United States Patent Application Publication US 2014/0057251 A1 - sequence listing, part 97

SEQ ID NO: 179344 - DNA, 520 bp, Cannabis indica
ttatatacactattccaaatgcttctactccaactatcacttattaaaaacctttaaattgtcaagtcatccaaagaaacagcttcttttctcatattttatttttcgtatttatagcaagctaatataaatatatttaatcctatatgtacgtagaagaatcttgctatacaacatcttatgtagtagtcacatgttgtattattttttttttttttgaaagggaggtacatgttctattcattgatttttatttatgatctcaattataattatttaatttcaatatattttatatatatgttcatataggttttatattatagctaaaacaaaagtatattttacgtacgtatactctccttggtgtaaataaagataataaatgtcattttgtttgtagctataacatgatgatagtgactctttggactttattatataagaatgaaacacacacacatgcattcatcttagacattatatatgctccttgtagttgtatatatcttactgacca

SEQ ID NO: 179345 - DNA, 683 bp, Cannabis indica
ttaatagatattctatatatcactctgaatactcctaaaggctccaaatcatttcttgcatatacctcttcaccaaaccaactggtacgtacatattatatatattataactacgtatgcatgcattgcatggcttatattattaattattacttgagttataaattaatatcattttcatctgcttattatctattttataattaatttattctttttggagctataatatatatatatattatattatcatttttggaaaatttaattgttcatgagtacatagtttttctttaaattgtttgttattctttttttttaatcttttttatattatatgatcgatccctatacctatacgtcttttttttttttttaactatatatatgatcaaacctagttataatattatatatatatactactcttactcttgttatttactagaattatgttctaaatatataagaattaataattactattatatatatattgctaaagaattttgctctagcaatataattactattatctcgatcaagttataattgttatttactattatctcgatcaagttataattgttgggatattccacatttgaatatagatatattttgtgatttgcaatctttcataaaatttagtgaaagcaaaaaattaaaaaaatctcatatct

SEQ ID NO: 179346 - DNA, 851 bp, Cannabis indica
tactaatacgaaaaataagtgtataatttaaacagtttatactatcaatcaataatcaaatattagaaataaaaatttagaaaaatcaatactataaaagttttaataaataacaaaaaaaaaataaaaaagttttaacatcataatatatatactaatcatcaatttattatattattgaattttactctaaaaaaaaatataatatacatattatatatattattttaatgaaaaaaaaataaaaattagtaactttataatatatagtggagtgcagtttgaatcataattgttaaatttaaaactgtaaaccgtatcgtaaggtgtggtttgaaaaaaatacacaccgcaatcattatagtgatttaatgaacacttttattatttatagatatattcactatttgatgccatgaccacacaaaattaaaattaaaaaagaaaggaagaaacaaaagagatacatatccttatccttgttaaaccatacatgcacaaattaaacacaattatatatatatatcaaaaaaaaatataaaaataaaactcaaatttccctttgttttattatatagttgaaaaaaaataaaataaatagaaattatttatttatttatttcttttctaacaaaataatattaataatcttttgatcacacgataatttttgtataattgaatactcctttttcttttcttttttttaataaaaagtctaacactatgtttggtaggacaagagtaagaagtgaagggatgaagaagagagaaagaggtgtgaaaagataacaaatctttttgttcgataagagattgaaagagagaaagaaggtgagatgatagtaaat

SEQ ID NO: 179347 - DNA, 614 bp, Cannabis indica
ataataatacacctgaataattgaaaatagaaaagagaagacagtcgagtagaagggcgccctaacaatagaggtaagagaattaccaggagccccccagctccggataataaacggggccgtagggtcgtcggaaaaaaattcaatggggcctctggcgaaaaagaacttttccttccatcctttatgagaggtctctaggtcagtgatgagagcccgattcttcctggggcaaagatgataacgcccggggttctttctccatcaaagaatagaaatggatggcgtcagatacctcccactgaacacccgccttatcccctaaaacaatcagacctaaaacggatagcccacacgctaggaagtaactgggcaggagcaattgagtattgtagaaggaattccttgattaatttagggatgggtagcctcagtctgattttcgattcgaaccaataagaatgtagacacacccactcatcctgagaggaatctaccctctcatgcggtttgggaagtctaatttcgacccccgacggaaaaccgcaggacgaaactagggaattgagcttatgctgagtcagaaccgccggacaacttgacttaacgtccaa

SEQ ID NO: 179348 - DNA, 524 bp, Cannabis indica
atgtatgcagaagataattacaagttttctaacccaaaacataaattaagttgacccatttataatattgttgagactccttttcttcaattaatattgatataatttctaggtcaaaataatatattgatataattttttcttcttagaattcacaagtaattaatatacagaaaattattattggatatatataatctgaatactaatgtctcattctcatatatacagttaaatgcaatcgccaataatgacagttaaatttagttagtatgaaaaatatgtacttaacaattaataaaatatatgaccctaaaaaaattctcatttcttaaaaataagagtgaaagtaacaatcacaatataagaactaagaaaaattcagatctaaaattaaacaactttattttatcatgtggtttaaaattaaattataacattacttttgaggtgatttgttaacaattaacaattattgcatgagtaaacttaattaacaattcatctatacataatatatatat

SEQ ID NO: 179349 - DNA, 962 bp, Cannabis indica
accggttgggtaagtaagcattagcttactaattttttttattctaatgtataaatatattttgtattgaactaaatcatcacttgtggttgaaatagaccaatttgtaggacagtctcggatgccacttatgttcttgatgtcattgctggtgttgataagaatgacaaagcaacatttgagaaatccaagtacattcccaaaggtggctatgcacaatttcttagttcaaatggactcaaaggaaagagactagggattgtaagacatccttactttgaattcaacatttctaaagagatcgacacatttctcattaatacatttgaggaacatctcagcacattaaggtattaatccaatatagcatctgttctagtatacttacttacatattaaatccatacatattgtcctcctattttatattttagttactagttagtgtatgaaattaatgtattgatattttattgaaaaaccaggaaaaaaggtgcaattgtaatagataatctgaaaataacaaatattgatgaaatctacaatgatgcatctagtgaagagactgcaatgaaaaatgatttcaagatagatttaaatgcatacctaaaagagctggtgtcatcaccagtgcaatccctagccgatgtcatagcctttaacaataaaaactctaagttggtaagtatatgtatatatatatatataataatagccacgcatataacaataaattaatatattacaaatgtatattatatacactactaatatatagtctattaaattttggatattgtaggaaaaattaaggaatatgggcaaaaattacttatagcagccgaagcaacaaaggaataagcaaggctgtattgggcactttagaaagacaacaagaaatggtttgtgtaagtaatgagaaagtacaagctagatgcattggtggcttgtgctggaccttc

SEQ ID NO: 179350 - DNA, 912 bp, Cannabis indica
tagaaaatttattattacacttattttcttaattcatcctaactctattagtgttcttttattttttttttttccattacactcaaataataataaataaaaaataaacaataacgctatatatggtacattctcaaaaagtaaaataaataattcttcatcttctcttttcatgagacacatcttaagttagtctcttagttgtttattagaaaattgcaaatttttcacattattctcaataatttactaaatcagaaataaagtttaaataaattgtttctatataaaatatattatacaaaataaattattctgcaagaacccaatatatactgcaatatttttcttaaaatatattttttacgtgctgaatattaatttgaagggtgcaccataatatgtctcaaaaacatatttaatcaatgatgtgttgtaaaataaaatacttttcttattgggtgactaaatatttgttataattattacatctatgtagtaacatcaatgtctaattctccactattctcactctctacctttacttattactcaatcaaaatatcatgcattctctccaatctaaacctacattcccttacatacaatttttttttttaaaaaaaacattattaaagatttgtgtacacaaatttagttgtcccaattcaaaaccatacaattatattatattttattataaatacacacattttttttccctatataatattaaaaccatcaaaacaactctctatctattctttcaacaatctctctctctaacattttctttgttgtgatgccttcaagagttttacaatggttaagccttgtaggaatcatatggttacaagccattaatggaaccaacaccaatttcccagcttactcttccaactcaaacatgcc

SEQ ID NO: 179351 - DNA, 668 bp, Cannabis indica
atacaggtattcgtttatgggacaatgtgaaattcatttgggatcttaaacacaagggtaaccgtgctgaggatatttttctttatgcttcgattgttgttggcagcatctcgcggactcgcaatgataaggtacataataatagtccagttgatgtgaagaagtgtattgactctatttgtacttctattgaagatttacatgcttctattttccctccacctgccccacgcttaatggaggcctggagtcctcctcctcaagactggattaagatgaattgtgatgtcaaagtgggtttagatagcatgtgtactacagttgtagctaaggctcatcttggcagggtgatttgagttcatacggctcggttggatttttcaaatgcgttatgtggagaagcgacgacctattatttggatgttacggtggcactagacatcggtgccaagtttgttattgtggagaacgactcgagggtagttatcaatgcaattcatgggaatgagttttattaggcacttgagaactatttctctttttgttataggttttctccttcgtttattagttgaattttttttaatatcagtaaaacctgtaattttgcggcccatagtgtggctaagtgagtgtttacctgaaatttggtgttatctcaatttcta

SEQ ID NO: 179352 - DNA, 602 bp, Cannabis indica
tattttaagaggcaagatcaaatagtgttaaaaatttagagagaaaagttgttaattatttaatatataatcacaaaacaatcctttcaatttctagttggtagtgggtccagtatggatataaatatttcaatatctcttataaaaatggttgtatataaataaacattaacaatgattaggtattattatcatataatatctcttaataaattgttcataaaattaaagagttaaaaatttaaaataatactcaagtagatgtattaaaaaggatgatatgtagagttatttttttttagtgtgtcattgttttattatatattcatatttaatattattttcttatttatttatcctttttttataattatttgtcaaaaattcatcactttatttttttttcttcgccttttctctctataattaaaagttgttccttaaagtaggacccaaaactttaattaaaactaagggttttgatatttctttttaaaataaaaattaaaattgagactcaaaagttcaataagaacaaagtcaaaaaacaatgcaaaaaaaaacttaatagcatatctctttctctcaaatcacatccatca

SEQ ID NO: 179353 - DNA, 806 bp, Cannabis indica
ctttccgttggaggcggcagaagcgatgcaggcccttctaccttccgccccaccgaaaaactggaaatacccccgtcacagatcgacgaggacctgttctggcaggaggtgatgaatagcgcggaagaaaaacgagaagccgcgcccacccctgccagaataaaccggaggggcaacagctcaccgaagcccacttgcgcgagttcgcgacatgttcaaggcgcaagagaagctcatagagcggatccgccatcttcggagaacggatggaatgcgtactcccggaccgaaaagcgcatggagcgcttggtcgacatgatcgcggacgagcctgggggaatgcaaaatcttccgcatatcctaacggatatgcagagcaacggccgggagagtcttttttataagaaatccctcacctacgctcaaataatagaaagaatcccacgaaaggaactggatagagactaagtaacgcctcattctacccctggagcgcggggagttgtattcgctatttcctgacgtactggagttataacatttgaatttctcttacattctacgttcctgaaatggatcctatcaaatatttcacattttctatgatcatctttattttaggtatttggggaatcctccttaatagacgaaatattcttattatgttaatgtcaattgaattaatgttattagctgtgaatttgaactttttggttattttccgtttctttggtatgatatgatgggtcgaattatttgctttattggttctaacggtggcagctgcggaatctgctattgggtta

SEQ ID NO: 179354 - DNA, 716 bp, Cannabis indica
gtcaaatcatcccgtttttaaagcgctatttttaaaaaataaagaggctaaaccccatgaaaatagtaagccatataaatatataaaaaacataatggcagtataatgaccgaataaataaaaaacagtaaaaatgtaaatgtcagcgtgtcacagtatttttgtaataaatggagaaaagttagtacatcatgtaaatttcccattagtattgggtttattcaatgaataacaattatttaacgaaaggttaaatccctcttctttgggccttgtgtgagagttagtggaccattagtagtgggtacgacaaactgaacccagccctccctcacatgaacaaccccaattatgaagacccatttgtcttatttaaataattgtattaggctaattatactagttttaacctaattaaaattgaattagcaacatagttaattttgcaataaatgaaattaatttttcaatagattattttaaaattaatttagaaaaacacatttagtttatagaaaagattctatattgtgatttctagtaactaatttatattttctgatatttaattaagtagaaaaatatatttaagctgaaaattaattaatttattaattaattttagagcaacttaaattaggatatttttcatataacttaattagaatttataattaagttgattttattcaagatacttaattatttatttctat

SEQ ID NO: 179355 - DNA, 519 bp, Cannabis indica
attatgagaggaaaaatttgattttctatgcattttttatacctaaatttgtttcccaaactaatagttatagctattgaaaaaatgggtatacttttccctaaaccctaaaatacccctcccatatttttcaacctctctctctctcttcctcctttctctctcaaatcaaacccaaaacccacgcacctccatgccgagccacctcctccaccgcacaaaacccacgccgatccacctcctccaccgcaccgctcgaccgccgcaaccaccgcaccgctggacgccatgaccaccacgaaaaccgaccaaaacgaaaacccacgcgcaggtccgattcaggcgtgaatggttggggaagacgaagacccgatgggtccgatggggggctgtgcttcgatgggggctgtgctgggtccgatgggggggggctgggtccgatgggggctggggtccgataggggggggctggggtccgataggggggggctggagtccggatggggggggctggggtcc

SEQ ID NO: 179356 - DNA, 803 bp, Cannabis indica
atacgaaatccacgctatacacagcatatgagataaagcattttacacagaaaaaaagaaaaccatttatatatacacggcatattacaaaatttccaaatctggtaccacttgttaggatttataaaacacccaagaaatatatatcacagatctaatcatattactgaaagtgctttaacatagaaaaccctaaatcataaatctatatagcctttgctaaattaaagaagaagatgatgataaaagctgagcggaagcactaacttgaagccattgttggagattgcagagtaggttttgatcttccaagaatacactattttttaaaagtattttctgtgatgaggaatgagagaatacaaaaactctagtgtttgtgtttcttggggaccactacctatttatagactatcttaaacaaattataaatcaacttatggtattgacacattattactatgacaacttcataccttatgatacccataacataattagtcacttaattttgtatcacactttataatagcgtatacattatacatatgtacccacaataagattttaatccaacgtagaaattttttttcggctgcatcattgcttaaattttttatttgcattttctcctaaagaaagaaaaaaaaaatgcattcattgaaaaaaaaaacaaaaaacaaaaaacaaaaataagtgacgcaataaaaattttatttgttttttctgctaaagaaaagaaaaaggaaattgctttgtattaaaaaaaacaaaaacaaaaaaagtaagatgcaatgaattac

SEQ ID NO: 179357 - DNA, 512 bp, Cannabis indica
gagcaagttagtcatggacaagttaaggtccatggccaagatgacattctaacgtaggctctcggaacaccagagcattctggacgtgtcaaggctgctgggtatgctagtacttaaaaaatgttatttcattagttagacaaaataaatattcgttaactttatttatgaatttgcaggttcattgcaaaggcgtctaaactttttgataggaagaaaaaggaagtttctgatgctgtggctcaaaatagataaccgacggcataacggactacgacatcagttattagcaaaaaatcaacaacatatagtcaattaattccacttggcctcccctgtgtcgccagttattttataataaccaatggcataggtaccccttatgccatcgattgatatagacccacctacaacatcgccttgaacagtgatagtctcatttttgctcaaaactgacgctaaatgccccaaaaaactgcctctaaagtcctttttttttttatttttttttt

SEQ ID NO: 179358 - DNA, 719 bp, Cannabis indica
gtaatatcgctactggtgcaactcaatatcgaatcctatttattttaccttaataaatattatagaaaatcgttaaacaattataggacgacacttcatcgtggtgctaggcaccgactttgagaggaaagatggcggtagaaaaaagatagtagatatgacatccggttcttaatcttacacattggttttaattatcattataacgtggggtgtgaatttaggtgtctagaaagagtgttgggtcttcttttgggactacttcggccattttggattgtgagatgtgtgtaccttgcaattgcctgactacgactagtgcattagccactttcagcatgattatcttcagtggcccttactataaatgacgaacttgcctcatatgatggtatctgtatgaatttattatgttttacactcactatgaggattataatatacttaattaatactctctattttataatttaaaagatttggtaccttatgtttcattgaagcaaaaaacaaaaaattagaattttgtactttcaataatgcttatttggtacttatattttgaaattatacacgtgtttagtacactaaactcaaatttaaccaaactacatatatgtaattaaataaacaattaaatttgaatttgaaactcataattgaaaacaattttattaatcaagtttgagttcagaataacaaatataccatttaaaaaa

SEQ ID NO: 179359 - DNA, 732 bp, Cannabis indica
ggctacattgaaaagctcgtgttagtttgtgaggttagttatcatttcatgaaataactaaaaatgacgtacccgtgtataagagttattagtctttggaggaaaacttaataaaaacttaaagcgggaacgttatagtgtgagtctacaactactactacaaacataggctttatgtgcatgtgcatgagcatgaaatagatgaagaagggttttatgtgttctgtgctctgttcaaagtcactcaacatagaatactaatttgtattatttacttaaagaattaattaatagtagtttattattagattagacccttaaatcacgtacatcaaacaataataataataataataataataaagtgatcctgtttctccaattaacttacttccattttctactcttcgtcttctccaataattctcacatcacttcaccatgttcaaatctaccaaatattaaaaacatgaaataaataataaatacatataaatatttatatataatgatgatgagtttgtgtatatatatatatcctgtttcattactcaaaatatagaaattcggctatttagtcattctttcacataatcatcaatatataaaggagagttttgaagagatgatgtggcattctcttcttctaatgttctatttttctaattttcttttttttgaatttaacatttataatcattatataatcaacatttatttttatattaattg

SEQ ID NO: 179360 - DNA, 949 bp, Cannabis indica
tattcttttgtatgtgaatatccacttttctagcacaatttgttaaaaaaatggtgttttccccattgaattatcttagtaccgttattgaaaatcatttcaccacatatgtgagggtatgtttctgggctctctcttttatttcattggtggatatgtgtgactttatgctagtaccacagtgttttgattactataactgtatagtaagttttgaaatcaggaagtgtgaatccttttatattagtctgttttgcatttctataaagaaatacctgaggttgagataccttctcacaccagttagaatggcaatcacgaaaaagtcagggaacaacaggtgctggagaggatgtggagaaataggaacactttgacaccattggtgggactataaactagttcaaccattgtggaagacagtgtggcgattcctcaaggatctagaactagaaataccatttgacccagccatcccattactgggtatatacccaaaggactataaatcatgctgctataaagacacatgcacacgtatgtttattgcggcattattcccaatagcaaagacttggaaccaaccaaaatgtccatcaatgatagactggattaagaaaatgtggcacatatacaccatggaatactatgcagccataaaaaaggatgagttcatgtcctttgtagggacatggatgaaattggaaaccatcattctcagcaaagtatcgcaaggcaaaaaaccaaacaccgcatgttctcactcataggtgggaattgaacaatgagaacacatggacacatgaatgagaacatcacactctggggactgttgtggggtggggtgggggagggagtagcattaggagatatacctaatgctaaatgacgaataatgggtgcagcacaccagcatggcacatgtatacatatgtaactaacctgcaca

SEQ ID NO: 179361 - DNA, 700 bp, Cannabis indica
agggtttggaggagaggcagcaagcgctgcgggcggagcaggaagacctaattgtgcgtgctgtcacccgcggtcaccggggagactagaatagaagagtccgtcgactcttttgagttttagaaggtttattaattaaataagtgtctggagacatttgttttcatgtctggtgttctttgttctttttttagtgtagatctactccggtgcctactggagatagactcctatctatgctaactatctttgttttgttttatttgttatgtttgcatgtatagtatgggaaaacccctagtgtaaaatgtttactacttaatgctatgctaatagaataaataattaataaagactttttcccagaattactacaagcacttgtagagaaaggtgggttaactaaagaaagatggaaccagatgcattcttaaaagaaagcgctttgccttacctatgatgcaaagtaagattggaggggccggctttcgaaagatgggtttcagagaatggaaccgagattatgggagtaagtggagttgggcgggctactctccagggccgtcatcgatagatagatagaaaacccggcaaaggactgaactttttttagttacctaggttacgatagccaacggcgaacgaaagaccacggaaagacgcttgtatcaaagttagctgattcatgtgcagcttcagt

SEQ ID NO: 179362 - DNA, 763 bp, Cannabis indica
ttgttcagcctgttgactggcctgtgtcacattgggatttctttaaactggatcctagatgtgaatgcctggctggacagctagtgggacgtattgttcgtccaggcccttcttcagtttaagtcagtcttgaggtcatgtacggtgcccagcctatcaaacactgaagtaccaggtggtattggcgtcttacatgtttggtgaataggttggccagagatttcagtggggtgaagttattgtgtgtaactccacccaagggacggtcaggcaagatctggccgtctaccatttggcccacaggttggacttttggtcgtggattagatggctaatcgttgtgagtttgcacagtatgcctagctacatacccttcttaattgcccaaaaggataatagatgcggtagccggttattgattgacgactttgtaggcctttcttattagtacagcggtctgccttgtgcgattatcaatggctgcttgctgagcctttaaagtttccatctccctgaccctctattctataaactgacgtctttgctcgtcgaatgcacggtttatagcgacacggagatcctcctgatcatggtggaaagcgttattatgacctttcatgagtccaagggttgctcggaggttttggatttcagtatcatctccaactggcctctgaacattagtggtagacgggacctcagtgttggagtggactgatcagctgcttaactggtattcacaatctcttgcacgcctggtgtg

SEQ ID NO: 179363 - DNA, 631 bp, Cannabis indica
tgataaaagtcctgatattgatggtatgtcagtgatattttatcaacataattggaatattgttggaaatttagttacaaaaggtgtcctccatgtgcttaatgatggtggtaatcctgttgttattaacaagactttgatcacattgattctcaaagtcaaaaagcctcaaattatgaaagattttcgtcctataagcctttgtaatgtcgtctacaagactttgatcacattggttcatttaattatactaataacgatataacacatatttaaagggtcactctctttattgtatggttttcattgttcaagtagatattaaatttcattcaatataagaaaagctgggtttgacttgatcctgactgtttattattatgagtatatgtatagttgtttttttacgtagtatatatttgagcagtgtaatttatttataataaataatttatttataattttattaggtggtgtggtgtggtgttactagtctctattaatacttggtttgttgtagtattcttcactgtaaaaggtcaaacacaacactttattccttcttccacgagtgtttgtattgtagtggattatatcagtaaatagttctgctgattattaatttgaatta

SEQ ID NO: 179364 - DNA, 1005 bp, Cannabis indica
atggcaaaattgttgcaacctttgagttggtggcatttggaaccaatttgctttttaccttcaaaagaggagatcaattgcaggtgaaacctcatgatgtataattttttcattttcagctctatgtttttttatttcaatttaagacaattaatattattagttttccttttactgttgcaatagctgagaacaaagacaatttatcagacaagcaattgtaaaatgtctatttttctttttgatcacctcagccaataaaatatcttaaaagcttagaagttgatgaagcattaatgtagaggaaaattactcttctaataatcaagaaaaactcatatatcatatatgacactaaatgccataaactgattttggttggcagaatattttattcctcctaagcagaacaaaatagcattctatattgacttcttattcttatgattacacatttattcttatggatgtgcatatgaagaccgctgaattaagcttcagtagtttgactagccttgcatgaaccccaaatggaaaaatatgaaaatactttgtttccaatgccaattttcttgcatggaatctgcaaagtgaaacccaaccacaaagatctcttctctgattttcaaagaagaaaaagaaatttgttgcaggaggcttgtacttttcagttgttgatcatcaagagtagaagtcaataatgaaggttctgatttccattggagaaagctccacaactagatttttttgatcaattggtcttccccttaacacctttggctctttagaagaccctttaactttccatactagtctcttttctccatttctgatctttttggttagcagataaactggtctcttctatggtatttatctgaattttaaggaaaacaaggatattagtagaaatgatttaagtgagatgaatatctggatggataacaagttgtctcaattattgttttgacttaccttcttattgttgaacacctttttcaattc

SEQ ID NO: 179365 - DNA, 578 bp, Cannabis indica
attacatacttgtcatctaaatttgatggatgtcaaatattattgatgatagtgtttattggatcacatttaatatttataagcttagtaaattttactattggatccacgatttaattaattttagttatctgatcgatccaacattcattggatatggaattagataggttttatctattgaatgtatttcatgtatatatattacattgattcagatttatccaatagtttagacctagtattttgaggaaatttgtattgtattctttgtttactttatctgatttaatttttactttcatttcctatattttttaagtatatactaatttttattagataatgtcttcattatacttttaggtttaatgtaaattatgtactacacgagcgagggtatattaatcaactcactcacaaaagtgggtagattttaataaaatataatatgagagtattttaatttaatagatacaaaaagaagctatttctcaacttatccctaactatttttgtaatcggatcgaatctatattctaattttttagttattctagtatttatttagtattggt

SEQ ID NO: 179366 - DNA, 1097 bp, Cannabis indica
gctgatttatcctccattcgatgacttgcatcaacattaatggcgatcacccccacaactggcggtgtccacctacctcgatttcccttgtctttttcccgcactatcccattagcttgctgaaattcacttagaaatttcgcacaccaatccaagagatcccttgcccgtggggcataccccccatgaaccacagtatttcgaacattccacagatgctacctaatagctagaaaaagatcaaaagagtctgtagaccataccttagcaagccactgaaagatcaagatggtgtttgaagttcgaagttcccgattttgatcccaccatccacatctcttccaaacttctacactcaatggacaggcccataacatgtgaccaacatcctccacacacccgtccgtgcatctagagcatttaggatccacattcatacctcttttagctaacgctgtattggtgggaagccatgagtgacatcatttccaaataaaatgcttgacttttgaggtccttagctttccacaatgtcttccccatgcttctagctgtgtcgaatctaattgggccactgtttctctcatttccactgatgtacgatacccgcttcgcaccgtatactcaccattattagtgtaactgccataatattttattttccagactccaatctccactaggaatgccaagaatcaaatcagtgtctttcatattaaaatttgcccgtataaactcttcgtcccaccttccatccgtaattttaaatcaataacatgtaattactccaggaatgcaggcttatcatggacccaaaatgtcactggtcgtggcaaccatggatcctcaaggatcctaacttcattaccactaccgattctccatcgataacctctctaagataatctttttgccccaaaccaaagctccgccacataaaagaagcgttgctgccacatttagcagccaaaacacttttatcgggaaagttgacatgctttttaaaacctactatatagggcattaggaaagccggatacacttcctatatctgttttgcaagagagcttgattgaacatactcaaatctctaaaat

SEQ ID NO: 179367 - DNA, 591 bp, Cannabis indica
tgtatatttgatttctttaataataatatatgctaatttaataagcacgcgtgtatattattttatttagctaatcgttttggacggaaaggcatatacataaggtggactttaaatgtaatgaaatggaagaaaagaaacctaattttttttttgattaattgctattttaacatattacaatctaataacttttgaatagagttaacttttttattatttttgtggaaattaacttttttattttgaaaagactaatgcaagaataaaaaaatttaataatttttttattaatttcttaataggtattttaaattttactctattttattcttatttatatttatatttttatttcaattctcacattctcattccattcaatttctatttttatgttttattaatgtataatataacgtgattgattattgatatgtatgtatataaggagattattaccatacgtcaatctcttattacaatttctagttaattcggaacccataaatacatgttggattttttttttaattttttataattatgttcgttataactacaacattatatctgtaaattttttaaaaa

SEQ ID NO: 179368 - DNA, 1065 bp, Cannabis indica
gtatttttccaacatgtgtgaaattgttgtcaatttgaggaacagataaaactttttaattaaattatttaattaatcatgagactggtggttgcttggttcttaggcaaaacgacatacatcatgatcttatttattttattttatttaaaaaaaataaaaataaaaatgggagacgtgttaaaagagccaaacattatcacacattttcctttggcccacgtattgggcccacatatagggcccatataacttgaggctgcgttagattgttggcccacattgatggaatggacctttttggagttccaatacaagcctttgaatgatttagtgatgttgatagttatacccactaaccctaacctctctctttttgtttcaaaattattatgctatcacctaataatgatgtagatggattatgaaaaatgcagtttttttttttaaaaaaaaataggtgaagtagttttaaaataccattcttattgattagctaatagatatattgttttttaaaaaataatctattttttcttacatctctaactcctcattactttatatttgacatgaattaagataatgggaaagggtataaaaaaaataattcattatagttgtaattttcaaaaaaaatacaaaatttttttttacttataattataataaatatcatcatgtaaaaaaaaaaattagactttttatgcattttataagggataattggttttagagaaccaataattagggtaattttaaaaataaggatactttttaccaaaactcctaaaataccctcataatttctaaccctttctctctccttctcaaacaaactctctctacccacttcgcctgaaccgaaccacgcgacccccacctcccaccacgagacgacccctacctccgaccgagacgaccgccacctccgacggagacccacaaaaccactccgatcgagatcgcacggtaccgactctacattggtcggatccaagaacaacatacacgagacaagaccatcagacccccaatcccatcggacccaagaaaaacatacac

SEQ ID NO: 179369 - DNA, 613 bp, Cannabis indica
ccatcgccgtctctctagatctgcccctttctctcttcgtcttctcttcgccggagctccgcttttagctagattttccgtcatttttagcccctccgccgacgttacagaggtaattattatatatgtatatgtatgtatgtatatttttgtgaatttttgttaaagagagaataagaggtacagagcgatttattcctagctatggttgattggctgtatgtaaaaaatgtatttttttagtcactttatatgttttatgctttttgaacgaaatggtttagattagttgctatatgggctgtctgtgttagatattttgacataacttcattttgctaagtttttttttttggtaaatttttaggctaagacaaagagtttgagaagagcaaaaatggcatcgaacgcagcagtgcctttctggagatcggcgggtatgacttacataacatactccaacatatgcgctaatctcgtcaggaattgcctcaaagagcctttcaaggccgaaacccttcaacgcgagaaggttcattttgccgtctccaaatggtccaacggcattccggaaaagcccagttagtcccaccactctccctctctctctctc

SEQ ID NO: 179370 - DNA, 764 bp, Cannabis indica
agtaaatacatgatgattaattaataccctcaaaatggtcatcactaagatatttgggaatttaaatagatgtatcttgagttcatgatcttattaatgtgttacaagaaaaactcagttatgaaaacttaattttggcaggtggaacaaacgacggaacgcatgaggctgtgggctggtcaagacgttattgagaagccagctgatcaacatatatgatctcattttcattttcttttttcttttatatataagaaattagtgaaggattttccattgttatggttcaaaacagtagtagatttttgggtgacactaaccagcaatgcttctcattttactcatgttaagcggatctgttttgtagttctctttcaatctctaaatatatataagaaagtgctactgttaattttttataacaatctcttagttaacttttgtgtccaagaacatacgctgaaatatttgtttttttatttttttatgacagtgtttgttatatttataaaataaaatgaatctgaatttttttttgaatgatgaaacttttttttaaatatgctgaatattaataatgtaaattatttaaaattttaaaaaatttaactaagaatgataatgtaaataaaaaaataaacgatatagaaagaagtttgtaaaaaataaattctaaacaatgtgatttgtaatgtaaaaattagattgaaagaattataataagatctgtaattaaaaataacaatcaagtaaactattacagt

SEQ ID NO: 179371 - DNA, 618 bp, Cannabis indica
cctcttgagattgagcctaatcataacaggattaagatcatttgatctaggatcaactaggcgatattgacttgaatagatattacggtaagtttaataaatctaagtcaaagttcaatatcggtcccttccgatgcatactccatgcatccaacctgagctttactttaaccaatgctctggaaagaacatagcatttctccaaatgcaagtaaactctgttgtagattatcatatcagtaaaaccctgtgtctgataaatctaggaaactttattcacatagtcatgtttactttccaaagtgttgacaacacaataaacaggatcaagtatgtgaaaagggtttcagatgaatttataaatcaaatagacaagcaattgataagatgaaccaaaacatacacaaatgaatgaaaaatacttctgtttctttattgatgttgaataaaatggattacattgaaatggagttttatttagggcataaacccacaatttctccaactgggtggttgatagagtgttggctatctgttgagtcaactcttcgacttttttctttttgctcggtcaatctcggttggcttgctctatggccttctccttctaagccattg

SEQ ID NO: 179372 - DNA, 529 bp, Cannabis indica
gtccttacatatgataaatacaaaaatatataaaaatatgtagtcttattttgcttttgaaacacatgtcaatttttattttttacatatgataaatgccttttatctgcatgaattttctgctgattttcagttttggtgataatatttcattacaacaaattagaccattttaatattagattaaattaaaaaaaaaaaaaatcaaacccacttacaatctttgctatgttataacttttatttgttggcaatttattttgaattaaaaaaaatactacaaatcttattcttgaattttgcggagaaatataaagttctatctcaaagttaattagtaaaaagttgaataattcatatttttatatatggctcaataaatttacatcaagtaaatagtagtataagtacctaaagtttcaagtttgtaagtgacataaatcgaatatttatgtttagcggcataggaatttaatgtttgtaaaactgtattttttctctagtttcgtcagtataaactcagcctcat

SEQ ID NO: 179373 - DNA, 1110 bp, Cannabis indica
ctcatattaacttctatcatgaaagatatggcatattacacaaattttgtgaataccttgttgttgtaaaattcagccatctgccaactctcttcgacatgcgctataggcatgctcattcctatagaagtagaattaattagaataatctttacaaaagaaattaaaattaaataaatatgacaggatcagcttaactacttttccattcttttaagatgcattagctctttataaacattttgcatattacttaccacattcttttcccgtgtatgcaatccaagctaaagcagagagactatcaacagcagccttcaagtggttaaaaaaatcagaccgcctcccttctgccaatttgtttgctttcgagattacttcgttcaatggtttgagaaattcagccaatcctgcaaggtctggtttctgcaaaaagcaaacaaaacacatttgagacaacaatccattttcagaaaagagcaaccaaaaacagttgcatccatgtagaaaatgacaatgacactcttcttttatttgaatttgcatcttcaatttcactaagccattactgacaaaaaaatttctttacgtataagtagtattaaccaaatagatcattccaaaaaaaaaaaaaaaaagaatcattcagaaacatacaaacatagttaaattgaggataatgattaccttaaagaacccataatcaagtaacagcaaaacatagaaaatgaaaaacccaccgtgttgaaactagagcagagctcaaatataaagtttattcctaaaactagagcagaacaacaaatgtagaggtttacaaattcttctttaacagcaaggcttaacaaaacattgggccgataattgtttgatcaataaattgattaacatacataaaatgtagcaaatccacctcaatctccaaccaacttagaagaaaatagacccatatattatcaaatgttttcagatccaagcacaaacatcgatacaattccgtccaccaatatagtagagtacaaataaaacgttacctattttgaaatggtcattctcagaagcggtcatcaatctatccaacagatattgtttacagctcaatgtcaaaag

SEQ ID NO: 179374 - DNA, 616 bp, Cannabis indica
atgctatcaggattaaggaacctaaaagaactgtccggtcgtccgccccagtggaaggaaaagggaaagctgtcctgaccgagcaggaagaagactcttcagatgatgaggctccgtccgttcttgttagggagaatgctcttgcccaagtgcatggtatttttgacttgtatttatttctttcatgacatgctttatattacacaaataaaatttcactaaatcaatccccggcaacggcgccaaaaacttgttgtgaaaaattgtatacgcaagtgtacgcaatcgtaacaagtaataaagtgataaatcgagtatcgtctccacagggattgaaaattagaaattaatttataaaactaattactcacaaattggtttcaacaaaataaaataaagtgatgagaatatgtaaaaaaaaataacaaacacaaactatgaagaaaacaagctagaattattaaattggcctaaaaatgcaaagttgatataatggtgcaaatgagtattgttgtaaattgataatgtcaactaggaatttaaaatgtcataatcctttttttcaaagtatttatggtttgattctctaattaattaacatattcctatgcctaat

SEQ ID NO: 179375 - DNA, 666 bp, Cannabis indica
attagtactacaatataacaaaatgtgattttttttttaaaaaaaaaaacaaaagaacaaaatgtaacattttggtactaccaaaaaatattactatcttttttatgaaaccaaaaaatattagtattttcttttttttttttctagccaaaaaatattaatatttaacagtaagcaaatacaaagtttaaatattttaaccataaatctcattaacttttaaaacactttttcaaagaacatgtcaaagtgacgatgtttccttcactaaattttcctcatttattattttttttttttgaaaggtatttcctcattttaatttaatgttttcttttcttttttttttttttttttttttttttttttagttttaaattctttcttctttatttttaattctactttcattacgaacgaatcaatgtctttacccgttatatttacttaaccagagctaaaagtttgtcatcacattttatgccgtgttttgttcaaagctagaattcttgaagcgaaacatttacatcgtaaaaaattaacaataaaaaaataccatattttgattgaaagtagtcacaatttttttttaagctacagtagtgggtgaagaagtcttaaagttaagtagtgattaaataactaaaatgaccagttcaatgttgt

SEQ ID NO: 179376 - DNA, 529 bp, Cannabis indica
cctgagttagaggttgatagtctttgtagtgaaaaattaatggaaaaacttacaaaaatactagaatttgggttaactattacaaaaatactgtcacacggaaatcttttcaaaaatactgtgtttttataaaacaccagtaaaacacaaagcagaacaattcaaaacaacagtaggacacctaaaaaataccagtaaaatactagtgaaaacttaacacagtatactgcagtatgaaacttataaaaaaaatacagtaaaaaagtaaaaaatatcgcttggcagtatttttgtaaaaaaatagcaaaagttagtataccatataaatttcccaaaattattgtaagagatttaggaagaaccttagtaaaaattctctaattgaaaaattacttaaacctattaatttgactcgataattaaaattaaacataagttcattagttcttagaaaaaaaaaaaaaaaaaaacttaaggtaagcctaattctatctattataattcaccttatattttggaaaacataatt

SEQ ID NO: 179377 - DNA, 559 bp, Cannabis indica
gtgaaggatcaaacttgaagaagaaggacattcggactcagatcttgattatactctgctacagaaaggatacaagggttagagatctgagtggaaggagacattaattccgctgtatcaatgtaaggttttcttaactttatatgtgtttaatttatcgttttagaaagttcatatttagggtgtttaaacaacatacttgtgagtagatctaagatcctggtaaaataaatttccaacaatttggacttaaaacgattgtttgatgttttggatggtatcgtgttgttttgagtgttgtttgatgatttattgatgtttgtgaattttcgtgaaaaataattgaatatctgtttctggaattatttttattagatagtatggaaaaaattaagcaatttaattttttacagaactcaatttcgatttaatttgaattagttatgattttttgaagtttcgaaaaatatcagggtgacatcactaagacacgcgcacgcggatggcctaaatcctcggccagacgcgtgttaggacaagtttttgtccgagaacacgc

SEQ ID NO: 179378 - DNA, 592 bp, Cannabis indica
gagcaggaatgagcacagatggtgatgggtgactggaaaacatagtcatagttcagtgcacaagaacaaatcccaaatataactgattactaaactcccaagaaaaaacctccaaatcaaaaccccaaatatactggatactaagagcagtcgcaattacaaaaagtattaaaaaacaaaaaacagatatcaagactcacagcaaaagttcaacgagtcgggggcacaccccggcttcaataactgcttgaattttatcatttgttccatctgagaggtaagaaagtgcccaacaagcatctgtcaaaacttcctcatcatttgaatggataagacgagcaagagctggaagcgcaggcttaacctgtgagaatggccaaaagagataccgttagaatttataatttaaattaaccaaaaaggaaggctaataaacttgtagtattagtacatcgagcatacaaatatccaacctgatcaaaaggaggttgtggcttgcccctacagaagtttgaaagggtccacgttgcatttctaagcatagagagcttagcatgctcatttaactgtgccagcaatggcagcaaggccc

SEQ ID NO: 179379 - DNA, 566 bp, Cannabis indica
gatgatgatgatgatgatggtaggcttacgaggctgatgtttgttttctcaagtttgtatttttttttaagatttttcttacttttaattttctagccatgcatgtagccaagggatgaattagcatatactggcataataaaatcgaacatcaatttaaatatgatagcacaattataaattttctttttaattttgttgtgtttgcttctttcatcaattcatcaattaattttttcactaaacaacatgttgaaaacacctcagactaaaagtgagtctaagcaacaaatgctatatagattcaatattatatgttgtcagcatattaaaaaaatgaagatcagtaggtcatatatatattgtaggaaattcaaaaaccgaaaaaccctacaccacctaaagccaatcaaaagaaacaatggtcaattaagaaatgcattttagtacaaactcttgtggcataaagttgcactcccaaaacgaccttatgccttcgattcaaccctaaccctagcagacgaggcttcgtcttcttcctctcaagctcgatcttgagcttcaaa

SEQ ID NO: 179380 - DNA, 782 bp, Cannabis indica
acatgatatatactaggatttttgtatgtcctcgcggcacaattacttgttggtttttgttttaatatataaaaactaatgaacaatacgtaaaaaataagtaaacaacctgcattttgttgacgaatgtttaaaaaatttaaacgatattaattttcttataattttctttgaataatatcagaaattaagtgtacaaaatctcttaaaataacatgtattgacaaaatatcttttttctataaaaacaagcctgagatggttcttataacactctttcgtatatcccggtcatttaaaattattctcatcattctatatcacgtattgttattactgtatctcattagctcgtatgagtgttcataaaatagtcgatccaatccaattcgtaaagtgcggatattcgcacctacgcggattggattggattggaaaattcaaaattcgcacttgtgcggatttgatgttgattgaaatgtaaaagtaatcgatccaataagaataggtcaaataaataatttgtaacatgtaaattttacaatcttctttcatttgtttataaacctagtaacatgataggatccatccaaattagtgtgtacctgtgtgagcctatatatttgtctttgggctttagatgcatatagggagcccatttaatttttgtaatttaaatgtactaggttactaaaaataaaatgaatcattattgataaattttaatttaggttccaattagtattgggcttattcaatgaattagagttgtttaattaagg

SEQ ID NO: 179381 - DNA, 537 bp, Cannabis indica
gtagctaaaattcagaggataaaattctaccaagatcatagtttaaggggttaaatcatatttattcttttattttttgtctgaacttctaaattgaaataaatttatattatattagtgctagataaataaattatttgaaaaaatgagtggaatgtaattaaaaaggatatttacaataatttttacaatttatatagtttaatgagaatttttgcagctgaaaaaaaatttaagaattaatactctacaaagagtcttagtttcaagaaagacaaatcttattatattaaaataggtggtacaagtgtacgcagggccggccagagggtggggcggccggggcgatacgccccaggcccccgactacttttggtaggcccccggaaaaacttaaattgatatatatacacacaaaagagtatatatatcttttagttcaacaaaaatatatagaaaaagatagaacaaaagggaagcaagcaagcaagcataattgtacagattggtgaggtcctgggttcgattcattgctga

SEQ ID NO: 179382 - DNA, 561 bp, Cannabis indica
aatgtattattaagtatttaacatttttaatgcttgtttatgaaaaaaataattaattaaaaaatatagaaaaattaataattcagtatcacatatttttatttatttgacatactctcataggaaaaaaagacaaaaaaaagaatgcactataggaactgtaatagatttttatatagtgaacgaatcaatatgttgatcaattcagacttggtactcttgataataggaactaaggctttagtaaggaaaataaatagaaaaacttacattaatcttaacaaattaatatgatcatcaatcaaatataaatatatctttgtatctatctaataatatcaataatatatatgtatacatcgtgataaaaataaaataatatgaacaatacttaaatatataaattgaaaaaagcaaaaaatctaattataaataagcatatatattagttaacgctttacaatataactctacaataaaaattgatattcctcttttataatttgtatatgataattaaatttaagttctatcgaaaattgaaatttaacttacatgata

SEQ ID NO: 179383 - DNA, 762 bp, Cannabis indica
aataaactatttttctttatcttatttcaggtttctattatgcaaattgcttcttatttcaggtcttgcaaaagaaaattaaaacccaactattaagagtatccttatttttcttttttacaacttttacatgtgttatcttcacctatcaacaatttaatttacaaattaaattttagtattttttttattcaactcaaatttaaattctgtatgctttattttttgaacattgatttttggtttagttttggattaacttaagatcaaattgcaattagattatcaaaatttcttaaactttcatatattgtatttagtatttacttttaattattaacaacattatttacattaattgaatatacatattaatgatctcaattacaataattaataatatttttttaattatttattgtattatttttaaataaaacaagacacacctaacataaaacttatatacaaggcacgtagcattctactagtatatatatatatatatatatatatatctaatttgtaagtttagtaaaaaaaaataaactaactgcctactttttactatttatttgtggtacattcaaaaaactaagttttgttttgtctaagaagttaagacaataataatttcctaattttatttattattgagtatctatttattatttttatacttatggtattgtttgggttacgtaaaagttattagttatttaatttttcttgtatctcttgtatcttcttttttcttttttt

SEQ ID NO: 179384 - DNA, 646 bp, Cannabis indica
gattttcaacctaggcactaggccaagccctaggccaacttgggcactaggcctatttgtagggactcgagattgtggtttctccttgagtttacttgatattcgttattttttatgatggaaaatatgccaaaaacgctttttgctaaacttgattgaaaacagctcatgtcgacaatatgtcaatctgggcgctaggcccagccccaagtgtcaatctaggcgctgggtcccagctttgccctttgaaaattccatttggtccccgaaaatagttgaatctcaatattttttgaagattgagaatatgctaaaagaattcttgaaaactccattttaaacggcccaggttgacaaaatgtcaaccttggctcagtgctagccccagctgtcaacttggccgttgggccttattatttgtgcctaagaattgttgtcattcatccagaaggacatgtttccccagttttgatgaaaaataattatatgcaaaagttggatctccaatcaaacacttggaaggcacccaaattgatagattgtgaacctgggtactctcaaaaattaacttgctgtgattctgattctactgcctcaaatatgttcgttgtttgtctagttgatatcccaatgcaagttttgacca

SEQ ID NO: 179385 - DNA, 718 bp, Cannabis indica
acgattttgtctggtgatgtactttacacggaatgtatttcgtgatgtacgacagctgttagatggggaagttatttgatctgagggctggggttgatctaggggtaattaggattaaaaaatggtaacatatcctgagacccatctaatcataatgtaccacggaatacattccgtaaaagtacaacacggacaaaatcgtgtccctatatatatatatatattattttttaatataactaacttctctatacataattaatccttaaattaatttatagcatgaacaagtttggtcatagatctagttattattatgtattttaatatatgtaaaaataagcttagagtataatcaggtccaataagtatattaagtttatgcttagagctcacttaacttaaagattcattaatttttttaaaaaaaaatgttaaattttttttactaattttaaaaatactatattttttttaaacaagatcttatttaaaaaatactatatttagggttggctttgagatatatcattttaaaaaatataaaatttaaattatcatttaacaaaatcaatgatctatatcgagatctacactacaacattcaggagcaatagcggcgggcccctggcccgctattgctcctgtttttggccgctaaagggcaatagcggcggacctcggccgctattggtccgccgctattgcttggccgcta

SEQ ID NO: 179386 - DNA, 585 bp, Cannabis indica
atttttaattaattttttttcttcaaatctgtcaaattatttaatacgttctaaaaatccataaataaacttacaaagatctcatcgaactaaacaattaaaagcggatgaagttaaaaaagcatatcctgcttaatatgtttttagtttcttgaaaaattctgaattttggtaggtgtatacatttttttgtttttgttttttttttttttttttttttatttagattacataataaatctatttatattaaaaaaataatgaagtcaagtatgtaagaaagatttctagaaggttttgttatttttgtatgaacggtcattttatactatgttttggtaggagggatggagaagataggtgggaggagataataaattttgttaaatttctttgtttgggaagaactatttatttatttatttatttttttgtaacatgtttggtaagagctattgaaggagagaaatgagatgtaagagaaatgggaatctactcaaatttccaatttggaatccctccaaaaatagaagaattaaaatttcccctcttcaattatagtaaattataaaaataactctcaac

SEQ ID NO: 179387 - DNA, 691 bp, Cannabis indica
ttatgatttaatggctaggcgagttggtgggcgtgagaaccttggatatactattgttgattgtcgaaattatttgcaaagcaaacgaacaattcaaatgagattgggagataccggtggtattctagaatatcttcaaaggatgcaattagaagaccctgcttttgttagtgccatacaagctgatgaagatgacatgataactaatatcttttgggcagatggaagaatgatggcggattatttctattttggtgatgttgtttcctttgacacaacttaaaagaaaaataaagagtgtcgaccgtttgcaatgtttgttggtgtgaatcatcacaagcaatctattacctttggagctgcattattgttatatgatgaaactgctgaaacatttgcttggttgtttgacacttttgctaaaacaatgtcggggaaaaagccaaagactattcttactgaccaagatgtggcaatggaaaatgctctagagtctcaatggccagaaacaactcatcgtttatgcatttggcatatatatgagaatgctgcaaaaaatcttagtggggtttttgaaaaatttcgacagtttacaaaagatttcagtagttgtatttatgattatgatgagaaggatgaattcattgaagcttggaatagtatgcttgagaaatatgatcttagagacaat

SEQ ID NO: 179388 - DNA, 598 bp, Cannabis indica
tgttcaactattacttataatcaaatatgactttacagacttttgagaatataaattctaagtactacacaaaaaatttaaattcgaagcctccaacaataagaaaaagtaatgaggcattgcttgctggcctacggttagtaaaagaacttaaaatcactcagactacacattttcaatgactctcacctagtagtctttcaagtgaaaggggagtactaagcaaagagactaaagatatggcggccgcttacttggcacaaataaatggctacttggagcagttacaatgctatacggtggaacaaaatccccaaggagaggaacaccaatgtggacatgcttgccaaggtggccttaacaagagatgttgatatcctagagtcgatacccgtacaataccattaacagaagaacaagtatatttggtggaaatagactcagggacgacccattttctcaagtacttccaggaaggaaagtgtacaaggtaacacactatgtctttgtagagaaatcttatacgcaccttaattatgccacagccacaggaactgtcattacgccacattaacacctattgcgctacttatattaa

SEQ ID NO: 179389 - DNA, 726 bp, Cannabis indica
ttcaatgttgtgattacagtcatgtattttagtattgaattattatagtttcgtttgttaataatcttcgaattttgggtcggtgttttgaatttagaaattgaagatgaaagaattaaagaccgaattaattaatattgtaagaaattgaagctttttttcaagtgaattaatgcatttagagagtagttatatattatgagttgaatcatgaatgaatgtattaaatgtgactgaagattacatgattaatgtgttaattatagttgaagaaaattacaatgtgtttatgagaaaattataataattaattatgttattagttcatgttgtattgattgaagttgttgttggttgttgttgtgaaggttgtaatagaaattaattgaaacacttagaatatgatgatgttgttggagttgtagttctcattcgttgtcattcagaagttgaagaagattttggatatgattgtcaatatcattatgattctgttgctgttgtggagcaagattatacggtggatcatcgaagtagtgttgcggtggatagtctgcttggttcagctgattaaagaaaagtgtatcatcatcatcttcatcttcttcttctaaatgttgatctagagtaatgttgaaatatgattcccattcttctactgatagattaggattaggaggaggattggattcatgttgatctatttgattatcatcattaatattt

SEQ ID NO: 179390 - DNA, 546 bp, Cannabis indica
tacacaaggatgtcattgataaatacaataacgcagatatcgaggaaatccttgaataccctattcatcaaatccataaacgctgcaggagcattggttagtccaaacgacataaccaagaattcgtaatgtccatacctagaacggaaatccgtcttcggaatgtcctcctctcagattttcaactgatgataacccgatcagagatcaatcttggaaaagaccgtcttcccctgaagttgatcgaacagatcatcgatcctaggcaacggatatatattcttcactgttagcttgtttaactcccgataatcgatgcacatcctcatagttccatctttcttcttgacgaacaaaaccggagctccctagggtgacacactaggccgaataaaccctatgtcaagcaacccctgaagactgaatactttaatttaccttaacgtttacagctggagccattctatacggagccttggtaaaccgaacgttcctacctcctcggtggccaaactactatcacgaaatacaatctccagctgaggt

SEQ ID NO: 179391 - DNA, 885 bp, Cannabis indica
gatctttgacgccagaaaatttctttttgattgaggacttcgaagagattattctcagcatctttaaaccgtctcaaagacatatcatcacgcccagctttaaactttcttgcttcactcttccaatgtttcaaccgagagtgaaatttccccaaataatcactattccacgctgtaagcttggtaccacatagctgaatcttctcctgaatcccactcaaagcagactccacccaacaatcattgataacttggaaacacatgggctctcggagccaaaagttctcaaatcgaaactgcttatgacgagagatatgagactgactaaccatattaagtaacaaaggactatggtcagaggaactcaattccaggttcaacaactgagctgaagagaaatagaccaaccattgcttagaaacaagagcccgatcaaggcgagattcaatccaagcatccgaaccacgactcttttcccaagtaaattgatggccaataagctctaaatcactcaattcacactcttgaattgttttctgaaaaccctcaataagccagttaggataaggagcacctccacgcttgtcttcatgagacaatatgttattgaggtccccaataacacaccaaggcaaagaagaagcagtagccaatgttttcagttgatcccatgtagtcacccttgcattacggttaggctccccataaaaaccagttaaccgccacacaccttgatcaaaagaagtaacctccacatcaatgtaattatgagcaaaatggagaaggttaatgtccccattatttcgccaaagcagagctacaccaccactacgcccaatagcatccaccgcaaataagccatcaaaaccaatagcaactcgaatc

SEQ ID NO: 179392 - DNA, 899 bp, Cannabis indica
aattatctaatactttatgcctaagaaaacgctccactatattctaaactaatacatattcttttgaaaagttgaaacaatttttttcaatacaattgttctgattgtattcttttagtgattaagagtttctgttttaaaaaaataggatagaaatttattcaaacctgtttgtatgtacccactccttgtatcctttttgaaattctttgaaacacctaaccagttgaaacacctgaaaggattttttaattaacaatccaatcaatgcaagattataaagtcaatcatgatatatatcaaatatcatttagctcatacctttatacaactatggcacttaattgctctttagatttgttgaggctgttgaggcaaattaaggtttttgagagaaaaaaaaaatcgttaacagtgaatgtgaatagagtaaagaaaaaaaaatgacgataaaaattaatgtatggtatatatatacatacacgtatttatttaaaaaccaaattcaaattttaatttttgaaatttttgttattttttaaccttgttttgtgggatacttatctttttttgaaatttaaatttaaattactctgtccagattgtttgtttataattaatgtttttatcttattttaaatcttataataaatgtttgctaggatatacgtctttttttcctttatttttggataaattaaatttaatattcttaagttgtttgttaattttataactaaaatgttctacatttgtggtttaattatttataggtataatttttaatttaaaaatacattaattaaactgaaaaattaatttttgatcaaaaaatttaaaactgaaatttttgagtatttaaattttttgttactcctaacttgctgtctatcgtataa

SEQ ID NO: 179393 - DNA, 498 bp, Cannabis indica
aacgtaaattgcatcttattactaaaaataacgtagcaatcttatttaatatattttacaccgttattaatattattgtgtcatttttcaattggcaaatttatagttactttctttctcttttgtattttctttttctatttgaaggtggattttataattatattaaacaattatatagagagagtcaaaataaaataaaaataatttttttcttctctcttatttctaattttaaaataaaattttaaccacactgctagttgtttggcttcaaaaataaatatcattgtgacctacttttcaatgtgatcatttcaagatatgggaagcatatgttttttcaccttttccaaaatcaaagtaactatttagttatttaccatatcaattatatactcattagttacatttcaacaatatataattattaaaatataaatattttaaacaatcaacaatatataagatcaccaatcgccacaaaaaacccaaact

SEQ ID NO: 179394 - DNA, 877 bp, Cannabis indica
cacacttccatttgttacaaagacacaacaaactaaacacaattacataggttagacactaattgctccacaattcacattaaattcaagcttaaagatatgaaaataactctaaatcttagagttatcatgtttcaaaatagacacttactagtttactgctaatgcgacttagatccttctatcatcgagcaattttccactcaggttgattggcacatatggacatgtttagtatacatgtattctgattgccacataaataacatatcagtagtagcggtattagtgtacatagaattgtacctgaatatcaataatatatctatttggcaatatagaaaagtactaattaacgctactaacactagtatgactagagtactgggtacaatttgatactatggttaattatactaatagtattaactgatgctaacacatcagtacgactagagtgctgagtatagactggtattatgattagctgtactatagttaaaaatgttcgagactcaattatacgcgttggacgtaggtagtagacttatggtaattgggtgcatgggcgcctaattataggtcaaatatgtattgtatgttttatattttttttactggagtctgttgactcactgatacatttccatgtgtagtagataaagacaaagttaaaactgaacggtagtgagtgatgagcttattgaagaatgtacatatccaaatagttagatttgaagagttatgatcttcgagacatgacaagcttaattatgtttgttgcttggcgacactttttgatagtataaactttatgtgtgttttgaaaaatagattttgaattgtctgagtttgtaaacacttttgtaattatata

SEQ ID NO: 179395 - DNA, 650 bp, Cannabis indica
cttcttctcacgcaaaataggtcaaagactctagacccgatcgggtccaatacgtgtgcacaaccagggcatcaatcaaatggacgtctaacgtccttagcatgctttgcatgcaatgtgaggaacgaacatccaacgtcctaacatcgatggtggttggaccatgaacggtccttgtgaatggagaacgaaatgggattgtgatttccatggtttatcgtctccatggtccttttcatctcatgcttacgtctattgtatagtgaaaccagttggacccaaagagtccaggtttcatttgattgttcacgacgacaatggagatgacaggtaatgaatttgaattccgagactgacccgtcaatttccgtatgcgatcaagatcattggagagggcacgaaacccaaggtagtggctggttgacttcgtgcatggtcatggcccacgggctcgagctcgcatgcgtggtgatgtacaactaggattccaagtgaattcgagctctgtatcatgagcattacaacgtaaaacttttacgaaaattattttcgtaaaataattaaaaaaaatgctatgcccctttatggcgtacataattttttagaaaattaaaagcaaaacctactcccaatattaccatataattaac

SEQ ID NO: 179396 - DNA, 564 bp, Cannabis indica
tggctcagctcagtggctctttctgctctcttcgttctggtagaaaagcatacagccctgcaagaagtaataacagcacagcagccaaaccaccaactgctgctccaatgatgatgccagtactcgtcttggatgacttgcttttgtctgaaggaacttctatagagtctatttacaaagagaaacatgaagagttttcaaaagttcataaataaactgaaacagattgcttcactcatgttcaaagaatcacctgcatagctttcatactggtcagcaataaaaaagaagggaccaaaagtttttggggtcttgtaggtttggttgctaagtgcaaaacctatatctgaaatttcttgtcgatcgaaactatcacggccagatgggaatacttctagctttatattaagatattcagagacatccttgttgggattactcaaagcaatagaatcaacatgaacttcaaacttctgaaagaaggtcatgagagaattctcaagtatttggtagtaagttgtgttctccaagtctgagaaagaaggagctcggaagtttaatgat

SEQ ID NO: 179397 - DNA, 755 bp, Cannabis indica
ctatctattctctctttaattttattattaggtttataatatataaagaagatatataagacgatgacatgacgctttaaaattacttcaactaatgctatctattctctccttaattctctcacttttaattttttattaggtttataaatataaataacaaattttttatattctatacatatatatatttaaaaaaaattaaatatctaactgtaaattttctttaatttttaaaacacatataactctaaacctataaataaataaacatataaatgtatattgttttatatacctccatctctctctcacgctctttcttcttctttttactttttattttttcttctattttttaataaaattctccatctatctctaattctatttattattttttcttttttcttttatttgcttaaaatttaagtaactattaattttttatgtatgcatgacacctcgacatagcatcaatagatagcatcaagaccttgatttttaatatttctctataatttggagacacacaaactaatttttatgtcgacaattttaccgttgtcgatgacttcaaattattcatgatatacttattagcatgaattatttgatgtgaaaaagttgcttttttttttttttaaataataggctcttaagattcatgaaaagtgatgaaaagctaattgtaacttttctctcatgtgatattcttccacttcttctattatatttcttattcgctctctata

SEQ ID NO: 179398 - DNA, 757 bp, Cannabis indica
cttcgcccaacacttatgaaagggtgtgagaattattacttaaagtgtacttaggagctgacaaccctctttagaataaattatcttgagaagattatttgaattacaaaatttaaaaaaaaaaaaattgtataagagtttttcgataataacaagttcaattgatatactatcataaaaatttaaaatagtttaattaattgaaattaatcttaaaattaaaaagagcattataaaaactgaatcttgtgggatcctgaactaatagtggatctagattgagcatgccatcgttggggttatgggaaccaaagaaacaactgcctcgcgctcagggccggcccaaccaatttgggggccttaggcgaaaaattaaaattaggccttttattaaaaataaaatcattaatcaatacttcataattttaactttaaaaaaacaatgcctcataaattcttttacatttatttagtaaatttaaatattctaaataaaagtacaatcaaaatattattcaaatttgttgatcgatctatcccaaaaatatgtcttccttcttcaaatttgacatatcgaacaatctccaatctataaaatttaataataacattagtttattcaaaattattagaaaaaaataacacatattgattcatccaaaaaatttatctttcttgcttttttgggatgcaaatttgtaaatcaaatcattgtattcaagtttatctagcaaattattttcaatttgactaacat

SEQ ID NO: 179399 - DNA, 807 bp, Cannabis indica
tttttctttttgagagagaagagtgagttatcatactcaaatttaaggtgggtgacttctagaagtgtgccaatttcacttttgaaaatttgccagacttttttttttgtgtgtgtgtgtaatgttttgaggtttgaattgactgataatattttgtgttaatagagtggaaatattatcaattatttccttggtttttttgttttaatttttgtattttcaagttgcaagttgcaaggtgagctttttagttttgacagcatttgtagtccttccatggctatgggatatctgcaaattttcttaatataatctcatgaagtgaatgtctaactaactaatccctcctcttgtttatattacttctaacttattcttgaaattctatattttcagctgtgaaatctaaaaaaaactaaagcaaccataatgataatgatgtttatacccaagaacgaatgtgttgttgcatttaataagagaacgaattaaattttctttcatttattctttaaacatttactttgattaaatattattatttaatgtagggtaaataatattttggatcttttattttgttaaatgataaaatagaccctatattttctaaaatagtaaaaataagaccctgagtttaattttcaaatagttttattttttaatataatcaactttaagacaatttctaacacgaacagatacagaaaatgtaaccagttttgtcataacatctttagattagattattattatgaatattttgacaaaaaaaatagttaaggtccgtattggtacaattttagt

SEQ ID NO: 179400 - DNA, 605 bp, Cannabis indica
gtgagggactacataaatccccttctttctattaccaatttatgtacatacctttccatatatttgacacgtggcacacagtaagagtcctacagcaaaagttttctcctccccaaatccaaaaaaataaaagtacatgtcacaacaatcttaccgcgtactttactgcacccgattattatagtaaacgttactcgctctttgggcgcgtaacctttcttttattagttgtacagttaatatgacacgtcagatatggcccacttcattgcccgcccgaggcttttttttttcttccttttatagttgaaaactgctttaaaaaaaaaaataaattagttgatgaaaaactaataaaatcgaccgaccttttatgtatggccaagaaattgagtttaataaaataaaaataaaaaagtaaaaaagaggcagggagagggcacgttttgcgaattttggattttcttctatttcttatcttagtattataaatgcccaaattaatatatatttgatttgttatatgttttttttatgacgttgggagttatggtcctattaattttcgtttttaattaatataaatattttgtatttggtgtaat

SEQ ID NO: 179401 - DNA, 1050 bp, Cannabis indica
agtctatcacaggggtttgtaagtatccttttacaacaagccttgatttgaatctatccaatgtaacatcaactttacagcttttaaggcataaaactcatgttgcatagaggcttgccactgtggatcttttagagcagctgctatggattttggttcagtgggaagaagagactttggtagaggatgttttgtagctaagtacgtatgcctttggtttaacaatgccactttgggatatagttgttatggaatgattccttgtggcagtggaggtagtgacattcactaaagttgagataactggttgttggtgttggattgtaacaggctcaaaaataggagaaagaacatttgaggatgccagcaacttgagttgtaatgagattagcataagtgtttttggttgaatagtggaagtgggtggagggttgtcatgttgtgtgataggagctaatactatagggtgctaaatctagttgtacaagtgttggagatggaggaaatcttgattgataatagatggaacatttggaataggaggtgtagggtctcaaatccaagaatagagccacagggaacaaagtttgtattagtagctgcattagtattgatgaattgaaagtagtagggggacagagtgagttaagagactgtacctaaggaggtggtgtagttgagaaaggtcctaggtaataagtgtcattgaatacaacatgtttaaatatgaacaccctgccttgagcatttttacaaatataacctttattcaatggagagtaacccaagaataaataccgctgcgatctaaaatccatcttgtgtgcattgtatggccttaagtatggaaaacatgcacaatcaaatggctttaggatagaatagttaggcttcttgtggaagagatattcaagaggagtattgttgtccagaactgatgtaggaagcccgtttatgagaaatgttgcacactgaaatgtataccaccagtattgaagatccaaactagctttggcaagtagggaagtcttgtttcaacaatgagcctat

SEQ ID NO: 179402 - DNA, 518 bp, Cannabis indica
ccttcaatctcttaactaagtacctagtccttccaagctcggttaccttctgtggcattgtttatggtattatttgtcaatgccagcacggctagggatggaggtggcagatcatttggagatccaaagaaaaggtatttctcataccttgcactgcaagtcaggccaacaactcttgctcctacgttcccagaacaacaattcagaattagaccgcaaaagttatccaaacaattgatacattgttgctcgaacaaatctgaggtgcattgtacgattgcgtaaatggttaaaaactctcaagagcgcatttcccgcagcgtatacaaaaagagcctccagaggaggggttttctagcttggaaggaacggatctagagtccattgggggtggggtggggtggggtagggtgggcgtggtcggagcacggtgctcccggtctagactccgacactgcacaagtagaacccgagagagagagagagagagagagaaagagaatgagatggattctgag

SEQ ID NO: 179403 - DNA, 712 bp, Cannabis indica
aaacaaaacaaaatggcaattttgggataaaaccggtaaacaacggaaacgtgtcaaatggcggggactacacaaactacactgtctcttaattatttaattgattaacaacaaattattacttttattattctaatctttgttttaaaccattgtaaatattaaataatattgaattatcttttaggacaaactagattaaaaaaatggaacggacaagctacaaaaatatagatacttatactttgagctaaatttagtaccaaaaaaaaaattaaaagtagaattgatggagcaattttcatattgaaaagaaaattcgccattggatgagggttcgggattagtgacggtcagttggtagaagtagccttgttgtgtgttctggtcaagtggatctaattttggcagaggtggtagggataatagaagcgttaagttggattaaggctaaagaatgagcgagtataaagtttgaaaggaatttattaatagtggttcaagtcatctctagttcattggatatgctttcttcttttggttaaatagttcatgaatgcaagattttattagcttgatctttaacatttattaggttatgttttgttaataaagttgctcattgtgttgctcctatctattgtttttatcgagatcataaatttagtatggagactcctctagctaaacttgtatctatggtaatggttga

SEQ ID NO: 179404 - DNA, 1221 bp, Cannabis indica
ttcgtgaaatcttggtttcggccaagtgcagacggtccaagcagaatcccaccctgaaaaattaagtgcaacacacaacatattaatatataatcagtattagctctggtatacgaaacataaacaacaaacacaatgttatataaatatgatatagctagtgatgttatgcgtactaaaatctcggcaatgactttgggctggcggaatggcttgagaagtaaagctaggcagcggcttatgaagagaaccaaaatggtttgaagtattagcaaagggaaggcgtagttgagagggttatcgccttgccaggctccgtccgatgaggtcttgatcgttgttatgtttggcatgattaattagtctttgattcaattgtgtatattacacagggccaggccacatgttcttatagggaaactagtgactagtaatcatgatcatgtccagacaaaacttaatccaattcataatatttattatgtaagtggtggttctcgattcaataaacataacatatttatttttgtattgagctgcatcatatatttgtggagcagtttccactttaaaagccatcccactttacaaaattttaatctttttatgtaagtgccttttgtttttttgttttaatcaaatccaatcatttagtggcaatcaaatcatgtcatgatacgaatatggactagcgagtcatagaaattagattacattaattcaatgtgttgggaaatgctgtattatataagcaaacttaagtttttactttcaatgaagtatatttctgcatttgcacggactcggatcggatcccctgtcaaggaagcctgtccaatttcctatcgaaggtataaattaatgatccgtgtcttttaattaatattttattatctcaaataaaaggaaacatgcacaaaaaagaaaatattacaattaatataagggtaaataaccgtataagcttaactttgtaagtggcataatctcagtattaacattactatattagccacataccaaaattatacttaaatctatttaaaaatatatatatatattttttttttcaaaaaaaaaaaaactgagtgacattatttaaaaaaaaaatatataatataattttgaaaattatcccatatactatttttaattttttttttaatttacggtttgaatttctcaagtggtttctattagggttgctatacgaattttaat

SEQ ID NO: 179405 - DNA, 502 bp, Cannabis indica
cctcgtgaatcattgactctctcactcgagtagggtgaagataataatactcaaccgcctcgcgtttgacacaacaaagtagtcatctcgcaaaatcaatacaaataaagaggtacaacaagatgaattacttctacacttagtgagttttcctctcacggcggataagaaggataactcatatttggcaagatgcaaccttcctagtctgcataactgcttaaaagataaagacaaagagcactagggtagttattagatatcatcccatgtgtgaataaataaaacatggggaatgcccacgtttcaccagcacttataaataaatcaatcccaataaaaataactgacaatctatactcctataaatagaagcagaatctatgggaaaaaagacgacaaaaaatagagagaaattctattattttcaaatattgagatttgtattctgtattccaaaaaatatccctaataatatggactcgtggagtatgtatatttt

SEQ ID NO: 179406 - DNA, 562 bp, Cannabis indica
tattccgtgcttcttctttatgcccaaaaatcagtgttcttatatttaactcattgatattcctcacaggacaaccttgcaaatcatcccataattcaccccctgcagtagataaataagttgtaattccagttgtaaatcatcatattgcgagacatgtggattcttaaatccctatggaaattttgaattttggatgtctgtgtggaatgactcagtttcttcgtctgagtcgtatcctaacagtttgccatattatccatcttgatatttcttaaatttgtcttcttattgtatcactcacaactgaatgggatccactggctgttggtttacattttgattcagttggttacacaaattaggcgtattttgatttaaatgctcgcggaggtctggctgccttcgatttaatctatcatgaagatcaggttcatgatgtctttgctcgtaattactcacagatgtagtccctgagtaaatttcagtcctgtaactgcgtgagttcttatactttctcggtcagtagaataatgtcgagatttgctcctatctcgcgttt

SEQ ID NO: 179407 - DNA, 504 bp, Cannabis indica
aaatatgattgttcaactcagtttatttttttgtaataatcccacattgtttaaaaagtatagtagaacattatatatacattataagtaaattttttctcatagtattttaatttgtcccaaaatatgaattttcttctttggctaattgattaaattagtcttatttaattaattaattataattttttaatttgtcccaaaatatgtatttgtctccttgactaattgattaaattagtttattcatttaattagttataatttttttttttaaaaaaattatctattctatagtctattacaataatatatattctatattttatataaaaataaaatatatttttcatcttattttttaatttggtaagaatttcatattatttttcacatgatttctatagattaatataaagaaaagcaaacaagagtgtaggttgctttctataattttttcttcatatctttttaactttttaagagtaccgtgttaatgtacta

SEQ ID NO: 179408 - DNA, 1034 bp, Cannabis indica
cccaagttgatgtgaggttatccctcagatggctagcctgttctagctccagtctctccattttaccatatgttggagttttagacttcctataccctagaggcaactctaggaatttcaatagtaatgccttccgtactcctaacacatgtagaaatggggtctctagctctggtttccaccgaggtgttattgcgaggtggcaggcgagcatgggcgttgtcagttccaatgtcaacatgtatttggacatttaaatcggtagctagagggtcacacagttcagtggatgcgaccttcctcgtttgaaccattattcttgggaagaagatgaatagaagataattaaaacatagatcttgtgtagagagcaatgaaggatttttctctcaataaaagtaccaaaatattgaccttgtttttagtcaacaacgcggagtcaataaaacgataatacaagtatttgaacaatataatgataataataaataactataaatgatacaagatttatagaggttcgacccttgaatcagtaatggcatactttcctttttgttgtatttatctggaaaataacaagatcacatgaacatggtcaagtgaatttcttactatctctaaaagttataaacaatttggtagtataatagctttcttgagaatgccaaaatcggtctctgaatagtgaatttgatctactatttatagtgaataagatgtagaatatttacatttaattaaagaataaagaattaaacattgattgagtcaaatccacgatatcctcaactccccctcgatttctagcaatcccacttttttaagcatattgattgacctattctgtagcgattaggcagttgggatcatgaatatgaacatttcttttgtcgatcgaggttgttggtcggagtatttgttctaagaagtgccttcttaattgttcagaatgctggccagcatgccccctcccagccatatgttgatgctagatggctccgttcggtcgatatactctgcccaacactctt

SEQ ID NO: 179409 - DNA, 797 bp, Cannabis indica
gtttgcttgtttttcttttcttggtcatggtaggtgtatgtatgttaattatagttttgctggcattggttgtgaattgaatgtgtatatttttttgattttgattatatatacaatgtttataaaaggacaggttaagttgttggtaacattagcaaaacattaattgattaatttattttatttttgtttataaatatttctttctttacaatgcagaagttagatactttggccttgctttccggatttctccttttagcttattaggaagttactaaaacgatttttgttaaaaagaattttttagagttaaaaaggtgaaaatttactatttagtatttacccaactagagtaaaactgcatttggaatttcataagttcaaaaggaactagctttaaaaactcagcgagcacctttaaattgtgagaaatgctaaaagcatttctaatttctaatgggagttatctatttgtatttgagtgatcttaccacatatatgtaatgtggtcgagtttttcaagattaatttgtgattattttttaaattttaattaaaaaattattaatttaatgtgattgggattatagtggacaatttttacaattatcaattatttaagtatttttttaaaaaaaatatgataaatgttttgtgaatgacaaaaaaaataaaaaattatttaaataatgtgtatattttgataagtgtatatattatccgtgtgccaagtgcgcattttaatatcgagtttagtataattctaacttaataaataacaggacaccaatagt

SEQ ID NO: 179410 - DNA, 560 bp, Cannabis indica
agtttatggacaagctccccactcaaagcaacaggtaaataactagttatttttagtcctatgacttatgtgattctttatttgtttattttttctccttaaataactagttatgtattgttatttattttggttttgtttttcagtgactgtggtgtgtttgtgattaagtatgctgatctgttcatccggggcaagataaatgagattcttcctgatatggacgagataattacgcactacagggatgacctccctgtgactttgtataactatgaccagaaaaagatttatgaaggatattcaactgaagataagtcgaagggaaagaagtcgaagaagaagaagaagtttgaattcttgttaaatatttatagtgttttctcgacagattaaatgtttgtagttttgtttggtgtttttattgttttgtaacaatacattatgatatgttaatattttctatgttaggttgacaatatatggaatcagttttttatatgtttctgtattcttttggttttttctgatttttttttttttttgtaatactatacttt

SEQ ID NO: 179411 - DNA, 512 bp, Cannabis indica
ctgattttggagatgatcaaagttggtatgtggatacaggagctactcatcacatttcttacaatgaggctccagatagtgtagttccttactctggccaggaaacagttgttgtaggtgatggtaagaaacttgttatatctcatattggtaaagcctttttgcctgataaacactcttcctttttacacttaaactctgttttacaatttccttctatcactaaaaatctcattagtgtttccaagcttactaatgataataatgtacttcttgaattccataaaacttgctgttttgtcaatgacaaacaaataagagcagttctagtcaaatggaagcttaaagatggtctataccttcttggtgatgatggctttagtttgtcaaacatcagtgtcatttagttgagtctaagtgtgctttactgtcacaaaattttaatgcccaatcttgtatttaacactgtcatcagtgttcatgtaattcaacagatatgaataaagattcaa

SEQ ID NO: 179412 - DNA, 715 bp, Cannabis indica
gtaccatttttaatgaggactttttggcgttggtaatagtggcgttggtataaaccattattgttgtagtgacttgatctttatttataggcagaaaatagttggaagagttgttataacagtcacaactgtaactaactctcacaaaacaaaacaaaacaaaatataataaaataaaattaatcatgttttgtaatatctctcctcaaacgaaatggtgtaagacacaattggagtttagttttgaggtagcaaaatctatctttggccaatgcctttgtcaagatatcaaccacttggtctatcgaagggacatatcagacttcaattgtcttggccagaattagaccccgtacgaaatgtaagtctatctcaatgtgtttgcatcgtgcgtggaacacagaattagctggaagacttgcagctccttgattgtcgatccaaattataggagcagatggcagtggaacatgaagttcagagagaacagaggttatccatttaacttcagcagtacagtttgccaaggcacgaaactcactttctgtgcttgaacgagcgaccacaggttgcttcttagctgaccacgagacaaggtttcctccataaaaaactagcatatccaccagtggagcgacgatcatcggggcaactagcctaatcggcatcagaatatgctttaaacacaatcaaatggcaggctttatgagaagtc

SEQ ID NO: 179413 - DNA, 900 bp, Cannabis indica
gagctatgagtgagtgtacgaccacactttcttatcgaaaatagcaaatatataattatggtcttcaaactattatggttgaaaaatatagattaaaaaacagtacgaaaattcaacaggtaaacttccaaagaaatgaaacaaaaatatatatatatattatttatatattagtgcgtcctcttaaattctgaatgtgattcagacttgtggggaagagaattgtaaattgagttgtctagaggacaaaccatagtcaagctaaatagtataattaaggacgatattaaaagattgggaactccaaatcttgtgaacattattatattctgatttctgatccaataaaatcagtatttcaaatagtataattaattttattaagcaaaaaaaaaaaaaactaagtataatttattgtacaatcattttaaatacactactcacgagagggaggcaatgcattcactggtattaaatatatgagaaatgtcaagcagggtgtgcacaaattcaccccattcaattataatgtcacatctaatttcaactgatacaataaaaaaaaattagatatctaattataaatgaattggattggatataaattttaaaaattcaatcgaatcggatcagtttttacataagacatctagtttaatgaataatagaactgaagcaatccaattatcatctaataaccatctaattatatttaatattttattttattcatattaaacacctacacataagattaacgaaactttaaatctaaaatattaattcttatctttctaaatattaataaaattgtaaatacttattgaattaagtttttttttttttttttgtcaattttattaagagattatgagaattaggttggactaaagtaatatt

SEQ ID NO: 179414 - DNA, 815 bp, Cannabis indica
agtttcatactgcagtatactgtgttaagttttcactggtgttctactggtattttattagtgttctactgttgttttgagctgttctgctatgtgttttactggtgttttataaaaacacagtatttttgaaaaaatttccgtgtgacagtatttttgtaaaaatttacccaaattcccgtatttttgtaaatttccccaattaaattgagaaaattacactctattaccctttttatattgtcctctttcatttttaccttcttttttaaagtctatcatttttacctcttattttaaacattgtaccaatttcgcccctgtcacttcaagatactctccatatgactctcttatgtcagggtattttgggtacaatacatataaaaagaggtatgtttcaaataaatataaaattagaggtaaatttagttaattgattaataaaagaggcatttttcaacttatcccaattaaatttgtgaatgcagtttctgcaaccatttttaattggattatttacacaaatttttaatatttttactttttttactatagggtagaatttttttcaaaaatattactgtgttaaatttttactgttgatctacggttgttttttagttgtttcactgttgtttttagttattctgttatgtgttccaatgttgttttattaaaacacagtatttttgaaaaaaaattagtgtaaatgtattttgtaaaattaacttaaatttagtattttgtaagttttccattttaattttgacgtaatgcaacactactatatgtatgtggtccctcaactattt

SEQ ID NO: 179415 - DNA, 1203 bp, Cannabis indica
agtattgttcgagagagaaaagagtgggtgactctatcttctccgatcacgggtatcgttcaaagttccatcttctttgactgcgggtatcgttcaaagttccatcttctctgaccacggccatcgatcgacggagtaggttgagaaggatagggctatgggtatgtgattgtaaaccactacaagaagtcgcggttcgttcatcaaagacggtgaagaactcaggtcgaaggttcaagtgctactgtagattcaaggtttgaattgttgccccatgttttcttctttttcgttgtccaatcgttttagatataaattttgtatctttgatattaatccatatgaataaacacgattttaaaattttcacccaatttctcatcaagaaaaagttttattttcaaatcaccccctttgatgtgaaaaaaaaaaaaaacgtaactaagaaattgaacttatagatgttctaacttatcatgttgtaagaaatggaactttcttgcaattcaatgcattaaaattttgtatgtgcatatattagcttatagtttgtttgtgcttgcttgaggattcagattaagaattagaatttttaaacacttcctactaatcctttctctaatctgaaaagatttatgattggaagttatgtatgtgaagatttcgagtcctctcttgagcaagatttcctgcctcccacaacattactcaccgtaaagttatgtttaacaccttaaggaaaaaactttgtctcattctctagtacatattcaaaattcaactctatagttggtcttgattttgtaattttatgaataggattgtaatttgtttgtgttgtgcactcaagcaccaacaagaacacaatgcaagaataaaatggattagaatgataaaccagaaatgtatcaaactagataaataaaagacagcaagaaataatgaggttcagtcacaagttttgaataaaacttggacctaatccccgggtagaaacagctctattggctgtgaaatcttattgataaatggctaagattacacttacatcaatggagaatcaagtgcacaaaacaaaactaatggtgattcacaccagttacaaaaatgagcttcaaaactgtcgaatctttgaactagaacagtctgcaatcctcaatcttgaagagaattcatctctgttcagtctctcatgtttcactc

SEQ ID NO: 179416 - DNA, 775 bp, Cannabis indica
tagaaattgtggaatcatgctccatagctgaaataggctctaaacaacctaaaagagtatttgtgaatgttgtattatcaaagagttggatagctaaggtatacttttttgtattttaaggtatttcacaactgattaatagttctgtcatgtggtggattagtattattaactgtaaaatgcctggtgctgcagaccatacaaaacatgttgctggatggtattgaaacttgggcaccaaagctttcagtgaaaaaagctgtgctcgatttttcatctccgaatatagccaaagaaatgcatgttggccacttaagatctaccattattggagacgccctagcccgtttgcttcgagttctctaatgtttgatgtcctaaggcggaaccatgttggtgattggggaacacaggtaggtagaatgatagtttattgtaaactgtctcgaaaagttttaaactttgatttttctctttgaaaagtttggaacttttgtaactttaaaagtcaaagaatggattcagtagtcatcattcactttttcattctttttttctgtgttttttcagttttggtatgttgattgaattcctctttgagaactatccaaatctggaagatgtcagtgaaactgctattggagacttgcaggtttgtgaaactaacactgaaaaattaatatatatatatatatatatatatatatattttttaatattttttttataaaattttgtttgttttttcctttgttggcaggtctttctataaggc

SEQ ID NO: 179417 - DNA, 1350 bp, Cannabis indica
atcttaagttttaaggatattaatacaattttagtttaatttaggttgaataaagattatagatactatgttttacgctataaataaaataataaataatttgacttattaaggattttgacatgttttagtctataaataagtaatatttttaagagataaaatgaaataattagtatataatattttgaatatttaaggaataatgggtattaaaaggaaattttatttatgtttgattttaaaagggtaaaagtaaggaatagagatcctatgaaggttatgaagtagaatgctataatttagttgttactagccaaagggtaatccctttggctagttctagtattttatagggagatctagttgcttagtcttggtggttggttgattctcttcagtttgaatagttttctaattaaagttttatgctgttttttgatatttttttcaggtggaacttcagtattttattgagttaggagcgttgtttgaagatgttatagctttattgtctaaatttccgggggcagttttgtcccatggggctcgctctaagattttagcggcccatggttggcaaagcatgctctgcggttagacgatgagctatcctggttcgaggaggttccagcgccggtggcggacgtgggcgtcgtaaattcatgagtgattttaatcactttgtcaaaaaaaaaaaaaaaaaaaaaacttatctcctattaatattcacataaagcattaaattttgcaaatcattgtcactttcttctctctctttgtcatacatacatacatacatacatagatttagcatacataagttgctataaatatagggcccgtttggtacgcaggactggattggattagacaggctaatttgtccaatccagtgtttgggcatgttagaagtctggataactaatccagttaacctcatctgtctgggattatttatcccatccagcagggtgggataaataatcccatgcaggtgagattttttttatcgtttttttaatttaaattttattaatatattttaaatttaataagaatttaaaggaaataattatcacacatttatttatacattttttttatcaaaaacttattcattaaaattagtgaaaatgtataattttgaattattatacataagtttttaaaatttagaatattattaattaaataatagttacttaaattgattctaagaaaaaaatatgacaataaaattatatattatttttaaattactaaaaaatttatataaatattttaaaaaattaatatttatattaaattagtgattaagataaacaattttatattattcaagtattt

SEQ ID NO: 179418 - DNA, 534 bp, Cannabis indica
ccttccacttctctctctatagccgaccctatacctctctcttttcctcttctcaatttcgaaaccttagtgatagagtagtgcccacacacagcaagtggtacctcaatcatagattggaagactgtgaaggatcacacacaaagagaaggacattcgggctcagatcttgataatactctgcgacagaaaggatacaagggttagagatctgagtggaaggagacattattccgctgcaaccaatgtaaggttttcttaactttatatgtgtttatttatcgttttagaaagttcatatttagggtgttaaacaacatacttgtgagtagatctaagatcctggtaaaataaattccaacatattattgatgcaattttatagtgtgttttgaatacctaaaaagaatgttaagaaaattgcattaaaacatcaaagtataagaataacaatgagcatgactaatgttattttaatatatgaggcatgtatttattgttcatcattccctgcagagaatgatacgaattgaa

SEQ ID NO: 179419 - DNA, 555 bp, Cannabis indica
ggctctaaggccagttgttggaatatgttttaccaagatctagatttactaccatgtatgttgtttaacatcctaaatatgaatttctaaaacaatgtaaataaacacatataaagtttgagaaaccttacattgggtgcagcgaaaagctcagatctctaacccttatatcctgtctgtagcagagtatcaccaagatctgagcccgaatttccttctcttgaatttggattcttcagagccttacacactataattgagtaccacttgatgtgtgtgggcgcttactctatcactatagggtttttaaattatgaagagaggaagagagaagagaggttcgaatagggtagaatagatgtctcaaaaatttgactgaaggcaagtgtgtttatcatcttttgatttgaggccatcactatctatttataggcaaccacctaagtttaggtttgaattatttggcattaaaatattgaaaaaataaatggtaaaatccctttaagtggccggccataggatgtgggcccccactttgcaattttgccatttttc

SEQ ID NO: 179420 - DNA, 609 bp, Cannabis indica
gtcccctttccctaatttagacacagtctacactcaaccactccaattaatttacacagacttgtggggaccctctcccatggtttccaatggatactattactatgttcactttactgatgcctattctagattcacatgggtttacttactcaaaaacaagcgtgatgcaattcaaacattcattaatttcaaaacacaagttgaaaaggaacttaatctaccaatttaaaaccttcaatcagattggggaggagaattttaagccttcacctcatatctgattgaacatggaatccatcatagactttcatgccccaccactcatgaacagaatggtgtggctgaacgaaagcacaaccatctcacactactacaaattaattaagcttttagtgacactatatagtgacacacataaaagtgtgggtcactaaaaaattaaaagtagtttttagtgacacacaacatttgactctaaatgttcggtgtttattacgcagaatgtgtgtcactaaaatatagagtgtcactaaatactaaaacccaaaatttacaattttataaaataaaaattatggcctatagtgacacgccacgcgtgtgagc

SEQ ID NO: 179421 - DNA, 530 bp, Cannabis indica
ttcaaaagtacaagaacgacaaacatacatatatagataggctacacaatcactcttccccaacgatcatggaaagaaaatggagctaatactaattaaaaataaaaacaacacacaaaaaggaataaactctctctcccctcttacaaagtaagcaactattacagataaagctccatgaaaccttacctattattaagatatcattgtcataacttaatttaattaattagctagaagtaaagggctttcgaacaagaacaaccgagttgataacctcatcattgggatgaaacacacaaagaacctcaaaaccaaccaagtcatgctcaacctcaacaatagggtacaaaaaagccctagctccattggcactcctcacaagcaacaaccctccttccttcatatacttcctcaagtgccctaaaatcttaaccttctcatctctactcaatccaacaagagcagccaagaatatgcaatcatactcaccaagacactccttcaactccataacatctttagtcaca

SEQ ID NO: 179422 - DNA, 816 bp, Cannabis indica
gctaggagtctcattaatctgccgatccggggcgataagctgccctgagataaccaccgatcttgggcaaaccatgttaaatctgctctcaacaaatgactagtcaatggtgcttggattaggttgttcccaagagttgtactgtgctcctcccagacttgcaattcggatcaccatcctctgtgcctggttttcggcagtttggaagaaaaattcaaaaggtgctttaagtttgaggaaggctggactagggatgaaaggagcaaattggtagttgattctgcctggaaatctgtaagttatccttgggctctggccagggtctttaagaaaattggggctgctcgagtcgctcttatgcattggaatagagcccaatttggtaaaatcgaaactttaatcaaagatctggaaaggaggattcggagtttgtcgacaggatctagagagtgggctactgaaagtggtatccgccgctctcttaatgaggcacggatgagaaaagagttgtattggaagcaaagagccagggtctcttggctgaaggaaggtgataaatgttctaagttcttttttctttcggagactattagaggaagaaggaatgtcattgagagcatcctgaataaaggcaatatgtggatcaccaaaagagagttaattgacaatgaattatggaattcttaaaggaatttttatagagcgaaacattggtcacgccttaattgcaactactaatccaggataaaaatctcttagggcgaccaagcagagcatattaaaagcccctccaatgcgaaaatcatgtgtactctg

SEQ ID NO: 179423 - DNA, 845 bp, Cannabis indica
gatacctcaatcatagtgaggaagatcgtgaagaaagactttcagcaagaaagagttttagcactaaagaaggagtgaaagagatccagtttcagatattgataatgctctgctacagaaaggaatcaagggctagatatctgaacggaaggagtcattatattccgctgcacccaatgtaaggtttgctaaactttatatgtgtttatttcatcgttttagaaagttcatatttagggtgttaatcaacatacttgtgtgtagatataagatcctggtaaaataatatccaacacttttttcctgtgtaaccagtatgacctcattccactagttcattagcttgataaaataatttctgactattcttatgagtttaatttttaatcaggaacaaagacaagcggacattctgtactttttgttgggaaaaatatgaaggatttttttttaaaaaaaataatgaaaaatatgtgtgaccgacattgtcaattgagctttcttaaaatttttgttatttttcgtattatgtttcattatttttttagacactatttttgctttaaagtgttgattggtgctttatgtgtgtgtctgttcattctttgcaataaaatggggggcttattttgaaaaattcaagaaaaggaggcgtaatttttcattttttgggtgtttttttctttattttttcatttatggaaacatgattttattgtattttatgtatcgtgttttcttaatttttattggggatttactttatttttttgtggtgttttaggaaacttgttttcatttaattattattttgtcggtttcctttaaggttggcatttttcaga

SEQ ID NO: 179424 - DNA, 526 bp, Cannabis indica
tatgaattcttagatatatctcttagtaaatctttgaccctttgcccagtgaatatgcatcatatttatagggctatgagcttggagaggaagtatttcccttctcgttacaatggatatcagcagaaagattgcataataaatatagaatacactgattgtgggatttggatagcttaccatatctctacaatctgatccccaagttatagggatttccttgatgactcacaatgcgaaagatgaattcgctaagtgttggtcacgctgtgcggattgctaattgctttgcttcgagcatgcatatgaggtatcctgttcagactatattctgcgagcagatactcggagtcgattccacgtgtcaccatcatgtgatgccaagtcaaagtgcaaaaattgggataacagaagcttttcaagagttttgtaatgaaataggtcttgctgcccaaaaaaaaaaaaaaagaatctcatctcttttatggggggttaaagagaagtaagaataagatcttggagattt

SEQ ID NO: 179425 - DNA, 990 bp, Cannabis indica
cttccttgttcctcttgtagtcctaagactctcaataattcttcttttgtctacaaaacacagtaaaagattagtccaaacatgtgaaaagtaagaggctgcttcagttttcaaaattgtgtttttaaaaatttaatagtgttttggctaatattttttaaaaatatttttagatgatatgaactcagtccacctcaaacccgactccaaatttggactcggaccccgaatcctaatttgacctagacccgaaccccaaacccaaccgctttctagctttttataactcgatttttcaaaaaactatttttgaaaaatttggccagacgcactttattagtttttaaaacttgttttctatttttaaaaactgaaaatattttttaagttatacgaagccaaatagcttctgaatatctagaaatgaacagaggaaatgcagattggagttggagacaaatatttacttcgcctagagtgaatcgtgtagtactctcagccacacaagcaaaagaactgtcggtttgtttaagcattacttgccatggccctgagcaatattgaagaaaagattcaaaagaactgacaacaatagtatgcaaataaagcattaaattttcctcgtagttatgtaccggggtattggcgaaacagtgctccattgtagttaacaatataaggggacactgctactgtcttagaaatcaagaacacaaatggatattaatactgagctgagacataagattaagggaagagacagacgcatgtacctttgagtattctctaattcgaatgtagaacactggaatgaattgagaaagaaatcggtaatgcagatctttgggtggaaatcccagaagacccaagtcagcactgcaaagttcacagtttgttatactgaaacagtaaaagaaataagagtcattcaatcaagacctttttaaagattttaccgtaatgtctcgagttcaagattaaatagaagtg

SEQ ID NO: 179426 - DNA, 715 bp, Cannabis indica
attgacttattgttgttgttataacttttattagtctcaagttttttgtattttcttaagtgttttggaataattatattaatgatattttaattattttatgatgatttcaaaaaaaaaaaattgtgatagttcaaaccgcaagaaaccgcaccgcaccgcaccacatcattttttgcggagcggtttttgcggttttttattatcgcgatgcgagtgcggtttggaaaattggaaaaaccgcatgtgcggcttggttttaaaaaatggttaaaaaccgcaccacccgaaccgcgaacacccctaggaccgggacctagtactcgaccaagacctgaacttgaactaggatccagctcgtgacccggtaccagaaatcgaaccaaactgcgacccgagtttgggatccggatctggacccacggcttggacaaaactcgtagtcggtgtctggatttaggacccagccctaggcccgaaccctgacaaggacccgaacccagacccggacctgaacctaatcccaaacccaaaagtggaccggcatcccgtaccctcgccgaccaaaaacttaggtaaccgaaaacccggaaacggttagtaccgggacgttggtaacgtactgacttggtacgttggaatgataactgaaattggacgatagatccagaaccgtaaccggaccgaaaacctaacgactccaaactaagaccta

SEQ ID NO: 179427 - DNA, 795 bp, Cannabis indica
gtaacacaaatgttgctaaaaaaagtaatgtaaaagtttctgaaacaacaaaataagtatataattttaaaagtaactaaacaaaaaatgtaaccaaatgaaattatttttatcttaaagtggatcttttcattataaagtaactcattggtaacttattgatctctaaagtaactaaaaagtaaaaagagttgtctttttatgcagaaaaataataatatatctttttataaaatgtaactcattagtatcttattggcatcatacgttattaatttttataataatatgtttataaattttactaataaattatgtggtaactggtaagttcattataagctatcttttagtaattatccaaattactctataaagtagatttatttaaaatattacattgtaacttttagatctaaaataataaaatactttgtaatcacttttggaaaattttgtctaagtaatttagttactctttagatatttttgttaactaaatataagaaactaaaaagatgctcttatttcaatgacaaaaaaaaaacatatatttcttacatattaaaatgatcacgaatgtatttttttttttttgtagctaaaataactagaggtgcaataaaaattatttttaaagaaaatctattaataaagaaaaattaatatttttttaaaagaaatttaaaaaagacacctacttttagcttgggaagataactaaaaaaagaagaataataaaaacaaaaagtgcaagagtccatttttaaagtttacttttataattgaatacaa

SEQ ID NO: 179428 - DNA, 606 bp, Cannabis indica
agttttatgcaaggttcatcatacaaatctggtatatactcaccctagtctgattgttttttttttttctttcttcttggttttagaatgcttgtaatatttcaaattctttatttctatctggctcttttttatccaggtagaattgattgggtacgcagcgactaacgacgagctctttctcatatatgagtatgcacaaaaaggttcacttagaaatcatttacatgatcttcaaagcaatggtaagattcaattcagtgtttttgtgggcactagaaataattagttgttagaatcatctacttacatggttagcgagtagggctcgtattgcataactttttccttttacttctaaaaagttgaagaagagaagtaaatgattggatagtttactttcaggagaaaatatatttccaaatcttgtaaatggataagataaaataagatgcttcaaaatttcattaaaattttaaacaaccgcacttgtttatcgaaagtttctgtagaagttggtggagaattttacttatttagggagatcttaaaaaaatgataatataataattaataaaaaatttacacgaaatctctatctcagct

SEQ ID NO: 179429 - DNA, 518 bp, Cannabis indica
attcggaataatttacaatatagaaaacaatgttcaaacagtctattttacatgcgcataaaataaaatagttacccgtgcaacacactgtttgaacatagttttcgatatgttaaacttttacaaatttcttaaaattttgcaagatgtcttaaataactataacgtaacatgaccatgagaaaaaatttgactaaaaattatttcggatactaaaacaaataagggtgcatcaatatatctattttaagaaagtgcattgtagaatttccctatagttaataataataataacaatgtaaaatcgaaatcactggagaatttgtgtcataaatagtttgactttgattaatttgtgtaaaagttacttattaattttattaaatgataaataaatttttatttttaaattactgtaaaataagagctgagctctaattttattatttttttaattataattaatctaaaaaatttctatatgaataatgtattctatttttatctatatactaatc

SEQ ID NO: 179430 - DNA, 673 bp, Cannabis indica
attatttttaaatctaatattaatgtgctaagatttttttttcaaaaaaaaaaatccttttacataaattgtataagtacttaaaaggtaataattttatcttataattattttttataaatttaattacatgaattatagtgtttaataattttaaattttttttctaaaggaagcaaatataaatttgtactaaatttatcacgtgcaaggcacgtgatttttgactagtatatatatatatatattaatatatatatatattaaaaaaataactatgtgggctagattaatactattaatcacctattatacaacatttacaaaaatttgtaaacacctttatataacccatgatacaacatttttaatggtttctaaaccatgtgggatttttgcttctcctaaaaaccctagtgcaaggcacgtatactaaatttttatattaagtatttttctacttttattttaaaagtgatacaattaaaaattaaagaaaaaatattagtggttattaagtgagattattattatgtatatctaaataatataattttataatttttgacaattaaaagtaaaacactaggatgcaatatattagtgtttaagaaagcttgataatttaaatatgttcttaaattaatctaaaaaataaactaaaaattaaatc

SEQ ID NO: 179431 - DNA, 612 bp, Cannabis indica
ataataattccatccacaaacatcttgatcaattcgactatcctagtcttatttcacacactaacaacaaggtactttagaattagcatttgtagtaaacattagtttattcagtttaaatccctctttctctttctctccactcttgccaggtgtccatgtgacaagtggttaatgttgttttcaggtgtttactaattagttcgacttgttagaaatatatttagatactatacaatatgattatactaactgcaggttattagaaatggggatgatctctaatcatattgtatatagcgattaagacagttcaagtcgtgaggctatgaattcaaaagggtatttaattttattggtcccggctgccataattcccattcgtgtccaatatttctgtcattgagaaaagaagaggttaatattattagattctatgtggatggtccaactccaaattaagcatatttatattttctgatatttgggaggtaaaggattccaattcggatcttctaactttttcctctagcatagcagtgtagcaatactaaagctaaataatatcacaatacaaaacataattattaattatctttttttttttttttc

SEQ ID NO: 179432 - DNA, 502 bp, Cannabis indica
aaaaggagtagggattcacaggaagaaatccctagctcccacatacattataaaggagaacttgagaagttgcaatatcattcacaaacagaatggcttgctaaattcaagttaattaattaagacatcagtagtaatcttgcatcccatatatattaatttataaagatgtctatatgtgtatgatataatcaaatataatattacaactgatctataaattatcttccccagtgaatgcatatattctctctctatatatatatacacgcacacgatcgtaactttcaatattgtttacagctatgtcatgatcatatatattattatttttcttcttttttttttttttttgtatatggagctatcatgatatgatcatataattacaaatatatacatgtgtaattttgtaaactgaaaaacatcatgatcacattcacatagcatatgtagagatcctatatatatgtatggtaattctagaaaatttatgcatgag

SEQ ID NO: 179433 - DNA, 1026 bp, Cannabis indica
cttgaagtttaaattttattttcttgcacaatattctctattttatatatcatctttttgtgagattttttttatctttttttccatcttattcttttgatattttctaatcttcttttattttaaatctgtaaaaataaatgataaaaaaaataaaattgctccaaacaagagtagagctaaattaaaaacacactaaaaattgacctaaaaataatactaaaaacaacctaacaatcattatatatatttttattatttttttaaataactatacattttccatgtatatatctataacatcaatagaagaatagatgttcacaaaaaaataaaaaagacttgtttttgtcctttgtcatttcttttctttttaattatttatttatttttactattgtgatatttttattttattttattttttttgtctttttttttatattttcatttaattgaattttttttttatttattttgttatttttttttattttttaatgtcagaactaaaaaaattacgcaatgcaaattctttcctacatcttcaggctttttggaccatcttatagaccatgtgacagctataggaatcttatacctcagcattctttaattaggtcattgataacaatgatcattttttttctattcttttattagtttttactttttattgaatgatcttctttttttcttattattttttaaaaattagatcttttgttactatgtttttttttttttttgtttttcgctactaaatttaaagttttttagttttttactttttactttttactaactaagtagtttttactttttttttttaactttttttaaaattttaagtaggtaggtagtactttttttactttttttttactacttttttacttttttttttttaacttttttaaattactactagtaaacgaaaactaagtaagtaacgtttaacggttacgactagttttcggttttacgtttaaagtttaaggtcgactttacttttttactttttag

SEQ ID NO: 179434 - DNA, 838 bp, Cannabis indica
gaccttttcgttttcgacatccccatatgtgtagtgtagcatatcaatcagcgtacagtccagacaacctttgctatatatttacatgttattatatatactaggtgattgttacgtgccaagccacgtagtgttagttttatttaatattttagttttttattttaattaataattaaaataatataattatttcaaccttctcctcttggtggtaaaattaaaaataaaactaaaaataagcacaaacatataaggtaaatactaattacagcccattttatctttttttttttatatttttttaagcccaagcccaaaaatctctaagccaacacaatcaatcttcttttatattatcttttctagatattttatctatatttttcttttttaaaaaataaataaaaaaattattaatattctcccaagataggtttgttagagagatatgtggctaagatgatttttttaatttaaaaagagattattaatatttaaaagattgtttatttaaaagattgtttaattttttggtttaattattgggtttattttttaacgggagatcaaacctaatcgttaaatttaacagaatattcttttatttttaagtatattctgttaaaccaagaatgttaaaccaagaaatgccgttagataggcacttttaatatataaagatatatattatatcactttttatatacttttccaatcaacctattatatgttacatttttataataatttaaaatataaatatttcaatttaattagttattgaagataaatattgaagttcaatgtaataatatttaatttatatttttttata

SEQ ID NO: 179435 - DNA, 750 bp, Cannabis indica
catataataaatattatatatatagtaagtagggatgcatattttcctcatagagataggcctgcaggaattcactcttaatggggcgaggatttcttgtctaaatggataacggggcgtggatggggatcaaattttatcccggaatgttaaacgggcggagacgtgatgacactctccaccccgacagggacccgtttaatttattaatattttatatatgcgtttgtatttttttttagtatattaatatcatttttacaatttttgaagttgtatttttatataataattactatattgaatagtaaataatatgtaatattttatctttcatgtaatttaataattttttacatttaaattttaaaaataaacttcatttttacaataggggatttctggcccctttccctgtcccatttggggattccccaccgcttccccaccgcgtcctcgaaggggattaataaatgaggatggaacgggaatggagattaaaatccttaatggagatagggacgggagaacactccccgctaattccccaccgggtgtgcatccctaatagcaagtaagttctaataaagttatagaatctgttatgagtagctttgaaggggtttgatgaacacaacagcgatagtttaatttccttaaatcccaagtcagaaaaattcctctcaaaactgggaataagattcttgcagtcctacttttctttttcttctgtccaccacagatatcaag

SEQ ID NO: 179436 - DNA, 540 bp, Cannabis indica
gtaattactataataaattaataatgacttttccttctctactgttttgctcatataatatatttaaattaatgtaagcagaacaccattttagatttatatatcaaaaattaattgtactattttgaaaaattgtgaaaattttaaaattattaatgttttttttttttaattttatttttgtacaaataatatgcatcacaaatatcacatatgaagaaggaccaagccaaaaaattacaactatcaaattaattatttgttctaagatatacaaaatatgagttatttttgataaaacaaatgccatataaaactaaatagaaatgctaaaaagacttaatggtgtgttatttatatatatagtgctattggtgtttaatactctccttaatatcacactgctattagtataattaagtattaagtcttacataattaaaaaaaaaaattttaacgaataataattttaacgctacacttaaaaaaaaaagtctagtagccaatagtaatggtgaattcaatatagagtctcattta

SEQ ID NO: 179437 - DNA, 668 bp, Cannabis indica
cctactttggttggagagaaatccttcagttgcgctattctattggtgtctgaataggaggaacatgataaactattgcctgcccctaactatagaagcttgttgccactgtcctatcaaagaatgagagatagagttcagttcccaggtaacctcaaccgatatatccgacctcacacacttggttggaaggcccgcctgttcgtcttctaccctatcctatggtgtctattgccagatgaaagagtcctgagagcaggacatctgctcatcagtggtcaacatttaggaagcggtcttcttcccgaacagcggaaggaagaccgctggccggctagctcttccaccctagacgggccattgctcgggggaagcgggcccttctcagccccatagccaccgttccgaaagtttgaggaactcttctattatggaaacgggggtttaaacctgagtacagagccgcagagctgacggaggaggcttttgcgcggctcaaagcggcgctcgtctcaacccgccgagatccgctgcaagaacgcaatgagccggcgccgagtgccccgaactgatgcactaaaacgggggaattggggaccgtagaagcggaaagccaacagggcgtaatccgaaccgtgagggccgtcacgaagattgtacagacagtg

SEQ ID NO: 179438 - DNA, 524 bp, Cannabis indica
ttatcaaaaaatatatttatgagagcatattgagcatatgttttaaattttttttcttttagattttttcttttaatgaatgtatttttattttaaaagttataaatttttaaatttttattattattaattaatagttttaaaaaattatgaataaaaaattagatgaattaagaaaatagatagatgtgtttataagaattttagaccgccatgtcatcgcctgatacttctactttatatatatagatagtttataaaaaatctatttttctattttatcacacgtatttatattaaaactgttgggtccgccccttttgatgggccttgtaccaaataaggacactaacacatttaaagaaataagagttatttacaccatatactgaaattttcaatatttttacttttttatagtggggcaaaatttttttcaaaaaaattgtatactgtgttaagtttttacttttgttctacgattgttgtttagttgttcctactattgtttttagttgttctga

SEQ ID NO: 179439 - DNA, 816 bp, Cannabis indica
ttgttaaaaaaaaactaaaaatgcctacctatttttaaaatataattttccttaaaccattttgagtgcatttagcacaaaaataaaattgtgttatacacaacatataatttaaacaaaatacatatattgtcataggtaaataaagagctttataataatcaatgaacaataataattatctacaaaattaatataacatatactaaatttgatacttttctaaataaaacactatatttttttcaaaatacgtacttttataaggtcataaagtttgaatctccctttttttttagggataagttaataaagcctacattaatttgccaatgaaaattaatgtaaacaccagtatggctcctctagtggccttctttattttatttcgatccttatattaaatggccaatcagtaaatgccaacttctaacttcattgcatgtttaatttcacttactacgccaccatggtagttgtcaatcaaatttatatccgtaatttttttaacacgcaattatatatttccggctgcatttattgaccatatttatgatcaaatttaatctatctaatttaataatataaattaactttcaacaaagtcgttgtagtatagtggtaagtattcccgcctgtcacgcgggtgacccgggttcgatccccggcaacggcgtttttctgttttttttttttttttttattcctctttttttggtttatattatttgcttagattatctattctatataaagtgtgtctatataactaaattcttggtttatgagaattctatgggtgactttttattttta

SEQ ID NO: 179440 - DNA, 853 bp, Cannabis indica
ctcttgaaaaattgtgcataaatgattgtggtttttacgcccatcctcatccgtatgtggtgcgtagttcaaccctgaagttcttggtgattaagttctatcagacttactcggaggtaacgcaaattgaagccataaaccttgagtcattggaactacatggtgtttcctttgacaaattagatttctctgtatgcaaggcaattacaaatctctcatttacttgtgtttggaatatgaatgagtcttcttccttagaaaatctcattccaaatcttccactccttgagaatttgactttgggaaacatgaaagggggaaatttgaaggacattaaaatcttgagtcagaacatgaaaagtttcaatgtgaataatcgttatgatggcgaaatgactgttgttattgaatgggctccaaaattggcgtcatttagttatacaggtaatatcaacttttgtataacaatggagtcatccaattttttgaatggaacattcgaaattcttaagattgagaacaactttgaggatgattggtttatcagcatgatagagtttcttttgaatctcaattgttcctggaatatggtaacactacatgttgacaaagctgaggtatgttcattacttgtcttatttcattatgtggtgttatttcaatttgatattttattcattttcttaactcttttgcattcattgaagcctctcatcggtctaataaacttgaagatcatatctcctcttccttttggttaaattggggtagcgatcttagagttcttactaaaatgctaaaccacgagaaagaatcagaaattgagagatgctttgcggtggatttttccttc

SEQ ID NO: 179441 - DNA, 673 bp, Cannabis indica
aattataattaatgaggaaattagttcctaaaatacttgaacataaattaaaaaaaaaaaacaatttcacaacaaagtacctcataaaactagtaataatttttttttaaaaaaaaacggtaagaatcaattctaaaaaatactgaagcataaaatatgaacataaccagtttcataacaaaataaaaaaaaataaaataataacacacaattcaaatattatataaagaagtcagttatatttgtcaactatttaaaaatttgagacaaaaaaactagttccgtaaattaaccaagataaaaatttacacacaaaaatcagttaaataaaataaataaataaataaatgactggttcttcaaactaactaaatcaaaaatcagttcccgaaataactaaaaaactaaatccatcaattaattaaatcataatatatataaatgttttgcaatgaatgaatcatcacaataagactgcactagacacagaatattcccacccatgaagttctataatttaacatacccatcaccccgaccaaaccagatttcctttcggatccaaacaaaaagcacatacataacttcaaatttttggtttgttgttatataaagggaatacaacagaggtaagacaaggctgtaacttaaccaagactcttaaagaatagtc

SEQ ID NO: 179442 - DNA, 797 bp, Cannabis indica
ctaacctttttcgagcttcaactaatgcagggattgctctcagctacagttttatccatcattcccatgattcttccatttcagtggcagagtttgattcttcctgtaagtcaaaataactctttcaagccaaattattcaagtgcctatacttttgtactgtcacaaactaattaaacaccgaaattactctccaagatgatcctttttcgaaccttttcaggtcttaccgggaagaatggctgaatttctcgatgcaccggtcccctttattgtgagtttttaccttgtaacttttcgtgttacatataaatgatctgcatattcacttctaaacagtcaaggacttagctgctctttataatcattttcaggttggattgctaaacaaacccaatgagttgaaaatgaaaacatctaatcttgttcacgtcgatgtattaaaggatcaggtttgtttaaatctgctttagcctcttttcaataagaatttcaaaaaatgcatttcttttagtattacctacacatttgcttaaacaggtcaaaacttgtagcttgccaacactgccaagacagaaagagctcgccaatgctctagcgccatttcatgctaaattgtcacgagaaacttcaatggctaagaagcatcctgtacataagtgctgcgaaacacaggtttttatttctcgtttgcctgactttactcgcaagttactaacgagtgagttaagggtcgcttttttttactaattgtttattcctttggtttgagttgtcaggcttatgctgctgacaag

SEQ ID NO: 179443 - DNA, 731 bp, Cannabis indica
atatcttccatctatatcttgtaacttttatgatgttttccgccactgaactttttctttagtataaatatatatatacaataatattgtggtttattttcaaacataataataataataataataataataataataataataataataataataatattgtggtcagtttatttattgaaaagagaaagtataagaaaatctatatctaaaattgtacgtatccattaattactcgatatctataatatattttaatatacgtacacattagcattatagcaagttttgattggtctcacctaaaaattgttccaatggagagacaattatttttaagggggaatattatctgtttacgagaaaataataatcaataaatattaattggggctatcgcggtgagatataaatataaaaggattaaaaccatgtgtgcagtttaaaatataacaaaaatatagggattagtgtgtattgcataattttcaaaaataaaaagaaaaaataaggaaaagtaaatttaccgctcaaaagaaaaagaaaagtaaagggaattagtagttgtcgtgatgagaacaaattaatcgacatagtgtgcaaaaaaaatcaaattgatataatagggataaaattaggtcggataataagcgagaaatgtcttcatcctcatcccgccactgaggaagccacatgtttaggttgaggcagttaaataagataatcataaa

SEQ ID NO: 179444 - DNA, 554 bp, Cannabis indica
cttggcttcatcgatttgaggaaacccgcttcatcgattggaatccttgggtcatcgatttgatgcgccagatgattttttttaataattttttgatttaattattgggtttaattatttatatatttttgaaagttaaccggaggatcaaacctactaacatcgttaaatttaacagaatattcttttatttttaaagtatattctgttaaaccaagaaatgccgttagataggcacttttaatatataaagatatatataaaaaactcctaaaatttataagagttagcttgtttggctttcttgctcattattcttctgtaaattatatatttagatggaacacttctcaatgggtattacccatgaatggttactaaacaaatttaataataaatattaattttaaaaatattaaaccattaaattttgatctaatgacgaataataaaagagaaatttaaatttttatgcttaatttaactacttaattaaagaaaatatcaaaaaatacatcttttttactttatatcaaaaatatattaagtcaaac

SEQ ID NO: 179445 - DNA, 539 bp, Cannabis indica
aaactcggcgcctgcagcctccattccgcgcatggtcaagcatcaggtgggcgagggggcagtgtcacgtgggcggtgggatacaggttcagacaggacctaccctaaccatgcgcgcgggcacgtcaccttgtccgagtgactggcgttcgtgcgattggaccttgtgcacccgaaacttcaaaccttgataactatttcaaattttacctaaattgagttccgtaaaaaccaaaattgcttaattttttacaaggaatccaaataaaatattttcagaatgaaaataaaattattttcgtggaaaaaatttataattcacatacattcatcaacataaaccaacatgaacacatccaaatctacacacaaataatattcatcgttttaaatccatatttcatgaaagtaaatcattaccatggttctgaggccatttattaggaatattttaccaggatctagatttagtaacaagtatgttgattaacatcctaaatatgaattatctaaaacaattaaaatacacacataagggt

SEQ ID NO: 179446 - DNA, 629 bp, Cannabis indica
tattagtaattatcagtatgaatgattttattgatagtttttttatgtttgggcaaaaggttcgaatctcacaattttattgggagagattatatatttttggctctataagttgaagttagcttgttgtggcagtatcatttttaatgggatagaaattcaatcttaagatatataacgataactcaattaaggtaagatgaaatataagatcgctaactgacctgtaatttctgaaattgtcaaagttactgaaagaatctgcaccaagtgatttttattacagcaaaaaaagaaacaatatgttataattagttacaatctaaaggtcatgccaagcaaagtgtgtatcaagaaatataaatatatatatatatatatatatatattaaatgcccacacatgaagattacagagaaatatagtactaggaaatatactatcatcaagtctagtcaagaagacatttaattaaaatataatatcagtaagaatttatatatataaatattttaaagataatatatgatcaaattatcaacaagagtgtctaatataatacttgatcattgaccttgaggatagatattgagaactttttcaatgtactaataaaggttttgtacatt

SEQ ID NO: 179447 - DNA, 718 bp, Cannabis indica
attttataaataaaaagtttaaagagtaaaaaataatttttttccatgttaatgtacttttgtaatattttttcaaatttttagtctattatgtaaatttttctaaaatattcttcaacacatcttttattattaatttttaatagtatttatagttttttttttttaaaaaaaataaactcttcacttattaatattatcaagagtaaattgcggcataaagatttaagtttaacttccagttacaaataaatacctaagtttaatttttaacggtaataacacttaagttatatttttagaactttgtaggtacctgactattaaatattaagtcattatccacctgtcattttttattgctatatttaaattaattttttttaaaaaaaaataaaaatttagatgactttgaccaatcaagaatcgtcacgtagcaatttacttaacactttacagcgagatacctacaaaagtttcagaattataacttagatattattaccgcaaaaaattaaacgtaagtatttatttgcaactattaaacttaagtatctatgccacaaattactctatttccaaacattactaaatataatgataaattaatcatatataaataatataggataatgctttagtaaaggtattaaaaaatgactttatgttagagtcatttttttaaatattgtgtcattattttatttctatgtgtcca

SEQ ID NO: 179448 - DNA, 576 bp, Cannabis indica
gtttcattttgaactcaaggtactattacgtgtctaaataatcagttaacaaaacttaacagaatgtttaatagataacttttgataaacacggaattgaaaatagtatttaccttaaattttattaaaatgaaaattaacagtttaatagcaaacatgatattcaactcattcctcctgtatttgcagtatcccaaagagtcatggagatcaagttcaatgtctactcgtcaagaaagagacagagctaaaagtcctgaacagcattctggcttaaacaaacgcctcttgaaggcattggtcagtatacgtaagtatagaaaagatgccactttacagaaacactccaatgaaaagtaatatccctataaacacatttgggtacaggaaaaaaataacaagttttgaagcatattgtttctttcaagtgttttggtctagttttactggttctttttttgaaatgataaatatgcaaagaaagatatttgtaatgataagtacctgtttcatctctccagcaaatctttcctcctaaggtgtttaaccatatgtactcgaactgattttctggct

SEQ ID NO: 179449 - DNA, 527 bp, Cannabis indica
aactttatatgtgtttaatttatcgttttagaaagttcttatttaggatgttaataaacatacttgtgagtagatctaagatcctggtaaaataatttccaacactttggataaaaatggagagagttatgtctgttttaccgaaggataatatatatttttcagctccaaattcgacctatgccatgtcatcatgatctgtgccacctcattatggcctaggtcgaccgtacatgttcttggacacctaggggtgtgttttgacttgttttttatttgtaaaacatattttgtaggtctcgggacctcaaaatctcatttcgacatttgaaaccctaacgggagacctgcgccatcttttggtgccaaaagatggtataggccggctaaggtttatgggaagtccttaatggtatatggatgctagaaaaatactatggccacaattagttcttggccaattggtgggagagacctatgccgatcttttgggacacaaacgatggtcgacaggtctgccgataggt

SEQ ID NO: 179450 - DNA, 643 bp, Cannabis indica
atagacacatttcatattagataaaagataaaatagatattattatgtccatattttaagtagaattataatgaggacacgtatacaagaattaataataagataatataattctggagatatagatttaaaaatatataaatatactaatttataagaataatatatatagataataacagtcacgatataggatactgaataaataaagtaatctttttgttgaacctgtttataaaatagtactcacaaaaaatagtactctttttatctcaaaaaaataaaataaaatagtacttactttttttttttaaaaaaaaaaaaaacgaaaattaataaataaatgatattttaagatacaaatttactacaaaaaaaatatatattttaagatacaaaatataaggtacgtattaattctaatttatatatatatcatctctcttaatatatttatatgtatatatgttcaatttattatttagtattaataaaaattgttcatttatgcctatatttttatcacataattatctttttaaatttaaactcgtaattattcctaaacctaaaaggaatagatttacactaaccctatatatatatatatatatatgtacaatatatgagtgttatagcataa

SEQ ID NO: 179451 - DNA, 636 bp, Cannabis indica
gaggggaggtggtggggaggggggtaggaggtgggtgggagggtgggtgggaggtggtagactattggtgggggtgacgaccgaggcaggtgaaggaacaagagacccgccagaacatggagcaggcgcataggatgtgacagaataaaccaacaaatcatcatcctccccctgactagtagaagtagtggaagatgaaaaataaggtgtattttctacaaaagtaacatcaatagaaacaagatatttgttgagatcaggacagtaacacctataccctttctgaagacgagaataaccaagaaagacacactttagtgccttagggtctaatttggtgacagatggacggacatcgcgagcaaaacaaacactaccaaatactcgcggagcaactggaaataatgacttattaggaaaaagaattttaaatggaatttcaccattaagaacagaggagggcatgcgattaataagaaagcatgccgtggaaactgcatcggcccaaaaaggtttagggactttcatttgaaacaagagagcacgtgcagtttcaagaagatgtctgtttttacgttctgcaacaccattctgaggtgccgtatcaacacaagaagtttcatgaagcatgccatt

SEQ ID NO: 179452 - DNA, 1115 bp, Cannabis indica
tcaagatccaaaatattctattttattctcacattctagttgctttatttaggacatgagtcgaaatctatagattgggattgctagttggacaattctttttttcttcaacaagaaaataattctacttgtaattttgttcaatctaatagttcttgtaatgatatacacaaatgtcatttacgccttggacatccttctttacagatttttaaattcttgaataaaattcttcattttcaatgattctgactcatctttgattccttgtcatgtatgtcatttagctaagcaaaaaagactactctttaattcggctaacaacatggctcctactgcttttgacttaattcatttggatatttgggatccttttcacaaaaccagcataaaaggttatcgatattttcttactattgttgatgatcacactaaatttacttgggtttatatgcttaaaaataaatctgatgtcaacactatcatacctcaattttattttatatactgaatcaatttgctattaaaggaatacgatgtaataatgcgaaagaactaaacttatcctctttttttacaactaaaggcactcttccttatcactcatgcgtagaaagaccacaactaaattttattgttgaacgaaagcaacaacatattaactgaatgttgctcgttctcttccttttcaatctcgtttatctcttgggtattggagttactttattaatattgttgtatacttgatgaatcgcacaccatctattttacttgactttaagtcttcttttgagttgttgtataacaggttaccatcttatgatcatctccgtacctttggttaccttgcctatgcttccaccttgcatagctcaaggcacaaattttccccgagatctcaggtttgtgcattcattggatacccggttggtatgaaagcttatctttacttgaccttgaaactcatcaaatatttcactatagaggtgtcattttcatgaacatatttttcatcttaaaaatcatgttctaatgacaatattgatgctttttttctaacattaacgattcacctagtgtctttcacaggctccgtccaaagctacagcacctga

SEQ ID NO: 179453 - DNA, 925 bp, Cannabis indica
caattctgttgtagtctctttgtttaatgaattccctttagaaaaaaaattaagtggatggatcaaaaactgtaagataagatagattatatattaattataagggtatttgacattgtggtgttttaataggtacactccaatgagttcaacaatcatatataaacgtccttttggtaggtgtatgcattcttaagaaggtatgtgaaatgattgaagtggtaagtgtagaatgaatgaataattcaacaagatacggcttcacttcatgtatttattttataatcaatctgtcccccacaacaatgtataaaggaaatttaaagaagacggaaactaaaagtgatgatatataacagattaaaatggggacatgagttggcaatcttttatgattggattagataaaccaaaaggaaacctaaggatatttatgtaagtataatattcatttttatatacactacagatgtagcccaactactgttgaccaaaaattataggaaacccaaaatataaaacaaggctaacaaaagcaatgatgtgggagactcccacaattacttattattatttacatcaaccttctaacatatttctatttatatataaactagggaactaagccgcgcttcgcgcggtgttgtctaatttttgtaatctttatatatattgcaattatattgagtgatataatctaaaatataatattttaatttgtgttattataaacaaagtaatagtattaaaattataaatataatttactatttttaaaatatatagaaagatagtgattttatgagaaacattaaagattgtaaaattaacaaagaaattacatgtacttttataataaaataaatgaaaaagttaactatttctaaatttaataaactgaccttgtatctgatgatgatgtagt

SEQ ID NO: 179454 - DNA, 752 bp, Cannabis indica
agccaattactactacaagcaaatcaaactataacatacaaaaatcatcagtcataaatcaaaaaaatcaagcactgatttgcatacctaaccatgttgagaatgcaagatactgcattttctgtaagtgtattggtatttcgtttccaatatcatgatgaattattggaaagaaaggtggccaatttttctcctcaataactattccagctgcaagaaaagggagatagatctatgaaatgactatcacataaataatcattttcgctgtgcacttcaaacactttatgttaaggtaccagccatatttttctatgactagaatgaaagatggtactggtagtcaattaagaagagaaagaaaaaacagacaggatgacttaccccgagctgcagcttcttctctccgtcttagatcctgagcaacaattaagcagactaatgaaattcattgaaaatacttttttaaaaaattaccatcacaagaaattgctatgtgtaaaagtctatattacttcgtctaagaaagaagaaaaggatttattgtttcctttaaagttatgcacatgctcaaacatacatacgacatctttggccaacaaactgtatgcttcacaacactgaaggccaacatcctactaaagaattgagcacccacacttgaagagtttgaaagaaccattccatctttcatcatgaataatgatcatactaagattaaaaaacgccaagtcatatatatgcaaaaatgt

SEQ ID NO: 179455 - DNA, 804 bp, Cannabis indica
aaactactaactaaattaaaatttttagtaaatttttagtcattatacctttctaccaataaaactagctacttttgtactcttcaaatcaacaaccaagaactacaatatactaaaaaataaataaaaataattaatattgaatttaaattttaaatttttaacaaatactataaacttatatatatatatatataaatatgtatggactaaaaatacatatatattatcgattataaggagtctctctcataagactgccaaaaaaggaggaggagctcagtaaaatttgacaacgattaaaaaaattcaataataaatatatataaaaaaaatcaatagcaatttaaataaaaataaataatctaaatataaaatttcccataattaattaataaaagctcaaaggaaaaatcaaactaatagctaaataattaataaaaattattttttaatacctaaataattaatattatcgaaactaaatattttttattgtctaacaacaaataatataaataattttttattatataacaacaaataatctaaacaaaatttttttctaaatatctaaatctaaaactaaataattaaactacaccaaatatttttattaatacctaaatctaaaataaattaaataattaatctaaattaaaatttaaaatatgtattaaataaacaagtatatatgtatatatataacagtatatataaaatatttataaattaattttaataaataatttaatatatacctaaaggaggtggtgggtgttagtggccacgaggaagacgagg

SEQ ID NO: 179456 - DNA, 881 bp, Cannabis indica
attcacccctaaataaaaatatgcttaatgttaaataaaaaaaaaaaaaaacaaccaatatgaagtctacatagagttaggtaatgatgaagaaaaatctactttttctttttaaatttattaaaatatttttggtgtgtttttatatatttattttaattttatatgtttacaaaaaaaaaaaaaagtactagttacttcaaaaaaaaaaaaagtactaactttgacattttgttacaaattatggctatataaaatctacatatatttattagataaggatgaaataacaaaatttattatcctttttaaattgactttattatattactgactatttaatcaatctgccacttttttttttctcttgaaatttttcacattactctcgagattttaatgagatcattttacaaaaaataaaataaaaaaaatctcattttgctttctaaagttattaaaatattttagatgtgtaaatatatatttatttctttagataagaatagatattttccaataaaagaaaaatccaatcatttttattggttcatttctaacaagagtttgtactttgtatgtagttagtattttgggattttgtaagtgatgtggttacacattattggtcaaactaattatctctaaagatctttcctttgttgtttgctgacccagaaacaacatcaagaaaaagcagtacacattgtcaacactaaaaagtttatatttttaaacctgaatttgactcaagccttgacatttctttagtcttttcacaccatggcttttctcacctcttctacaccacaccaattcgccactttcagcataaaccatactcacaaggtgtggttagcagcacctatcttcagcctctg

SEQ ID NO: 179457 - DNA, 956 bp, Cannabis indica
ggtagtaactagttttttttttttttttaaaaaaagaacttaaaaaaagataaataaagaccaataaaattaaatatattttaataatttataataataagaaaaaagttaaatttaaattataaatttgaaccatataataaaatgataagttttgtaaaaaatattaatgtatcatttttatatatatatatgataataaaatgaaattgtaaaaaagagaaataataaaataaaaatattttgataataaaatgaaatatttatgtcaagtaacatgtttatatatttttttttgaatagaataaaattctcattgttaaaagtcaaagttaatctcaagaactcaaagattatcagataaatctaccacaacactcttgcctcatccaaaaacaaagtgagctaagcaagattgtgagctaacaagttagcacaatgattacaaaagaaaagcttagagacattaatacaattactttaatagaaattacacaatatatgagaaaattataagaatttacttttttatggcacaaatatataatatcatggggttatgtgttttttctttttttaactttttacatttatatgggctttttcatgtcatatttttataaaaaagataaaaatatcatatttgtaaaataataataaatttcttcaaaaaagtcaccagcgccaaaaaagttgcaggtgccgaaaaagtcgcaagtatcgaaaaaatcactgaaaaagttagtgtcaccgaaaaagtcactgaaaagtcactgtcaccggaaaagtcaccgtcgtcagaaaagtcactggaaaagttaccagaagtagatgtcttagatataaataaaaatagaaccggttttataacataatgaataaaaataaataatacaaaataactcaaaccggttataattgaaatataactagttctgtaacataatgaataaaat

SEQ ID NO: 179458 - DNA, 507 bp, Cannabis indica
gtactatttagaaaatacagggtccattttatcatttaacaaaacacaaggttcaattggtaacttttgtaaaacagaaggtccaaaatagtatttaccatgtataatttataccatgaagcaaggttggtaaatgagagtagttaatatacttaattatatatataaaggtagttaataagttagtgagatgattaataaaaatgttgcttcaaaactacataacaagaaacaactaggccggaggatagtcattttatttgtttgttaggttaaccttttgtaaaggggtcgtcatattattattattattatatatagatatgtacacatatgcatacatgtagctggttttgattcatatatgtatacaaaaataaaggatcaatggtgggacaagtaagcacatgggattatttgcttatatattacatgcacatgaaagtttgttgctttaaaaatatattatttaaaaagttggtttaaaaagttattatattatattat

SEQ ID NO: 179459 - DNA, 971 bp, Cannabis indica
ctactaattctttgattccagtttattgctttcttattctcaactctttagttagtttgccggatgaatgaataatgatgtgatattataggtcgtggagagagaggctgaagctgggggaaagatcggtgatttagactcctatgagattgaaggtggtgagacaaagtcagaagttctccagaatctgaccgagttccagttttcttgtgtatgtctctttttcaacaaaacttttactttaggctggccatgagtacataaattaggagaaactattttaaagtttctagccatgatatgaagttaaatttaaaggcatatcgcgatgcacttttttcatcacattaaatgacttctggtgtacctactttgaattatgttttttttatagcgtaaagcaactataatctgcttaagacattaggcacccatacaattggaacatcttaatttagacattaactgattcctgaagtttctttatgccttctgttaattcgtggagaacagttgtttttttattgtgaaaagtatctttttttaattattttttctcgctaacaattttctatccaaatgggttgaatatcatgaaatgtgaatctgaatccttaatggaggctattaacctccaatttagctgtgagtttttggcatggttggtgcaaaactagtattagttttttttaaaggatatttttcttaagtctaaattttgaactggttatggtctgcatactgtctttaaaactattctacatgtctatcaggtcttgttcaacgctgtgatggagaatgcttgtagtgagcaaggggcgaggatgtctgctatggatagttcaagcagaaatgctggagaaaatgcttgaccgtctcacacttactataaccggtatatatggctctttcacacttttgacatacacttttaaagctttttttgtgtggatgagatgggtgcttttggg

SEQ ID NO: 179460 - DNA, 543 bp, Cannabis indica
gatagagtagtgcccacacacatcaagtaatacctcaatcatagttaggaaggctgtgtagaattcagagacaacaaagaaggactatcgggctcagatcttgattatactctgcgacagaaaggaatcaagggttagagatctgagtgggaggagacatatattccgctgcacccaatgtaagatttctgatacttttatgtgtttaattttccatcgttttagaagttcatatttaggttgttaaatcaacatacttgtgagtagatctaagttcctggtaaaataacttccaacaatacattatatgcatataatcatgaaataaatcatgtgaaccatgcaacataaaaatgttatttctgatctttattaataagtaaatctgattatattgaaatgggttttatttagggcataaatccaacaaagcaacaatgactcgaggtaaaacagaggtctcgctagaggaatagaagataaattttgggattaggccaatttccatatcctacataacgacatttaccctcgttatctcgt

SEQ ID NO: 179461 - DNA, 688 bp, Cannabis indica
ataaaaaaataataaatccataacaaacgtaaaatttttgtcatttttaatatttatgaaataatcttttttattttgttgctgacatattagtggtgtaaattttgttatagcaatgactatttttaaattataatgtaaatctgaaaaagaggagaaaaagttggtatatgctagaaacaaatatgggtataataaagggatattttcaatgtaaaatgacaaaaatggtattagctagttgagagacacactactatgtgaagaggctccaactctcagtggcaaagcaagggggcaaggggcaacgaggcaagtggacaagtgcggcgtcgggcccatttaagattgttatttgattatttttattttggtcttatgctactattttattttctttttctttttctaaatcccacactttttgtatgtctatgtccatttagttttattttagattcaaaaactataaatctaatatattctttcaagtttcaacgaacatttgaccatttttatccaaaaataaaaaatctatgttaaagaatttttgaaaaatagtaaaaatgattaaaaaaattaaaattatacaaaacagaatattttgatccccaaatttatatacattttatacacactaatataaatagtgtttaaaaaaatagttataatttattcccccaaccaa

SEQ ID NO: 179462 - DNA, 647 bp, Cannabis indica
aaataacaaaaaaaatatggaaagggagaaaaaataattatacttggaaattcgagagtttattaaattggagttttaatcaataatattagtgttcgatgaaaataaaaagggagtaggagaatatgagaagtttttgtgaatgggaaaataattacatttgaattctattaaatgtgaaatatacatccttacaaaaaaaaatgacatataaaagctaaaaaagtgcgtgagaataaatttaaattccaaattataaatgaataaataattttagacataatgttaaaacataattttattttagacataatttttcaactttttattgcgctagtttatttattgttctaaatcaactatatggtgactcatcttttggttaaataaataaatagtccttatggaaagttattaacaaaatatagtagtcaaagtatcacattgtattcatctttctcaatgagcttgttgatcaataaaacttctcatccctttcctttaagcctattgcttgggagtttttatttggggcctttcttctaaaattacaataaagacagtgattggctaatagtgaattctcagggtggtatcatattcgaaacttactcctacacattcagcaaaaaaaaaaaaaaaaaaac

SEQ ID NO: 179463 - DNA, 821 bp, Cannabis indica
gttgtcctgcagtacaatctagctgatgctacaaaagctaaagtatatccctaacacatcatacatttgaatatatatttcttactatcaattcttacttttgagtatcatagaaagagcaatctacctggcgttagaaatatttgaaagataagaggatgccgattccatgcttagagctatatcagcagatatccccaacctagctagatggtatctcgtaacttcagctcggatagctctcttttctattactaatgcttttagtcctcggaattcagaaacaactggatcattttgttgccactttgtgtctaaagaactggtatctcctttccttaaagatccagtaaatgaaaaggtactgccagtgtcctgttcactgacaaatcctatttctccatccatgagttcaaccaaacatttactgatactcaatcctattcctgttccaccatatgttcttgacgtggaactatcagcctgtacaaaaggtgtaaaaatgttacgttgtgcattctgaggaattccaacaccggtgtcttcgactgtcaccagtagcttaatcctatcagattcatctcctgttgagctgcttaaatttttaaaatgctcccaacttttccatctatgaaccactcgagaaccactcaatgtattgtaggtattgcttgacttaatcttcaactgaatctaaacccctgtttaacgcactgtgttccatagagtcagctgggcatttaaacttcatctgctagatcgcaccgtgacgaaatatgtgtccgttgtcagggatgaactgcaagccatttgatatttgc

SEQ ID NO: 179464 - DNA, 543 bp, Cannabis indica
ttaacggtaaggggtaggtaattagtaggtttttaggttttttttggtttagtttacttttaaaaccgtttaaaaaacgtactacctaccttacgtaagttaatttaacctttaacctttagtcgaaacgaaaaaagtttaaagtttaaagtaaaagttttggtttaaaaagtttaaaaactttttaaactttttaaaactttttacgttacgaacctaaggtttaaagggttttaaacctaccttaaaggtttaaaagggttaagggtttaaagggttaaaagtacttcgttggaaccgtaacgtgtaagtaggggtggagaaatagttagtagatatgcagttcaaagatcattaaattgatttttgaattatatccaaacttacctccccagaaatttcgagttgcatattgatgattagttactagtcgttgcctaaatccttctatggtaatacaatttcagaatgatgtaatggttgtatacttaatgtaaatcattactagattcatggatgacctaatcaaaatcttaagaaaag

SEQ ID NO: 179465 - DNA, 581 bp, Cannabis indica
ataaaaaaaaaaatctataaaccgaccaacggtttgggcggtttggtcgggttaacccgcccaaaccggccaaacttttttttttttttagttttaaagtcaaaatcaataaaaattaaaaagataaattaaaaatatcacattccaccaaagtacaacaccatatatatggctttaaaactagtaattaagtatataactttatattattatatatttaatcatttatgttatatataataaaaactaaaaagttaaaaaaaaaaattaaaatgtgcaaaatcgggttggtcgggttggtcggtttaattgggcgggttggacctattttcaacccgcccaattaacagattgggcggtttgtaattttttcgagttatttcggtttgtaatttttatcggttttttcggttcggtttgggcggattattcggtttgggcagtttacaaaattttttgtacagccctagcactaacattgtatttttaatatttgtgttttccacatttagcccattgttctactgaaatatcttatcaataataagataagtagtataaattgtttatttttttttttt

SEQ ID NO: 179466 - DNA, 800 bp, Cannabis indica
taattaatattattgaaaatccaatctatgaaaagagagaaggattatatatataaaatataaaatataaattataaactattgagtgaattagagaagcaaacatatatgtaaaacttattaattacttattaaatactacgtacgtacgtgcatataagtatatgcatataataattaatatacgtaagatgtgttatatataattttttttaagaaacaattttattcatatcgatctgtaatttattcgggatatttctttattgaaaacacaactagaattagaattaaaaaaaacaaaccaactatttggttccaatgattctcgaatcgatcgttttacaaaaaaaaaaaataaataaagttagataaaaaaaattgtaattttactgttatatccttaagaatacttatattattcagtttactgcaccgctcaaaagataaaatatagtagatatgttctagcaagttattcaaccactcttatcattacaaaaaatcttacttttagttgcaatataaaacttgtaactaaaagtaaaaatattgtgactaattataaactcatatattagtcacgaaaattacaatttgttgtgactaaatgtattttcggtcacaatacttgatgtgagtaaaactaaattagtgaaaacttgtatctaaatactatgttttaatcacaagtaactttttattgtgactgaaattcacatttagtgacaaaaaatttaggttattatagatttatgttatgactaaaaaattgtctctaaaagtatctttattttagt

SEQ ID NO: 179467 - DNA, 764 bp, Cannabis indica
gaatatatcaacactatcaaatatgtaaaaactaaaaatgtgatatgatatgatatgatatgatcacatcaaccacaaatagcttaagcttgggcaataataataataataaaagcattgattactttaatgaattcccaaccaacattaccaccttagtcaacaaaccattatctcaagaaaaagaatggaatttcaaaagaaaaagaagaacaacaagaaaaggagaagaaaagaaaagaaaaataccccatcaacacctctatctctgttgtctcttttgctttgctttctttccaattaagctccttattagtttccttttacactttcacacttctcatctccacactcatttacctccaaactcctctgtttgtaccttgtttttttttttcacacctgttcttcaatccagctaaacaatagttgtaacttgtaatatattttgttttttgagcttttttgtcacagctatctggatactgtttagatattaattaccataattgagttttttttgttgtgatttgattttaagcttcccttattaagttggtcagtttagtaacattattagttcttaaaaaaccaaatctaatagatgtattcttaggtaatagatttcatttcaatggggtctttaggaagcccaaaaacatgggtaccataccttaacaacaaagattgttcacaaggcttctgtagcttatactgtccacaatggtgttacatgatcagtccacctccaccaccattagatt

SEQ ID NO: 179468 - DNA, 552 bp, Cannabis indica
ttttttttcatttctatttttttgataatatgaagtacttttttcatttgatcacattattatgatatctttattggaaaaacataagagaagataagaggaaaagaaaaaaaatggaaacattgctttcttggaccacatttgtgcagggacaatcaatttgtagcagaagcatttagatcaatccttactaccacttcttccttttcttacaaaagtacaataccctaatattttgagtaaggtctaaactacgaaagtaaaaatcataccaaccaatgaaactacggaaaacataataatggaaatatttttactttaagaattaagagatccaatttaagtttctcaacttgcaaattaatttttttttttctattttatagtttttctaatgattatatacaatgcaagaagagaaattctttctttctttctttgattgttgaaaaagaaagaacaaaaaaaaaaaaaaaaaacaaagctaatttatatgattttccttatatgggaggatattataatattgaatatatgtgacttatgttttaa

SEQ ID NO: 179469 - DNA, 992 bp, Cannabis indica
ttcgacgtccgagggttggctcttggtccaagtctagatctcggtctggatctcggtttgggtccaagtccgagtccaagtcttgggtacgggtccatgtttgggtctagttctcggtccgaatccaactcccaagtttcgatcccagtgggtatgggtctgggtctgggttcatgtctaggtccgagtttgggtctgggatcgggtcccaggttcacgtctgacctgatctcggacccaaaactggaatcagactaggactgggactagaacccagatattggaccgtaacagggccaaaacctaaacccaaactcagaccagaacccataccggcacttggacccagaccgcgagctgtgacctgggacctaaaccaagaccgggacctagatacagaccaaaaccaagacccaaaaaccagggccgaaccaaggacccaagaacttgactcagacctaggacccgaaacccggaccggactgggactgggacccaaacacggacccgaacccaaacaaagatttggactcggactggacacgtacccaaacccgaaaacgaacttggacccgaacgaggacctaggaaccgaacatagatgggggacccagacctgggaattgggcccccaaactaggaccagaacttggatagggatctgtgacccgaccccagacccaaacctggacctaggaccaacctcgagacttgggattccgaactcaatgcttggacccgaccagtagtcggtgtatagatctaggacttagaccagaacccgaacccaaactcgaactcaaacaaggacttggacacataccaagtcccagacccacactcgggaaccaaaacaatatcttgaactggaactggattgggatcttggaacaggaccgggacctggacctagggccgaacccggaactggaccaaccttcagatcctaactgagaccgaaacccgaacctcaaccacgccccagacccaaa

SEQ ID NO: 179470 - DNA, 634 bp, Cannabis indica
agatcatttcttaaggtgtcaagccaaagatagtataataatatattggtataatttaatattacctcctacatattttaatttaattaataatatataaaattataaattacttataataggctgctttagtataatattgaacactttaaggtacatataataaaaaaaaatattagtattgggtaatagtggtacctagcattttttagaggtatcgttctgcgattggttagcaatactccctaaaagttattagaggagtgctaattacaacttcctattacaacctcttagtcaacctccacgtccgaaatcacatgtcggaatatttttttttaattttttttcatagagattttcgttatagttacaacaatatcatctctgtaaatttttgaaaaattctcaataattcgcagtactgaaaatagtgttcttgatattacagtctactatgggtgtttaaaaacttcaaacttattttcggtattgtaaactattcgatttttcaaaaattgacatagatgatgctgtaactataacaaatatcatcgtgaaattttttttgaaaagaaatattttgatatatatttttgagtatagaaatagactaagagattataataagaga

SEQ ID NO: 179471 - DNA, 925 bp, Cannabis indica
ctgattaaaaaaatgaaaacagattttaagttatgaactgaaacaattccaaaatttctcatatatacttcttttattgtatatataatattactcatattgtatacatatgtttttctttttttaaaagaattagaaagaactgcaaacattaatgcatataatccatcacaatataacaaaaaaagtagagacggctcctccaatgaaatacactttctgaaacgatcaaagaataaatatataatctacttataattttttgagttgacttattattaattatttgattatgaccatccattattaattaataaatatatatagttttatacttcaaaatataaatataatattttgattttagtagtatatatacattcattttataagcttttctattatattttgtgtgttttaactaaatagttttggttagatatatggaatgataaaaggagtacaacaatgctgcattctatcacataattttaggtcattgatggctcgatcattggcttcacgtccagaccccctccatgctttcacttccaaactaataaatgcacatatatatatatttatatataaatatatctgtctaaaaaaaaaaaaaaaaaaaaaaaaaaaaaaaaataaaaaaaatgcacatatttatgtttagtatatatatacactttatctatataatatatatcacattatagcctagctatcctttaaaaatttgtttccttctcttttatattattattaattaatgaacaaggatatatatatatgtattaattattagatagaagatataaattattatcattattatctagagagaccaaaatcattattatcatatcaacgttgtttggttatttcaattaatcagaccgggtagtatcttaaatatgtatacatgtatttatat

SEQ ID NO: 179472 - DNA, 631 bp, Cannabis indica
gtcacaacactagccttggttagaacatcataaaggtaccttttacagaaaaaatacataagttagaaactcatgcccaaaggtgtttgaatgggacagaaaaggaggaagaaaaagaatgaacagaaataaaaggaaacaagtaataatatcttactctgatgcagcacgacaatttggtaaaaattccaaagcatccaccacaaaaactagaccggctgcttgaggcaaaaagtcatctaacttaggtcgaagacgagaatgcccaggaacatcaacaagatgaactggcttcgtttttccattctgttaagaaaattcataataaggaggacggggaatagattattatggacatcacccttctagaaataaagaaattgcagttcattgcatacatttacatgtacaagagaagatgcatatcaatatatcataaactaagcatccgtctattacaaaagacaacattcgggggcaaagatgtcttaacagaatacactatatttccttgtgtcagttgtgtacatatgcagtacatagtgaaaaatgagctaaaatatgtgaaaatgagctaaaatatgctaccttgtttttctcagaatgcagcacaaaggtgccctcgttggtt

SEQ ID NO: 179473 - DNA, 560 bp, Cannabis indica
ctctctaataatttagattccacgggtggattattcgtatatgttgtttgaccggtggtacttggtttcgaaggatatgttgataatgaattcacgacaataataataattaacttcattgttatagggaatcgattttttacattaaacacagttcacccataattgactagcactagcagtggtactcttaatttataagtatagtcttggaaatatatataaagaatatgattttagagtaacaagaaagataatgctcattatttaatcgataaacgtgtccaaggagtgtgcgtttcaaggttttatgaaaataaaaacataatcatattaaaactttgctccattggaactgatgagtgagtcttaaaaagatgttgttaaaagtaaagacaatttctgaagggcacgtccaaataccgaatcagaaagttcctttaaataattctttgttatgatcttcaaacatgaatatgtaagagattaatgatgtcatttatgcccaattcaaattaagctttacgtggtgaataataaatatattgagaagatgtgtc

SEQ ID NO: 179474 - DNA, 714 bp, Cannabis indica
gattggagggtcccaaaggcttcttcttctcttgttttttgtcattgtcttatgtgaatttttacatgaaagattttttttttttcaataaataaataattaaaccgtacacgtaaatagatttcctgatgtgtgggtgcctggtgggacacaatttttagataatttttttcagcaattaattaataattcattgaaaatagatcaaaaccctttataggtgtgtgtaagttgttttttttttatttaactaaaccttttattttttaaaaagctaataagttaattaaataaatatttattggttatagttgatgcgaaagctttctgatccacttaccaaatttatttttttagtagtagtctttatttgacttgcaaacaaataaatttagtgagtggtgaccgtgcgtattaataatatttatatgttaatcacataaaatcaactgaaaatcacataatcaaatatgcattttaccaattacaaaaatatttatgatcgaatatctaaacatgtatatactacgtacaaccaaccaattttattcataacaaataaattgaaagaaacaaaactattggtcgttgactgtaattttttaatttatgaaagaaaataataaaaaaaaagactaattcttgcatggaagtgaccaaatgaaatgcaaacaaagagctatacttttgataaaagcttacgtgtgtacagac

SEQ ID NO: 179475 - DNA, 774 bp, Cannabis indica
atacatatcttgtcatggctgctatgttccacttttgaatgttctagtccagaccaccagctcctttaggtaggcagatatgcctcccaagccaccaacccgggtcctgcacctgcatgagtccctttccataggaagatcagcaaattgcctcaatttctttggtaatagcataatctgagccgaatatgcatgtatggatatgagcacaacattaatcaaagtcgctctccccatataagacaagttttgggtgctccgcactcttatcttaccaaccattttctctaggataatttgacattcagcagtggatatcttctttgagcagatcggtattccaagatacctgaatggtagtgtacttcttttgaattgtgaggcctctagaattcttcccacttcattatttgacatgccagagcaatagatggcagttttctgttcatttggcatcagacccgatgtagaagagaatagctttagccgtctcaacatcagcatgattgaaacaaaatctccatgactaaacacgaagagatcatctacaaaatagaggtgattcaatttcaaagatgaacatctttcatgaaacttaaaaccaggccaatcaccaaccttctgaaatatccgagacaagtactccatccctaatacaaagagaagaggagacacgagatctccttgtcttaaccccctctttgcattaaaaaagccacacatagagccatttagtaagagtgagaattttggtgtcctaatgcaaatcattat

SEQ ID NO: 179476 - DNA, 1087 bp, Cannabis indica
taggcatgcgggttcacgtaaaaatgcacgtagaataccaaagggagttattcatgttcaagcaagtttcaacaatactattgtaaccattacagatgtacgggggcaggtaatttcttggttctctaccagtacttgtggattaaagggtacaacatttctagtagcccatcacgaaagaactccacagttaaacgtgcttgacctggggtaatttcaagatgggtgacctcctgggaagttttcccaagaagcgggcgagtgagaacaaagcacgctagaaatactcgtattggtctgtagggccagtcgttagttgaggaagcaaccagagtgacccactcgtgtataaaaaccataaatctatggaggaaggcccaatggaagcatgaagtggggatgttacaaaatggtagtgtggtcgtcgaggatgtcggaccccataagggggtgactatgacagtcagtagtcccgtgatccgtaaggggaaataccgccgggtcagttgtgtaatcccacatcgcttggggaaggtcaagtgtgatgattctaagacggtgtaggtatgggactacacagttgaagagggcttaaatgaattgattggtactacctatatcaacaagatgcatcttcttttctagtagcccatcacgaaagaactccacagttaagcgtgtttgaccaagggtaattttaagatggatgaccttctaggaagttttcccaagaagcaggcgaatgagaataaagcacgctggaaagactcgtgttggtctgtagggccaaccgtcagtccatgaagcagccagagtgatgtactcgtatataagagccataaatatgtggggagggcccagtaaaagcttgaagcgaggatgttacattatttttgtgagtctaattaataaatatatttaaattttatttttatttgataattatttataattattaaattaaaattattatttaaataattagaagagataagtggtaaaataggaaagataaattatttcattaaattgaaatagagtggcaaaaataaaatccatgggtttccttatgtggaattcgacccta

SEQ ID NO: 179477 - DNA, 572 bp, Cannabis indica
attactctgttaaacacgtcttaccaaattcaagcccatataaaaatgaattgatttatttaaaaaatatcaaattgagtaaagcacgacacaaaaatattaaaattataaattctgttggacttatttttaaaattgttcggcataccgttgagaagtggtgtatgtgaagataggtggtgttggaattatacttcaaatggttgctatactgtaaaaaagtggatatgcggtagctcttgatatggtgagtgaaaggaatggatgctcttctgggaatcaagctcaattgtggaatgggatgtggaatttaaaggtacaacagaaagtcaaaatatttttttggagaatgtatcatcaggctctcccaacttatcaaacgtagattcctattcagccggtgtgtcacagatgtggtgaggatacaaagactccagagcatgctttagttttttggtctacattgcttccaatatggtctaagcttcggatttggaatctcctatactgtggtaggaatgggtctttagcggagttgcttgtttatctctttgatgagcttgatcagaata

SEQ ID NO: 179478 - DNA, 730 bp, Cannabis indica
cttggtaccaggacctagacccgaaccacaacccagactcagaccggcatttgaaaaacccgtacccgaaattagaattggaactatgactaggaccaagacctaagaccagaactgaacccaaaccataactcactcaaacctgaacctgaactgtgactttgactaggattgggacctgagacctgggacccgatccttgattgggactcggactggcacctggacctggacctgacctagtcctaaaccctcgccgagttctgagacctacacccagaccaggatccagaccctgacaaggatcccaacctaaacccagaccaagacgtggacagagacctggacccgaacccaaaccgggacctgaactaaaacaaagacttaggacccaaacctgaacctggacctaggaaccggacttggatggggggacctagaccagggacttaggccccaaaaccaagacccaaatctaaatccagtactcgaaccccaaccaggacctgacctggacccaggaatccgaagtcggacctagacccgaacccaaaacatgccccggacaaaaaacaggttaggaatatggacacaaacccatacaatgattaaacccgaacctggacccgaaccaaaaatcaaactcgaacccgggacacgaactcagacccagacccagaataagacccaaacctagatctgcacccggacccgcactcgcacgaagagt

SEQ ID NO: 179479 - DNA, 1260 bp, Cannabis indica
atggtttacatcctagtttattatgttgttttgggtgtccggcttgacaatttcacttgtttcaaaatatgtttcttatttgtaagatgagtttaatctttgtcttgcaagtgctttgtctgttgatacttgatactaagactgacattcatctttttctattttctgaataggtcattatcaactctgaggtttgggatcttagaaagtatagactcctccgtagtgttccttcactcgaccaaacatcaattacgtttaacgcacgtggtgatgtaatctatgcaattctgaggagaaatcttgaggatgtaatgtcatcgttcaacacacgtcggatgaagcatcctctgttttgtgctttcaggacagtggacgcagttaactactctgagattgctacaatccctgtggatcgttgtgtcctcgactttgctgcggagcctactgattcttttcttgggttgattacaatggatgatcaggatgagatgtttgctgcagccagggtgtatgaggtcggtcgtcgaagaccaactgatgatgattctgatccggatgatgctgagagtgaagaggaagacgatgacgacgatgaagatgatgatggtgacattgatcccttacttggtccagatcttgatggggatggggataccgacattgatgatatgagcaatgattctgatgacgacgatgatgttgatgtttgacgggtcttgaggatgacgatgatgacgatgggggattagtgtagatttcggaggggggccctgggattactggagattgtaacagatggtgatgatgatgatgatggagatgatagtcagttggtggagtcttttagagtgatgaggattatgtaggaaacggttttggttactgaatataaggttacaaattggccagggaagggggatattactagttagcgagattatgtaaattattgttttaccggggctataacccatggttgtttttcttcttttcataattgataaacaatcttgattatttatacaagtattcttctgttgattactatttgtgtgtgcttgtggtgacctaactgggcccaggtgttatatggaaatttaagtatgcatgttattataccataattaaatagtaaaccttgatgcctaagttataccataattagtatgctaaactttaaaactctctaaaaactgtactttggtatacaattgataaaattgctcttctcaattcaaacactttctttattttgtc

SEQ ID NO: 179480 - DNA, 620 bp, Cannabis indica
aaataaacatttgacagggaagagagagagggaagctttttcagttttttctagagagagagaggtgcacgagagggaagagagagaggaagagagagggaagagagagagggtaagtttttttagtttttaactaattttttttttaattttttaaaaaaagggtaaagtgggaagttcatgtaatcaatggaattaatttgtacaaattagtgaagggtctaaattttgatattgggggttttattagggataaaaaatgaaatttcccttatttaattgcttgcataagtcagggacattacaatttaactaatcacacaaatcaggtgcattaagatttaactgctcgtgtaaatctcactgtctctagtttacatgttcatgaaggtaggcttattttgatgtcaacaacatcttttcccttcagtattgtaattactcattgacctcatcggcgaagcactttttgattaacaacttttgaagttactcatgctagtttgttcaccatgattaccatgatgggtgctatcatctcttggaagagaaacctcccttgtaagagaccttgaggattggctttgtgtatggcttctccttgattcacctatattggt

SEQ ID NO: 179481 - DNA, 1262 bp, Cannabis indica
atgatcttagggtgtcttaacattttcatgtatttatattgatataatttaatagcgttatttaaatttaaatttaaatatgtgaaattgatcaatgttgatttttacgatattagataaactgaatgaatatgacagaaagaacgatttacgaatgttagagatatatagtacactagaattaatagaatcaaaaaccaatgtgagggtactctaaattttaatgtactaaccttaatgacacaacacatgtaaccccaatataacatattaatttcttatataataacatatggtgagacatgcattgttttctttttcccaactaactaaattattattgttatgaagaaagttgtagggatatccattctttggataaaattttatttcttctatttgttaaaatttagtaatattattatattaatgacctttttaatttcatgtttaaacatgttgccgattatatttttattttactaatatctactctctagtcagttaaaatttagtaatattattatattaatgacctttttaattttatgtttaaacatgttgccgattatatttttattttactcatatctactccctcttgtcagttagccaaaaaaaaaaaataaataaataaaaattatatactccctatagtcactagacatatactactccctctatatagtcactacatatatacattgagacaaattgcaatagaaattaattttcttattatacttaattgttggaatagtttatattcttatatatgattcaataccttaccatttattttatgtggaacaatatctacaatatttaatcatattaattaaatttataactgacaaattaggaatttttatatattgaataagtttgtatttggttggaaaaaataaaaatataagactataagtgggaatagaaataggaatacgataaatttttaatttttttcccttatattgtaaatttagtgaagattaattcttttcattttattacgatctcaaaacacaatctaattattatagttactaaatttatattcttaattacttaattataaattgagatgagatttatttgttgtatatatgtgaattattatgataggtagatttgaactaagcaatttaaattacgtgaatttattatatatatattgctgatatgtgtcattatatgtttttatattatatcgtaatttgtaaaaaactagctgcatagcaacttttttttttaaaaaaaaa

SEQ ID NO: 179482 - DNA, 587 bp, Cannabis indica
atttcataagatcactacaagaataaaagaccgtgtgaagcgacggtttagttaactagtatatatataggaacatgatttttgcccgttagatgtactttcacgaaatatatttcgtggtacaataaatgggtttctgggtacattagataggtctcaaggtaagttaccatttttaaccctaattactccttagatcaaccccagtcctcagatcaaattacctcccccatactaacggttggcgtacatcacggaatacattccgtaaaagtacatcgcggaacaaaatcatgtccctatatatatgtggattgttattaggtatgagtggtattttattaatttttagatgtgtccgttttgtgagttagttagtgattattttttaaaaattagtggtcttttttatttttacacttacaaaatagtttttttttttttttttttttgcattttttacagaattctacatagaaactcatattgcaactagcgctgcaacctaaattgtaacaaaaaaatcgtatagaaactcttattgcaactagcgctgcaatcactttagaaacctaaactataaattt

SEQ ID NO: 179483 - DNA, 679 bp, Cannabis indica
catacttggtagtaaatttagatcatggtaaaatatttccaatacttttttccttgatttcctggtcttaatggcaaacattttatcaataaataccttggtgtgctccagtgtttttcttatttgaaaaaatcttccttccactatcttcttcaaaaagccaatagtaaactttctgtttggaatactaagctattttctaaagttagtaaggaaatccttcttaaagcgattatccaagctatcctttctcatgccatgtcctgctttagacttcctttatctacttgtagacagcttgagaagcttatagctaatttttggtggggctatctttggggaacaatcataggaaaattctttggaaaaatggtcctttctttgtaaatccaaatttgtcttggtttctgtgctattgttcaccacaatcaagccatgcttgctaagcaggcgtgacagatcttcattaaccttgattcccttctggccaccttccttaaagctaaatatttcaaaaataatgattttctccatgcttcccttggtcactacccttcttttacttggagaagcttgctttggggaagggactcttatagggcttagtctggaaggtgagaaatggcaaatctattcaaatgactagtcctaattggatcccgaacttgagagttgtatc

SEQ ID NO: 179484 - DNA, 631 bp, Cannabis indica
agaattgagtggaccttcaggtaccatcctaataaaaagggcaaaagtacaactaggaattaaagtattagaatggctacaaaaaataaaaaaagtaacaaaaccaaacccaaaagaaagtgacaaactaatggtctctcaagagttaacacatttttttttctttttatctcttttttttttaaaaaaaatagtaaagtaaaaaataaaaaattccattatttttgggaccatgacattgttccctaagtactaattctttcttcattatgttctccactaaagggaattgtgcaaatcaccataaccaaaagtaacataaatgctaggtgatttatcaaaaagaagaagaagaagaagaaaggtaattaattaataaacaactacacttaattctcattaagcatacaataaaataccatacatgccctttgaaccgttaacaaaaaaaaaaaaggttaaaaatcatttttaacttttctcttgttttctgataattaaactatgggaatgggggaacccacagagattacacgatgatgaggattgaggaggccaaccccaaaatctccatacaccaaataaacaagttaaaggactactttgtcttcatagtaggaggcaaagggca

SEQ ID NO: 179485 - DNA, 649 bp, Cannabis indica
cagaggtagagcctagcctagcagaaaggctactttgctaatcttcaagtacatttcttgcttaaaaaaggttattgaataattgctcgttacaaagtcaaatttaaaatttactacaaaagttagctccaactaataatagaattattttacaataatgcaaaacaatgatatggacgttatactacccaatatatgttcatatatatattagccattgatggttagtaaataaatttaactataaatattaattttaaaaatattaagccattagattgtgatccgatagcaaataataaaagaaaatttaaatttctacacttaaattagctacttaattaaagaaaatatcaaaaaatacatctttttacactatatcaaaaataagtttatatgaaaaatatttaagtaaaacttaatattttttcatcatttttttgccattttttttttcactcaatggaacaacctgagctcatataatgaaaaaaaaagagattttcctaattaaatagaaaaattaagcataaaaacttaatattactcaagtaatacctattaaaaaaacactattaaaaatacgcccgtacatatattcatttacatgtaacataaaatacacatgaaaatgaataatattagtaga

SEQ ID NO: 179486 - DNA, 665 bp, Cannabis indica
agatctatttgttcgcaaaagcactcgatggagtttcttctattttaacttttttgaaatatgttatatatttaatgaatccaaacataatagtgtaacattaattagttaagtttttggtggttaaacccttttaactgttgtttcatttgtatttaatcatttaagtttaattttggcgataaaaccctccaaactattacactagttgcaaattaaaggtgtcatcgttaactgccaccaaaaactgcttatgtgtatatttttgtacacgtgacacgtttatattagtacacttaatattattatttaaaaattattttcaaaatttatttaaagttgaataaaattataaaaataaaaataaaatattaaaaaaaataaaaaagaagtataatatttacaataatttttataatttttaaataataatattatgtgtacccatataaatgtgccacatgtataagagtgtatacataagcagtttatgttggcaattaactgtggaaaatatatgacaccttaaatttgcaaacagttcagtagtttgaagggttttaccgtcaaaatttgagcttagaggatttaagtgacaagtgaaataatagttgagagggtttaaccgcaaaaaattcaattaagttatgttgctgaaacaaaat

SEQ ID NO: 179487 - DNA, 780 bp, Cannabis indica
tttaattttattatttatataggaggatgttgagtttaattaccagcttataaaatacaaaacttaataattttttttttctagagttaatttaaaatttatcatagtactccttaacaaaaaaaaatttatcataagtaaaaaaagatatttttttttttatttttacattttaaaatattttctttttacatttttttaccaaaatctatataaaaattcacacaataactaatgaactaacataacaattattggaccaatcaaaattataaatttaaaaaaattaaaaaataatatataaaataacttttttaaaaaattaaatttgaataccaaaaaaaatataagagataacatttacagcaatctgtcgctctcacacgtgggaaatatttggaccgtttaaaacttaaaataacctttaaaagtggcaacccgtctccacctcactcgtggcgtaaatttccacgtcatcctcttggaaatgtaaaattttatatatttaaaaagaaagcatattcaaaatttaaacggtcggattttttgacatacacgtaatcacagccgtttgatcctcaatcatgttcgacgtttaaagcttgcttttctttacatctcttagctgtccagctaaaacagtaaaataatggcaatatgttttttttttaaacagagaatctaaagggacaggggaagagagagactgacattttcttccatttggagagagaaaataaagagagtttgaagatttttcaaatacaaatttgattgtct

SEQ ID NO: 179488 - DNA, 798 bp, Cannabis indica
gagtcacgaagaatagcagctagtccaaaaataccagtgtttgacatttcacagctgcatcagtgttttaacttaagcctgcctgaaggaggtgccagccattttggcttaacagtaggagtagtgttatgttgagcagctacaggtgaacctttgaagttgagggcagtgagaatctgagaagattgagcagttctaaaatcagcaatatagttattagcaaattgccaaatttgcaaagcagttttaggagtcttcgaatgagtctcagcattccttgctgtccaaatacaccagagaacagtgatgaaaagttcaaccttatccgattgcaagagtgaagaaacatagactaaaaagtctgagaaaggacaagtttttgataaatgccaattaatgtcagattcccaatttctccagacctgtctagcccgattgcaccagaataaagcgtgattaactgtctccaaatgtatttggcaaaggggacattggggtgtggatgatatgtggcgatgttgcaaagtagcagcagttggtaaagcatcatggtaagcacgccaagcaaaaattcgaattttggaaggcaatttaagaccccagaagtattgccaccatgttgcagatgtgagtgagctgctggggagagaagagacaggttcttattatttaaatattatttcttatgttgtttttgatgttgggttttcctattaatttttatgtgttttttttttgtgtgtatttttatagaataatgtaaaaatatatataaaaaaaaacttgaacgtaaaagtg

SEQ ID NO: 179489 - DNA, 865 bp, Cannabis indica
ccgaaaaactaaaaataaaaactaaaaactaaaaacttaaaaaacgaaaagtaagaacaaaactaaaaaatacttccgttagaacaacagtagtaaaattaatacaagtaccaactaaatttagtttttaaagtaaaaaaaattcgtacgtacccaaacgtaaaaatttaaaaaaaaaaaaaaaaaaagggtagtaaaaaattttagtatatgatatagaaatccctataaaatttgtgctaaatttgagacaacaaatgagattgtgttatatttagcccactatttacaattatacttcaatacacaatttgtaaaataagtaaaaagaaatattaattattattgatgagcaattgagaatacatttttttttatcttttttattgtataaataatggtattaaggtaaataatttatgtaaagtttttaaaagttaatatattataataattcatgtcataatagtaaatcaaaaagtggcatttattgtgagccaaatttagtaaatgttatatcttgtgttaaatttggtacaattgttagcagcatgttacaaatttggtacattttttagaataccattagaattgtattaattttaagtgtggtaaaatataacaatacactgtttaacactctattggagatattttatggataacatgttatattccttttttttgaaaggtaattcattcactgaaacattcttaacaaaaggataaggccatacaacctttatatagcataaatgacacgagggagaacaaccccaattcacatagtactaattttgttaatcaaagcataatttgttaaaatatgagccatcatattggcctcacgatacacaaaagacaa

SEQ ID NO: 179490 - DNA, 860 bp, Cannabis indica
gctcacgggtactctgtgtgcaaggtaaaagacaaaaactaaacagtgaggatggcaggctcgaggcgtggattacatgttaggggattatcacgatgttttggtttaaaaatatttcattaaagattatgattcaaatagtttttgtaaagctttatattttaaggttatgaataaataaatattttgttttaaaaataatgagatctcatgcttagttattattcattaaagaagtcttttattgtctttatcttaaatggtttttaacggactagctagtgtgacgtctcgggaaatcggggcgttacaatatccaccagtggagcgacgatcatcagggcaactagcctaatcggcatcggagtatgcttgtaaacgcagtcgaatggcaggctttatgagaagtccttcattgatagagcctttgagatatcgaaataatcttttacatgcctcttagtgaatggtggtgggagcatggatgaattgatttaacttgttgacaatgaaggcaatgtcagaccttattaaagttaagtattgaagtgccccaagtgtacttcgatacagactttgatctgaaaatggctcaccattggtaagagataattgatgagcagagcttgttggagatgggctgggcttggcaccatccatgtgaagctctgtttatagttcagagatatatttagtctaagagagatgcataccagatgttgtcctgtgaactttgacccctaaaaaatagtagcaaagcaccaagatttttgacagaaaattcagtgttgagatcagtgattaacttgtttatgagtcacatgattaggtcctgtaattagtatgtcatcgacataaac

SEQ ID NO: 179491 - DNA, 1008 bp, Cannabis indica
cgcctatttctcacagttattgatatgattatgattatgattatattaatttattgctatcaaatgtatcactaccttaattggttggttttttttttatattttgttgttgttaacttttttttttttgggtattgtttggagtgggcctaaatggtatgtactatgggtctatctataactaatgtatatgatgatgatctattggattaaagagagagagatccaagaaaaatttaatagaaaaaatattttatttcaatattaattaatgcccatttcattacaaaaagattatacaaatacttaaaagttaaaacgatagcgtttggatccaagtaaatgacctatgatttgactattaaaagcttaaacgacactaaacaaagacaaacgacagctaaattaaaataccaacaacgactaaaacaaattagtctttattactaattatcatatatatatatatacaattagaataataattacaatacattaagatggcgtttggtaatatttttttaattaattttatatttttaaaattagaaaagtaaaaatatttttcaaaatcatattctataaaattgtttttacttttcaattttttaatttagaattaaatttaaaaataaaaaataaagttactttcaatctttttttaaacatttgttttaattaatattttggactccgactagacctgaattggatccaaacccaaccccacccttgacaccgaactaggccctaacctaaacccggacttgaccccagacttagacccaacataaataaaaatcaaaaaataaatatgaaaataaactttacagagcacacttttgttttctatctctcttgtgtgtagcgtgctggccagccacccaggggttttccgaccaccccaggccaaacagaccacagaaccgaaccccacgacccaaaaattcccaaccctgatccaccctcttcacacactctctttcccgatttctatctctctctttc

SEQ ID NO: 179492 - DNA, 530 bp, Cannabis indica
gtgttaggtgccaatccccctttatcagtcattgatggatttgcaaggagaatttggcaagacaaaattgataaggttggtatgctttcttttggaatatttctgattagatttacttcaattgagattagagataatgtccttacagggggtatacattctttaacaaaaggcctgtcatcatgaaggcttgggatccgaatgtgaattttaggaaggaggatattcgaactgtgccgatttgggttcaattggaagatttagaacttaaatactggggagtgaaatctctttacaagatcatagggcaggttggtaagccattaatggtggatgaagtgaccaagagcagagataaattgagttatcctagggtgcttatagaggttcccatgaatcaagagttccctgggctgattgaattcgaagatgaaaacggattaaacactagtgtaactgtcaattatgagtggaagccaattgtatgttctcactgtaaaggtatgggcataaggcaagtgattgtagga

SEQ ID NO: 179493 - DNA, 1196 bp, Cannabis indica
taaccccaaattactctaaaaatattttagtgttttctgcttttatggtttgatgacaaaagttaagaaactttatcaaagtataatatgctatcaaggttatccatagtggagtgttatgaaagctggtctgagattaagtgggccctaaagaaaatttttttggatcatttatataaaaaatatgtagttatttggaaagttactaaatatatgtataattttaaatgaaaatatttttttggatcttgaattggatgagctctaagcacggatttagaccaccttagcccaaacacaaccttatatgattaactttttttttaaaaaaaataaaagtataccaccaattatttggtgaaaggagaaaatttattcgtagcacgatttgtatgtttaatgattaacttattatttaaaatttgtatcataaatatatttaatatttccttctttctaaactcaatccagcacaaataagctggaacactacatagatttataagacttattgtttttcttaatccaaatcttaataacaattattgtatgtaaataaatatttaagaaagaacaatttataatttggtcaaagttgtaatatggaatatgtatatctgttaaaaaaaaataataattaagtttgatagtggtatcgatcattttattaaataataataattctttaattaagaaataattaatgaagtagaggatcatagtgttacctacatttgcaagaaaagtctatttaagtaggattttgcatagagagaaaagaaggccttttgtctttctcactcatatatattctcaagactttcaatctcttcttttggtttttttttttttcattttcaccaaaaatggaagtattgatacagcgggataaagtctcttcagagattgagaaagaggttggaagcctgccagttcattatggtaagagttagttttattttatttatcttaattatattttacgaagtagaattttgtttcgaaaagattaattttgttagtcgaattaatgatgggattcatttgacaaatattagttattacaacactaattacatccctttcaaaaaaaaaaagggctagttacaaaaaccaagcttaaaatatattaaagctaaacataatcattttttttgtattgtcctagacttacaaatgatattgttcatgttttt

SEQ ID NO: 179494 - DNA, 1010 bp, Cannabis indica
atttataagacttattgtttttcttaatccaaatcttaataacaattattgtatgtaaataaatatttaaaaaggaacaatttataatttggtcaaagttgtaatatggaatatgtatatctgttaaaaaaaaaataattaagtttgatagtggtatcgatcattttattaaataataataattctttaattgagaaaaaattaatgaagtagaggatcatagtgttacctacatttgcaagaaaagtctatttaagtaggattttgcatagagagaaaagaaggccttttgtctttctcactcatatatattctcaacactttcaatctcttcttttgtttttttttttttttcatttccaccaaaaatagaagtagtgatacagaaggataaagtctcttcagagattgaaaaagaggttggaagcctgccagttcattatggtaagagttagttttattttatttatcttatattttacgaggtagaattttgtttcgaaaagattaattttgttggtcgaattaatgatgggattcatttgacaaatattagttattacaacactaattacatccctttcaaaaaaaaaaaagggctagttacaaaaaccaagcttaaaatatattaaagctaaacataatcatttttttttgtattgtcctagacttacaaatgatattgttcatgtttttttttttttgctaaattggctttgactagaaacattaatcatatttcaattagattgaaatatatatcatatcttaattgttatttcaatttagagtctgttctcattaatttattactttggttagtagcaaaagtcgttatttaataaaaaccaatctttcactcaaaaaaaaaaaaaagaaacatatcatatgtgcaaatattaaaaaaaattaatagttagtgtcactatcatgatacattttttttttaattttatagtttataaggtatacatttgaaaaatatgatttttttttgttaaaaaatatat

SEQ ID NO: 179495 - DNA, 780 bp, Cannabis indica
gataactgcttcttcctccatggttttcctcccggctatggcgacaaaaagaagcaagataaaggcaaagctaaagctcaccaggcctcttcttccactcctgctgaaactgctgtcaatgcacctgatctgtctattcaatgccaacaattaatatcgcttctcagccagcagctcagcaacactactgctcgtgttgacactgaccaagctcctgctgctgcctccaatttggcaggtaattccttctttaatgaattttcttggataatcgatactggtgcaacacaccatatgtgtgcacacagctcttgttttagttctttctcaaaatctgtctatcccaaagaagttactctacctaatggccatacaatccctgttgccaacataggtactgttaatattaatccccttctcaccttaactaatgtcctttttgttcctagtttcaaaataaacttgctctcaatttctgaactattggacagcaccctatttaccataaatattaacagaaatacctttgtaattcaggatccttctcagaatgtggagattgggatagctagaaagcatggcaaactctatcttcttcaacagaagtaccccattgctgctgcatctcaatgtttttttccattcaataaaaacaatgttgaccattggcacaatcgccttggccacccatctatgtacatttctaatgttgttaataaaaagattgatccatcttttgctactcctgcttctacttactgtcatatatgtcattttagc

SEQ ID NO: 179496 - DNA, 856 bp, Cannabis indica
aatttttgctattgaacgtagaagagtacataacagaacatagaagagtaaataaataaatcaatacagtaacctatccaataattcacaagcaaataattaaaaagcactaacgtatatacctcagttctcaacacatttccaattaattgagcaaaactaatcaaatcacacaacacaaaatccacaaactaattaacaaaccagcacatttaattacaattcagtacagtaatctagtattagcaataaaaaagagtagtccatagatcttatatatattataatatttccacacattaataatttaagactctctaacatttagggataaaaagaaaaattagaaaaaatgtaatactaacggcatctccaatgtaacaaagttaaatatagtgtcaaaacaacaaccaaaaaaaacataattttagcaacacaagcatagagagtattggtaactatatcccaatattctctattccctttagtaatcacatcataaaatttattcaaatttaaagcaaaactttttaaaaacttagcaagcaccaaaaatgttgtaaatgtactagagaattaaatccaaaataatctcattatatttgatgtttttacgctgttttagcgggtatcatatatgaaatcaaaatttgagtatatttgagaaaaaatgtatagatccaatttgtaagaagatttgttggggcttttgccaaattgttgaatttggttcagtttaattaatagaattattacttcttattaaaaacaaataatgtatattaaacattgataatcggtgttgagctaatttttcaatcattttacggagaattcatacgaaaataagcaacat

SEQ ID NO: 179497 - DNA, 998 bp, Cannabis indica
aataaaagccaatttcgacatgttaaaaagacaagtggatgaggccaccaagactttaaatgatgctgaacttcacagacccgatgaccatatactcattcactcggctaaaggacaactggcagaggcattgctacgggaggagatccattggaagcagaaatcgcgagtccaatggctccatgaaggagacaaatgcactaagttcttcatggcttcagcaactataagaagaaggaggaattatatccaatgcataaagaaagccccccaagaccattggattgaagactactctgacatcacacgatgcttcctatctaaatttgaggaacttttccaaaaaaattcccactgtacaacggaagctcttgaggaaattctaacaccaagccttgatgaccatgatatggaatgccttcaactcctccctgggaatgaagaaatatctgcagccctgttcgagatggggaaagataaggccccgggcccggatggccttcccacaagcttttattcgcaccattgggggacagtggaaccagacttattggcgatggtctcgcacttcttcaggacctcggaattactgaaagtaataaatgacacctccattgttctagtaccgaagaaagaatctccagtcctagttactgactacagaccgatagcactttgcaatgtatcctataaggtaatatccaaagttatcgccaatagactgcgctacatccttgacaagattatctcgcccaaccaagctgcgtttgtgaaaggaagacatatagcagaaaactctatgatcgcaagggaaatcgttcactccatgtctaagaagaagggtaagcgaggcttcatgatgataaaactcgacatggaaaaggcatatgacaagatggagtgggacttcattctctcggtactacaatgtttaggcttccccaacatcttcatcaaatggataagctcctgcatcatggttaatgagattaaactat

SEQ ID NO: 179498 - DNA, 646 bp, Cannabis indica
atattatatacttataactttataggataattgagtttcttttgataacttgtatatggtgaccttgtttgacaaagtcaaacataaattatgaatatgatatatgctataggaatttacttttatttatttatttttataaaaatttatttgtttcctttattctcttttaacataattaatttctttttaataatattaatttactttgcaagatagcttaattgtttataaaataaatgtaaacaccataaattattaaaattttatcatggggttaagacttagtaactactaagtgtaatgtaaataccacaaattactcaccacaaattatcgttgctatagttgtcacaaagtgatctttttcaactatgaatatagtgaagattaactctgcaacaagatgaaataaattttaaatgattgtttgctaatatatgttgaaaagagaaattgccaaaaattttagcatagattcacttattaatgacttttgtaatatgtaagaaaaatgttttgtatttgcagttgttacgcatatgaccctaataaataaaataagagaaaaaatgtttaaagttttttttattttaataaattgtcgaataatatatgatcacgtgtttctaagttggtacttaac

SEQ ID NO: 179499 - DNA, 1094 bp, Cannabis indica
gttattgagtctatttttatattgttaaagagtctattttagtatgtgttttagtaatttttatgttttattgttcgggcttacgtttattttcttcttattttaagctttaatggtcaagtacatcatataagttaaaatgagataaaaatatgttaaataagatgaatttgaaggatttatcatggatttttggagctttatgatacaatgcgtgaaaaattgtaagttttagaaactcaacacactccgtttgtaattaaaaatcaaatttgaagcttcaagtaaattttgactatgatctgttcactttcaagaagatattgtgaataaaagttttaaatatttctttcaattttccaaaacattttaaatcatctaattctaagttatattgtgagagatattaccaaaataccatcggttgtcgcagcaagatttcaaaattgcaatagctctgtaaaattgagtaaagttgtggctctctaaagtagggttgcgacgcttgtttaaaatcacgaaaaaatgaaagtttttctaagtcgaaagtggcttaggttttatgcaattgaaggtcgaaaataggtcattcagactgtggaaagcaactggaacaaggcaaaacaccattaaaagctatctcaatttattttttccttcatcttatttatatatacatatatatatttatatttaattttcatatatatatatatgtctttgaattcctttatgtttagaatgtttactatgaactaactttttgcttagggttattaaatgaaatgcctattattgaattaatgcaattttttgttattcttcatccttattttaattcctttcagtctaggcttaattattgattgtccatatttagtaaatatctatatattttttgaattaaaatttaaaaagtgcaatttgaatatgctttgattattaaaacacaattttatattctaggatgaaagtatttagattaattgtttttttgagttatttttcttaatgctacctttgtgattaaattttttcatagaaatattgtaacatccccgcttcaagcttccattggacattatcccacgaat

SEQ ID NO: 179500 - DNA, 775 bp, Cannabis indica
ccgttaatatgaagactttgtaaggattttaaagagtattgaaatatttgaatattttgaagtaatgttctttttcaagggttgcaacaagatgtctttatatttgggcatacttcctcaatggttatttaggtttcctcccaaggaatgttcaagttgtaaaaatagtcattcagccattgaatcttacataagtcattcttctggtttttcttttttgtttgtatttcctccgattacctcttgataatttgttcacattatttatataattgcagagggatctaggttcaattttgtacttgaactttcttactttcctcgccaacaatgtagccatacattattagtttatgaaagttagaccctttggtggttctttgattaattttcttcggtagtgaaggttctttaacaaattcagtttgattgtgaaactgacatggaagtttcacatggcactttgggctatgaggccagttggtttaagtgataacagttaggatatggattaggcagcaagaacaagaattaaatatctggaaatatattgcaactcttccctttggagcaaatttatttctatcaattccttttcctagtttagattatttagggagcttagctcagaatggatgagaaggccaatggggttcggcagctgtacaattgtgcagaaagtaagacttgaacctctacatccttcttttgttgtgaagtgtgtctgttaggatccccaaaattgaccaagggattggttagttgtatataaact

SEQ ID NO: 179501 - DNA, 906 bp, Cannabis indica
gtgtaccttgaaaattctagaagtaaaaaaacaagaaacccataatcaaaaaatacatacctttaaaaaatcataatcgatcaaaatccaatttttggagaaaatcatatctgggtctgattaaaaaatgagtatttttatttttgttcttcatactcgagtaatgaagggtagaggagacgacgagagagaagactgtgaagcagagcttcggcgaggtgagaaggtaggcgttcgagagttcgtttctgcttccgccattggtccacgctgtgtttgctctcacacgctgcagctatgcaaagtttgaccagttgggtcttctcctccattgccattgctttgcttggttctcaagatctgttctttttcatttcatttcttcatattaattttcctcacttttcagaggtcaagtcaaacttcaaaacgtcttagatgaacgacacttaaagaagatgtcgtttttagatgttgagtaaaacctcaagcctcaaagataaactacacttaatatgatgtcgttttattgaggttaagttaaacctattgtgagtagttgtagtagtgtcggaaatacgggccagaatttttgacatgaaaccagcacgagcacgaaaaaaaatgaatttaagcacgatacataatagtaaatatgagattaagcacgtcacgtaagtaagaatagattatcttaaaaactatgtcacgcaaaaagctcaaaaaaatatcacatgaaataaaaatacctcatactttaatgattatgatagttaattagtaccttacgtttttatgaaaaatatatttagtatcttgtgttttcaagaatatttaattagtaccttaaatttttaaattatacatacttggtatcctaaattaaatttaatcaatacatttatc

SEQ ID NO: 179502 - DNA, 632 bp, Cannabis indica
gagagattaatttattatggaattagatcaatgagcaagacagcaacactatctttagtgacttttccaacttgtgtatagttatcaccatttttgtaaagaagatccataaccctagcaagattcaaggcaccaactaatataggtgaagctgcttcagttggtttcaaaaactcttcgtttatttctttccatgcaataacaactcgcctattcatttcatcacatgcttatttttctgatacaccatattgcttcatgtaacattctattgtagatggtatatgatttctctcttgctcattttgtatgcatatgtaccaaaaatttattaataaactttaacatttcacatacatgtatatgtacgtacttatacacgtataggacaagaatattgtacatgcagcagttagaaagttttatattgataatgtgtgagaacacttaggtcttatattgatattatagtgagtgtttattgacattaaacattaaccaatcttgatgatttcaaagaaaaaaaaaatatattcagatttaaaaaataaatattactatagtatatattaaaataaactcaatctaaatctcaactaaagctttttttctttttccaaaaactaaaacaa

SEQ ID NO: 179503 - DNA, 682 bp, Cannabis indica
gctgattatcatgccagtctaaatccagtgaactgacaaatcaggggattaaactttcaaacatataatcaagattatattccactgtgctgacaacactataatcattaacaaatacatatgttctggacttaatagaatttataatcatgaaataaatcatgtgaaccatgcaacataaaatgatttctgatctttactaattagtaaatctgattatattgaaatgggttttatttagggcacaaaacccaacagcaacatgctcacaccctaaaatattttaggcctataagcctttgtacaactttttataaggtaatttctaaagtcttggctaatcatttaaaaattgtttgggataaaattatttctccttttcaaagtgcttttgtatctggtcgagtcatctttgacaatattcttattgcccaagaaattgtgcatgccattaattctaggaaaagtggtaagactggttgggctgctctcaaacttgacatggccaaaacttttgatcgtgtcgattggcattatttgaagagtgttatgttccacttcaattttccacctaggtttgtttctcttgtaatgaagtgtattactactactaccttttcatttttttgataaatggttctgttagtgggtttcttaagccttctaggggtattaggcaagg

SEQ ID NO: 179504 - DNA, 775 bp, Cannabis indica
ttaataaatatactattttttttttatttaagtaataatattgtcgttaaatttttaagttataagattctcaatagttatttttttggaatatatattttatttattattgttgtggtagttttttttttatcagtttgcacttaaaaatactattgtacactatatattggagtaaatttctaaaaacattgtactaaatataatatttgctccttatcaaaattatatataacataatatttattcttttttaggttaatgtatttttatttttacttttatcaagaagaaaactttattacctccttatagaagtaaaaaataaaaaaaaaataaaaatattacgttatattttttggggaaatgctctaaaatattttaaaatattacattcttatcttaaataaataaaaaaaagaatgagccctaattatctatacaattttaaactaatcactaattatgtacattatataacatatatattttttgtaaaaataaaaaaacccttaaattaaaaaaaaaagattaaagtgacaaagtgaaggattgaacccatcaccttaatatcaacacattttccttcttatcaattgtgctataactatttattataaattgttgaactaaaatttatatatgtatattttttatatatatatatatataatatgtttttatttttgggggccttcgaaattgtggggcttggggcctacgccccaagccgccccaccctctggtcggccctgctcttgacgggtaaacccga

SEQ ID NO: 179505 - DNA, 671 bp, Cannabis indica
atttagctaaatgatgagtaacaagtatttagctaaaagattagtaacaaatttaccttttgaaaaacaaaggaaaaccaataaattttaagagaaaaaacttttttttatgtcccaaaatgacaccctcaaggtctagaaatcagtactagacaaaagagagatagccaaggcacaataaggttcaacaactttttcttttctttttaaaagatacaggctattatttttcacattatttttacaataatattataatatgttatttatacattatttttgtatttttatatttgtactgtattgtttacatgttaattttatattacgttcatcatgtttcatataaatgtattaaaagaaataaaaaaaatataatatacgtagaaatatatataaaaaaaatacaattataaatattttgaataaaaattttccctaaaaaaattgttagaaagtactagtaatggtgtcgagtataatatattaagtgtagtttgatatgaagttacatatattttagtctaataattattaattaattatgtaacaatactcacttaaaataatagtaaaaatgtcatgatagaaataaattttgcaacgtattatcccatttttctaaattattggtcaatgaaattagaactcggttcatattcaactctacc

SEQ ID NO: 179506 - DNA, 838 bp, Cannabis indica
gcaaaacctgaggtgcatattcaggatcgagataagttctatcatacacgagctttacagaggtttttgtggagaccatacttctgaccaaggctatccaaaaatatcctctgttagggttactttgagcccacaatgaagaaggattgtatagagtatatttagaagtgcgaacagtgtcaaagatacaccaaggttccacgagtgccaccaacggagatcatcttgatgagcagtccatggccctttgttgtttgggtaattaacttagtaggatcccttcccacaaaaaaaggaggagtccaatacgccataggtgttgttgactacttcaccaaaagggtagaggtagagcccatgaatacagtcgcatgcaagaaggccttggactttttaatcaaaaaaatcatgtgccacttcaaacttccacataagattgtttgagataatgggaggcaatttgacagtgatcacttcaccaacttctgtaaccaacacggaatcgtgaagagcttctcatctgttgccaaaccacatgaaaatggacaagtgaagctgtgtataagatcttgaagacaacgttgaagaagaaactccaagcttgtaaaacttattgcctagagggagcttttgcgagtattccgagcatacagagccatgaagagaacttcaacagggcacacactgtattcgatgacttatgggcatgaagaagtcatccctataaaaaccacaattcccctctcacagacagaaaacttatgacccaaactcggaatcactctctacttcaagatattggatttgattgagagctccacgaaaagtcacgagttca

SEQ ID NO: 179507 - DNA, 506 bp, Cannabis indica
gtttacactaagtacccaaccatttcatcattctaaaattttcctatcacgagggtattcccttagaagaaatttggcaacgaccagtaactaatcatcaaaatgcaaatcgaattgctggggaggtcagtttggatataattcgaaaatctaattaatgatcttgaactgcatatctaaccaatatttctccacccctattagttcgcaagatctttaaccacttaccttaatggtttttaaacattgctagaaattcatgaaatttttcaaacatttcaaaatttctttgcataaggtaaaatctagagtgatcgtgttaagaacataacaaaaaaatcatatccacccctgatccatctgcgaatgagatgattatactttcagtggatataggtatatagactctttgcaaagaatgatcttgtcaaaaccactatgaacaagatacaaatgcgatagatctataaaataatgtggttgttgtcttttgatgacttagtttt

SEQ ID NO: 179508 - DNA, 871 bp, Cannabis indica
actttatttaccatattttttattaaaaaaaagaaaaaatagcattaatgtcattatataacatcaatacaaatgacatctatttatctataattaagattgaacatcgggcgggttcactgggtttcgggttcgcaggttacgggttcacgggtttcgggtctaaaaaaacgaacccgaacccggacccaaataggggtaggttggcgggtttcggttggccggctcaacagattaactcggtcaattcagtcaactccttaaaaaaattaatattttattcaaataattatttcttttactttttttatttattaaattaaacatatataatataacaacttgttcatcaaatcatctttaaaccaaatcaatccaaccaacaaacaatttgttcatcgaatcaaacttcatctttatgttcatcaatcaagataaaagtgaaagctaaaatattttaaaatccatccataaaaatttagagtccataaaatccaaagtccatattaatgtctcaaactaaaaaaatgcttataaatttaatgtccatataaacatttataaaataaatattatataaatggcattgacatgctctctaaagctaaaacttgaaaagttgtcgagtgatttggctttggctcctctctttttccgttaggacatcatctgtattttaaaattcaaattttcgcatctttcttaataaataatcaaagtaataaatcttaagtaaacatttgattaaaaaatataattaattattaaaatcttaaattaatatttattaaatattacttactattacttgctaagatctaactgaagttgactgcattgatgaagtagtcgtcgctgagcaagtgtgcgc

SEQ ID NO: 179509 - DNA, 760 bp, Cannabis indica
ccagtgaacattcctactatttatagggctggaaacttgaggaggaagagtttcctctctcgttacaatgcgcataaacagaaagatcgtgtgatcaatgctgaatgcaaggatcgtgggattgaggctgaatacactgatagtgggatcgtgtgtatgccacatccacgtaagttgatccctgagttgtagggattgagctggtgactcatgatgcgttaagctgaattcgctaagtgttgctcattctgcacggctcgttgagtattccattctggatatgccagcgaggcatcctgctcggcatgttgatccgaacagatgctctaagtagagtccacgtgtcaccattctcgtgatgccacgtcagagtgccaaatttgggataacactttctatattttctttgctggtttgaacccttcttcatctacggtctaatctgattcttgtacaacagctttattgggttttttaattacccattcaaccatttgcttcccctccttgtttctacaatcctggtctcatgaccaatgcctttgcaatgcgcacaagtcgtgggtttccattcataagacacaaaaacaagcaatgtcctcatcattctcatcttcaaaccacgattttctctgaaaattcttgctgcaatgacacttcaatgagaattcgaggatatgtcaatttctccccttgcccttagtaaaagccatccaccataaccggttcaccaacttgactgaaaatcttgaagagaact

SEQ ID NO: 179510 - DNA, 1254 bp, Cannabis indica
cggggctattcgatatgagttgtagaaatacatgtatacaatcttgattttccttcattctgtatgccattgcaatagcctttaggagggacccttgttgcaagagcaaccacttttccatacacatgcatttccaaatcagcatatgcatgcaatttacgatcttccagagtcaatgttcgcaactgagggttatcaaagtcactcgtgccatcaaagttagcggaaatgttgacattctcctcagactgacaaatccccatatcccgagatgttgaagaattcagctttcggttactgctaaatgatagttctggatatttatttatcagacagaccatcccaaaaagatcacgccctgaaaccaaatgaagcacctctggagtatcaaacactgatctttcctcagcttcaaagcagtctggaagaaaatccatcgattctatttcggggccatagtaagctgcatgtatggctgaataaaaatctgcttcaagcacatcaaagtatccagtcccaacaaccactttcttctctgacaaaatatcttttattgcagatctgtaccaccttaaccattccactacttccatctccttataacttgaaatattggattcattcgcataaaaccttacacctttttcagattgtttgaccacaagcttcctctgtgagataagatacatatcataatgggctcgcttttcagaatccgaaagaatctgcaatccattattgatcatgctgtgaggtcagaacacctgtgtatcacagcatttatcaaagacgaacatcacgattacccaactataaaattcacatacgaaccatgatatcagcatatatataaaatccccaggaaataaatcatgcagagaagtgaatgcaagcccatggccaattgagtaccaaaaactaaactagaaacaaagctgataacttcataaaagattggaaaatggacaattcagcttaatattgattgctaatttacagtaaaattcattctatcccaattaatagcaaaaaaaatcaaaatatcctactcatatgtaaacgatgaagagattaatcatatgaatagaaacccataaaactctttgaacattaaatcaaaacctttctaggtatagtctgagagaatacaggaaattgtgtacttagattcatcgagttaaagagtattcactcataggccgcaaggattttgcacaaatctcttgaaagcatcggaatcgtcgtcgactcagc

SEQ ID NO: 179511 - DNA, 658 bp, Cannabis indica
ccagagtgtataattttaactcacccctatttttttgtttttatatatataatttctttcttctttcttttttagttttttggttatatttttttattagtttttattgtgtgttttttctccttgtattttctttgttctttttttctttttgatttttatttttgattctctttgttatttttgctctatattgtatgtttaaatcaactttgatttttgagcaagcaaatataaaattaactagaatagagaatgaagttagaaatttggttattaggtattgatataaaatttatatgttcgaaactggtttttaaagttagtatcgtttttaaagtttagttattaggcattgtgtatttttcattatgttttgataaaattactttttttctgcctcttttaatgaaataattagtttattttaatgttgatggaactggtttttaaaattagtattgtattatatttattttcattatcttgttgatgaaactgattttttttatgtttcttttaatgaaattattagttatctttaatgttgagaaactggtttttaaaatttgtatccttttcatattataattttttgtattgtgttttttttttttagttataatattggtaaaactagttttttttttttgtttac

SEQ ID NO: 179512 - DNA, 617 bp, Cannabis indica
ggccctaggcacaggcctaacccgcctatgcccagagccgggcctgagtagtggtgtcgtgtagaagttttaatattattgttggttttcattatatttcaattaatttattctattaatgtattacattagacctagttagctttaagtcattttgtttgtgagaattgtgtttctcctttgagtactttccaacttaacccattttaattaagtgaatgaattcatttttcttcatgacaagaaaaaaaaaaaaaactgttaaataaataacatttaaaataagggtaaatattaagtcaaattttagaccaccttgtaaagagagtgatcattttatgagtaattcataagcaatcttttttctttctttttatttccacacattaaacattctgtgtggaaaaagatgctttgttggaatgctatttatgatttaaattaataattaataataacaagtactaatatttataaaaagagtcaatatgcttgtgagtatattaaacatgtttttgctccccacaatattcagaaagtactatatctcaatttggttttgtcatttccatcaattttttaatatatttgattttactttggaaactcctttttct

SEQ ID NO: 179513 - DNA, 737 bp, Cannabis indica
aatgaaactgaaacaacattgatagcgaaaccagtggtaaaatggctttttgtttttgtttttgtttatttggatggagtcttttagtttaattttgcgattctgaggttaaggatttttgcactgatcttgcatttttcagtttcattttctctttaactaaacagagatgttgtttctttcttttcacgctaaatgtctttttgtttgcagggatttgaagttggggtagtgcatttgctcctagttaacttttgaggtaaatgtcgaataagaactctgatgattttgctccctttttttcacctttccctctttgcatgtttatttttaggctttgtttagaattctgattgattttttttttgtgagagaaaatatacaggaaagttgttttgccaaaattatatgataagactttattttattttttatatttttaagaaaatatctgttctcttttttcatatatttatagttgctcctattgaaaaagaagaaaaagaaaagaaatatatgtttataattgttataaattttataaaattatatttgatttctctgttattttttttttaccttaagcgctttctcagttgtagaaagatgaaaggaaatttaagtttttcttcttctttctttatttgtttttttagtttttattattttgggggtagtataactacattttattaaaaaattacgattatatattatggagttatagaccaaataca

SEQ ID NO: 179514 - DNA, 851 bp, Cannabis indica
actaatataatccttatctatagagagattaataataaaatacttataacaatgaaaattcatttattttattgtatatatagtagtatatatataatatatatctaaagagcacaccaatgtagccgcgatagaactaaaaaaaaatctactaaaaaattaaaatctacaaaattcttatttacaaaaaattaaaaaattaaaaaaagtaaaatacatcacctaattaaaaaaaaaaaaaattaacgtacataaattgcacttaacattacttaattaaacctaattagaaaaatataattatacgtgcattgcacgttaacatcaatctgttatatatataggaaaaagatgatgggtaactaattaaccgacaagtaagggtaacctgcttttttcatatttttttatttttcaaaaaaataaaaaattcataaaatatattttttttaaaagaaaaatcatattttttaaaatttataccttaacaaccataaaaataaaaatttctcgaaaaaaaaggtattattataattaaaatgaacttgtaattattatgagaagtataaggggtacttacatatttaagaaaataaagctattttacataaatataataaggaaacttaataggaaaaaatatggtatttacaataaaaatttaacatgtatgggataagcaactttgaattaccataaaaaatattaaaatttctttcatatttttcttagaaaaaaataaaataaataaaattacagtaatcgccggagttgtcattggtgctggaaaaatcgtcaaaatttgctgctggtgccggaaaagtcgtcggagtagctgtcggcgccagaaa

SEQ ID NO: 179515 - DNA, 689 bp, Cannabis indica
ccttttaactaaagtcgtcgttcgtaccggacccggaaccgaaacgtttacggttttaaaggttaaaggtaggttaagttacgtacggtttagggtttccccgttccccgttggttcgtaacctttaaccttttcctaacctaaacgttaacgtaactacccttcccccttccttccctacccgtaacgtttactttccttcgtagtaaattaagttggtagtaactttaccctttttccctttaactaagttggttttggtttcgttcctttcctttcgtttgggtcggttccgttacgggttaccggttttaccctttacgtttaggttacgtacttacgtccgtccctaccttaattttaatttactaccaaaacgtaaaagggtaaccggaaccgaagggacggttttccctttttacctaccttaccgggaacggggaaccgaaccctaaccttagtcgtcggttgggtaaggaaaaagtttaaacttttttacgttaccgaccgaacgaaacgttaacgttttttacgtttacgacgacgttccgttacgacgtcgcagctatgtattcagcttccatagtcgagtccgatatcgcggtttgttttgcacttctccaaaccactgctccacccccaagagtaaacaccatcccagatgtagatttcctgtcttcaagacttgc

SEQ ID NO: 179516 - DNA, 596 bp, Cannabis indica
aataaattataatgttgaataaaactcttgtgacaacagttgcatctttttccatagctacactcttcagagcttttctcaaagaaggtacagtattttgttcctgtaatatattcgaaaattaattaattaatcatagaacaaacaaagtggaaactcgagaaaaaaattaagaacccctagcaattattttaaatatttactaatcatataaagattatatcctacttaagaaagtaaaatacttcacacacaaataccccatgaaataattttttttttttcttgtattgtttacaagttacaactgagtttatgaattatgcatctcatttggagactactcattcaggcaacaacccacgaatattagaaagagacaacaaactctaactaattcctgatgatctatacaataattgtaaattacacaacaaatgtaaatctaaaaggactatagaaaaaatactaagaaagcagagaaagacagacacataataattattgtagaatacataaaagacttagacttctaataatctaaataagcaatacttgtcatacctttacctaacgtcaacactcattagtccact

SEQ ID NO: 179517 - DNA, 532 bp, Cannabis indica
taatcaaatcttcaccaaccgttgaaaaacaaaatgataattacaattgagctattaagaaaattaacttatcaataagaataaaattatggaggttattattatttattgggtaattaggatttttgtctcctgaactttgacatgtaccaaatcatgccccctgaacttttaatgttgttaaaaatacccctgaactattgagattattgatttaaggatttttttttttcaatttttagtaaaaaaaaaatctaacatggataaaagttcaagggccataatttagtatatgtcaaagttcgagggacatgatttggtagatatcaaagtctaaggagcatggtttagtacataaacaattcactgaaatagtaaaattaaatgaaattagacaaaagttcttaaatccaacaatctcaacagtttagagagcatttttaacgatcttaaaagttcaggggcataattagtacatgtcaaagttcatgagaaaaatcctaattaactttatttttttattttttcttag

SEQ ID NO: 179518 - DNA, 840 bp, Cannabis indica
tccatccacatcaacacccaaaaacaaaacaaaaaagtacaaaacgacaaaacaagggtcgtttccctttcacccaccaatcttatccccaaaaccatttccggtttagaacaaaaccactcgctttaacaagtttataaatacactactcttctctacctctaatcactaatctcacttacacaaaaacaaaaccagagactttccaaacttctctcttcttcttcttcaaccaacctaaaaatgaattacctaaacaaggttttgatcgccggtagcgtggtcgccgtacaaggccggaaggaccaagcaaaattgaaaccgtgccttcgatctctgcaactgaaccggcagaggttgttttcttcctcctctaccgcctcatcctcttccgcaggagaatccaccggaatgctatcgctcgctggagtggcgggattaggtctgtttggcttgattgggaactgtgaagatcgaatcaggcaagccgatgagtcaatccagaaagttatgtacttgaactgttggggacagagctgaatcgatggctttagaagcgagatcgaatcgatctaaatcggctgatgtatatgatatgtaaatatagagaagcttgttgactcgatgactcaactgaattgtaaagaaggttgagttgactcggggcttgaccgagttagctcaggaggagtagatggaatgcgtgtaaaaggaaaatcttggatgaatatgataagggaatgttgtgttttatgtaaatatttgtacatttgaaatgaatgaatcagaaagatctcaaaattttttgtagatttttttccttcaaattatttggctttt

SEQ ID NO: 179519 - DNA, 832 bp, Cannabis indica
tatataaaaaaaagagaaagaggaagataatgataatgataatggtgataaacaaatggcttaatcaactcggggtggaaagcgacgacccctgtgctcctccagcaaggcatcaagtcttttctgcttctcccagaagcggacaaggacctcttcaggcttgggatagaagtcgagcttaaggttctgaacattagtctgccaggccataaagacaccgtcgtcaaagggtttgttgcagtgctgacaggtaacaagggccaggagggcatctctttttgctttcttttcagcctgctccttgaagtcacgaagctccttcacctcaacggtcaggttggttgtcgtctttagatcagcctggtgcagctcttctaaggacttcagtttggcagtcagatcttcaagcgcctccttggcctcactaagctcacgcctcgccttggtcacgacctcatcccgggtcttcagggcatcatcctttgcctctaactcctcagtcttggccttcaacgcctcctggtgcctccgctccatctgagtctcccactattgggcctcctcccggaaagctttcttctcagtcgctaagtctcttagactcttcatggcctcatccatgcccctgaattcggacatgatgtacccatgatcgattaaagtctttgagaggcgaccggtctctgcagcaatctggcgatacaagaaaaatgagtaagtacgggagatcaggcgccataaagcaaggcccgagaacactaacaaataaacttacatcggtcatagcagcgctaatatcctcaatctgttaaattgagttcgtggaagcgca

SEQ ID NO: 179520 - DNA, 974 bp, Cannabis indica
aagcgaaaatttctggaaacgagatttttccagtttttttccattttcggtaattattttgaattctggtatgtatgctgacgtggcacaacgttatttgtgcaaataactttcttaaagatatttttataaataaaatcacttttaggtataatattgaaaaaacccctaaaaattataagtttggagttagttttggaatattattagttggatctaattattaatatttaaaatttattatgaataaaaaattattaattatattgtagttttcaagaattaatttaaacaatttaattaaccaataactataaattattatacatatcaataggtaaaaaatacaatacttattatattagcttccattttatatttataaaacaatatatacacataaatacataaatgctagcttggaatatctaatgcatattcttgttggaatccatgtccacccaattactttaaggatctacaagttttatcctttacatactcttagctaccacaatttggcaatactaggcaattttgaattgccaatatttaattaattattttcttcaactagttatggtccccccattataaaatttagagccacctttaaaaaaaatgttaattatattattttctattagatgccgtaccactccattacttaaaattctatttaggaatactgattttcatgcaactggataaacaaacctattagttttaagtttgtccattaatgaagtatttaaatcaagaataagatatgcatgtactgaaataaattaacaatatatttagtgctaattaattactcttatatgatctacttgtggtagtcaatttcctgtactgctttttaggtaaggacctcccaacagtgcaaccaaccggccatggaatacttgtccaattcataacttaaaattattatcaccataactaaacttaaggctaattaagatttttac

SEQ ID NO: 179521 - DNA, 1099 bp, Cannabis indica
agtttgtgttcaaattttttagataagtttagatttttctccagaatgatattcttccaattgatttttttttgtttattagactttgagtagtagataaattactttaaacctcacttcatattcctaatcgtattaattaagttagaaaatgtattccatttatcaatatattaccctatttacaaaaatgtcagaaaaaatggcaatgaaagttagatgatcataagagagacggagtagtgatgatatttttttttaactaaaataatattatattaaaaaaccaaacaaacggagttagcttctagagaggatggttaaatgtatgggtgaaattttaattgaggtggcaaaatattactggttgggacagagagtgggacagggaactagggacaggtgatttgggcttggggctctctaggagaaattaggttcgactcaattagcacacttacacgagatcagtgatttttggtacagtgagtatagtgccactacaaatttgagtacaacctctttccttattttccctcgttaatgctacaagaaattatttatttaggttaagtattatgagtggttgaatttgattccaattttaaattccacaattcacttcgaatagagtgccttaatttggaatgccttcacgtaagaaaatacttaaaactggagcaacacagcctattaattagtacaagtattatcaccatattcaccattcttgtcattatttgttttagttcatacccacacacacacacaggagtaattattagctcaccaactaatagtaccttagctagagattacaaagtctgaacaattagcacatagccaaatagctgtgacaacttactacagacactgattcagagctcttcgttctattccagggccaccatattcatctggctcatccatgatgccatggctgatcttattcttgcccataaggctagccctttctcttgatctttgtagctcacaaaatggcctggctttgctcctaccacatcgaaatttcttagtgataactcactgcaagatatcggcacagctgggcccttataagccttgcagatgtagctca

SEQ ID NO: 179522 - DNA, 921 bp, Cannabis indica
ggaactttctttctcagtgagtgaaagtgtggaattaaaatcagttgggagaggatccatggtgacggagaaggtagggaaagggggagtgggaggagaacgccgtgaggagtggttattgtggaaggaatcgataagggatggtgggcgggagtagttacagaggcagaatttcaaaaaattcggtgaaaacagcagttgaaattgatcagatgaaaaggaaaatatagttggagcataacggcaacagacccatcagggcactattgataaaactaataatatttatatgtatagcgtcagttattttaatacattattttaccgaaaatacaaattaatatatactcatccacacttccgtgtttcctcctcggtttgctcagcatcactttttttttcctctttctctgtagcctagctaactattttttttaagtaaatcacaaagacaagataatatataccaatcagttgttttgaatgtttagttttttattatttatttatgtctttaaatttttctcttttataaatatggatatctctatatactatttcatttaaactttttagtttttttttatatatatactatatgtacaattaaaaaaaaaaactaagatatacttatttttttttctcaataagtgttattttgtcaattatattatttcaatataatttttacgttatttaaagtactactaaataataatctttttttttaaacaaactaaataatgtcttaaacatatcataaaataaattacattacaaaattttaatttaattaaaataatgctatcttattgtttcttttactattattttttaagttctaacattttctatcacttcaaactacttaaaattaaatagtacataaagataagaattcacactatatatgttatctag

SEQ ID NO: 179523 - DNA, 944 bp, Cannabis indica
taatggtgtagttgtatgcacttgtaagacattcgagttcataggagttttatgtgcacatgctttcaaatttctttctacaaataatatttcaaaaatacatgatcgttatatattaaaaacgtggacaaagcatgcaaaggttggaatcaaagcaagctcattgaagaatacaagttttgaggattctaagactagaatgggattgcactataaggatttgtgtagaatgcagacacaagtatcaacaaagtcagtaggatacgaagaaacatatgtgattgccttagatagttataaatattttttttggaagatgtggatgaattcataagacaaaaataagccaataaaatatttggctctagcaacttgcaagataaatcgttgtccgaaattactatcaataaaggtaaaaataacattaaggtagtcaaacttaaggaaaattgaatgaaaaatttactaggactaaatgtgctctttaaaagactaaaaagaagaagaaaaaaaaaacattgttcaatctcctcaagaggcatattaatatcttattataattgttatgatatgtattatatatttttaaaaataattataattgtatttttattcattatcattttcattttagattccttccaatgataccaataattaatctaatgataaattttttttctctcaacaaaattatcatcaaatacattgctctatatgccatcaataccatcaaacttcaatcaagtatgagttatatttatttttattttttttctttgaaaattaaatattattaatataattgctacatttttattttaattttttattattaacattctaattgtatatagattcacagtatacatggagatcaaaagcatagttaaatttatgcagcaggtatatatataatagtgaaatttgtaaaactaattaat

SEQ ID NO: 179524 - DNA, 622 bp, Cannabis indica
gtgataaatatttatgtttgctatattttatttttccataatctaagtataacatggagtgatgattgtggtattgcagattcaaagcctgtactttcaagatagtttgttacaacaatgttggtcttggatacttggaaatgcttcatgtagatatattcattcctaacatcattggcgtgttttccttatacatttggagctctttgctgtgaaggataaatatcaagatgcatgttttattatatgtaatcccatcatttgtagcttatccctttatcctattagttactaataaattcatgtattgtacacaaaaatactgttttaattcaaggattttatcataaaatgcaaattaagaagtgtttctactttcataatttacaatttgaatagctaaatggataggaaagtaagtgtaatttgaaaaactcatctctagaggaaagcaacagcacgaaaataacactaatacaattagtttttttggtattaaatatggagactttcaatcccggtttgtaaagaaaaatgggattaaaagtggctttttatcccagtttttttagagaaagtgggacaaaaggttactttttatccctagtttttttataaaagt

SEQ ID NO: 179525 - DNA, 549 bp, Cannabis indica
tcataaatacccaaaataataaatagtttatatttttacagatttataactttttttttatattttttacagatttaatttttcttacaaaattaatgagtgctgtttttcattgttttcacattgttggtacgggaaaataaggttttctcttttcttaaaaatacaaataaaaacttgtaataaaactaattccgtaaaaatgtaaatctgtaaaaatgtagcaaaaatctgattttaagtacattatctaaacttccccacaatgaaattcatttgttttccttcattaatcaaaacaagagctaggaagcttttctattctattaggaaaatacagttctgtttgatttaacggtgtcattttattttaagggttatggtaatttggttcctagggttaactggtaattatagtttcgttagtaatttgtaatttttacaaaatgatgtagttttgtaaaaattccgaattggtcgtaagcttgtaagctttaaagtataaattataatgtcatatttgtgaaacataccatgaaaaaaaaatat

SEQ ID NO: 179526 - DNA, 806 bp, Cannabis indica
tatatatatatatttctaaaaaaaaaatcaaaatgacgagtatgtaaactcaacaaactttagtctgacaatattatagcccatgatattgcaaaagttgttttatcttcgattatgttatggtttggtggtcgggtctcttcaactttttgtgagtcttacactgattttttggttgtttgttttttttttaacgagaatctcatttcataaaattaaaaaaaaaaataataattctcttcacatcgaatgtatgatcttatcaatataagcactacctattgtttgagctagaaacaacaagagtgaaagaaagatttctgtatatcattaagcagaatgagctaaagagatatacaaaatacagaatagagataatcaaaaaaatgacaacctgactaactactttaacagagaataagtaagtgaatagcaagcctaatgactaattatgccagctgaactggttctttatctttaacaagccccctcaaacttagtgtggttaaacaaactacaccaagtttgtctctcacaaaggagaacttggaattagagataggcttagtgagggaatcaacttagttgatgatttggcaggaacatgttgtataaattttcctttgaatcactttgtctcgaacaaaatagagataaatttttatgtggtttgtgcgagcatgaagcacaagattagcaacaagcattatagtattgagattgtcacaccatatgagagggagggagaggcaaagaggcagatggaaactcagtaaataaagacttgatccaacatgcttcagata

SEQ ID NO: 179527 - DNA, 704 bp, Cannabis indica
atgtcatgtgttaatcttgttttggagaatgtgtatacagctgacaatggtaaagccaacaagctacgcaaatactccactctagagaagttttcaaattttatgctgtcttttatgtctttcatgtaagatagatggcgagtcctgctattaggcttgtaaaagtctttaaaactatcagaatcaatgcaattcttaccagatatgtacaatgctagatcatgcataagatcgtgcatcaagagaacagatcgatttcgtctagatctttgaagaaaggatcttgaaatcaaagcattgaagtagccttctccaacaacctcaattctttttccgttttgtggctgtaaaagaccttctgccatccatattaaaattagtttttccttatcaacatcacgaaattcgtaatctttgggaaatatcgaaagataggaaaagcatggcttcaaataaggaggcagaaatcggtaacttaaccacaaggctcgaaaaatttcaatgttgtgagaattgggcaactcccacacattactttgcagtacatgtctccactcgtcaacagtggacatagatcgtaaaagtccagccatcgatttcacagctaaaggaaggcccttacacttcttaacaatttgtcttccaatttcttgcaactcacacaataccacctcattagtgtctacatgatcaaaggcatgctc

SEQ ID NO: 179528 - DNA, 623 bp, Cannabis indica
catagttgaagagagcttaaatggattgattggtactacctatatcaacaaggtgcatcttgtttttcggtagcccatcacgaaagaactccacagttaagcgtgcttgacctgggagcaatttcaggatgggtgacctcctgggaagttttcccaggaagcgtgcgagtgaggacaaagcacgctggaaacactcgtgttggtctgtagggtcagtcatcaatccaggaagcagccagagtgacgtactcgtgtataagagccattcattccgtgggtgtaagggcccaatggaggcttgaagcggggacgttacagggtgcatatatctaattatcagaaatctactaaccacattcaatacgtatgtttgagtctcgaacattcataactataaatacaattaaccatatatcaaactccacttagtactctaatcatactagtgttggtagcgttaatttgtacttttctactattgtctaacatatatttttcggttatcccggtgcaactctatatacaccaataccgctatttctgatatgttagttacatgacaatacaatatacatgtatactaaataatgtgcatatgtgcatttgtaacacctatcttacct

SEQ ID NO: 179529 - DNA, 626 bp, Cannabis indica
tacgcttattgatccacttatgtcaaaatttcattatttatattacggtggaaggttgccctaatactctatagttctaaacaatccctctcatgactcctgcaaaagaggtgaagcaatcccgcctttgaagctcaaaccctcgacacaagtaacaagaacccaaattcccatatttgtcatatttttcaaaagagtgtaaccaacctttaatcttcccactaaaattgaatggaggagtggactagtggagcaagaaaatccactaattaaatttgtagagagttggttttctacttccaaggtctgatgtttatcctcaaaacaaacataacatgaaatatttagatagttttgccgtgcgtgtaacccgaaatcatgaaaccatggcctgtcccacttcctttccttcgatcaaatctcacttttcgatttcaatgaattccatggtcacgattgctttctgaatctttccaaccacatcatcatcttgtcaaccaaataggcactctttatttttcatcctttcatgtcttttcttttctttctttctaattaaataaattaaataaaaaagtcaactaaaattgactttatgttgttccttgtaacgtatgaaatttgtg

SEQ ID NO: 179530 - DNA, 738 bp, Cannabis indica
gacataatctagaatttttataacaaaacttaggatattttttcacatatgtcgttaacagtaaatattttcaagttagttatatttaaaaaaatagtcaaaaataaggctcaaggtaatattttgtaacaatttttaaaaaatatagggtctaatttaacattttataaaatagattgtccaattggtaatttttataaaacagagggtctaaaattgtattaactcttacacatatataaaaaatatatttctattatcatttttttacacttaatccgcataatttttaaaaaaaaaaaaaaattagcatttttgctccctaaactttcgacactatctgatcatgcctcctaaaatatacagattattaaaaattcctcctaaaatataaaacttatgtaattatgtttcttctgttaggttctatttcttttactattaaaattaatatttttaccttgtgaactttgactaaataaaattttggctcatttattaaaaataaataatttccaaaattataatattttattaattctaaaaaataaaaaaaaactattgaaaaacatgataaaattattaaaatattaaaaaaaaattaagtttacttaaaatttttaaattattttaaaaaaaatatattttcaaacattattctatttataaacacatgtcttaaatatcaaactaaaattaactgaaaaatctaaataaataatcggtaaatactatttt

SEQ ID NO: 179531 - DNA, 536 bp, Cannabis indica
ctctctctctctctctctctctctctctctctctctctctctctctctctctctctctctctctctacctgtgcggcgccagtgtgtagatcgggagcaccgtgctcagaccacatccacccccaatggactccaagtttgtccttccaagccaaaaaaattcgatccccctcttctccctctcccgatatcactttctatcttcgtttttctattgtgcaacgacggtcttacatcagaactgtatgttgttgttgactatatgtacgtgggaggagaagttgcgccctcatctccaccagaagctgcaccccaactatgcttcacttagagtactaactctctttctctctctctcgtttgttgtttgttaacggtaaaaaaccagaaaagaaatgaagttttatctaatcacaagtataaagattagttttggtccgagcagctgttgcaacagcctgtgcaatcactctatttggtcattggtggtatacttgttattttttccaaggcaaatggactagcacctttttctt

SEQ ID NO: 179532 - DNA, 912 bp, Cannabis indica
ataaaacttagcaacttttattaattaactaggaatcgttaataacaatagaacgcacttcgttggaacaattctccaactgaagcacacgacctgtagagaaacaagaatccctggctaaaacatgagccaacttgtttgcaaatcgtttgacaaaacacaactcaacaatatttaaggataagagaagagtacgaatatcatgaactaaacgaccaaaagaggatgaaaaaaatttttggctttgcacggcttgaacacaaactaagttatcagtttccaaaatcacttgtccccacgaatgacggtcaatccagcttaaagcttctttgatatttcaggttgcacccgccccacctttcctatcatgtaagcttctaccaaattaccgctggaatctcgagccacacaaccaaaacaaaaccggccttctcgctcaaacaaagcgccatcaacattaactttgatcttatttatagcaggtgtagtccaatgctcaagcacacggtccccatcaattcacgcagacaaagaaagaccctttattttttgagcgaatttgtattgatcaagcagagttcttactgaagcaaccacatttgtagcagtacggctcctttgttgccaaacaaagtcattacgggcacgccaaattgactagctaacagtcgcaacttcctccatctcttcctgcctaccacggctgaacaaaaccagtaaccaattgcagaaagtgtcgttcaaagtgctgcccacgaaaccatagttctatgccatcacacacgagcaaatcacaccccacaaaagcatggtagatcgtttcatataaagcgttacacaaaggacatgtagaattaacaggaacatgcttgtgcttcagctaaaaacaagtaggaagtgaatccgaagctg

SEQ ID NO: 179533 - DNA, 595 bp, Cannabis indica
gcttaattctactcaatctagcataatatcacctctgaaaactattagaaacaacagcaacatcacagaacagattcacaatattttccttccaaaaatcacatatttgcataggaaattcaaagctttaaacaacaccactagcatgcattaaaacctatataatccatccatttaaaacctaattaagctactggaaacaacaattaaacacagcaatatacagctttacaaactaacatgcaacctaccattttcacctcaaaaacatcaagaataaaaagaagagatgagaaccacttactagtaactatggatcataaaatcaacacaaaaatggcttgaatcaccacaaaaattccagctcttgaaccccaagtttcagccgaaaaagagagagagaaaagagagtgttttgcttgaaattttctttcttttttctaaacttagtattttgtgaaaatgaaaaagaaataaactaaccaagcactattcatttcagccaaataaaccatgaaataaacatttaatttttcaaataaaaagtcactaaagacaaaaagtcattgggggcaaaaaagaaaccgacttttta

SEQ ID NO: 179534 - DNA, 752 bp, Cannabis indica
atttagtaaattttgggttgtgctgagttttatgcatatggtagtttttggagaaacgtgactatagttaagatgccaaaattgtggttacgggtcaaaatttatttgttacttttctggatttctaatcaatgtaatgatttcttttgatattaattgaaataaatgagggtttaaaaaaaatttaaataaatgagtaagatttaccttttctaagaaaaaaggtagaatgtgtaaaaatattaaaaataaactagtattttttttaatatatttatagaaatattttttttatatatttatagaaatataatttttttttatagaatctgagcaactaaattatattataactagtgaattttaataattatatatatttttttaagtacaaaaaaagcataataatagttaaataattaatatattattagattttaagtttaatatttttgattaaaaagagaaattgtatgtaatatcaaataagtgatactttaaaaattggctatagaatgcatatctaaactacttaacaatttttaatatatgatacaaaatttatagatagaaattttattgtatagattaatttttaagaaaattaccttctccttttctatttttaaattatgaaaaaagtgaaatttcaaactatttaaataaagattagtaacaaaaaaaaaaaaagaacgtaattaagtaaagtaaataaaaaaaaaaaaaaaaaaacgaaaaataagtagtagaag

SEQ ID NO: 179535 - DNA, 531 bp, Cannabis indica
gaacttgctagtggaaatgtgcatcttataactacgatggaagattgggatgttatgctatcagaagctagcaaagatggacaaattgtaagttattttgtttaatgataaattaatgttatcaactaatatataaaaaacaaaacatacttgaatagtgatcttattcaatactatatatatatcattcccttattgtactccactcaatcaaatttaatgtttccttttagcaaaataaatgttatataaatatgaatctgataaccaataatacaatgtaaataataactatgattataggacatagtttagtggttcatacttctatttacatacagggagtacctaagtttgaatctccctcccttaatgcttagtacacatctaatatgctatgttggtcttgaaactgttacaggttttggcgaatttcagtgcaccatggtagtaatccatgtagatcaatagacaccaacctacattgaaatggcagataaatatccctcttttctatttttaactgtcaat

SEQ ID NO: 179536 - DNA, 496 bp, Cannabis indica
atagtcccaaggaaatcagggtctcagatccgtttcaaaatggctttccattgagaggagagtaagacacgactcgacagcgagacacgaggaatttccgtaggtttgacgggatagaaagtatcttatggatcatggaaactttcttcttattcttctcctcctgatcaaaggctatgctatctttaactctactctagtgaagagccagagttacctcacgaattggatttgaaccaatatcaagccactttccttttagtggatcgtgagtcaagtaagagaccacccatcgactttgcttcccttcaggaagaggaacgaaggaaggcacgagccctatagaatgaataaggagaggcctattgatgaccgagccactcttatactactccttacctcacccccttcgtcacttaaagggtacggagtacgctgaagcgagtctaaaggaccgaaacgaagtgctctttgtaacgctactacgcatccttac

SEQ ID NO: 179537 - DNA, 536 bp, Cannabis indica
gttactcatagtaacaagtaacttcccaaatattacaaaaagatgacaactaatatacattatcatatgttacattttattagtttattacatatatttaatctatatattatattattataaataatataacataaacaatcctagatcacttaataaacaactataaaacaacaaaaatataactacaaattaacggaaaaataataaaatattgacctaattgcaataagcagaataatatctactcctcaatatatatttttgtaataagatttttttatttagttttgacgacatgatttatctttttgtactattatattatttttttcataaaatttgttgttaccattttattctttcaactttttttattctcttttcttttttgagttagtgatagttaaaaaataattataaacgaaaaaacaacatgaaaataataaaataaatttacacatatataataaaaataattgtttagaataaagtaaaaataatacacaataaaaaaaacacataaactaaacaac

SEQ ID NO: 179538 - DNA, 729 bp, Cannabis indica
tttttagaataatactaaaaaattaagttatattataattaatctttatttagaataataatactaaaaaatcaagaattattgtccttaaatataaggaaacctataaaaatatttgatttgtagttaatagatattgaagattataatttcattttgaatacttcaaattcacaaacaaaggatcactaatacgatatgtaatattattataaaaaatatatattattaatcaattaatttagataaattataatgataataataatcaaaatattaccttgtgatgttgatggtgatgaagtagcattagcattaaccattgaagactcagaagctctatatattattaatcttcacaaattcgactaaatagtttagggttgaaattaatatatatatatatatatatatatatatatcaccctataattaggagtttctaataaaatcgtttttaaatatataatatgaggagttaggaaagtggatttctaaggcaattatttttaaaatttatttaatattaaaatagaaggaaatatcttaacaaacaatttatcatattttcttttttgtatatattttgtatttctatgcatttataataaataaagatattttgagttgttttttatttttttgtgaaagccatatttagagtgtttgatacacgaaattttctctaaattaactaactatcagtaatcaaaattacacctaatattc

SEQ ID NO: 179539 - DNA, 702 bp, Cannabis indica
tgaaggtgagttcaatctcttattaaattcaggatacatatagaatgtttttcaaggctgtaacttttatatttgcatgccatttaacaggtgctagactgggtgcaccaaaagtttcggcacaatagcatcaagcctttcaaggaactgaccatcggtatcaatgccataaacttttactatccacccttttaaatgatcctgaaggatattgcatgcatcacttaaatagaaaattcttacattataaagtaaacaacaaccttattagcctatatctgtgtttaactctaagctaatcacttgtgtctattttaatcagctggttctactaacataatttatgacaaactatccccccctagcaaaaataaagaattatgagcgcgtgaaatcaagaaagataaggtggcctcacatgacgagggaatactagtttgtataaaaaaatatcatcaaaactccacagacaaagtagagctactagtagctttcctaggagaaaattgttgggtccacctcatactacaaattatagagtcttcaacatcacgaatcataacaagatggctgctccagaatggtgcaaccaatgcattagttaaattttttttttttttgttggattagaaacaccctccctctcccagccataaaagaaaatatttattcatatatattctattaaaaataatttacatg

SEQ ID NO: 179540 - DNA, 597 bp, Cannabis indica
taccacgactctgattgagccatctgaacttacacggtgacgctaaggagttgtttgggtttttatttttattttttttagtatctagatgtcttgttttttacttattattttagagaaatattagtggtgataatggtagtggcttggtggtgtgtggtaattgtggtggatagtgatagtggtggttgttctgtttttttttttttgggggaggcggggttatggagatgattttggggtggttctttagtattttcagaagaagaaaaaaagaaagaatgaaagaaaagaaaagaaaagaaacaataaaataatatatttttattttaatattatgtgcactactcaaattctgccacatgtactttagtatatacttcagccatccactgtggcacttaactgagatttttgaattgaggggtaaaaaacataacagaagtgaagtttagatagttttgtccttaaaattttggtttttgaggttaagtgtaaaaagacataaagttcaagtaattttatagctaatatcttttttttttttttcttctacggtttacatccaaaatacgtgtatttttctttttaatattt

SEQ ID NO: 179541 - DNA, 674 bp, Cannabis indica
atggtatttacccttttttttatgtatatttcaacaaatttattttgatattttttcttatgaatattgaaaagtatattatattatataattttatcttggtacggaataattgaaatagttaatttgatctttgcatgcatgggaatagagccaaataaataatatactttgtcacagctgatttttttttcttttctttttttttttttatgaaagtaaccacatgataagatcattacatattccaaatttaaaaaaaaaaaacctctctagattaactccctatctagccctaaaagtttcttagccatatgatgagtatggacattacaagatcttggctgaaaacttgaaaaaatattagggaagcgagacaaagagtcattaatgtcattaactatgtctgaaaaagctgaaaaatctttctttttgctcttcactctgtctatcagctgcttcgagtcagtgacgaccttagcaagaggcattcgaacattgcagcaccaaagcaatgctgattacattgccagagcctctgctattgtagaagttgctcttgctgccataggtaccgaaagaccagcgaccatgttctccttccaatccttaattatcacccccaagccccaatttttacccactcttacgaattgatagctgcatcagtaaac

SEQ ID NO: 179542 - DNA, 509 bp, Cannabis indica
gttttgttaaatgacaaaatggacccggtattttctaaaatagtaaaaataggaccctaagcttaatttttgacaacttttttttttaatacaacgaacttgaagacaatgcttaatacgaacagatacaataaatatagacagttttgtcatagcacttttagatcgaattataattaaattttattttgacaaaaaatcaattcagggtcctatatgtactattttagaaaatacagggtccattttatcatttaacaaaatacatggtccaattggtaacttttgtaaaacagagggcccaaaatggtatttacccttttttttatgtatatttcaacaaatttattttgatatttttcttatgaatattgaaaagtatattatattatataattttatcttggtacggaataattgaaatagttaatttgatctttgcatgcatgggaatagagccaaataaataatatactttgtcacagctgatttttttttcctttcttttt

SEQ ID NO: 179543 - DNA, 703 bp, Cannabis indica
cggcactttagaccttttatagtgaagcaatatgactttctcactctctaccgtatttatacttcatagatgttgaagagcagttggtttgtgttttaatttaatccatacgatttgtgcttattatcattaggtttataatttcatgttcttgttatataggaaatctgcatatgaagctgaggaacctcaaggtgagtgggttagaacatccatatcaccacctggatcgaggcgtagtcgataattgggttgcagatagtccatttggttgttaatgttggccagatgatcattctataggttaaaacatgttctttcgtgagatgcatgttggaaaagtaacctctggtgagatttgctaattgtgattctggatgaagacaactatatcatataaatatatagagtatgctctgctctgcggttgtgagaaactatagttgttagtggtagtagtggctttgtttgttgtaatgaatgttgaaacatcaactatttacttgaatggtttttcagttaattaaacttccaacttcgttatgtcaaggtacccacaaaaatagtggtaggaaatttgttgaacgagataaaatacagtttgaaattcaaactttgaaagagaaaggaaatgcttattactaggcttctcatttgtttaagatacttctagtaatgggttgatcttgacatagaattgaag

SEQ ID NO: 179544 - DNA, 625 bp, Cannabis indica
atttgcctcccaaaataaaatagatatataatgaattgttattacaaattaatataagtatgcatgctgagtttaatttttttgtagaccaaatatatgtgtcactctcaaaaatttaaaattttaactaaatgaataaagatatcagttaaacttatttgtgatttagaaaatataactaccttttactcatttgtgtagtattagaaaattatgcatagaaaatatatattatttaattgattaatcttttaaaaaataaaatctatagaaatttatatcattttcttcaatatatgaaccacatgtaaaaaaaaaatatataaaatacatctattttttcaatatatattaatatatttcatgtatatatatattaattataagaattaagaatatcaagatagttttatataacaataaataaaaagagttaaacatgtagttatgtgcatataatttaattgtaataatgtgagttatttccattaataacaataaatttttagcaaaaaaaaggtaattttaaaaaataattaaatgacaaaaattaataaaataaaaaataagagagaaaactcatatagagattttcacctcaactccatcaatgtttttactttaa

SEQ ID NO: 179545 - DNA, 789 bp, Cannabis indica
agtatcttttattatgttgcaatactatttttgtgtaatcagcttgatatgtttaactcactaaataaatgaatcagaaaaaacaaatattttaaaaaaaatattacagataaattattactatataaatatttagaattttagattatagaattaattttaacaaattatataaatatgaaatttgtatatcaaaagtgtaataataaaaaagagaacttgtaaatcaaccaaactattaggactgtatagataaaaaaattacacaatattgtatataaaatttgtaaaagaaaaaaatattgtataattattttatatttgcctcccaaaataaaatagatatatagtgaattgttattacaaaattaatataagtatgcatgctgagtttaattttttttgagaccaaatatatgtgtcactctcaaaaatttaaaattttaactaaatgaattatagatacaattaaacttatttgtgatttagaaaatataaccgccttttactcatttgtgtagtattagaaaattatacatagaaaatatatattatttaattgattattctttttaaaaaataaaatccatagaaatttatatcattttcttcaatatatgaactacatgtaaaaaaaaaaacttgaaaatacatttattttttctaatatatattaataaatttcatgtatatatatattaattataagaataagaatatcaagatagttttatataacaataaataaaaagagttaaacaatgagttatgtgcatataatttaattgt

SEQ ID NO: 179546 - DNA, 1203 bp, Cannabis indica
gtaatttgtggacttattttgaaacaaagtatggagacaaaagacaaaagagtacccactccatccacctccatgaagttataatgatttgatattcaaatatcttccaactacacaccacattttccgacaaataaattaagaaagaaaattgtatagtataaattaataatttttttttgagaaaatagtataaattaataattatactatacttcaccatgtcatatttagattgtgttaaacttacattacatcgcacatttatattttttaacaaatattgtttactaaaagaaaaatatttattacaattttggcactatgtatttatacttccttatagggcagtctttattattattattattattaatttattttagtcgaatttgattttttttaacatttttatttatgtttaagtttttaaacatttttataaaatctgtttttaattttattttactaaaaattactttaattactaaaatacttttattgtttatgtcatatttctctcttttacatattaactctctctcttcttttggttttttctttcctatttcttcatttttctcttcaattttttctctctctctctctctctctcttacaaaattaaaaaaacaaatgtaaatattaattaaataactacttatttttcataacataagaaaaaaaaaaaaataaaataatgtgatcaattgattatttctttcaaataatgttaaaagttaattttttttgtttttaatttgttgttgttatttaattgtacaaaaaagaacaatttaaaaactcattttttttattatttttattcaaaataataataatgaaagaaattatactatatttaaaagtacacttttttaataatatttattgaagtattttttcacaacgtaatacaaatcacatctagcttattttaaatccctaattgttttataattatttatcttttaatttattttgttgttgttgtttcaccaagtcatccattaaagagtttttaagggcaaaagacgagataatgatgtcaaggttgcaactcaaaagattaatgtatagtttttattgtctttgtttagtttcaaagacttattttgttatgtgtatattttttttttgatgtatttagtaagaagaattgttcaaccttaaatggtttatatctctcatttttttttgttt

SEQ ID NO: 179547 - DNA, 617 bp, Cannabis indica
agtttcttgaaagtgatatattaattatacaagctaaaataaatctactttaatttttttagccgtaaattacatttttagttatacattatgaatacatatttaaaaataaaatatatttaaatattaaaaaaacaattatataaaaaatttactagaacaaagataaatatataaattaaaataaaaactggaattaacaaaaataaagtagaaaaacaattgaaaaaaatattaaaagtaaacggccccctgttgtttgatcctgcctccgcccctgctcgtatgcatgctcgaagcaaaacgatcagcaatccgcgcagagcgaccaacacttagcgaattcagctttcgcatcatgagtcatcaaagaaatccctataacttggggatcagattgcagagatatagcaagctgtccaaatctcacgagcagtgtattctgtatttattatgcaatctttatgcttatatccattataacgagaagggaaatacttcctctccaagctcatagccttataaataatgatgcatgttcactgggcaaagggtcgaaaacattctggtcgaaagattttacataagagatattatctaagaattcatattcagag

SEQ ID NO: 179548 - DNA, 742 bp, Cannabis indica
tacaaggcttagagatttgagtggaaggagacattaatccgctgcatcaatgtaaggttttcataactttatatgtgtttattttatcgtttttagaaagttcatatttagggtgttaatcaacatacttgtgagtagatctaagatcctagtaaaataatttccaacaattatcaaggaagaacaatggatatttctttatagaaaacatggatatttgaataagctttccaacaatgctaagatcgttaaaaatgaaacagtattcagagagataagatagttttaatgtgactaacagtttagagaaaaaatagaaagatcaagattatgaattttagaccaataaaagagtattaggggttccttgccttaatggttaagtatggaaacagagaccgaagatgagaataattgcaccaagccttcttgaaatgttctaaactacaccttacttataataacacgactttaaattaatatatgattaaacaatcttaaaccactcaaacaattaacctcaaacccagacatatctaaaggtagaacaccctttagtcgaaactctactgatgttacttcttgaacgattaattgttcaaagatctttttttttttgaactatgattgggtgtgacaacttctgatctttgtggtgcatgtgaatatggggatttcaatataagacaattttttttgaagtggcatatatcaagagctcataactactaaaatataaaac

SEQ ID NO: 179549 - DNA, 636 bp, Cannabis indica
tcgccggtaataattaataccggaggatgtctccttcagtaatgtggaaaaattctttgaaatgattatatatgctaaaatgaaagatataaaaaaaatgaataaagaaggcagttagaagaagaagatagcaaaaattatgggtaggaggtggtttttcgtagattttgaatgtgggtttcgaaagtaatagctgaaaggtagtttggaaatgaaaaactgagaaagaaaataaataagaaactaaatactaaatttgaaaatgaaaaataaaggaaaaaaaagttaatatatttgggctaaaatgaatggatatgtgtaagtggtattttagtaaataaaagctgcaaaagagaacagaacaacacaagcagcagcgaacagaggaacttaaaaaaagttcctcctaatcttcctctcgcaacctaatggcttccttagcaagggagtgtgcgttggcattaaattggcgagggaagtacttcaaagaggcatcagggaagttggagaaggaatgtctgatcttcaaaacaaggctagaaagagtcgattggtccttccaatgtccattaactttggatacaaggtttaggcagtcagtgaacataaactcaagcttcaactgagaagagagac

SEQ ID NO: 179550 - DNA, 704 bp, Cannabis indica
agcacattgatcaaacaaataagcaagtcagtgattactggttgggacttaatgagtttgctgatatgagccatgaagagtttaagagcaagtatttgggactcaaacctgttttcactgagagaaaagaatcttctgagaaattcagttatagagatgtagtggatttgcccaagtcagtggattggagaaagaaaggagctgtcactgcagtcaagaaccaaggttcatgtggtaagtacagaaaaatttacctatcatagtatgtaacaacatggtggttttaatgtttttctttgtttatgttgagcaggaagttgttgggcattttccactgttgctgctgttgaaggcataaaccagattgtgacaggaaacttgacatccttgtccgagcaggaactgatcgattgtgacagatcattcaacaatggctgcaatgggggtttgatggactatgcctttgagtacataaagtctagtggtggacttcacaaggaagatgattacccttatcttatggaggaaggtacctgtgaagggaagaaggtactgatgatcaaaattaagatcattcattttagccataaacaatggtagtttcttgtattgctatctaatcatttttgtggcagggtgagatggaaagagtgaccattagtggttatcaagatgtgccagcaaatgatgaacaaagtcttctc

SEQ ID NO: 179551 - DNA, 716 bp, Cannabis indica
taaaaattgtttttagaaaacatcaaccaaaacacttttgtttttgttaatttctttttaaaaactacaaaaactattttgtgttctcattttttataacacaattttgaaacagaaaaacagaaaacaatgccaaacaagctctaaacatttccaaattttccagcaaagtaagggatgtgaaatcaaagactagaaagaagagccaacctgattaaagcaccataaaatcttgcttctctagctatctgttgttccaaggatttggcagattgtttaaaatatttaccaagactctgcaacagaaacaaagaacacttcagaagagatttcaacaacatcttgtgaaatacaaaaatgaaaagaaatatataaatatatatatataattgtagatgtagacccaacgcgcatatgtgtgcaatcaatctgaagatcagccaagaattggatgtcaaattttattaaagcggaatacaagctcagcaaaatgctggtgaataaggttgcttatgcaacatttaaaggccaatatataagttttgaatgcagataatcagctaccatcctacagaatctattgttaatacacaataaatatgttcgtgacaaatgttacagaaggttatttctgatttttgagtgtgcatagttcaagatacagaagtttatacttttaaatcacacaactataatcataatattggagggccttg

SEQ ID NO: 179552 - DNA, 1026 bp, Cannabis indica
atattctcccaaaataggtttgttagagagatatgtggctaagatgatttttttaatttaaaaagagattattaatatttaaaagattgtttatttaaaagattgtttaattttttggtttaattattgggtttattttttaacgggagatcaaacctaatcgttaaatttaacagaatattcttttatttttaagtatattctgttaaaccaagaatgttaaaccaagaaatgccgttagataggcacttttaatatataaagatatatatatatatatatatatagagagagagagaggagaagagagagaatttcaacttttcataactagaaaaagactattcaagaataaaaaaattattgttatgaccattattcccaataatcagtacatgttggactttgttgtaaaccacagcttatgtttagaatatgtggttctcttgtgtgcttctataccctacttaccctgagttcatcattattatatgcttatttctgttcctatataatgatagtagcgtttgttgattatttttttcaatcagtttatttattttattttttttttctaaatttacaatttgagtttcgaaacttgttacagtgctagttgtaataggggcttctgtacgattttttattgcaatttaggttgcagcgctagttgcaataggggtttctatgtagaattccgtaaaaataacaaaaaaaaaaaaaaaaaaaaaagttttaaagtgtaaaaataaaaaagtcaattttttaaatagaaaggaaaaaaaaatttaaaaatatattctttaaatttaatttcaatttttaaattttttctaattaagaatcaaaattttcaaacaaaaaagaagtcactttgaatattttttttaaattaatattttgaactactcggatcacacctagatccaaacccagactgagaccgagacacgaactcgggtacaacccccagtctagacccaaactccagccttagaccccatcctcgtccccagccccagaccc

SEQ ID NO: 179553 - DNA, 823 bp, Cannabis indica
atagctatagctgtctagtattggtaagtgtggtaatcaagagtccaatcaagatgttttatgtttatttgtgtttttgaataaagactatataaattaatatatttatataatttatacctacacaagaatatgttctttcacattgtcaacagtcataatttgttacagcaagtaaatcttagcaaaattaaggagatcaatattatgactatcatatcccttgtattaatataatccatatgtaaaaatccctcacatttaacagtgtacaagtatgactttctactacatgtgcttaatcagacacatatatataattaatatctatatgggaacttaaaagtttagtataactttgattggaactaattatagaataagtactttgattggaactaattagaacaaaataatttttactttctaatattttttctttctttcatggaaagtggggagttttgaaaaaaaaaaattggagagatctacatttgaagcatcttcattatgtgttgtatggcaataaagggtaacatccaaaagtgaagtcaaaggggacaagaggctgagtggaagcaagccaatcctccatatccttctcttatcaatctttccatctcttttgcctcatttgctgcttttgctctctgttacataccaaaacatttaaaacattacctatatattatatacactcacccacatgtagttatctttttctttcaagacaaaacccttattgcatgtagtaacttcagcttttacaattatataaatatatatatatatatatatatttatatatatatatgtattcaga

SEQ ID NO: 179554 - DNA, 500 bp, Cannabis indica
ataaaataataacagaacaaactgttagatttattacttgtttgggtataaatttcgcttattattggttggtgtaccattctatccatgtatagggatatctcctacttatccaataaatatataaaatatgttgtattgagctgaaccctaatgtgatatttttcatatatcataaatacagtttttctctctctctgtaaaacctattatggtattaaacttttcaacacatccctaatcacgcttctgccattgtagctggttctcttaccggattcaatggcacacacgtgcagcagccaccctcctcacccacgaccaccggcgccacctactgttagctctcacgtcgcctctggatcaagatccacatccttcgtccactgctcatccagatccggttgaattgcctccatctcgtccttcgatccatcaagatccaccatctttcaccgttggtgacttctctgttgatgatcttcatcttgggattttta

SEQ ID NO: 179555 - DNA, 876 bp, Cannabis indica
tataagagagatttattcactggtataagaaaataaaaagcaaaccgcaaaagtaaaaaaagaaaaaactattcacttttatagtcttttcttctctgttaaagttggaaggaagctacccttatattacgtatcactatagttgaggtatttatattaaatcgtatgtatattatatatatttgttggatatgtgtataatatataggtgtatattagtgatctagttaggattagttgtttaactagtttgattgggtgagcaatccctggccccgccatgccccgtttacgtccctatgggtatccgatgggaatcttttccccgtcgggtaatccccgccccgtccctactttaatttaaatgggtgttggagcgggtatgggagtgaatttaaaaggcgggttggatttaatggagagttgaaacacacttgttccaaacatactcttcatttaagcaagattttgtgcaaatttgttgttgcttatgggtttataatgaattgtagcattaggaaaagagaacaaagagtcaatgactttccaaaccaggtcagacaaggctgaatgatcttaagtctttttaaaaattattgagactaaaacttcgcaatcagaaaccacaaggttgatgggaaagtggactgccttacaccaaattaaagctcaaagaagagcctcaacttcagcaaagattggaggaacacctgaagttgtagaagaatagatttctgctatgactctgtcattcgaatcttgaactacaaccccatatccatgtttgttaacctgcctttttattgcagcatctacactaagcttgtattgctctagaatagacaatgaggaagttggtctcgattgagctgcctc

SEQ ID NO: 179556 - DNA, 787 bp, Cannabis indica
attcatatcatttctcactcttcctctctctccttcattcttatattatatttgtaagtcttaacattttattgccaattaattttctagcttttctctttgtttcattagttatagtgaaaccattaatgacattttttttttgtttccactccttttagtttctaaataatagtatttttataatattgttcatggataaaatagtcaataattctatttttttaagcgtttattataaattattattttgagccacttataatttaatattttcttgaatagatgaaaaaacgaatttagttgatgtgataaagataataattaatatttttccaattttaaagtggaataagatttcaaaaaatatattttgccaattttaatgtgggagtagattttaaaagatagatcatatatgtatgtatatatatatatatatttttgtaaataattttgctaatttttgatatttttattctctatactaatacgatatacatacatgagtatgaatcattttcattcattttctatcactaaaaaaaacttcaaatatacttattcaaaattaagtaacatcatctccaacaaaattcataatttgataattactcatttgaataatttttctctcttatcaatgccatttagattcataacattttatacttatctatgttattttttttcttactaaagtctttttatctctttaatcttacttgacttttgaatttcacttaacaattgtcaatttcatatgattcaaaaaatataattcatt

SEQ ID NO: 179557 - DNA, 1091 bp, Cannabis indica
cttctcagcattttttttttatttttttttttatcattttttggctataaaagaagtggacttcaatagcttttgagaagtaatttagagggaaaaatgagtacgaatttcagagacagaagtcaatactggaggcattctgcagaggattttcaacattattttattctttatcttcttttctttcttaaaattaatatgtgtgattttgcttccacgaacatgtgtagctaaacacttgattaggtttagatggatgttgtttgacattgctttatggttttaatatgatttattttctccctaatttctatgtattctattttattcatacttaattacttttaattgtctggccatcaattaactgttttatgatttcgatgcgagatctgagaagtcagtgtcaattatgctatagtgaaatagaacttaatttcgatataggaccactactagaaaaacaggttttagtgacacacattgagtaactctaaaacggtttagtgacacttcaacgcgcatcactaatgagggtgactggaaagacagtttttagtgacacttcacacgtgtcactgaacccttttacattcactttttccgcgtcactatatgcgtatagagtcagattttgtcagactgaaaaagtaacagccacacgctaaaaagtgtcactatatcattttttcttttttctttttaattttttattattatttttagggatatagtgacacaaaaaatgtcactatattaaatatttttttttaaaaaataatatttaattattattacattccattttaacaaaaacaaattaaaatcttttttttttttgtctggaaaataaacttcattgaagaaaaaaataccaaaatagaacaaggttcacggttgcaacaggggtgcaacctccccaacatcaaacacaggacaaacattcaaggaagccgcacgcgcagcaagatgatatgccaccccattatccctacgagggatccaactaaccccaaacagcgccccaaaagagaaacccagaaaacaaagagagaaacacctgagcaagtttccagtcaggcaccatctgc

SEQ ID NO: 179558 - DNA, 560 bp, Cannabis indica
aaaagctattacatactattttacgtcttcttatccttctattggagatgttctttctactgtgtcgtcttgagttactaaaactatgaatcattctctgttgttcccttttactgccaaggaagtgagagaaacaattttctttatgccaactgattaaagtccaaatgaagatggtataaatagtttattttaccaaaattattagagtgatataggggatttaattattaaagttgttttaaaattcttgcatggtcatggagatttatctgttattaattctattattgttactttagtttctaagactaaaaatgccaaaaatatgagtgattttagaccaattgtttgtgtaatgtcctatataaaattatctcaatagttctcgtctgccgtttacaactatggttggatgatatatacactcatctcaaagcgcttttatcagtgggcaacgtattactgataatggtatggttgcatatgagttattgcataatttactggatgttaattctgggaagaggttttactcggtgatgaagttggatatgagc

SEQ ID NO: 179559 - DNA, 522 bp, Cannabis indica
taatgatagaaaaaaaaagtatgtagcattaatcactgccttctatttttgcataggaaaaaaaaatcagccttttatttttattgggtagattagatctactttaaaataaaagagaacagcttcaaatgaaaacaccacaaagcacaagtgggaaattttctatttattctattttttttttttttttttggtagatatgagatcattttttaatcaaattattcagttcactgcagccacgttcattttattattatcatatattaattctttttacgtgtttagttgtaattttacaatattatatatatataagtttcagcacctacactggtcgcgatcttatagtaaaccaatcacataacaacatactctcgtcgttttacagttttttagtgtcgttttgcagtttctactgtcgtttttgctattattagattaaagacacaatagacaaagcctgtgtgagccttcattatataactctttccctccttcgacaccagtttgaccatttca

SEQ ID NO: 179560 - DNA, 795 bp, Cannabis indica
caaaaataaaaattttgaaaatagttacaccacgattcacacaacactttactcatacaaaatgtagctattttctgaatctttaaaactagaataaagatcttttgaaatagatcaaaattgagagagatattgaatttttactaaagacattgtttctgaaaacaaaacttaaaatgagatatcataaccgagtgaagatatcaacttttgctaggtaataactaaaagtttcttcaaagaaaatatgtattattgaattatctttccaacggtaccagaaccgctggaaaataataaatatcgagagagatatcgcacttttactgaagcaatactggaaagaaatttgaaaaactataattcgacacccagcatgaaaacatgaatttttttgacatcaaaataatcagaattaaggaagagtctcttcatgaaaaatatatatcattaaattatcttcaaaaaggtacctagatcactaaaaacggacctatggagagagagatatggtagttttataaaagcttatttctctgaaaaacgaaaataaaaacacaactacgaattttacctgaagatttcgaagacacggaacgatgatcagataacagtggttgattgctgaccccgaagctcttaagattagaacaattgatttggtaaaatagagaggataattattttgagaggtgatgagaataaggtagataaatggctgctagggttctaaaactgttcatatgagtatatacgtatatatgagatatcgtataataggtttaaatttaaaat

SEQ ID NO: 179561 - DNA, 831 bp, Cannabis indica
ctagatctctctttcatctttccgggacatcttgaatcgtcctatttccagcaatatcgagagagttatagtcaaaatacgatcagtcgacgcagtagaaagctcactgcccaaataaaggggggcacacctaagcatggaaatcccatgccacggcccgccccttttaatcctaagaaaataggtttttttagcagtttttttttcctttttggctataaaagaagtggacttcaacagttgagaataagcaatcaaggaggacaaaaattagagatgaaaatcaatcgcgaaggctttttcaacgaggttttcagcattttttcttctctattctcttctcttttcgaaaattaatatgtgtgaatttgctacaatgaataagagtagctaaacatttcattagggttagatggatattgtttaacattgtttatggttttaatatgatttattttcccccaatttctatgtattctattttatttgtgcttaattacttttaattgcctgatcaccaattaactgtctatgattttgatgcgagatctgagaagtgagtgtcaaatatgctatagtgaaatagaactgaatttcgatataggacgagagtacctatatggtttagatagcttatagggtttctgtgtttaatgcctgttgcatgttaaatttatcacgagagtagaaagtttgcatgtaattgagatttatatatctgagaagactataaattaccttagtaaacctgctattgcatagaaatttgtaataggattagaatcatattaaaccataatcaatagatgtaattgaaatccaaagccctaa

SEQ ID NO: 179562 - DNA, 850 bp, Cannabis indica
aaaatccctcacaagctttggattcgcaaaagaaattgattagtggtaatcgggttttcaaactctctcttactctttgtttagatgtaagtttattatgtttcacagaatgagtagtgagcctagggaccaaatactctatatttatataagtgagacatttcatcaaagtatctgtctcaattaattgtcagaatattttgacaattaataaaaaaatataatttggataactaaatcaaatcaaattggtaactaaataatattgatcatattttgaatattttgtcaattaaactaaatattgactttatttaatccaactataattaatataattaataatggtaatattaaaagagtttataagcaacaaccatttttatatattttccttttatttttatttttttaagctgctaacaagaggagacattcatttctacatatatagagagatatatggactttgtttatcgaaacagataactaggaaaggaatgccagtattttacggtagtggaggaatactttgctcatttttaaagaaatttgctggatcaaccatagttttgacatgtaccaatctattaaagttgttttggccgaaatatttgaccacccaaatgctggcttcagcataagttacagtacccatgttgttattccttccaatatcaaggtctctataattgatataagctgattaggatttttggacacaaacggagtcatgtaattgtaaagtcttttaatccaacttatgtgcttttccactactattccactattctcttcttcttcccaataaatcaaatactgaatttttattcatgttcccaactctatg

SEQ ID NO: 179563 - DNA, 1481 bp, Cannabis indica
aataaaataaactaattttaaaatagatatggttaggtaattattattttaagaataaaataataaataaataataattatcctaattatatgtcaaaatatctcaaattaagcatttttcaaatttctacaaaaatatctaggttatttaaatatttaaaatattatttataaatttctaataagtaaaatgatataaaatatcatttttctaacttataatttataaacaattaaatatttaacaaaataaccaattttgaatttgaaaatattatagttagaatatctataaaaatatctaggttaatttcaaattttattaattatttaatttatcatataagataagttaaatataatatttcaaattaaaaagataaagttatctttaaatttaaaatatggcaaacattaaaatatctgatcttataattaaataatatataaatattaaataaattaacaaattttcaaaatcggaccataattaaaaaataaaataatcaattttttaatttaaacctcaaaatatcagaaattaatagtaatctattaaaaattaaatattattaatttaaaatttatatttaactttaaatgtattaaaatagtattttattttgattttagggtttgaaattaggaaaaattcaaaaaaaaaaataggaaaaaataccaaaaaatttacgaaaatagtggtgcatgatgcacctgctgtgcacgaggaggctgcatgcaccctcctacgcgcgcggagaggggattagcagggagggcgtgcggctaaactcggcatgtgcagggtctggacatgcaacttgtagcctccaggtgtgcgtgtcccctgcctgaacgagtgctgtccgagcacgagcgcgcactaggtctccttgtccgggtgcctactgcatgcgatgcaccccactcgacacctcttggtcccgaaacttcaaaaagtcatatcttttcaaatttttatcggaatcaagttccgtaaaaatcaaaattgcttaattttttacaaggaatccaaataaaatattttcagaacaaaaataaaattgtttttatggaaatatttcgtaaatcacgtacattcatcaaataacacatagaccaatatgaaaacatccaaatcaacacacaaacaatattcatcgttttaaatccatatttcatgaaagtaaatcattaccatggctctgaggtcagtttatgagaatattttacaagaatctagatttactaacaagtatgttgaattaactgttggaattattttactaagatctagatttactaacaagtatgtttcattaatatcctaatatgaatttctaagacaataaaataaacacatataaagtttaagaaaccttacagtagttgcaacagaattaaatgactccttccactcagatctctaacccttgtatcctttctgtagcaaagtatcaccaagatcagagcccgattct

SEQ ID NO: 179564 - DNA, 634 bp, Cannabis indica
atacattcatcaattaatacatagaccaatctgaaaacatccaaatcaacacacaaacatattcatcgttttaaatccatatttcatgaaagtaaatcattaccatggctctgaggtcagtttatgagaatattttaccagaatctagatttactaacaagtatgttgaattaactgttggaattattttactaagatctagatttactaacaagtatgtttcattaatatcctaatatgaatttctaagacaataaaataaacacatataaagtttaagaaaccttacagtagttgcaacagaattaaatgactccttccactcagatctctaacccttgtatcctttctgtagcagagtatcaccgagatcagagcccgattctccttccttgttccttgtgtttggattcttcacagtcttacatactatgattgatgaccaacttgatgtgtgtgggcactcactctatcactaatggctgaataatatttgtgaagaaaggcttagtgtttttttcgaaattgaagaggaagaagaagaaggaaaaggtctcatcaaaaagctaggtttttagctttggaggcattagtttggatgaagagaccacaaccttccttttatactatcttc

SEQ ID NO: 179565 - DNA, 780 bp, Cannabis indica
tataataaaatttaaattatgaaattatatgtgtataattttaaattataaaaagttttgctataaaattttaaataatttaagtacaaaaaaaataaattgctaaaagatccttatatagtaataaattgcaaaaaattaattaataattataattaatttaattttaaaatataattaatcttaattacagttttataaggaaataaattattaggttactttcaggttacaagttatttattatttatttttatttaattttcaaattaatcacaaccatttaatagtaatccaatggcttaaaaaaatataaccatgatggttacaataaaaatgtaaccattgaaacctcttagagtatgaaatgttatacataaatatttatgggtcaagttgataagtaaatcaaatttagagttattactattattgtctctaaatatccttatttaagaatgtattaattatggtaaaatacattattagttacttttttgtttccattaagaccttattctaattattttcttttggaaatttataaaaatactgaaatttaggttaatttttataaaaatactgtcaaatgatttttttttttcaaaaatagtgtttttataaaacaccagtaaaacacaaagcagagtaactcaaaacaacagtagaacaatataaaaatactagtagaacaccagtgaaaacttaacacagtatactgcagtataaaatttataaaaaaaaactacagtaaaaaagtaaaaaataactgcataacat

SEQ ID NO: 179566 - DNA, 603 bp, Cannabis indica
ggaagccttggatgaaatggctaccaaggtgaagtccttagagggagttcaccaggcagacttggagtctagggccaacttggccgtggagctgaaggagctcaaggactttaaagaccaagccttgaagaaggctaagagagatgagctcctttctcccgtctcctgcagccggtgcgtcaagcgtttcgacgatggcgtctacatggcctggtctacaaatgaccagaatatcaagcttaacttctatcccaaacccgcggagatgattgcaaaattccgggagaagaagaagaagctcgatgccatgctggaggcgcgcattggtcctcgccttcctcctcacattgactaggccgctctgagttcaacccattacaaccaagatttttctcacttcttttttttttttatatttacagccaattatcttataattaagacaatttttatttacatagctgtttttatttaaggggaaacattggataaggcctgtccccgggccctttgtacatatttttttacctgcccttacgggtcgtaggatttttattatatttttatatatgcatcttatttgtatgcacatatcttcctttt

SEQ ID NO: 179567 - DNA, 900 bp, Cannabis indica
ctgcaacagactgcaaaaaaatgtcattttgagtgacaacctttttgttataatatacattttttgtcattaaggtaactatttagtcacacaaaaagttacttgtgactaaaagatagtatttaagtacaaattgtcactaatttacttttattgtaacttaaaaacatatttagtcacaacaaattgtgattttttgtgactaatatacctttagatatggactttttatccacaacacattggaattattgtttataattagccacaactttttcacttttagtcacaagttttattgtgactatgtatataagtagttggtagcaaaactttctaccattaaaaatctgttacaattcattttttaatgttggcaaagtgttaattaagttcaactaaaatgacacatgtgaagatgatcatattgatccaaaataataattttgaataaattattgttacaaaaattaattaaaaaatatttaaaagtcaataaataagtaaaaaaaagtatctatttttaaaagtgtatatatgtataatactcctaatttttctaaaagaaataatttacattcttaaaattaaaataaattaatataaatattatttttaaatttttatttaaaaatttcattcaattttctttacttttttgttttgtcaagattgaaaatttagatttttttttttaaggttttagtatttaatacttaatttaaacttattcaacttttactatatatataagtaatacttgtctcaaaattattgaacatcacttccaacatggagatggaaataccatcattcccagcagtactcctttcttttcatttcatcttcttcttgtttatggtcaataataagaactagtactactagctcatcaccatc

SEQ ID NO: 179568 - DNA, 785 bp, Cannabis indica
actaatttttactaaagtaaaatattactatcttaataaaattaaaataaatatataatattattttaaattttatttaaaatttaatctaattttctttactttttgttttgcaagattgaaaattttagattttttttttaaggttttagatttaatacttaattttaacttattcaattttccactatatatatataagtaatacttgtctcaaaattattgaacaatcacttccaacatatgtgggaaacattcacaacctcatgtttggctcttcattaatccatcatacactaagagatttagccaagaaatatggaccattgatgcacatgaacattggtgaagttccaaccatagtaatctcatcaccagaatttgccaaacaagtgatgagagtccatgatgttaattttgcatcaagaccctcaattcttttttcgaaaatcatgttatatgatggtgctggtcttgcttttgctccatatggtgagcattggagacaggtaagaaagattttcatgcaagagcttttgaatacaacaagagttcagtctttcaactacattagagaagaggaaatgctcaactttgtagactcgatttcatcgaatgttggcaatgttattaatctcagtgaaaggctcaacatgttgatgtataacattatttcgcgtgcagcttgtggtagaacaaggattcataacaaagagttcttgtctttgttgacggaaattgttgaggtatcattagggtttgaactttctgacttgtttccttct

SEQ ID NO: 179569 - DNA, 666 bp, Cannabis indica
atatatatatatataattacaaagaaagtctttctgttataaatcatcatgatataattgcatcttcgtcatcttgctaaatatattttttcaattgactgctacagtaactatttatgtatatgtgacaaaaaccttggcttaactgcttcgtttccttgtcttaaaaagttatgactcaatccttttgtatgtctttaaatcagttaaattaatatagattaaacactattttgaagattaattaaacaaaaagtattaaagtttaataaataaatactattttgaagattaatttaaagtagattaaataattattccaaacaaggcttcttattcctctaataattaagctattcaaataaaaattactcatattcaaaacttgcttaattggaattcgtaccatataccacactataaaaaaattattatttttagtgacaatttttttagttacaactataattttttgtgactaaatattacttttagtcacaacaaaatgttacttgtgactagaacataatattttgttacaagttgtcaataaattgtttaagtcacaaccaatttgaaatttttgtgactaaaacattttagcctacggaccttttagtcacgacataagaataaaaatttataattagtcacaactttttttac

SEQ ID NO: 179570 - DNA, 737 bp, Cannabis indica
ttaatagtctctttaattaatcatacccttaccattttaatatcctgcttatttataagtttctatagaaaaataaactgctcatttaataagcttctataaaaatctaaaattcgccatattttataaatcctctacgagtttttttttttttaaaaaaataaatcatcaatttattaattgcaatcatgtaagattacattaaagaaatcagaagaaacatcatgacttctgatgacacgatcaacaacagaataagatgttctagccaagaaatgagcaacactattcgcagaccatttaacaaaaagaaccgaaacatcaattaactcatctaaaagagttttacaattaaaaataacactctcaaagtaagacaccattgcaagaggactccaaattgcttgcacaacaatgaagctgtcagtttcaacaattactctctgccaagatttcttctttatccaacttaaagcctctctaacccccatcacctcagccatttttggtgcaactaacccaggccgacagcaagtaacagcctccaccaaagcccttgacaaaaattaagctgcttatttcataactttttataaaaactaagctgcctatttcataacctcttataaaaatcaaattgctcacaccaccttcaaacaattaattatcctggttgtaggaggtcgaccttgcaaatcataaattagtgattctaatcaatgtgtcaaaaaaaatat

SEQ ID NO: 179571 - DNA, 837 bp, Cannabis indica
gttagagagagagagagggagaaagaaagaaagaaagaaagaaaagagagtatttttggttcgtttttgtgtgaatcgtttttctaattttctcatcttctttcattgaatttctccgcattgatgcgtttcgcttcttgatctcgttctcgatctgcctccgtcactccgatctgaattatcaccggtatgtttatctcttacgtcgttagatctttctttttttttttctttgtgtttttttgatctttatgtatcgaaattcagattcatatatgcgaaaattaaaaagattcgaaaactaattggataatgtaataaattgttagatcgtgtttgattcggtgcacaatgacggctgatgttcatgaatctgtggtcgttaatggcggtgaggcggtgattcaggaacagtctgatcgggatcttagccctacttgtactgttacttctattactcacgatcctgtcaatgctaaggacgatttcgacggttcgtacgtttttgtttcagatacggacgacagggataaggatctcgttgactctgatctcaataaatgggggaaactcttcacttgcctgttgaaaataatgagagtcttcaattggaagaggggcgagggttgtagtagtcattgaacaatcagatcacaatggtgtcaatgatgataaggtcgagggagaaggagaaaaaacatgacagtaatggtgaatgtcaaacagagaaggagtcgattgccgttgaccaatctgagcaaccagctgacaatggcgtggtggaggtctgtgaattcagtaatgatttatcgacctctgacccgataaaaaacctga

SEQ ID NO: 179572 - DNA, 774 bp, Cannabis indica
acttggttcgttgattgccttgaaaaggcagacaaatatgcaattcctttagcgacccttatttgaaaatgatttggcaagacaacataatggcgcgaggttcaaaagcctccaacgaaatagaatcattttgtttcacgttggtggggtcctactgatgaaagaggaggtgatgtgaacctagttgaaaggccatgaacatgcggtgtgtttacattgctaaaaattaccttacactcatgcatgtgtccgcgacattaaaaaatgaatgtgactgtgtgcgctctatgctctctgtattaatcaaaaagattcaatggaggaagatttacgatgataccattaatcttgttggtgacgtaggaatgattagggtgttcctagaacacatcaagaacatgaaaagttggagtacctgtagagaaaaaacgaataggttgtccaaggaagaacaaggttggaagattgaacgggagaaatatttcccttgtggtgatataaaaataatgcaatctcaaaattgtggcaattgtggtggttcgggccacaactagagctacatgcaaagcctgtatttgaggcttagtctaatattacttgtaataatatgtattgtgaaaccgtatttggtcatatatatttttgttttctacataaaaaatcaaagtggtaagtaggtggtgtttttatttgctaaaaaaatataatttttgccttatcgatgtatttttgggagttttttttgacatgttcgcaaaataaaaatttcttagt

SEQ ID NO: 179573 - DNA, 823 bp, Cannabis indica
cgaatacgtgacatagatatacagaaacacaaaaattagaaaattaaaatttataacatatagagtttcaaaaactgtattaaaactataaataaacttaaaaaattcattacagaacaactaaaaaatatactagaaaaccaaaatacatagtacattgcaacaatctataaatcatcacgaatatcaactaaaaaataatgaatcataaatgaaacctaaaaaatttataaacaaaaacaataaaaataacaaatcacactacaataagaatttaatatacataaattcaaaaccataaaaataaaaatcaacagcaagtaccataaactattaaaaagagaaacatggttccgaaattgagaaatgaaaatgaaacctaaaatcaactaatatgaaatataaatgaaactcaaatgacctaagcaacataacatacgtagaacaaactaagaaataattttttttaaaaaaaaatactagaaccatacctaaaagagataaaacctaaaatatggcaaaactaaaaaaatgctatacaaacctcaatcaaatgaggagcttgattctttctcttttaaccaacaacaataggactcccctcgatttcctctccaataacgattttagatttcttcttagcaggatccttcctctgttagagtatgggctcaacaaaattatcattagaaaaattatcatttaacttcctttttcctttttcatttatgaagacagatttcaaccctatttttgaagcgttagaacctgtaattggaactttttcacaaaaggagatagagaagatgaagaacgagttata

SEQ ID NO: 179574 - DNA, 569 bp, Cannabis indica
agcatggtccgatcccactataggaaataagtgaatagaggccttaggaaaatcattaaaccatcttgcatcaacaatgaccctatccagtcttttacgcactctattctctacatttctcaaattttcccaggtacaaatgtctcccccacatccaagatcaactcctccagagttaaacaagaaatttgcaagcatctccccttcccgcatatcaaaagctttgcctcctatcttctcagactgatcaagaatcacattgacttaacccattatagcccaaggctcgctgcactcaccaattttagccgtgagtcattgccaaaacgatctcttcagagcgtaatacagggtcccataaatgcagattaaactccattgaggcagacctatccccccccttaaccaccacacgaaaccccaaatctaaagtttcaaccacatgacaattaattcctcttctcaaagccacacaagaaaccccctacctatacccaatacgcaaggactacacgagacaattagaaaaaccccagacgcctagtaacgttcctcatcgtttccatatc

SEQ ID NO: 179575 - DNA, 927 bp, Cannabis indica
cttttggacaaaatgaataaatctaatggttttctaatttaattaaaaaatattgacattattaaaacataagtaaagctcactaaaggacacgaattaaatggccgaaaagatcattttaccccttattaaatcaaaaaaacttctaagtcttttaggagtattttggtcaataataaaatctcaactaatttcaacattcccaatgcctaactatactgccccgctactactaaataccaaaatttgattctattggccaaatgtcgcgttctaatattgtcaggcacaaaacatgcaaaaacataaaattttatgaacgacataaacaatacatctcgaattcaaataaatctccataaaatgataaataataattcttattctggtttcataactaaaccttaattatctgctaatttctaagttaaaactaaggggtctttacactattggtgtcggttgtgaactgaagcaaataacttttcttcaaactgtagtaagtgttaatttttttattgcattagttatagttcgacgcatatgtgtacgcaattttgttttacttttagtgtcagttataaaacgacgaatagttgtaggtaagggtaaattgcaaataaatctacaattttccccacctgcatttttagatttcacaattggtttgttaacaatattttcatgcattaacaataacatttataaaataataaagataatatttttcatgtaacaaaaaattaatataactacaaaatatatctaatattaccaaaagtaacgaccatacacgttttattctatacatcataacaaaaaattaatataactataatgtatatcaataatacaatgtataaccaaaataatatttatataaaataattgtaacatattacgtttatcagagttacttacacttag

SEQ ID NO: 179576 - DNA, 535 bp, Cannabis indica
ggaagccaatgatggaacaccctccaaaggaaatttttttcatttttttggcgtaaggatagacccccatacaaattttccaccacgcctttgagtttttggaatttatttttgaacatttcagctgctgtaggatttgtttgaagcgaagttttataaccactagccaccgaataatttaccatttagagtttggcatgccaagtaatccaatccggtgtattcatagggggcttaattccaaggacccaaggaacatcatcttgatggaaccaactaattacttcgttgtcttttccaagttccattcggcttgaggagagaattaattgttacatcttgagggattggtattttgagtgcgaagtttgaaaggatagcttctcgggagccacacatcttcatttactcttatcgtattaccgtcaccaatacaccaacgaactcctttgataagaagatctcttccccatagaatactactccaaatagtggacccataatgacccaaattagcttcaaagaagctcaccga

SEQ ID NO: 179577 - DNA, 825 bp, Cannabis indica
cactcccagttttgcaccaaatccagtttcattgttcttgagtattatcatttcagttggcatggaccctattctaaccactcggtcctgagagctttctttctacacttagtgggtttcttcattgtcccagttctaataagcgtcgacccacaaaagatattgggtttaaatatccatgccttagctctagtaatcatggggtgagatggatttaaaggagttgtttcttatactagtgcatctagtggcagacctaagattatattttagggtgggcgtaattttgttttacatataaaaatacgagtataaatacatgtgtatcatgctagtccagtccatattttttcaagtttatagggttgtgccgtgtcaacccataaaaaaatacggaccatgccgtgttatgccataaaaacatatgggatgtgtcatgttgtgcaacaattttatagggtgcaacctaaatagttacgtgctaacccgtttttgtttttaaatataccaacctcttttcttatatgagctcaaattcatgttctatatttttgtatttttctattaaaatggatgagctaattactaaaatatatgtgtattcatagttttaattacctttgcatcttttctcaataatagttacccataatcatataaaaatagttataattattagaatttgaatattactatcattttaattgataaataaatatttattattgttattattgttaaatcatcaagctttttaatgtgtcgtgctttcgagctaatttattcgtgcttacgtgatgtgcttttgggcttgtcatgtcttgt

SEQ ID NO: 179578 - DNA, 668 bp, Cannabis indica
ttgatttcctgaattaattgtcaaaatattctgacaattaatgtggcacagatactgatggagtatctcacctataaatatagggtctcggtccccgagctcctcactcattctgaatccattcagcaaattccatctaaagagagttgagagagcgaggaagcccgaactccaatactgaagctatcgcagggattgaagctcaaagatcaatggctggaggtacatcgatcctttcattgcatatattattgatatgattacagtttattttccgcatttcatatcattgtatatgctatattacatacactatatatatagtctaacagtgtgattcaaaaggaaaatctcacacagtgttagttagacacaaaggagaagttatattaagtgctggtgcaattggaagtcctcaacttttgctactaagtggaattggcccacattcttacctctcatcacttaatatcccaatagtcctttctcaacctaatgtaggagatttcattgctgataaccctcgtaacaacatcaatctcataatcccatcaccaactgagccttcccagttcaagttgtagattacagaccattattcatggaaccatctcggctaatcttcccaattccccaactccgttacctttcagtactgtacccctaaa

SEQ ID NO: 179579 - DNA, 711 bp, Cannabis indica
atatgcagaaaaataaataacttgacacaagagatttatacgtggtatcagtgttctcacgaacactcctagtccacggggccacgcccagagaatgaaatcaattaataaagtatcaaaattacaaagacaattgacttaaacaagtttagactccctctaaagtattgccgcaatcctttgtaatccactttatgaatctgacttcttgaaacaccttcaagcccgaactcccttcgtctttgaagtgtgagtgcttacttcctcccgaagtaaggcttcaacaagtcttctcccgaagaccaagtgcttacttcctcccgaagtaaggctttatcaagtcttctcccgaagaccaatctcttgttcagtcaagtagttcttcacaacagagtaagaacagaaatagacaactagaacctagatgaacaactaggctctcacaaaacaaagaaaaactctcttctctcaaaaagataaatgcaaaaaatgaataatggaagagctaattcgaatggctgctctctaggctctatttatagaacatagaaaccttagagacagtcacaagttcgaatctacagctgtacaaaaactttcctaaagaaacacgatctgctacatcagattcggatgctgacgcagcagatcagaccagaaacgggaaacttgctataatcgggtccgatcctctatcaatgcttgattcct

SEQ ID NO: 179580 - DNA, 650 bp, Cannabis indica
atattaattagtatttttatttgggttgaaaagtaattatattttatcttattttatacatatattaaattaggattaaattttacttattttattattattattttatttttggatctgatggatccaatccaatctaataaatattggacctaaaatattatatagatttaattcgatccaaaaatattaagtctaaaatattgaataaatatgaactagatgtaatcatttgacaaaattcaatggatatacatgaaatagaaccgattcaatgaatcttagatgagtttggatgattaaaattaattagatctaatcggttgataaaatttaacactcagtcaatatataattggataataagcttaaaaatattaaatgtagttttataaacactttaatttgtactttctatatttattaattattaacttatttttgacaaaattgattcattaaattaaaaataaatgtaaagaatgggagacatttaaacaaattcattatatatatatatatatatatatttttggttttgactaattcttgttcccttaactaactaaacaatttgtcactaaaaaataggacttaaattgtatttatataaatatattatcacttcacttcttatcttcttatctttg

SEQ ID NO: 179581 - DNA, 545 bp, Cannabis indica
atataatattttaaattaaaagataaggctatcatttaatttaaaatatagccaatattaaaatatatgatcttataattaaataatatataaatattaaagaaattaataaatttcaaaatcttaccgtagttaaaaataaaataaacaatttttaaatttaaacctcaaaatatcataaattaataataatctattaaaaataaaatattattaatttaaaattgaaatttaagcttaaatatattaaaaataatattttattttgatttttatgatttgaaattggaaaaattggaaaaaaaaaaggaaaaatcccaaaaatatcgcattaggggagtggctgccgaggaaggctccacgtgcagcctagaaaggcagcaagcagccctggcgcgcggaagagaggaacagcagggtccttatgccgaggtttctcggcgtgtgtagggtcctgctcggcgtgatgcagcctgggcaaggaacgctcgtgtttgtccaagtgaacgcgcacgtgcatgcgccttgtccgagtgcctggtgca

SEQ ID NO: 179582 - DNA, 616 bp, Cannabis indica
ttaggcccaacaccaacaattgggcacgctcatcccaacaaccaaaaaatgaaatgggttgtaattttttgtaattacaaaaaaaaaaaaaaaaaattaacaacaatgtttaaaattaaggtttttaccatattgaaatttccaaaaaatttcttttagtttttttttttttacttgtggagcagattttttttaaaaaataatgtgcaagttttatactgtgtactgtgtaaagtttttactgttgttccacggttattttttagttgttctactattgttttaattgttctgttttgttgttttacggttgctttataaaaagacagtatttttgtaaaagatttcatgtaccagtaaaattgtaaacttttacctaaaatctaatatttttgtaaaaatccctttaaaattccttattttcgtgtatttctaaaataattccttatatattggattatttacaccacatactgaaaattctaatttttttatttttttctaccatggtgcagaatttttttctaaaaaaattacagttgtaagtttttatactatgtactatgttaaaatttttactgttgtactactatagtttttttagtttttccactta

SEQ ID NO: 179583 - DNA, 460 bp, Cannabis indica
gcataatagcctttctaagctttatatcccctctgagaagatttccatctgaattgagagtttacacgaaactgatctctatagcttgtgacgattgacaatgtgaaagcacattgccagttgcctgagataatttcaggctgatttgaaacgtgacaccaacattgttgcgttgctaattgaggcagtccttgttgaccttagccgatacaatagtttgctgaaaagtgaaaaagaaaagacagaaaaaagagaagaaatcgataagagtagttaatacaaaaaaccctttctttttttacttaaaaaaagtagttaattacaccatacaatgttagctaaagcgctttttgaacaaagagattaatcacaaattcacatgatacgcatactaagatcacataggccatacaaccccaaacatataggccagcagccccaccttcagcggggaaataac

SEQ ID NO: 179584 - DNA, 690 bp, Cannabis indica
actgcttggtcaagacattttcaaagccatcgtgccgcaattcaaaaggcagtatggtgtgttgttattcttgataatcgaaattgctaccccgtatttaaccttgtcctaaataactttcacatcctactcaagaggagtagctcaaacaacatagtgtgttgttcgctctaaccatgtttgaatccctcttaggcacctacatattgattgctatattttttctaaacccatatccttttctttgtcattgaaattctaccatttctttccaaccatactgcctagagataccaatgtatgtttgcattttacattttgcactccaagtccatctgtgtgaggtatattttgtaaaccaaatatagctcccagtaactcctaattatatgatacaaggtctggaatcatgacttcttttgggaatccatgcaacctggaggaggggacatgcctgtactgggcttgcttgagcaaatagaaaaggattttggttccttcacaaattttagagataagttcacagaagcagcactttcactttttggctctggatgggtttggcttgtctgtaagtctttcacaactttattatgatttattttgtttttgagttttgtgacaaaaaggttaacatattacattaactgaattttgtgttagtttaatgtgttaaaatgaatctcatct

SEQ ID NO: 179585 - DNA, 743 bp, Cannabis indica
catatcgtgaataaaatcactaaacgtcgtgaagcaagtcacgaataactaattcatattttaagcaagtatttttactgaattaacaaaaaaaatattacagaacagaatagaaacatacctgactgttgaacaatagtgcgatgtcagttgccttaacatcttgtttctgttggccctccagagtttctaatttaccattctgggaaacttggtcgcgctgcattgagcatacttcttgcccactttctcaatggtttcgtatgcccagtactgaaaggcaggtacatagccactaacagtgtactttgcctcctgagcaatcttcttccccttcttcttatcaacattatccttgtaatgttgcatatccgtattcaatgtctccatcaacttccaaaaagcatgctcaccccacggatacttgaaaaagaattcaagatcgttaacaaactttaacatgtcaggccaaacttggacattgttctcttttgatactaatacaccttcaatgaaagcgatcagtccaaacttgtaggcatcatctttacttcgcacctctcaagttggagcataagtgaatccaactgcacagaactcttcctttcaaaatatgtctgaactaaatggtcgttggacttggctatttcctcctctgtaggggcactactcataggtaaagctggtaataaagtccaaaactctatccgtctgaatctcatgtcattcttctttacatgaaa

SEQ ID NO: 179586 - DNA, 473 bp, Cannabis indica
ctattttgtggagatggtgatggtggctagtttgatacaaaacttagaaaagttcaaaatgttcttgtgtcgtaattcaaaaaatagatattttgtacctgaattttggctgaaaaaaaaaaaattacttttcgaactatgagcaacattttaaattattttttcttcaattttttttattaaatttaatgacactaaatagcatttatctaattaccaaaactttctcgtgagattattttttcttgaatttttttttttttttgtactaaagaagaaattcattaatcaagaacaaccaatacaaaacaagcctcaccaaccgggtccaaccaaacaacctttctcaactcatcaatcgcatatacaaagcatttccttctaatacatgtttaatcctagtcatgctatacaatctatactttacaatatctttaatctctttgactatgtattacaccatataacaagtg

SEQ ID NO: 179587 - DNA, 734 bp, Cannabis indica
acagtattagagtttcaatcgttctttaatggagaatccttgctttgtgttggagcattaagtttgaaccaaactcaaattcaagatcctctacaagtccctcttccaaaatcttacctttttctgtttacccatttcttgtccatccagcttgataagcataattttctttcttggcaacatcaagtgttagcttcaatcaaacaaagccgtcttcacaaatatctcgattcaactcaaattcttgtcatctttttaacccttgctgatgaaccaagcaatacaagaaaccatgcctttgagaattaggaacaataagacaatctcttggtttcttggttattgtctttaatatccgagaaaaccacaaatcacatgattggatgtgataatatttcttagatttggaactctctcaatgagtaatacacaacccttaacactatcaatatttgtctttacaagactcaacttatgaacatgaagatgagtggttctcttaatgactacctgctgaagattaagggaattaattgttgattttcttgctaccatcggtcacaataagacacctcaagatcatattgaggcaatctttagtgttcttgctccctagtatgatgtctttgtctacctctgcaccacaagaaatgataactagatagttgcagagatggaagcacttctaatggcccagtgtgttcgaattgcaagaatgtcaagtctctagatat

SEQ ID NO: 179588 - DNA, 599 bp, Cannabis indica
tgaaggttcaacaacaccaacgaaagcagatagttattatgagtatctaagtttgattctccaaaatcacaagttctctcttattccgatgtctcatcttcacaagatgtgtttactcgtgttcttcgcaccaaaactacctattcatctcctcttaatagtgcattggtgagtcgtaacaattttgcatcaggaaacaattctactccaagtggatacaaaagaagtacttcacaagaacctgataatcgaacaccgaattccgggagcatcatgtgcaactattgtaagaaaccagatcacactaagtttgagtgtaggaaattacagttcaaaaatcaaccaaaacattctactaatattgcaagcactagtgatgcatctaacagctcggtccttatttctgctgatgaatttgccaagttctcgaggtatcaagaatcacttaagtcttcatctccttctatgatttcaataactaattcaagtaactctaatgcatgtcttcttttccacatcctcaaaatgggtcattaattctagtgccacaaatcatatagcaagtaattccagtctctttttcactttttcagtctcat

SEQ ID NO: 179589 - DNA, 753 bp, Cannabis indica
atttgcacaacttatttttgcgttttttaaatttcaagattcatgatatgctctttacaaacttagtataagttagaagcacacttttctattttattcattactatatttattaatgtaacaacatgattcaaaaacttgatgccaattttaattaaaggttttcactcgttactcacaggacctttttttttaattatcattattatttttggcgttgatctcaatcctatctctgtttttctcttgttcccgtcagttggatggaatatgtttgatattttctgcagacttgattttattataatcttttttctaaatgtcataagtgacatattgttgaaattgttctttgaaacggctgttctggtaccaatgcatttgttgaatttcacctgttggtgacattgaagcatatttagcaaaaaaaaaaaaaactgatatcccaccatttttcaattacacaaactttgaaaaaaaaaactgaataaaagttcgaagtagatgaagagtctaatgttgaaagttaagtaagttttgtttagtttaattttgattgttattattcttatttgtcatttacttctttattgaaattattttatctgtttatttgaaattttactgattctatgtttttttttcctaagcttaaaaataattttatcacgaaacaatgttattaaagtgagggcttaagcatccatactgaatacgcattaggtgatatgtattatatatatatatatatat

SEQ ID NO: 179590 - DNA, 596 bp, Cannabis indica
atgaattcatcaactggtataaatgccttttgttttgctcacctatttcttcatttattaattattattttgttgttttttcatgaaacggatatatcatatatatatattattttttttttttaatgaataattaatatttttgttctttaatttttttgattttatcccctaaaatataagggtcagttgaaaaatatctcttctcataatcaataactaaatttatctctaatttttatttaattgaaacaaacctctttttatatgacataagagagtcacatggtatcttgaagtcacatagacaaaattagtacaatgtttaaaaaaaaaacgtaaaaatgatagaatttaaaaaagatggtaaaaataaaagacgacaatataaaaatggtatagagtctaatttcctcgaaaagatatgacttattgaaaattctctctaaaatataacagttatataattagtatttttatccctgaactttgaccaatataaaattttgccctcttttattaaaaaaagttaaatttaaaaaattataatattctattaattctaaaataaaaaataataaaatgtataaaaaaaa

SEQ ID NO: 179591 - DNA, 575 bp, Cannabis indica
ttaaaatgtgtcatctcattttacttatttttttttagacttattttattaatttctttattttttttactaaataatatgcaccactatgcatctttcttttaaattctttttttataataaatatgtattattttatgttatacaacataaaaaatactaactctttcttttttataataattgtaactatttttaaatataatttagaaggttacacatgtcacttaattaagaagagaatgtaaaagagagtgcaaaagagagtttttctagcattatcattaataaaaactaaatgatggcgtaattgtaactatttttaaatataatttagaaggttacacatgtcactcaattaagaagagattgtaaaagagagtgcaaaagagagttcccctagcactcctcattatattaaagcggggcgtaaatgcaaaaaacaacattaaaataaactaaaaaatgtaaaaaaaaaaattgtaaaattttgaaagaatttttttttctgagtgggggcaactgcctctagtatacacgcgtgttggtctgtcacggttacacacacacacaca

SEQ ID NO: 179592 - DNA, 763 bp, Cannabis indica
gaaacggagaggacctacggaagttccagaagtgtgacggaaggtatttttaccgccaaaaatacgacttaggtatttctctgctactcgggataaaacttaggtatttttgccgcaaattactctcgtaatatttttggaatgataatttttttatgatagactaaaaaattttttagctgaaaaaatattcaaaatattaaaatattttatattcaccatctaataattttataaattaataaaaatgtcttttaatttataaaaaaatttaaaattatggaataatgtaaaataaatcatctgcactaatacacaaattaaagaaatattttatgtaataaaaataatattttagatttaaaaaaaggttaaaaataaaactaaataacaaaaaaactattcgaagagaaaataataattattaatttttttcatataataaaatatatttgcgtactatttttattttaaaacattattgtttaattttaggattaatctaggctattttatgtttttttttacttttaatgacaaatatgttaaaatatatttttattaactttttcaaaattatttgggtattgaataagaaacattttaatttgagggtttgaaagtattttttccactaaaaaaaataggtattcaattgttatgattgcccaactcgtgttatttatgcaaaaagaaagaaaataagtttggtatttaagtcttacattctttaaacgttgattattttaccgcaatttatcca

SEQ ID NO: 179593 - DNA, 646 bp, Cannabis indica
  modified_base (565)..(565): a, c, t, g, unknown or other
gtatttggcattatgaaaaaaatcaatttttaagagaaccgttcattatctccttaattaaggtggcgtttggtaacacttttttaatcagttttttgtttttaaaattagaaaaatgaaaatatttttcaaaatcatgttctataaaactgtttttatttttcaattttttaattgagaatcaaaattttaaaaacaaaaaaaattactttcaatatttttttaaacagttttttttcttaatcaatattttggactccaacaagacccggacccaaatcctctcccacggcccttgtgctgaatccgacctctgaaccgaatccaaaatcgaccccggacctagacccgacttaaataaaataaaaaaaataaaaatagaactttacagaacacacttttgttttctgtttttaaaattgaaaaacaaaagtggttacagaacgcatttttgtttttcaaaaataaaatttttaaaaacaaaaattttactttcattttgtgattaaaaattaagaaaacaaaaagtagttaccaaacggacgacctaaactaaattttagtntaaaaaaaaaaacaaaactagtaatagaaatagacaaaacaactaataaagactactaataaagacttaattatataatgt

SEQ ID NO: 179594 - DNA, 797 bp, Cannabis indica
aaacattaacaaaaaatggcatacaaataacaaaaaatcaacaacaaattaacaagagtacaatataaaaatacatcaaaagaccgtattttctataaaatcataaaaactgtaaaaaatatttaaaattctgtacaaccgtaattttgtaatttttttattatttttgtgtatttgtgaaataacccctaaaaataattaattatgttggtggtcattgaatattttattgagaatatataaattttttattgtttaaataatactaatattgtaaataaagaaagtaaaattttgtaaaattcaatgaattataataattagtagtattatagtaaataaaaaattaatatttagtgtgggctaaatttaacacaacgttaattcttgcataaaatgtggtaccatgccttctccttttggtttattagtttatgagtgcaagatcctcttgacctctttgaaatctgttgaggttcattttgtcaaacgttctgtaaataaagttgatgcttgtcttgctcgtagctcttgtttttatccaaattgtattttcactgagagtaatgctccgactgaagttttatctattgtaatagttgatgctttatgttaataaagttgccatttcttttcaaaaaaaatactatatcttgtatcaaatttaatataactttttagcaagtgtttaatttagtacatattttagaacattattaaagtagtatttttcttaatgtgtgctctactagaattgctcttaggcaatcactatataaaaaaagccacttttagtg

SEQ ID NO: 179595 - DNA, 1388 bp, Cannabis indica
gcttatgagacaataaatgttgatttttagattgttacgcatatgtgattaattgtactgtttgtatgttagcatgtgtttattgcttttacttttattgatgagtctttttttgacttacgagtgttttgtggtgttggtaagagcaagggtaaattagggtagccatgagtcagcagtcttctccgacgaatgtacatatcgacttaaccgacctgtagagtcgagttgtcagtagatattttggtgccgcatctgtatagcattttgaatgtaaaccttatattaaactttttgtaaaatacatttataataggggatccccaaacctagatatttattaatgtaacctttataattaaagtttatttaaataattcataaaagcacacacgtgtgacgttttttaaggtgttatagtaaaccataatttgttgttcattgtaatactcttcactgtctaaatccactaaatctcataattttgtggtttttattatattatctttctgttatttacatataatttggaattagattcaatttgtcttgaatttctaattgaagataaattttttattatgatcattaattttacttgcaatatatagtattgattattgtatattattttttgtgtgcaaactaactttaaacgtcttccactgttaaatttgtatgcatttatttttaattattccttgtgaatttaatttttaattattattgacaccctaaaatattacccaaacaaaaggatttaacatgttgttcctatagctcattaaaaaaaatacacagtatagaaattaaacatgagcaggatgattgacacgattaattacaaaataaatgaaagttgataatgaaggttagagcatcaccaaggatgcaccaaatcttttatttggtgatgaattcttatccaaggaggctgcatatatatgttgaatttggggtggaagctacagtccacggtacatatgccgtgcactgtagcacacggcatccattttttttttatatatatattatattatatttaattaatatatatttatattattaattgtatttatgaaattataatgtatttttttttaaagtagtatattaatgtacttttacttgttttcgcatttgagagatttttttagtgtattttttttatggttgtgtatattataattacttaagatattttgtaaaattttaaaaaatttagaaaaatttaacaagttgaaaataaagttcaaactatctgttacacgtgtaactattttatttagagtggtgcattttagtttgtggtggttttagttaattaatataatattaattttttattttattaaaaaattaatataataataaagaataatttttag

SEQ ID NO: 179596 - DNA, 697 bp, Cannabis indica
atcttacatcatttctcttctttgtcttgtatttactagacgatgatgacttttatacacatttccttacccatcacatttcagtttttaaaaaatgatttgtgatgggtcacttctcttcattgttgaaagaagcttgcaagagttgtatgtgattgcatttgtttctcttttatgtttataatgttgatgattcaatagtgcgttcatagcttaaaacttcgacttgcaataactgcacgtagaaaattttgatgatagaactgctccataaattagatgcaagaactaatattaaagaatgagagagagatagagagagcaattccaaaaagagagggacgaaaatgtaatgagagagagcaattacagaaagggagagcaattaaatagaaaaagacgaaaatgtatcatatatataaagtatattattaagacacattttttaactaaatatgattaaatttttaattaaattaattatttaattaaaataatgataataacacattttttttaagttttaattatacacatagcattaacaacatactacaacattactacctaaagtgccaaattcagcactagccatgtagatgaaaaccaacagaagtgggcgcatcctattaatgtttaagcattgctatttatactcaaacttgagtatatagtatcttcaacatgtgatgcgaaa

SEQ ID NO: 179597 - DNA, 773 bp, Cannabis indica
cttttacccaaattgtgggtcacaaactatgaaaagcttcacaagctacagcctatggttcaaactacaattgagccttcctactgcacaaaagaagatggatctgttgaaattgcttttgacagaagcctaatatgtcatcacacccatccaaccacctagctatttttgcacccaatatgtcatcacacccatccaaccaacaaatggagtaaatattgtactttgattctcaaggaaagccaattcatgcttttgaatcctcagaagagcataaaatacaaggatatttgtaactacaaaagttttctaaaagatgatgagccctcacgacgttcgtaaaagctagaaaacggcaacaaaaacatcgatctattacgccaaccatccaaaaaattcgattatacaatcaaatactctgcaccaaagagctacaatcagcctataccagaacctaccggatgagattcagatgattcttcaaaaacttcacagccacagatagtattgccttcttacaaaagacaagcgaaaaggatgaagaagcatggagaaaaatttccagcaccagctattcaaccatcagttcaattacttcctcacgcaaacatgatcacccccagtccttccattgattatgatgtacatttccctcctctcaagaggttcgaaaaaacagaagagcaaggtaccacttcccaccatccaaaaataccaaaatcctacaattagaaatgctgatggaactctacaaaaggtctccgcagccaaag

SEQ ID NO: 179598 - DNA, 567 bp, Cannabis indica
  modified_base (90)..(90): a, c, t, g, unknown or other
aaactaaatatttggaaaaaaaatttcaaaaatacattaacatggaaaaaaaaaaattacgctttgaattttttttatttatgcaaatancttttttgaaaaagtaataaacattttttatatatatatatatagtttatttatagttgacatgaagttattattatttttttttttgtttattttattagttatcgcgagatttatttcttgttgtcttttggttgtcttctttccttttactaagcaaagactttacaagtgtgttttttaaataaaaacttaaggccataaaattttaaaaacataaaaaaaaatatttttgaaaattactcctaaaaaaatcactttcaaaatttatttatatattttttttttcttaattataatatattttacattctctttcattaaattttggaacgtgatctcaatttgggccccaaaccttagaagctggccctcagaccaagaactagaccctagcccagacctgactctcgaacccatactcaacccccaaacttgtacctaaccccagacccagacttgaacctcagacacagt

SEQ ID NO: 179599 - DNA, 563 bp, Cannabis indica
aaaataatatgaaaacatcaaaagactatattttttatcaatataatcttaaaaaccgtaaaaaaatatttaaaattttgtacaactatatttttataaattttttattatttttttcctatttcttaaataatcccaaaaaataattaacataaaataaaatagagataattacaccacgtactgaaatttctaactttttcacttttatattgcggtgcaaattttttttcaaaaatactgtgtaagttttataccgtgtactgtggtaagtttttactgttattctacagttgttttgtaattgttccactattgtttttagttgttttgtattgtgtttcactgttgttttataaaaacattgttttatttttataaaaattaacccaaattccagcatttttttaagtttccataaaatataacctttccttatcctcttgggctgagtaaagccgaaaagtccaaaacactataatgacttgggccacatctgattctttcatcatagtgtaacactgaactatgggttattttaatatcacatacattataatttc

SEQ ID NO: 179600 - DNA, 679 bp, Cannabis indica
ctctctgatcattgttttatgtatggagagtaatttcacttcttattctttttcttctggatatcgatgtagatgaatcttacaaaagtttactgctagccagatatgagttgggcagttcttttcattaccagtactttaacgtttttttttaaaaaaaagttttgagcttttagcataattgcgcaattttgtattgtcagttagcagatgtataattttcagattattataacttcatggtgtatcaatgaccaagtataaaattgatattaatgcttacctatttatttaaatatacatgtattataatttcccaaacaagctcaaaacaaatttgagctcgtgtcttgtggctcatgtggatgccaaattccgatcgattacattctgatgatttagttgagtacatgagtgagattgtttttgaaacttagggagtttttcagaaggatgagtgggtgtgggacattcttattacgtttaatcaagtcatttgctttgttatatattcatccttgcatccttggtttctctcatttattttggaaatactaatgagacaaatgtctcgttttctttctaacactaggatcatgctgcagcctatgcatgtagtggtctctaacttgtagcagccattacggcatagtttctgagcaggtgactatatgcctac

SEQ ID NO: 179601 - DNA, 1336 bp, Cannabis indica
atatataaatgtgatatataatattataagtatgctataattattttatggttgtatataattttgttaatatggtacatacaatttttttttataataatattatattattttattttattttttattgtaagtatatatattttgttagatggtatatagtttttgttatctatagtatatcatttatttaagataatatttagtttttatttattatatacaaattttcaggtatgtatacatattttaataatggtatatataaatttttttatatgatatatattttttgagtattaatttagtattgttataattttttttggtatataattttactactatggtacttttcaatgatacgatatatcaaatactgttatatatatgtaataatctaatatatttattcgttcttattataagatagtaatatgtaatagtaagaaaattatataacttaatttaattattatatatttttaaaaaaaataatatctaataaaagtatttttataatttttactaactaatttattatatattgttattttcttaatttttttaaaaataccacatttactaacttagttttcaaatttaaaatcattttgcagcccaaaaagaattctcatcttccaaacacttaactttataataataataataataataaagttaaaaataataatagaatattaataatcgaaaaaaatctatgtttactatacttaaaaatattcaaaaaaaaaatatttaattacgaaaaatttatcgctccctccctccaaacctacttttggcaaagagtcatgagtgtgattaggaaatgattgttgtcgcagagcttgattttgggcaaatatagctaaagttaccatatttgggagtggaagcttcactattttcgaaacggccaagaagacaaaaatgccaaacatgttacaattccttcgtctgtatgtgtagtctctttaattggctcaaataaactttcatgttcttatttatagatatttctaccaaaagattagtaattccttcctcatgtcaaacatcccacaaccctacattctttctactctatcctgtgaatgtgtgaaacaaatgagagtgggactgcagtagtttggctttatcaagagtatagtctccacataaaataaaagtttttttcttaaaaaaaaaaattgtatcaaaattgaattttcccacctactatttgaagatttgtattagaaaaacccaattagatgaaaccaacttggaaaatatacgagaataataaactactagtctactaataaaaataatcaacttcgcggattactaa

SEQ ID NO: 179602 - DNA, 527 bp, Cannabis indica
ccttctgtaagaaccttttggccacggcgacactacatctggccgcagccactggttcatctcaatttttttttttaaacaacagtacaaaaataataagaaaacccaaaacttgttttaccagttttctaaacaagactagaaagaacgactaaaatgtaacaaaattcaactaaaacataaagaaaacttgggttgcctcccaattagcgctgtttttatcgtcgcacagctagacgttgatcgagttcttcatagtggcgccaagaatcatggcggacttggtttgatcaatttgacctcccaagtagagctttaaccgctgcccgttaaccttgaaagtattagggccttcacctttcaattccaccgctccataaggaaacactttaaccactgtaaatggccctgaccaccttgacttcaatttaccaggaaacaacttcagccttgagttgaaaagtagaacttgttgcccaggttgaaactccttcctgactaaagtttcggtcatgccacctttttag

SEQ ID NO: 179603 - DNA, 635 bp, Cannabis indica
accccttcacatcaactcatcaactcatgaacatcaacatctaatcttcttcttctccttccttcccaatctatttccctttctctctttcccctttacccatacccacctcttttcttcttcttcttattgttattattatcccaattttcctacctgccaaaagaagaaaggaaaaaaaaagtcaattctccatttgggcatatctaatttctggctttttcagctttagaagaacttgggttgcttcaagatctgattttttattttttattgggtgtttgagatttgaatctttacaagtttttgtttttttttttcttttagtgggattgattccaatcaattatagatttatgagataagggtgtttgtttgtgtgtttggattgtatttgagattaagagatgaagagaggaaaagatgatgacaaaagtatgggacctatgttcccaagattacatgtaaatgatacagagaaaggagggcctagagctcctccaaggaataagatggctctttatgaacagctcactataccatcccacagatttggttctggaaataatcttcctttgaattccaaatcccaaccaatatggttccttcagcttcctcaagtcaggtaataatta

SEQ ID NO: 179604 - DNA, 723 bp, Cannabis indica
gcatgacataaaccatcactaaattagtaaaattaaatgaaattagataaaaatccttaattttaataattttaatagttgagggggaatttttaacggtcataaaagttcagggcatgataatttagtacatgtgaaagtttaaaaagcaaaaattctaattaactttatttatatttatgacaagatcccatctaatatttagaaccataaaataccctttaaaataaaataaattaagtgggggtagttcggaatcttcacataagaataaacgagtatgattcatacttaaaaatgctttctttactctaagaatattttattcacaccattgtaattgatgattattataaaagaagaagaacaaaaaatgattttttttttttttttgacaaaagaacaaaaaggatttgatgatgcaatacttccacaagtaagattgtgaatgtgaacttggtatgtagtgaccaattttaatcataaaaaaattgacattagtagaaaccacacaatttaattagaacccaaatataatattcattaacccaaaataaagaaagaaaataaacaaacaaagtgaggcaaacaagtgaaacaaccactcacaaaacgacaaaaagctcttgaaattgttggcaaaatctgcaaagctgacgtggcaaacaaactgttaaaaacgaactgtaatatggaatagcatcttcatctttattaacgcag

SEQ ID NO: 179605 - DNA, 661 bp, Cannabis indica
ctgatctttgcagtttaaatgttgaaattgaggaggaggatcaagcaatttatcttctcaattcactacctcagcaatatgaacaattcagagatacaattttatatgcaaaggacacattggtgatggatgaaatcgttggtgccatatattcaaaggaactatctttgaagaacaatgggaaactatcaagattgaatggtgaagtgaatttcacaagaggaagacaaccacaaagatcttacaatcagaataagaacaacaaccattcaagaaaccatggaagatcaaactcaagggattctagcaaagactcaaacaaggatgtaaaggggtgctatacatgtggaaagttgggacattacaaaagagactgttactttaacaagaacagaagtcagaatcataagaacaaaaagaactatcatcatagctccaacaacaaatttgaatcccaagattcagcaaactatggtgatggatatgattctggagaagttttgctagctgcttctcacatccaaaatgaaaattggatcttagattctggatgcacattccacatgacatacaacaagcaactacttagaaatttcaggaaacaagtggtggaaaagtagttcttggagacagcaatacatgtagtgtagaaggcatagga

SEQ ID NO: 179606 - DNA, 562 bp, Cannabis indica
ttaataaaataaatttctaataagataaaataccaaataaatagtatttactaatcttataatttaaattaataaaatatattaaaaataataaattctaatatttatggttagtaatttaaaaatatctagattatctttaaatttattactattttcatatcaaaatatatcatttcatattttattacttaaataaataaaatatgtaagtatttgatcttataattaaaattaataaataaaataaaaataatcaaaattttaaaatataatagcaaatttgtagaaaaatcagtttttcaaacttaaagcctactaatatctaaaattattttaaattaagaataaaattaataaaaattaattttaatatgataattagatttgaatttagaaaaaaaaaatctacaaaaaaaaaaaaaaaatctaccaaaaaaatcaaaattaaaaaccataaaaaaatgacaaatttgaaaaaattgtgaaaaaattgcatgcaacacggacaatatgtccgcgcacagatgacgggggagctgaccgaggagggaggctgcat

SEQ ID NO: 179607 - DNA, 1331 bp, Cannabis indica
acttcttctttagtaaatagatcacttgtccctccttttgttccactgaattccaaagcaggtcattccgagattgccatacctgatacacaagtgtagcagttctaacatacaacactgctttcttaaatcgactaagtttggcacgctctatccaccttagtatcgattttaaatcacttgaatccattctctagtccagccactctttaatttgcagtaagcattgcagagaaaaacaagtcattgtctctggttgctgcctgcagaacaagcagtgatctttaggaatgatgctgaaatgtttcagtcgttcccttgttctgagtctgttttggattgcagtccacataacaaagctatgtcgttggatgttaagtctactcatactccatgactccaatttactttcttttgagggggacaaacaattttgtagccattggagatcttgtaatgtgtgcttgtgaactgttgtacattcattctatctctgatttgatccttgacggagatcaattttttccagtaccaggtcgcctgttgtggagcttgataactccaccaatctttcccctttatatagacatagtgaatttattatttaatctacaagttttcttctttattcgcaattgcccaaacatattttgtcactaatacaatgttgttgggttttatgccctaaataaaactcatttcaatataatcagatttacttattaatatagatcagaaataacatttaatgttgcatggttcacatgattatatgtacataatgtataaattcatctgaaacccttttcacatacttgatcctgtttattgtgccgtcaacacattggaaagtaaacatgactatgtgaataaagtttcctagatttatcagacacagggttttactgatatgataatctacaacaagagtttacttgcatttggagaaatgctatgttctttccagagcattggttaaagtaaagctcaggttggatgcatggagtatgcatcggaagggaccgatattgaactttgacttagatttattaaacttaccgtaatatctattcaagtcaatatcgcctagttgatcctagatcaaatgatcttaatcctgttatgattaggctcaatcttgaaaggctattcgtgttctttgatttgttagttaagcctacttttaggtcagggtgatacgtacattttgggaacacggtagtgcaattgagtgggagcgctagcataaacatggaatctatagcttctatctggcgaatagtaagcaaaggatgatctccttcgagcttgaccaaacgaacataaatggt

SEQ ID NO: 179608 - DNA, 540 bp, Cannabis indica
gctttgacaggttcatagccttcatttttctaaatgagccactctttaatacattctaggcatatattgctataatggcatgatcaataccccccttttgttctccacacaacaagcaattttgagctatagtgagttcaaacttcacaactctatagtgtgaagtctctgtcatataaccaaccacatgataaatctgtgtttgggaatgattaatctatcccaaacaattttgtccgaaggtactttttcttcctattctaataacttctaatacccaactcgaatgttgtatattgttgggagataaaacaatcttgactcatcttctctctaaaagcatttttcacagctactaagcgtttccaataccagttgcagtgtggatgagtactatactcccaccaaataaacactatttatccatttattaaacaacttgtttttttttcttggaattacctagacatattttctcattgcagctagattccaatcttgaatttttctaaatcccaagctacctgtttttttaggaag

SEQ ID NO: 179609 - DNA, 691 bp, Cannabis indica
ctgtcctcatatatttggtattaggagtggaatggtaagtatgtagaagaaattgattgttaaaattataatattattttttaaagcataactatttataatttttctcaagacaattatgacattttatatattgtatttcttcttttttttttattccttcacatttggagggattgaaaaacttgaatttagagggagaagtctccctccacttatcctctcccttaccctccccttcttaccaaacaaaggattttccactcccttcatctctttccctccatccctctccatccagccttccttcctccctaccaaacatagtgtaaggtaccccttggcatttctcattcctcttccgatttgctaatggatatgatttataacaccacagtctagaggtgttcatccaatctgttatacccgattttgagaaataaaaaagccaaccttgcgactttgtgttacaaaattattaaaccactgaagtgcacgtatcaagtagtactcacacaggtgaggtcgaacccacatgaattaaaattgactactactaaactagacttatgtttctattttggttaaaaaataatctttgagagagagtggtaacaattgatagaaaatcaaagataatgataaaatttgtttaattatggatgagagattaaggatatgaatctagttg

SEQ ID NO: 179610 - DNA, 577 bp, Cannabis indica
catcaacttcgtactcgcgttggaaggaccattattgtacatccaaaagttaccaagtgttgtaccacatgcccgatgtaccccctggtactcgtgttggtaacatcgtaactaccctaaaaccctacaatgtactaacacccttaaaactactttttcattagtgttagtagtgtaaacagataataacatgcatacattcacaaatatatactttatgctatcttaccttgtttccgtgcttagatgtgccggtcagcctgagtggaaccgcagctcgacgctttatagggccctaaaccacaatatttgaaattttgatgagagacacactaaaacacttctcggagattttgaaatcaaactaggaataaccctatcgatgaaagacatggcaacaacctaaataacacaaaaatgggaaaaactagggtttcaaaaattgccccaatcggtagaccggtttcccaactgaaatttcggttccatagggtttccttagggaccaaccggtcgaccaattcctataggtctccttgaactagtcgaccggttctatgcaggaaacccaaaatgt

SEQ ID NO: 179611 - DNA, 628 bp, Cannabis indica
gtccaatttcattcaattttactaatttagtgattgtttatgtactaaatcatgctccccaaattttaatatctaccaaatcacgcccctcaaattttgacatgtgccaaattatgtcatctgaactttcatcaatgttagactttccttactaaaattggacaaaagtacttacatccaacaatcttaatagttcaggggaaagatttttaacgatcagaaaaagtttaggtgcatgatttggtacatatcaaagttcaggggataaaaatcctaattagcctttattaataccacttttaatttttaaatcataaaaattggaaaataaattttttttgagtaaattccatgtagatgcaatgtttattggttagttcctataataaaaataaaataaaaaaaaaaaaaacaaagtgtagacattattttgttgtattaattacattcactacaccaacaacctaaattagtgacattttttttaaaaaatagtcacaataataatattttaatgacatttgttaaaaaatgtaactatattaaatcaaaaaagaataagtgacactttaattagtgactttttttaaaatgtaactattgatatattttagttaacattttattc

SEQ ID NO: 179612 - DNA, 749 bp, Cannabis indica
agaacaaagttaccataatttaggatcatattcactccatatttcttaaatcccatcactcaacacttgagaaaagaaaatccactgatcaaaaacataatcagagcaatcaccatcattactgtaaagcccgcttagttaatttggaaattagcagttatttatgttaatcaggaaattatttatagctatttaaataatttatcattgttatttatggaattcagatatgcataattatgtcatcagcagtttttatatttcgcatttccggtgtccggtattttggaacgcggcgtttggctcagtagaaatcacaacttagtatgttagtattttggggacgggttttagacattgggaatgtcgggaatggccgggaatttagaatgtcccaaaaatacccctttagtggttattatgtggttttagtatggaggggcaaaatggtctttttgccccaatgatattttgtcttatgtgattttttaaatggaaattaaatgttaattttaattattttcttggctgaaataaagtattatatgcatgcaaacctttattttctctcaactttacacttaacaaaaaaatagaaaaaacttagaaaaaaggaagctctcttttctttctcttcatttcggcttggtgttggctgctagggcagggattttctcttcttcaattgcttgtgattttctccttctcttagtgtgattcaattgtaggtaagatctttgaacttgtcc

SEQ ID NO: 179613 - DNA, 650 bp, Cannabis indica
gatattagaatttcatgttatcacttcaatattgtgagttttgtatattgtccgttaatgcaataattaactatttagctaaatttgctttaataactattgcaagcacaatttggctattttctcaaaaagaagaaaaagagaaagaataaagaaaagaaaaagaaaagggagagaaattcctattttattgcttgtgagtgagtttttcaatgtgactacacttgtgttacattacatatgcattcatgaatcttaaattgtaatttatatgctttaaacttttgttcaacgtatgaaaattatttcttttaaaaaaggaggtacataattttattcttgttaacacgattaaattttattaaaaatactttttatatacaaacctataatattagtgctttcatattcgatatattattcaacttcacttttatatttacatgtgttctaaataagaacgcataaaattcaattaagaaagaaaaagaaacaaaacaaaacaaaatggaacaaaaaggtaagtgttgtacagagttattttcttctaacaacgaaagagaatatattaaccaagagaaaaataatggaaaaataattatcttaaaaggaaatgctaaaacatattattggtatttacgtattctttt

SEQ ID NO: 179614 - DNA, 674 bp, Cannabis indica
aacaaaatagatgatccatcctataactttaagtcccaaataatattctttagttttttccacaaggttgccaatgttccttctaagtgtatttagttcgtgtactaattaggttaattagttcccttcagaaaaacatttgtagttgaaagaatttccaccaaatatatatggttaccattgtacatggtgattcctgtcactgtggtcttcccttcaattacaaaatgttttcgttttatattttgtaaataaaaaaataataatattattttatgtacttgaattattattatattgtgaaaccttttataaaaataatgttgaataaattatttaatttcgttttttagatctaaatttgatttaaattgttttaaatataaattattttaaagaaaaaacaataaatcaattttattcattttctctaataattttaattcaaatttatctcgaaaggaatttttttaatattagagcacttttataaaaaaattattttacctttttatagaaatacagtagaacctctatttaagaatactctattcaagaataacctctaatttgttataaaaaaatcaagtcccgatttaggccagttataaataagaataacctctaaattgtaattagttatacatttttaagtacccgtattaacaaagtat

SEQ ID NO: 179615 - DNA, 859 bp, Cannabis indica
gtgtttgtcaaattgctttagcttcaaaaccagacagatacactcacactttgaagcctattctgatgtggattgggcctgcaatcttgatgataggaaaatcaacaataggcttttgtgtcatgcttggaggaaatttggtcacttgggcatcgaggaaacagactgctggagcttgttcctgaatctgagtataggtctctttcaacaactgccacaaagttgttggttagttctcaaggaacttggcatttccattcctcacacccgttatatcacgtgataatgtgaagctcaagaaatggctgccaatcttatattttacttgagaacaaagaacattgagattgaagtcgatgttcactatgttcgagaactaattactacaaacacattggccatttcttacatctcaactgaagaaaaacctacataacttaacttaaaaaacactaactttacctaaattctaattttctttttgtcacaagctttcttcggaggttcctcccttcagcttgaggggggattttgaatatattgtggaataacaaaaattcggtagttagtggtagtttttttgttaagtctttgttagttatgcaagttgttattttctattttagctcctttgttctctgttcttagctgctacaataatagtagcttcaattgtaaagttgaagcattcagaaaattcaacaaagaaaaatcatattcaagatttacactctctcaaccctttttttgaaaaggaaacaaaaaaaaaaattgatacataataattaaagccaaacgacctcttttcacatgagtatagtcaactacagaaagagactcgtagaggagagaaaaatgt

SEQ ID NO: 179616 - DNA, 674 bp, Cannabis indica
aaatattttttcttataataaacataaagttctaaatgataatattccatcaaaacagtactgatcgattcacaagaagtttattagctaggtaaatatcaaaataactcacaatatatatattttttttttcttttaaacatctttataattataactcttcatggatgatcgatcggcatcataataatgtcgaagtacagaagttgttgccttgaattgattctgggaaaagaatgtggaatgtaatgtatcacgaaagataggatagacaagatagaaaaacaaaattattggtagaagctcaatgcaagaggacaaaataggtattcttaatgatattcattgattattattattgggtataaatgaggcaaaacaaaaggacaccatcatggctgtaactgagagaaatagcaaagagagtccaactatgaatgtgcatggcaaggttaaaagaaattcattttgaacaagaaaagcattatagctatggatgaaaaggacatggcaatggcatttgatattagaagaatgaaagagataaagtcccatgtgattattggttgattatcaccatgatcaaggatattgaaagctgttggaaatgctacagtcacaatgattgttgcaacaattgacatgtgttggaattttttcttcatccatttttc

SEQ ID NO: 179617 - DNA, 674 bp, Cannabis indica
aaaaagaaaaaaaaaaaacaaataacgcgtgaacgatctatatatatatatataaaggagaagtatgaggcggtaacatgacactataatatcactctaaatgcatcaatcatttctctccgtcattctctcattttttgaatattttattagagcttaaatttataaattaatattttactattattttaataaattttaataaaaatctagtataatttattttatttttttgaaaaaaacctctatatataaactacacttaccgtaccatagtatatctaaataataacaataatttttaaaccagggtatacatattcttgagtgtcgtagtcgcagaataaagtttgtcatccctctcataactgcaaatcgacagtgaggaagatatcttacaattcggtgaagtacttgcactgcttcctcacgaacaccgggatcaatacttatgccatgttgaggaattatttttgcaattttatcacttcggccaacctcttcaataagatatggtatgcatttaagcacagaccagaagtgatatccttgagatttttcttttgtaacaacatctatagcagtctttgaagaagttagaagtgcctgactataggatttatggcaagaccacaaaatttactggtagccttcacctttggaatatagtgacc

SEQ ID NO: 179618 - DNA, 1113 bp, Cannabis indica
acaaattcttagacatcacagtgagaaactagccattgcatttggactgataagtaccccagagaacaccactctaaggatcatgaagaatctcagagtatgcaatgactgtcatactgccattaaatttatatcaaagcttgtgggcagagaaattattgtaagagatgctactcgttttcatcatttcaacaacggttcgtgttcttgtcgagattattggtagtcaggaagaatgagacaatgaaaaatatgccattgtcaactattgaatacaatatttaaagataagaagatattgaacaaaacttaaactttggatgttgatacgagtgaacggttgagctgtcttcatttgacttcaacctcttattttcatataaaagaaatattatgatacgttgcaactacaaggaagctcacaggacaagttattagctagctgacttgaggtggcctctgctttcttgctactcaatccttgccttttgaggtaggttgatcagtttgttgtcataattctatatatacgttttgtttgataattagaaataattatgcatacaatacaagggtgggctttcctctctggaaatattatttgttcaataattgtgaatacggtagtaagtaacaagcttatctagttgagaccagatacagacaagttaaggaattattatatttgaatgatttttgtgcatcttaacctcacaccccattacacccaaggagtggaatttcatgtatggcaattgtggaggaattccaccatcctaattattggttttgttgccgtactagagatgtcaatccgagcaggatgtccattactgactcaatttgatacttattaatggagaatgagagatgggagtagaactgacccataatcaaaagcattattaaggggtacacagtaagcaagggtcttaatagtgactacctaaaaatcaacatgcctgtctttctttctctgcgctttctttttcatcgcctgcttctgctgaagctctcctgggtcttgcagcccttcaactaccacccaagaccgtacaatggccctagggctgaccaagtttgggagaaaaggaaaaagtttctgggtccttc

SEQ ID NO: 179619 - DNA, 621 bp, Cannabis indica
atgagagtttatttaactaagttcattgaaatcgagtttattggcacgtaatatattagccaattgtttacaaaaatgaatggaatgtaatagaaaagacatatttgatacagtttagatggttttattcactaaaaaaaagttgagaagcaaaactctacaagagtaatagtccaggtgaagaaaatactagttattgttcttgttatttacatgttttgttatttgattaatgaaggctgagactgacagaggagcagggtctaacaaaggagtttcagaagaacaaattttcttaaagatttcttctccaaatgtacttaatatgatgcttgttgatttacctggcatcactaaagtccctgttggagatcaacctagtgatatagaggcaagggttaggaaaatgataatgacccaaattaggcaggaaaaatgtattatactggctgttagtcctgcaaattctgatttggctacctctgatgcacttcaaatggctagagaagctgatccaacgggtgggaattgcttcggggttgaatttttcggtcactgagtttactcaatctaccagctaactttttgtgcttcacatgattgttaaacaggttctcgaac

SEQ ID NO: 179620 - DNA, 657 bp, Cannabis indica
catcatcaaaattatgaaagccacaagaaatatgccagccatgaaaccaacaaaatgaaccatacccaccatatacatgtgtatatgtatatatattctttcacttatttatattaatagcatgaattcttgcatgcatcagattatatctattttatataaagtgtgtccatataacaaaattcttggtttttaagaaatttatgagtgactttttatttatattaaaaataagatagtttattattaaaaataaaatggtttataaaaaattcatgggtcactttttatttatatataataaaataaatcccattaaatccaaaaaaaaaaaataagagttctagattttctttagttattgtatttctaaccctatttgattatttatgcctcttttataaaccctatttgattaaagtaattaatcaatatgaacaataatttgtaattaatacttataatcttaactttttaatttcagttaataattatttgttcacgtcattattaagtttttttaccttttaattttcctttttgtttgtatgatgctaatttatttctatattttgtatttcttacaatttttgttgtttcagaccattaaggtagtgttctactaggagatctaacgagtttcgcccttcgctatga

SEQ ID NO: 179621 - DNA, 782 bp, Cannabis indica
ccatatcaaaattttcacagtagaaaaaattacaaagagagaaaaattattattgtagcaaacagtgcatagagtagaatgattataaaatttaattttggttaagatgatgagtgcaaacggctccaaaagcagtgcataatttttgtattaaatattttttttaatattcttgataatgttaattttagagtagtttattaattataatttgataaaataatgcaaattgaattgatttacagtaatcatatgttaatttagtttttcaaagattgtgctgcacatgtggtgatggttaatttttttttataaatgtaagaaaattaatggaacacagctcaaaaaatatagtgttgggatataggacaccatccatctctactcttgacgtgatattgttttctttgcgcttaagctatttttttcttaggcaccttcttaaaagacctcaaaccaatagtaatagtgttcatctttatatacctaagattctttccacttctagtcaatgtagaactttatttgcacactaacacacatcattgtggcctaatatattattacaataattcatgcatattaaaaaactacaagtcgtttgttattataaataaagggaattttcaaacgagaagtcgttcgtttttcatgtgtaatggacgcaagtcatttttgttggtttaccaagaaaactgtcattatgtcaaacgcaaacaacaaacactcattttatagcaaagaataaaataaattaatggaccatgtgatgtgagtctagt

SEQ ID NO: 179622 - DNA, 736 bp, Cannabis indica
ggcgtgcctcaaactcgcgacccaacagtgactcctggaaggtcttcttctagcatcccccaagtcgttctgatcgatgaggaagaaggggaagaagaaggcgagattctccctcccttggaccgaaagggcaaaggaaagatggtggagactgaggttgctaagaagctaagctgagtagaccctccagctccttgctttgactcaaggatttcgtccgaggtggacgagtatactgttcctctgggtatcgtcctaacccccattcctactgatgaggaaagaacccagctccagatcgccaagcacaattatgccacaacggagtacacaaaggggaatgctgaggtggaggccctgaaaaaggttctaaaggagcaccaggatagcttcactcgcagtgaatacgccgggaacgtctgggacttaaatttggatcccttgactgactggtttaaccatttcgttggtcccaccttagctccctttgcctcagaaataacaagccacttcgctgccggcctgactcagcttccaatgaagatatatgtggcctgtgctttttactaatcccatctaccagatctaggacgtgagtgcagcccttaccgcggtaagttcccatttgttagagatattttcgagcttcttttctttctgatgcctgatattacgtatcatattttttttgtgtggtttaacagattgttgcagagaccggtcacctctcgaaagc

SEQ ID NO: 179623 - DNA, 622 bp, Cannabis indica
ctactcttttttttctttctttttttttttttaaggctatcttatcatgacctcttgtttactctcattgttctacaaggggtaactaatcattatatcacaaagagtctttctctttgtatataaataaggttaattagtattttttcccccgaactttgacatgtactaaatcgtgctccctgaacttttttggtcgttagaaattctccccgaactattgagattgttaaatttaaggatttttgtttaatttcattcaattttactgtttcagtgattgtttatgtatcaaatcatgctcctcaaactttgatatctaccaaatcatacctctcaaactttgatatatactaaatcatgccccttgaactttcatccatgttagaatttttttactaaaattagacaaaagtccttaaatttaacaatctcaatagttcggggaatttttaacagccaaaaaagttcagggacacgatttagtacatgtcaaagttcggggagaaaaattactaattaaccgatatataaagatatgtttctttttatttttacccctaagtcggccattagtattcgtgtcaccaagcactttgacaatttcaattctcaaagtatt

SEQ ID NO: 179624 - DNA, 555 bp, Cannabis indica
accctaaaccctattggggatatttctgctggtttgtaataaatatttacgtatgggggatattttcagaaatcaaaattcagaactaaaattctacaattggcatagtggttaaaagttacatttattattttattttattaggagaaaattctttgttcgattacatttgtatgaagttgttattgtttcgtgagtggaacattctatttatctcctaaggggtaagatcatgtttaagttgatatcacaattgttaattattggccaattacactgttaaagaaagaccaataagctcatggctcatgataacaaaacaacctcggagaactggtgaggcaaccaaacacaaatgggcaaagagcaaaacatagttcaaaactagtgaaggagacaggtacaaggacacaccaccatttgagaaaaatttgacctcaaaaatgttcgagtgcaacggagccagaacgcctgaaatgtaatcaagtagcaagaatcacacactctaaagcccacacacctgcacgagaaaggccaccacacaactccaaccac

SEQ ID NO: 179625 - DNA, 543 bp, Cannabis indica
gtacatgatctctttccccttttgtagagaacaatgaaaaggagagttctatagttgtgggagggaaaagttacatgtcatgacatatatgttatcacatgtacaacaaattttatagttggtgaggatagttgagtttcaccttattcaaatttcaaatatatgtcatataaatatataatttttttttatgagaatatatatcatagtagtatatattatagtagggaaagtgatgataaggggtttgggagacaaaaataggacccacgcaacaaataactatcatgatgagatttggtaagacttttaggtaattgatagaaagggtagtgattgttgcatagaattcagtgttttctttctttctttcttcactatttaacttattgctttgccttgtaatcttttggtaaccgattatttattacacttttgtaatttattatatatagatcatcaacatgtcggagtctctaagaaaccaacactcactatatttcttctatatttttattcactattattggtttggtaagtatg

SEQ ID NO: 179626 - DNA, 795 bp, Cannabis indica
catactatattttgtgtcaaatttaatataatttttagtaaatatggagaaaatacaaatcttgttgtactccactccatgaatcttttgctttgaaagagttagattctttgttgagagtgatgttgaagtcccactgcatacctctaatgatcacatggttgagctttagttaagaaggactaggtgcatgcttagaatccactcaatccaaggtgttagaatatggaagtaagaataaggaagtgtgtggtatagaaaatatgtgagtgtatggcagggccgaccctaagtaatattcggtccaagaaatttattgagtgtctgttttatctaaaataaaagagaaatttacatagtatactaatttttgttatttttttacaattttttacttttttactgtgtttttttataactttcatactgcagtatactgtgttaaattttcactggtgttctactagtgttttttagttgttctactgttgttttaagttattctgctttgtgttttactggtgttttataaaacacagtatttttgaaaactttttcgtgtgacagtattttgtaaaaattaacccaaattccagtattttgtaagttttccaaaataaaatagtgagtattattggtacacttttttacaaaaaattcaaaatactatttttctaatgcaaaaaataatactatataaaaaatttaggtccgtgagtttgtagtagaccctagacacgagcctagcctgccttagcctaaggtcaggcctggtatatggtaaggtgtatggag

SEQ ID NO: 179627 - DNA, 1514 bp, Cannabis indica
ctctaagataatttctaacacgaaatgatacagaatatgtaaacagttttgtcatatatatctttaaatcagattattattaagtttattttgacaaaaaaaattagtttaggaatctatttgtacaattttagaaaatataaaatctgtttttgttatttaacaaaacagataatctatttaataacttttacaaaatacatgatgaataataatatttaccatatatttatatgagctgactaactctactatataaatgggaaagtgatatgtatatgggaagttttaattatttggacataactaaataattaatatttaatatacaagatttttagtgatggttggagttatcaaataaatcaaatttagtatccaaaatttaattaagaatagtatttaatgtatgcaattaataaggaagaaggataattaagtttggaaaagaaaaaaaaaaggtaatttagatgttgtgataccattgaggaatgtggagaaagagaatccaaaggtggcgttaattttgagaatatatggaaaatggaatatattacaaattcctattttttatttatatatttataaaatgagtaactaaatggtgaaattaaatcaactttcttaaagtagttttgtaaaactatctcttttattttttattgaaaaaatatttcgtaaagcattataataaaaattgccaaccttgccaccactcgagggtagtgtattgagagagtgctaattatagcagtttattataaaatatttattttttcattctatgtttattatagttataatatcatcattataaatttttaaaaaaatttcaaatagtgcgaaaatgagtttaaaattttttaaacacgcatagtacaaatgcgagggatgtacttgaatagtgtagaaagtttcttatgatttttaagaggccaataaactgccagctaagagaggaagaagggaggaggcgagatggcaggcccctgctctggattctttttcagtcaatgttgatgcgggtgtatgagctatgacgggtacctcttcgactgggatagtgatacaaaacagtgagggacgggttatgtttgcttcaactactgtgaagaatcacagttgtgaaccgtttggtgctgaactttagagcatcatgaaggatttaaaagttggaattcagtgtcgattggatctgttagtgtccaaatggatcgcctacaggcgattcatctagttaatgagcagttcgaagattgctggaaggtgaatggccttgtgcaagacataagaaatttagagcaatattaatttgtttctagtttaaaatttgtttttagagaagccattaaagtgactcatagtttagccaattacgctttggtatgttgagaattatggggtttccatctcaaaaccaattagcaatgagtggactagtccatgttcttatatatggctcaatactttcacatttaatccatgtgggacaatattctccaatatcccccctc

SEQ ID NO: 179628 - DNA, 850 bp, Cannabis indica
  modified_base (819)..(819): a, c, t, g, unknown or other
taaataaaaagtgaccatgaatttctcataaaccattttatttttaatatttaatgcttaataatctcttctcactctttcttagtttactatgattttgaactacatttgtgtttttgccactttttttgttcattgtgatcttgaaccacaatgaattattctaaataatataaataaaatggacgattattttatatatatatatatatttttaatttctagagttatagttatatagagttgaaatatgctaaatatcaattcaaatattaataggatttgttttattattattttattatatataaataatattttattattttattaaataaaaataaaaagtcacccataaatttctcataaaccaagaatttcagttatataggcacactttatatagaatagatatataaaccctaaattacaccacaactaaatatcacaaaaaaatctctctaagaaaatatcacaataaaattaaattatttaataaatatcacaataaaattaattgaaatcaagatactactaccagtaacgaaaacacatattgaatgtggtttacaaataaaaatttcttcaacaacttgtcaaaaattaatcgtagtacatctacgaacacattagcaactataaaataaacaaatttcagcaaaaaaaaaaataaacaataaaataacacactaagatatataatttgtaataatttttccttttgtaatgatataattttgttaataattaactaatgttatatattaaaaaaaactaacactaagaacacaatagacaacaacaccaactcacactacncaatcacactccagcttccataccaaatact

SEQ ID NO: 179629 - DNA, 548 bp, Cannabis indica
attggtgatactcttatgtgttctgacaagcaatttctttgtctttttggagaaaatccccgcaccctccagatgggtttgttggataacttcctcaaaattgtctctattatggatgatgaggttcgagaagtcgtcgagggtggcataggaaaaaggaagacaacatagccttttgtggctagatctcaaaggctagaacctttggctaggggccaagagtctgccttgatggttccgagtatagaggttgtagccaacccccaagtcagttttgttgagactactttcgctattatacctctttggcaatggcccatcatcttggatgatgataaagagatggaagatggtcacggtcctgccttttctaagaaaagaataggctccactaagggtggagatagcaaaaaagcgaggactgaagccaagcaaaagtttcaacaacaggctacttcgcagaagtaggtgtttgagtcttccaatcggaggggggctgatgttgttgataatgaaaagccccctaggcagagcacatgttccttaaa

SEQ ID NO: 179630 - DNA, 605 bp, Cannabis indica
aagaaattaagaaattgggaactgataatggcctggagttctgtgcagatttgtttaatgattcttgcagaaaggttagtattggaaggcacctaacagtcccaaggaaccctcagcaaaatggccttgctgagagaatgaatgtaatcattcttgaaagggtaagatgcatgttaatatgctctagtttgcctaagattttttgggcagaggctgctgtcacattatgctatctaatcagtggatgtccttcatctacaataaatttcaaaactccaactgaaatgtggtgtggctatgttaccagctatgatcatttgaagatctttggatgtgtggcttatgctcacattagacaaggaaaacttgatcctagagctagaaaatgcattttcttaagataccttgaaggagtaaaaaggtataagatatagagcatagaagaaggaaatcatcaaaagaacttcatcgttagagatgttgtatttgatgaaaacatcatgtacaatgatctttcaaaagaaaaagggttcacacatatctggtaataagattagagagagagttcggattgaggtggaacaaattgagaaggttcagatggt

SEQ ID NO: 179631 - DNA, 837 bp, Cannabis indica
tctagtttgagtattttgactttaattaggtcattcaattgataaaaataggtgctaataaaaaaaattctttattttatcactaactcactatatatttacatatatttcttaatatgtaatcactaataataattaagtgtcactaataatatgtcatataatttatataatttatgagttaggctatctaaaggttctagagaacataattaaaggtgtgctagcatttgtgaaacgaaagtatttgcatagcttttgtgacatttaaattattgtttaatgctgattacatgttagtctaatttagagatgattagataacatgtgatttagggcctaaaagatctgaaaagagttaaagagagtagtaattagcattaacaattgggtaattaaatcaacaggattctttcccctaatttgccatctttgattaaatctttttattgctgaattttattttattgttaatctttatttttatcacaatcacaaaattattggtttgccaaatagaaatataagtctagtttattggtattcaattcaatttcttgtgggatcgacctcacctgtgtgagtactacttgattacatgcacttgcgtagctattcataatttttgtgacaacaataaatgcagaaaataaaaaatcaacaccaaaaatctatattggttcaagtatgataggtcgatgtgattttatggttatactccagttctggaacaccaccaaaaatctccattattgattgagtagacatgtacattcaaattgagacagattctctgttgagttttatcaaagtgtttcaattctcacactcttatcc

SEQ ID NO: 179632 - DNA, 695 bp, Cannabis indica
ctgtatatgatcattaattatagtcgatatagatcgatatcatagtatattagtatgtttgttgaaaatattttgcaaattttgcaaaattattttaaattatttaattctttaattttctacaaacatatatactcatcgtgatatttatctatatcttacctcttcaaattcaaattcttaattttttaatatatggataaaggatatttactttttctttttctctggaagatatataaagaatatatttagtggagggataatataaaatcatgacctacagacatacgagtatttttggagtaattgacaagattaaataagtccttaattgaactaaatcataataaataaataaataaatagataaatatagtcacaatatttgttggtgcatgacatatttttccaccattagtgccacagattctgcgattttcttaaaattttattataatatattatatatacattctacgaagaccttattagtatcttcctttacatattattattattattattattattattattattattattagtatcttcctttacatattattattattattagttacttctagagaaagtccatacgtacgtactttaatttccaaagaaaaaaaacactttattgtacaaacaaatactgttgtgtactcggttatttaaaaaaataaaaaaaa

SEQ ID NO: 179633 - DNA, 907 bp, Cannabis indica
attatctcatatagagtcagtaaagatataatacatgttaaaaaattgtgactaaaatcacatttagttacaattagctacaaattttttaatcacaacaaatgataatttataattaattataatttttttttatttttaagcataaatttatttatgtgtaaaaataaattaaaatatacctataatatatacatggaaagaccgattgatatctttattcccaaaagtgaccaatctttaatatgtttgacacgtttatatattaaaacaaagaaataatctccactccaccacaagtcacctctttagtttaggtgttttttctttcttttttgacaaagtgatcgtgaatcataagacaatcgtctaagccaacaaacttttgaagcaaaatattatctacaacacaaaccgcgaattttttccagtggtgcgaaaatactaataatgatgacatgtcttcggtataggtgtcctcgttacagacccacttttttgtagtgaagataaagaacaatgaattaccatataagtggtcacatgttagaataaatatttccaaattaaaatgaagcttatagaaaaagttaaaaagaaaagctagctaaatgtagtgataatatttaggtcacacacaaaatttatcttatgattaaaaattattataaattatcattaattttggtttaatcacagtgattttataattagtatatacttttaactacataaaataattattattggtgagtaatagtgattttgtgcccaataacatgtgtgaaatgatgagaataagattgttaaagaagtggtttattggctaagagttttgagttgtgatcaagataaaatttttagttttctttgttttcttttacagacggcgagtggcacgagcact

SEQ ID NO: 179634 - DNA, 682 bp, Cannabis indica
gaatttgaaatttgtgttggatgcaattggggatggtccccacaaatcagtatgtatcaactcaagcaccttagaagctctatatgaggacaatttaaatggtaatgcatgagatttgccaaattggcatgcttcacaaaaattttccatttcattctttgaaatttttacattgtttgactcacagacaagtttgaggactctagtggatggatggcctagacgtctatgccataaatccttcttggaaacatgaaaactggctgtgttaacagcacttggtttagacagactcgacacaccagaaaacagtgaggattgacttgaacttgaagcagatttgtttggaaactggtatagaccatctctaagcactccttccagcagcaccttctttgtgatgttgtccttcacaaaacaataatcaggatgaaattcaacaaacacaccattataagaagttagacttgacacactcaataaattctttgcaatatccggaacaagcagcatattatcaagcagtaatgaagtggactgagtattgtgggtaatttaccataatcataatgtgaaatatgtagtttattaccattaccaaaggtcaaatgttccttaccacccataatcttgctcgtgtagcatgttattctcatcagcagttacatgattgcttgcccca

SEQ ID NO: 179635 - DNA, 722 bp, Cannabis indica
gacttaaaataataaataacttactcaccccatttttgggatttctttacacgtagctactaaaatcttcacacttaataaaatactacaaccaaatttagcaaaattcattatgcaaatggctggctaatagcccaattatggagagttatacctttccactttcctcatttatttccctttttatatagttttcatgttattatttaggattacttggtcaacaaaaaaattaaaaagctgcaagtgcaactacttgtgaatcattcaaggcccatttaacaactcaaaacaatgatatctcaacaaataaagattgtctatctaattacaccgctgctaaaaacttgaatcattagcaatcaaattgtaccatgacataccataatttatattgtctaattgatataagcacataaagcatttcaagacatgtcagattatgtttcttcttctgctctaaaaatcttgaatcaagacacagccaaatacttcacacacttaggcattggcagacagtagcgtatacagaatcaatatttatacataaatggaccaaaacctccacaagatgacagttaagacttgcgcttcgatttctgagagacccgtgcggctttcgaccttcttttgtgcagcctcaaattcttgctcgctaggttcagaagaacgaaccacccccaccatactttggacactagggatgagaacatggaatcgaa

SEQ ID NO: 179636 - DNA, 591 bp, Cannabis indica
gaaagtacctatttccccgtttgatgaaggagaaaatgcaaaaatcgaattgtcaatctgatacttggaaggcaggtgctcggggccccaggtgcttgaaaacgaacttgctctaagggccagtttggcacagctgtgctgtagaaaaaagcagctgtagttatgctgtggggaaaagcaactgtagcaaaactgtaaaaaaaaatcgagttgagtatttggtaaattataaattttaaagtactgcgagttgttaaaattctattacaataatgataatattttaatctagtttattataattacaaatatatatataaaaaatatgttacataaaattttttattttctacatatttttaattatttttttttccatagtgtaaatttatatacatttgataaaaataatttttaatacttttaaattatatttttatcacttgtaaaagaaaaaattgtagtttataaaaaacttagggttgatattattttttaataatatataataaataattaaataaaattttagtaaaaataatttattgtagtcttttaattaaaatagattttttaaaagttgggttgtag

SEQ ID NO: 179637 - DNA, 872 bp, Cannabis indica
gtaaaatgatataaaatatcattttttctaacttataatttataaagaattaaatatttaacaaaataaccaattttgaatttgaaaatattatggttagaatatctttaaaaatatctaagttaatttcaaatttattaattatttaaatcatcttataaggtaattttaatataatatttcaaattaaaaagataatgttatcttttaatttaagatatacttaatattaaaatatctaaccttataattaaataatatataaatattaatgaaattaataaatttttaaaatctgacattactttaaaaatacaataatcaatttttaaatttaaacatcaaaatatcagaaattaataatctattaaaaagaaatattattaatttgaaaaaattgatatttatgtttatatatatatatatattaaaaataatatttttaaattagagtttgaaattggaaaaatctaaaattgggtgaaaaaacccaaaaaaatcaaatttttgctgaaaaatcacccattggcttgcaacagtctacacacagctttcatgcatgcgcagacataggggttgcaaggtgcttgacaagaaaactcggtcacctacagggtgtggcacaggcagactgcatggtgcatcatgtcctaacatgcggcatcagcgagcttcagacacaattttatctgagcttcgggtgcggacaaggtgtcttgtccgtgtacttggtgcgcatgagcacccttctcgacaccattgaaaccaaaaaaaatcaaaccttcataactttcttaatttttttagaatcgagttccataaaaaaattacttaatttttcacaaggaatttaaataaaatattttcagaac

SEQ ID NO: 179638 - DNA, 590 bp, Cannabis indica
attgtctggtatattttggagagagcaccttgttgaaaacaataaagttctttctttaataatagttgtagtaaaccaatgatgttgggtataaattcaacacacacacacacaaaaaagaaaagcaatcgcatgtcctatatagatatatctttacagcaatcaatttctaatttctatgcttttctgtaatgtgtttacacgtgtaagaaaaaattaaactcaatattcttttgagcctaaattttagtaataatgagatcatggttgaattgaatgagaccacaactcataaagaactcggtaaaaaaattatttgaatattataaacatataaaaaaaaaacgtttggtaacaattttcgtttatttacttttgtaagaaaaagaatgtttgataactttgatttttatttttgttattttttatttaaggtgagaagagagagaataaagtaagaaagtgaattgaatagtaataaaagagtataaatgtttaacttttgtaagtaattttgttttattttatttttgaagaatatgcttttattaaagattgggtaaatattattttggaccatgtgttttgtc

SEQ ID NO: 179639 - DNA, 553 bp, Cannabis indica
ttagactttttttattaaaattggataaaaattttaaattcaacaatcttaatagttcagggaacatttttaacaaccttaaaagtttaggggacataatttagtacatatcaaagttcagaaggtaaaaatcctaattagccaaaataaagtattgagtttaggagttttcacactatggaaagatcaacaactttaatttaccactagtttgataattaacagtttcttatatacagaaagaaagaaaaaaataggtcacattggaaaggctggaaatagagaccaataaaaatgcacatgaattttagaggtattgcaagcaagaggcaaatggtcaaaggtagaatccatgtgcttggaattcggagtaatggagaacaatataacaaaatgataattttcttgttgttgttatttttctagctgtattattttttctttcttttctattccttttttttttcttttaattggattctagttgtattcactcggctgttatttagcattttgggagtgggatatagtatgtaatttgtctaatactagt

SEQ ID NO: 179640 - DNA, 638 bp, Cannabis indica
ctgctattctccttttactatcctgctgtacactattaacaatgacactaacttgccactgtttttgattccacaatacatcatttcttgctccccatagctgatatactaaagcagccaagactatgttcatcatacttcttatggttgctgaaatccttttcatattgctgatacattgcagaagcttccgcaacccgactgcctttgtcccccagtttagtttctttttcacttccaatagacacttcctgctatattcgcaatgaaaaaataggtgctcaatggtttctttttccttcccacacagtaagcatgtcctatcaacttttcaaattagttttctatgttctatgttcttagtttatttgtttatttttaatttttttcatatttcttcaatcctattttaagttctatatgtattttttttgtttgcttttttgtttatatattgtttctgttttattcatgttaaaacttagagatttttttgtaatatattttttttcaatattttttgttcaatctttgctggagattttttttaaagcttttttatctacattgtgattgtttttatattgatttttttattttttgtttgaatttatctatttttgtattgtttttttttt

SEQ ID NO: 179641 - DNA, 1206 bp, Cannabis indica
ttatcaaaaatatcgattaacaattgtcatttaataaaatagataaactgattggtaacttttataaaatacaaaactgacgattttttaattttaatacatattttaaaattaaaaataaaataattttactacacagtttttaaaaatatttatcattttcttaattcaaatataaataaactactaatatttgttgcacaaacacatccaaaattttattattatcattttagaaatactttgaattcaaaattatttttatctcccccttaacaaaaaaaaaaaaaaaaaaataacttttagtctttctgacaaaataaaatatcataaaaaattataaaagaacatacatacttaggtccaatatctacaagcacgtaaaagtaacaaataaaaaaaaatataatgggtgtagttgttttggccaataaaaataaagtcaaatagagataattacatggtatggtagtgtgtacgtacacttgtgatttttttttttttttgttaaagaaaactaactgctttataaaaaagattattaaaaaaagaaagagggctactttatacatgtcgtgtgtatgtatacattaatagactttttttcggctttgttatttatttattttttttgttattaaaaaaaatatatgtttaaagaaaaacacatatataattttaaaaataaaaaagaatatattaaaatagtgtcaataaaaaatataagaatgtgttaacaagtgaaaatgaatgcacttttatatataaaaaataaaataaataatcatacatattttttttatccaaaaattactaaatattactataaaaatatttaacacgcatagctagtaaaagtcaaatattgattagagtaagaaaaaatataattaattataaaaataacaaaattaaatttaaaaaataatccgatacaataagatccatagtattattgtgcacccaagtcttttttagtcattagatgtatgttcaaaggctctaaaagtctgctcacccccataggataataatggagtctcatgccataatcatggggtagttttttttggccaatcacattaaattcaaatagaagttacatggtatgatagtgtgtacgtacacatgtgatttttttgtttgtttagaaaaaacaactactttatttatttattttttttaaaaaaaaaaagaattacccaa

SEQ ID NO: 179642 - DNA, 819 bp, Cannabis indica
tagatatggtttgaaaaatttgtaaaagagatacattatatacttgttgatgtattagatttatttttcaggtctcattttagatgctgttaagttgtaattagatttttagagtaatgataactttgctgattacaaaaaaaaaaataaaaaaaaaaaataactaaatttctgttaattaattataagatatttatatatgaatatatattatatttttagttttaaaggattaatttaaaagattttattttataacattatatatgatatatctatctacatgtctatatatataaatgagaatattagggagagtgatgatatgagtttctatctttctttttaatttttcaaattttttgtttatttatttatagtttttgcgattatttataaccaaaaatttgtagaaaaaactatttattggattcttaatttgtaactctcggtcatttatgtttatatttatgttttattattaatcattaaaattatttgtattcttccaattttttaaaaaaacttatttgtatattttgtatagctattactaatttctccaatttttttatttatgttatgtttttatgattacataaaaataaatgtgtaacaaaaacattatttattttctttgaaactcttatcatttatgtttatatctccaatcccttctattatctatatatataatgtcacataccttaaattgaaattttgtgtccactcataattttgtagatttttttttttctttctaaattactattcaatatcagtgttacttggcaatgactatttaattttaaaaatttg

SEQ ID NO: 179643 - DNA, 759 bp, Cannabis indica
taaaaaatacaagaaaataacaatttttcataagctcgtttaggggttatttgataaatataggtcaaccatttcataaaaaacaagctgatccgtctaggcccagcataggttcggcccaatataaataaatatgtgtttataggacaggttgggcttagttcaaaaatatgggccaggctcggcctagctcgacccgacccgttttataatattagtcgggtcgggcctacataaaaaatgggcttttataaaaacgggttgggccgcctgaatatacaactttaggtacgagactacatagttgaataaggcttaaatggattgatggtactacctatattaacaagtgcacattattttcggtagtctatcatttaaaaactctaaaggtaaatgtgttttacttagaataatactacaataagtaacatcttgagaagtttttctaaaaaacgtgcaagtgaggataaaatatgctgaatacactcgtgctaatttttaaagctaatcatcattctaaaaaacaaccaaacatgatgtaccaacgtaagagagtcatccatgaatgtaagagcaccaataaaatttaaagctagaagttataataagtgtcacatagcaatgcttcaaataatcgagcaattaccataaaaaagtggatacggggttgttgttagatgagcacaacaattatatgtaaaaccaacactggtaaaatgtaggtagaaaaaacaaaaaggtagcgacataatctca

SEQ ID NO: 179644 - DNA, 1312 bp, Cannabis indica
attttggctcgttgttgaatcaaagggcaaaataattaattaattaattataattataaaaatacaaattcaactagccagccaataatgttccttaattataacgatcatgttttttttaaggattaaatagctttttattcaaagagaattttatacttacaattgcccatgttaaattatattttaacttcaacatgaacaataatccttaataattaaatatataagtataacatattatatatctttcttcaaaaaaagaaaaatatattatatataataaagatatattatttcaatgtttgagaaccaccttgttatttattatataatatttaatataaataaaaaataaggaccaccttataataattaagaaaatatttaatgtataatgatcaaaaagaaaagtccaatcaaatagaagttttttttattattattattaaatcaatcaaatagaagtttgtgtattgagatattatatcaaaatatatgatattttatctcaaagcaaaagtagggacacatttcgttttcaattaatccttcaatggataataataaataagggttaatgttagatcatgtaaattcttagcttcaagtcttcatggaaaattttctaagaggtcatttcttttatgataggttaccgaaaaataaaataacacatggttgatatagatagtatatatttaaagcttcttttaacagtaataattttatacctactatagtctcagaatcatcacacttgacattctcagacagtgtaggattttacagcttacccgaaatcacgagactactaactatcacagactttgtatttttgcaaaaaattattgattgaatcttgtgttttgttaaatgataaaatgataatcctgtattttcttaaatgaactaaattttcgataattttttttaatataaccaacttgaagacaattcctaacctgaacaaatacagtaaatgtaactagttttgtcataacacattcagatcgggttattatcaagtttcattttgacaaaaaaaaatcagtttagggtactatttagtatttattagtagtattttgtaatatacagagtctaatttatcaaaacagacagtccaatcaataaattttacaaaatacagggtctaaaattatatttaccctaataataatataattttgtaagtgtgacttataaatattaatatatatatattgtgacggtttgaaattatcgattaagctttgatatagtataattataatatatacatttaaaaaattattagcagcaacactac

SEQ ID NO: 179645 - DNA, 727 bp, Cannabis indica
tcacatgctcaaccaagcaaaatttaaaaactaaagaaagggttctcattaaagcttaccttagcttgaatctcccaaagttctttgctgaaaacactaaaaatcaacagctcttccccttgaatttccccagccgaaagagaaaagagagagagagagaggaggttctatttgatttttctttaaattttctaaactttttttttttcaaatgaaaagggaatcactcactaatcctttgctgaaattaatgagggtgctaggtgtcaactaatgggacagccacctattccacttaatagcaaatgactaaaatgccccttaacttaaaactagggtatttctaaaactaggggtaaaatggtcaaatcccataaccccgatcaatcccgataatttattttctctaaaatattccccgctaagaaataaagttctaaacttacccatgtgatcaatctagccatccatcgcattttccgttgtcgccgagcaaaaattacaaaaattgcatatttcacatattaatcaaacaatacccctagagtttaataaaatctccgaaattgagaaattacaactctaatatttatttctaaatattggggtccaaaataattaaattcataaataataataaaataataaaaattagtgctaattgccttttctaatccaatttattaaggcggtcgttacaccttttcatccatgtttttttttcttt

SEQ ID NO: 179646 - DNA, 532 bp, Cannabis indica
atattacattatagaaacattttaaaacatttaaactccaaactgaaaccaagtcaaagttaatggattaagtaatgttcatacaaaattggtaaaattgtactaaagttgtgtgttctatataatcacatacaaaaatttagtaaaaggaaaaaagaaagaataaaaccctaaaaagaaagaatagaaggagatgatcaggtcgagactgagtacctgcaatgccgattgcctgcgccggctcctgtccggtagtatgctcaactgcaacgtcgaaggggtgaatgatcggtgaggatgaactcgctgagactttgctatttggtaaaacttaaggtgagactttgttagattttgttattttaaatgggctcactcatatttggtaaaactcatttttgtaatattttttttattaatgttatatgtaagtattatagaaagcatattatcttgttagttgtttttttttacttttactgaataaagtgtatttatgtcattttaagtacatttttataaataaaaattt

SEQ ID NO: 179647 - DNA, 769 bp, Cannabis indica
gcaccaagtaaaaggacggttttgcccctctgttttgaacgttggtgttgtgtgtagggggcattttcagaatgccagctgtttcctacaacatggattttgttttgtgtaccgtataaaattctacatactatactatgtgagatcagaaaatgggtaacaggaatagatttattttcttgtttttttgaaagttgtaacaggtatagattaggagggagagaggttaattaggagagggaggtgaaaaaatgtggggtgtaatttttttatttaaaggtgaaaaaatgtggggtgtaatttttttatttaaagaaggcctaattttgtaacaaaatggggtgttttataaaaaagttaagattttaaaattaaaatggggagaattaattagatatggggtgtatttatatttttttggagtgcaaatataaatccccaaagaatcatattttataattacctttataccctacattagtttccaatctttaaagcaattctacctagttattgctttttacagtgcaagtaaccattaatgaagcaattatatatatgtgaagaaaagtctcccacttttttagatttgttttttaatagaacaaaaaaaaaaaaaacaaattaatgtgcggacacattaattgtcaataatctgaatagacaatctacgttaagtttaaaattttttgtcggtgcgatttgaatttttattttaaattaattacagttcaaaatgaatcacactatatataaaaagaactatact

SEQ ID NO: 179648 - DNA, 814 bp, Cannabis indica
attatcatagatattttttaattaatacctattaaatttagttaactcgaaatcatttttatattttccatgttaatttttaaaaataaacttattaaataaatcaaagtcactatatttaaagttattatcatcaccattatatttataagagtaatttgtggcataaatacctaagtttaactctcagttgcaaataattacctaagtttaatttttggccgtaataatacctaagttatatttttagaactttgtaggtacctaaccgttaaatattaagtcattatccacgtaccattttttattagtatatttaaattatttttttttttaaaaaaaaactttaatgatttagaccaatcaggaattaccatgtggtaatttacttaacacttaacagtcaagtacctacaaaagttccagaattataacttaagtattattaccaccaaaaattaaatttatgtatttatttgtaactaggagtaaaacttagatatttatgtcgcaaattactctatttaaaattattatcattgtattttacttgtagttatcactatattcaaaattaattatattgtggtatctcacttataatcaattaccattacattcaaaatcgtaatcatcgtgtgtcatttgtaattgtccctaccttgtaatttttttatagcttcttattgtcataaattagattggcttaaacttgaatcatgtagaagaggtataaatgctagttgtaaaaaaaaatgataaaatgtaattaagttagagcatctataatggagtgctaaaatagtagtgcgat

SEQ ID NO: 179649 - DNA, 696 bp, Cannabis indica
atgtcggtggcaagatcaaagtacataatctctgtgcaatctcaggggacacagagtttatcaaccaagaaattaccatgttattacatctattccaagaattgagtaagggattaccaaaagccggccgaggaagggttttatcgatgaaagcagatttgttcttggctgtcaacgccattgttatgcctctcttccaagattggtaattttcaccgttgagcacaggggagataagaacaagccctgggtgatctgccgtgctgagaaaaaaagggcttaagacatcttcatgagccaatcgatcgagagagggtctgcgattaagaggagcaggttgaggagcgggttgaacagggaagaacacatttggttcgatgggatcttcttcttgggaaggacgagctctggaagttggaggtcgacgagatgccatggaagggttgacgactggtgcggaaatggaatcgggattggattgcgatgtggtttgatctgctgtgggcaacggaataccgtcttgcgagcgagtggagggccttgccattgaagcttgagcaagatgttcgtctgataccatatgaggagtgaaacctgaactggttcttatagagagaaaagagaatgaagctctgttttctaaaatggaaaagttaattgcacttggaaatgttacagcaaggatatatatccatc

SEQ ID NO: 179650 - DNA, 856 bp, Cannabis indica
taaataaatattaaattaacagtaaataattataaattattaagaaaatgtagtatgtatacctatttcgagggtgtaatttctagagttaagagacttcaatatgcggtgcatatatatattttaatattaatttttatataaattaatattacttttaaagtctaagtcaccgatatatttagtttaaccagaatatactataacttaacagaatattcctaattaattaacagaatataaataaatattaagttaacagtaaataattataaattattaagaaagtgtattatgtatacctatttagagggtgtaatttctagagttaagagacttgtggtgcatatatatattttatatatacttatatagataattatatttatttttaattataaattaaaattaaggaaaaatagaagattttaaagcaatttataaattgaattaaaaaaataaatagaaagtgagataattttgagaatatatatacctatttagagtgatgttatattgattaattaattatatatactatttttaataaattagttaatatatactttaaaaaaaatagattaaagtaaaatttgaaattaaaaaatattaatttttaaataatctcagaaaatatcaccaaatagcgaataactcaaaggggtcgagagctaggagaattcattaattcaaagcatcagccaaaataaagtctttaataaaacttgagtagccagaccaccaaactatgcttgcggtaacaaaaagagcaagcttagcaagagaatcaacaacattgacagataccaagatcattatgcattctcaatctaaaaaggttttcatgttatatatc

SEQ ID NO: 179651 - DNA, 707 bp, Cannabis indica
attaaatccatgcagatgtcggtaatgctaaatgggttctcgaaagattggagattttttctattccttctgattatgtaatgtttgtttcagtatattgtaagaaaaaaaaaatccatgcacgtgtatatagacatatataccttgggtagtgggagtcggacagaaataaccgtgattggcaagggagatattgagtggcatgggaacatcaggggtcccaactccaaattgagtaccaaccaattggatcacgacacctgtctgtttaccatcaccggcagtgtcaacagctgacttgaggtccttcaatactgagccaccaagaacgacaccgtttccaacttgagcagggaagagtactgatgatgatgaagcttctcctccctcgtccaattgtaatattattacagagtcagaagcagagaccagaacttcgcggtgctgaaaacccaagaacaccttccatgatttgagctcatcaaggccgttgtttagtagcgtcaacgtggattcgaacctgtacggctggtctattatttggtccactactgttggtgggatgggacgacctccagtgtaggcgtacgataagaaaacaccattgcacttactagaagatggtgtttgctggggttgggcttgggacaacaacgttggtgatgcacaccatattaatattatttttgaacaaatagaataagata

SEQ ID NO: 179652 - DNA, 1058 bp, Cannabis indica
ataaccagcagaaggtactcaaaactacctctgaactgtttagtgtaattattagtttatgagatttcactaataaggttcatcatggtggtattttgataatgctaattctgaagatccaccttgtaatttagagatatactcttattgttgtattcctccattatgtgtgtgtgagagtgtgtacggtccttcattaggatatcaatgcgctccatgttgatgaatatttgcttattattacgtatgtgtagagtggagggaatactgccatatattattcattattcacattattctctgccttgtacttgggctattttattcattgaaaagtatcagttgagctgcgtaaatcaacaggaacttttttctgaaatttgaatgaatacctgttgtttgttgtgtggagttttgtttctaacattttggtaaaatcttgtcttctaattatcgtttgtgcttttttttttaatagtgatcattaataacaatatagtatcattttgtgttgggcaccgtaaggtgccaaacagcaatgttcaataaatatttcatatttcataaggcagaaaaatttcatggagatgtcttcataaaaaaaaaacattatggagaggtgttatatttatgattcatcatttcaaacaattgatgatgtttgtccgccatgtaatgtagcttttattatttcctcacaactccctagttctatatcttaattttgcaaaaacattattttgatgcttacctttttcttttcacttgaattaaacaaaaacatttatttgtattgtctaactttgcttctcatatgtttatgtgctatctatccatatgtgtatgaataaagtcatgcaattttataaccacttggggctagctcaagtggccataggtgggtgtgtgagtgttgggttcgagtcccagtaaaaacatgttgtaatatataaacgcttaaaatcaaaaaaaaaaaaaaaacaaaaaaaaagtacatgcaattttattagccaaaacggaggttccagatacaattttgcatggcataatggatataa

SEQ ID NO: 179653 - DNA, 536 bp, Cannabis indica
aaaaatcctaattaatctttttaaaaacaattcatgctcattattttctttttgacaaaaaaccatgctgatatatattattttttttttagaaaaaatcatgctgatatttaattagtaattaattggtatttatattttattaaaatataaattgtgattacctaatctttattatttaaattataatactatttttttttaatgaaaacaaaataacaactacattaatcaattatccttcaatgacaaggacaataaatcacccctgatgatacaactagctatagaataggagttctgtgtaaaaaattgagacccctaattcgcagatcgtttaacaagattaatcgacacattatataatttcaataataaaaaattagactcattaattaaacaccatatggagagatcatatgacaagtactttaaatagcatgcacaacattaatgcactctgtttccactattatgtttgaccaatcttggtgtttgaaccaacttagtgcctttttgatgccgactgcttctgc

SEQ ID NO: 179654 - DNA, 559 bp, Cannabis indica
tactaaaactagtatactaatactcgagttaattgcagcataactcctaagactttcactttgattgcacttaattcccaaaacttaaatttttcgcggtaaaattcccaaaattaagaaattgttagcaatttacattttctatctattgtaggtgttaagtgttatattggactatccatgtgtacatctacgtggacatagtgtacacaagtcacaattttattggtacacataaaaaattatttaaaaaattaaaaaaaattgtaaataaaaataattaaacttgaaaataaatttagtttgaagggtgtgaattgaaaatgataaaaatcctaattggaaaccctaattccctttttctttcttcctcactcgacaccctctctctctcttctctctgtatttgtgcggaggccattggcacgacgagactattgtgctctaatcacccacgccccgagaggaccacacataactgtccttaggccaaaaaaaaaaactccttgcccgtctttgactcttcatctctatatcgacggtgcgcatgcacgaccct

SEQ ID NO: 179655 - DNA, 679 bp, Cannabis indica
gcgtgatagtggaacccgccattctcatacatttccctcgaaaccactatggttttacacctgaaagtagctaccaatcttttacaaacttcctcctgagaaagatcccgcgtgagatagtgttactgacacataaggcttcagcgtgcttttcgccagttgcttctcttttcttttcgttgttatgatgttccattttcaaatagcatgagcgttgaaagggaaattcctatagattagagcgttatattcttttttttacttctttcaaaggggaatgaagaacagaagagaggaggaaagtggttcactggagtttgtctcttgaaaatggttttctttctttactctcttgagggtctttttctcttattttcttttttggtatcagagccaacaagagaattagggtgctgaaacaataacccaaaacctgcttgcttagagaatcaaactgttcctgtctgctttttccttttttgattttatgaccaatagaaatggaaactctttgttatatgccttatacctaaaaaatatctttggtagatcctaagacgaattatgtacacaatgaggatcacaatcattgatacagttgggtaccaagctatcttatcaatatattaaaaaaaattacgtatgtagtgatgaaattttgtatacataaaaactacct

SEQ ID NO: 179656 - DNA, 769 bp, Cannabis indica
ggacttttatccaattttagtaagagaagtctaacataaatgaaagttcaaggaatatgatttggtacatattaaagtttgaagaacataatttaatacattttaaagtttaaggaatataatttagtatatggacaatcatcgaattagtaaaattaaataaaattagacaaaaatctttaaatccaataattttaatagtttagggaaaaatttttatgaccgaaaaagtttaaaaaatataatttagtacacattaaaattcaaggtgaaaaaatgccatacaacaaataacatctagaaaggaaaaaaaaccccacttatggtaacttgaaattggtagataaatcattcatgggaaactttaagatatatattatagtatatatgtaataggcttttttttttatgtctcatttatatttctaacattggataataataggatatatatatataaatatatatatatatatatttatacataatatggtgagaatgttacagattttgatgaagatgaaaagcttcataaatataattatttaaaaaatacaaatagttttttttattattattttcaatagaagattacaaatagttttatctattaatataataattaaatatataaattataatttttctttctacaaattttgaatgcctcacaaaatatgaaaaacaagaagaaaaaaaaaatagtaaaatgtcacttaaattcttttaattcttttatttatataggacttttatgttgaatcatcaa

SEQ ID NO: 179657 - DNA, 722 bp, Cannabis indica
acattcaatggcttccagtcgatggctcaggcctgaggtaggctttcaagttaggcttatttctcctttgttttttttttttttcatctttccgataaagtctgtactttccttttgttttcctaattatttatgggtttggattttgtatttaggtttacccactgttcgctgccgtcggtgtcgccgttgggatttgtgggtttcatacaactactatataaataagaacattacattttaattaccataagtaactaatttattgttttttttttatgtatgttctatttgaattattcactaatgaatctcctttttgttttttttaaaaaaagtttaaaaaaattttggtaacaccgataattatttgagctcaaaaattatatcaccgcaatctgcttttcaagaggatcgttttaacatatgggaaacatatattataatatttattgtagcaacccataaaattagatggtatacttattttgttcaaatataatatttagttacttctttgttaataatttataaaagaaagagaaaggttacttttatcttgttcatctttttttttttttttatattcaaaaaaaatatatatgtttcccacaactcaaaatatggtttaaaattgctaaaaaaaaagtaacctcaaggtatcttaaataataaaataacatataatatagtctaaaaattaaaaaaaaataaaatactat

SEQ ID NO: 179658 - DNA, 721 bp, Cannabis indica
atatggtgaaaattaaaggtgaaatatactggaacaacggatgagatacggtgttaatgatcggatataacaataatgcattactcttattttttttttctacaccaccctatttacttatttttataattaacaattttttttaacaaagacaattttaaaattctctatatatacattaggataatttcaaaattcttaataaataaataaattataaaaccctaataaatttttcaataatcctctaaataaaaataattaatactgttgtgagtagatataacttttccttattttatggagttttatttttgataaatttaattagtaatattaatatataattatatgatataatttcaatatcactatatattaaaataatttttaaattattatttattatactaataataattatttttttttaaataattaaattagccgcgtgaagagcggctctattgcctactttataataatttttataattgaaagcaattttggcaatgacaaaaaaaattagtgggcaaaattatgccaaggttataattccgagaacaaatcctattaattttatttaacaagctataaaaaagttgttttctaattatccgataatattgttagtgttataaaataatataaaataatataaaataatataaagtagatgagaagaaagaagaacaagagagaaagtgaatgagaatttctg

SEQ ID NO: 179659 - DNA, 695 bp, Cannabis indica
aaatatcttccaccattcaagtgcttgactcatgagcaacaaaaggatgtagataagctcataaccaggttggttagcagagaagaagctcatattgcattgatggagcttatgaaatggaggtcagaaggactggaccccctttatgctcaagcagttcaagtaaaacaaagagaccccatcactggaaagatgaaagttgccaatccacaaagcagtagacttgtatgggaaacttgcttaagcgagtttaagactttaggtaaggttgcagtgaggcttatttttcttcaagcaacctcatgtggatttaagtgcaattggtcttttacaaaatggatttgtgtgcatagacactcaaagataggtgtagaaaaagcccagaagatgatatttgtagcagctcatgccaagctcgaaagaagggatctttccaatgaagaagaaaaagatgcagaactttttggtggtggaaatgttgaggacgacatgctcaatgaggtctttgccgatgcaccctctgtgtaatgttttctttttcaatctcttgtgggtttctttgtagcttttaggatttttatttaattctttttcttcattttattctatttctcttcttttttttttcacccttccttcatttacgtatagatttagaaattttgaggaaatttatggtttgctgaacaacaatg

SEQ ID NO: 179660 - DNA, 807 bp, Cannabis indica
gtgataccaaataaaccagtcactatgtatagtgaaagtgccacccaaaacgcaccccaattacaatgaaacggtgcaaaaagactaagcaaatgcattgccaaaacaacaccagcagtgcccatatccatagaattccatttcctcccagaaaaaactcttcttggcctcttcaccaccacatctgacaacataattctcttcccatttactggctctgcactctcacttaatgctgcattagtaactaacccaattcttctgtcattacttcttacatgaaaatgccttaaaaggtttgttattcccaaaagtttttcaggctttggaaaagttgaaacctttggtaatggcctgaaaggggctacattccctctaggctggtgacttaaacggtggagagaaataaaaatatgggctttgggtttggacggtggagaagtaagcatagccatgaatggagaaggtttgtttaattctttttgtgtgaaattgtataatattgtgtgtgatatataatataagcttgaattcttggtgggtttcttgtcaaattgcgggaaaaaagtttgtggttttgtaggtttgtttaaattccataaattgttgaattgggtaatgataatatataagaaagagacaaaaggttgagattttagatgagaaagttggtttcttgtccttttatagttgggttcagtatatgatccagatatttttttatccttaagataatacccaatttaagatttttgttttggtaatgaatataagatagatatttctgcctaactttttgttttctat

SEQ ID NO: 179661 - DNA, 1345 bp, Cannabis indica
aatgtttccaccggccattggcgagtgttgttcccacatggtcttgcagctcctactaacccaaccaataccatgtgctctaataaatacttgccataaaaagaagtctccaatcatatttacatttatatatactctctcccaattttttaaatcatatattaatacacatggatagacacatcgatttagttaaaaaaaaattagaaaaaataaactaattaaaaagaataaataaacatatttgtgtttggatgagcaaggtttatatggatattcttttagtttaatatattatttcattattatatcaaccttatattagtcgattcaaacaattggtccttctttctcgaatagacatctttatatattacagaaatttaagtgtttatatatggatattcttagtgtaatatatttggccaggtaagctagtcttatttatttttttttttattcgagtgtttatatattacacaatatataatttgggactcgaacccaggacctccaacacacacgcactctcctatggccacttgagctaccctgaaatgattaggtaagctagtcttaagtggttaaaattattcaatggacatatgtgccaaataaaataatatgcaatagtcatatttaaaaatttgattttttttcttattgtctcatacttatgaaactaaaattatataagttgacgcattagagtaatatattaattttaattacaaatatcattacttaaatagataaaactacaaacatgtaatatgtaatatatcaatggtatattatcaaattataaataatttctcatcgttattatgatttttaattcagtataaatggaacaacataaaagatttgaaagtatccccattttaatattaaataatatcaaataaatccatattttaaataattgtgaaaattcataattaactaataaacatgaaatattgtgagtactttttaattccaaaatattgagaatgagaaaaatactatttcacactaacttatatatctttttttaattctgttcactgagctccgtaattaggcgagagattagtacaaaaatagcgttcatgtattcctacccttgtaacaaatttagattattctttggctacaaattggtacaattcctctaccttagctctatctttaacctttttttttaaaggttatatattttttcctaccacagcttttagggaaggagatgtcagtacgtgaggtcatatagcagtgggacattggtcgagcttatctgttcttagtcaatatgtttttcactaatcatctgtacccttgtagcttaagcttaagccacatg

SEQ ID NO: 179662 - DNA, 936 bp, Cannabis indica
accaattttttcccattttagactttcattcgctcgaattcaaattttcttgagagggaaataggtgaaattttttagcagtgaatgaacccaaccttcaatgatgttcttcgaattgctttttgcctgagaaattgtcttcttctaaactgtccacccccacgtgattgagcatttttagtaggagtgaattggcacatatagactttaatttttgtaaatacagctcattgattaccctacgcaaactagtttttgttgaaaggtagtgcttgcttgcactatccaaaaccaacgaagattagttgggtgcattcgtcttcaccaccaggcatgggtttgtttcatctattcacctttaattgtattttttaaatttcactatagaaattagggcttgcatgctttttctttcaagtaaatttcgacttttttaggtcatgcgaccaatattgctggtagtttatatatatgaaaaattctattgcttttgagttttagtcttagaaacttctgggaaatagttgtgttgatgcagaaatgctagcaaaatttctccatccccaatatccttctagttctgggtactttaacaatttcttcctcttgatgttcctaatttccttttagaagaaaagacccctgatgtaaagaccgcttagtttaatttggaaattagcagttaatcatgtttaattatgaaaattatttatagctatttaaataattatttatactgttattattgaattctgagatgcattttatgtcatttagtagttttcataattttgcatttccggtgcccggtaacatggaactcggtgtttggctcagtaaaatcacaacttagtatgttagtattgtgggacggtttattagacattgggaatgtcgggaatggccgggaatttagaatttcccaaaatacccctt

SEQ ID NO: 179663 - DNA, 708 bp, Cannabis indica
ggttagcttagtggtgagggtgagttaaaattgaatgcggacactgtcttaaatgaaaccagaaataaaattagtgttggtgccattatcccgggatgcccatggtggtattgtagctgctctttcgaaaccaattgttggtaactttacttcacacgagatggaagtgaaggctatgttccatagcttaaattggattctacaaatggagttaccaatcacacaaataaagactgacgcttcgatgggttcgaatgctataaataataattattctacaaatttttttttaaagacttaataatagatatttatagccttttatcttttctccctagctagagttgttgttgtacatgtcaagcgtagaattaatatggttacttatatgttgattaaatatgctttaaagttggatgaagcttacttttggtttgagaattttcctcaagaatgtaattaatttatgatagctgagtattttatctaataaaatatcatattttatacacgcatgttattacaacctagtgtatatggaaatttacgaatacaaagtttggttaatgatgaagaaacatataaaaagtttttttttttttgagtgtagcgtaatggtattttacaatcatatattagcttaatagcttaaagtcgaacccaagacctttccctttttcccaaccctccctcaccactaagctaacc

SEQ ID NO: 179664 - DNA, 781 bp, Cannabis indica
agatagatagtaaattaggtagaaaatatagaaactcgaattagaaaaagcgtagaaagttagatatgacatagagacaaatgaatgaaaaaattataattaattagtagagacataaattaattaataacagaaagatcataatattgaattgagaaagaaaattgttctttttttcagataacaatatagagtatatagacaaaaatatggtataccaaaaatgctaatatatatacatatattagtacatatatcatcaccacatgatcatgcatatatatatataatgtaagaaatatatatagttaacaatctgctaaagtactattccatctaatgtctcataaaaacccaaaatattaaaaaccaaaggaaaaagaaagaaaatattaaaatatataaaccctataccctacctcatatgccacgtgtacatgccatttattaataattttttctataaatgtatcaatcatataataattattataaacaaatctaatatataattaaaataattataaaagtaaaaataaaaaatctcttgttgtttcttgtacccaaatcaaaacaaaaaaaaataattaattaataatgtctacaaattttgatctgttgatgagaaaatattgctgagtaaaagtcaattgatggagtattgggagaagaaatcatcctaggagaaatgaagtaattgttattactactaccttgatgatgatgatgatgatgaattacagggctcagatcatggaagaagctatccgacggtggagag

SEQ ID NO: 179665 - DNA, 919 bp, Cannabis indica
atatatttttttttttgatttctttttataacaatagatatttttaaaatcattaaaaaaagataatgtatatttattaaatcgttttttttttatttggccccctaataggagtgagccctagctaagaccagacttggtgttagggtacttaattttcagcattggattggctctaaaaaattttgttgccattgtttggttaaattagttttttctttagatcttgttatgagcatttttaatagtgttaaaaaagtagtatattattatattcactacaaaaaaattactacatatagtgtgacaactttttagtcacaatatattttttgtgactaaatgtaacttttagtcacaataaaatattacttgtgactaaaatataagttttaattttaaatacaagttgttactaatttagttttagtcataataagtattgtgactaaaaatatatttagttacaaacaattgtaatttttgtgactaaaattttttatcagagactttttagtcacaacataaaaatgatgatttataattagcttcaacttttttacttttggtcataagttttgttgtgactgaaaataagtttttttttttcaatattttagctatatttaagaaaattactattcaaattgtgtactaaaaaaatgtgttaaatttaactacatgttaaaagttgtagcaataatttgacacatgttaataataataataataataataataataataataataataataaataataaatagtatacgtttgtaatacaataggtagctaccatcatgatcaactgaccatccagagaaaacgacttaaaatgtatatttatataactagtatcgtaatatgttatcatcaagctgactaactacaatgttaatactacagattatacag

SEQ ID NO: 179666 - DNA, 744 bp, Cannabis indica
taataattcttttttctacctaagaaataaatttgtagttacctgagaaattaattgtagtagtggatctctctttatcatgaaaataacatttatggatctatctatattatgggtcctagtatgggttgcattgactttttctccatttaatttattttttattaacagcaattattatgtatatatatatatatatattaaaatatgttatgtgtatactatttatattttaataatttatttatgtattttggcaccgtcctttatatattattgttacgtgattaaaatatatttgatatacttgataaatttataaatgatgtttgtctcttcttttaaagtacttgtacatattataaaattttagttgagtaataaaaaagtaaaaagcactgaaagattcctaatatatattttcaccttaagggatatgataaaaaaaaattaatagaaattgtgtaattattgttattattagttaagttggtattataattaaattactcaataaattagttaataaaatatattttcaaaaatattgtgtaagttttatattatatattgtgttaagtttttcatgattgttttttagttgttctactgttgttttaattgttctattttgttgttttacggttgttttataaaaagataattaatatttttataaaaaaaattctgtgtaacataaaattataaacttttacttaaaattatatatttttgtaaaaactt

SEQ ID NO: 179667 - DNA, 629 bp, Cannabis indica
ttcctctacttctactttggcttttttaacatgtttttctttaaagtggaaatggggtattagaattcagtgaaaaaagaaaacaaaaaagtgaagaagaagaagaagaaaaaaaactacatatatagataaaaaaaaaactaggggagtagatttgaaagtggcaatgccatttctttctatttgcatttttcttggatttactagtccttcctttgctttcctcttatacttcatgttttgaacaatcatacagatttcacattcaaagatttgtttttcaaatgtcatttctgtttgtttgttttttctttttcaatgggattagtggccttttgtgattcaaagccacaggaatagtcagaaatctttctttaagacttcactatcattttaatttggtttttaggtgcatttttaaacctgaaaatctcactcatgtagtttgtttatgcacactcattgacctactgattttaactttatttgtaacaaaaacatcctatattactaagtagttgggcctgtatatcattagtctatagattagaagttctgtttatgtattatacaagatattggattctctaagaatgctattctcatggtttggtttataatttgaaaag

SEQ ID NO: 179668 - DNA, 680 bp, Cannabis indica
ctgaaaatttactcactagattttccccctccctctctaaaatttgagttattttaaagaaaagaaaatagtaaaaaaaaataattagaaaaaaaataattgaaaaggcttatttttgttgccttacccagcctcgaccgactcgcaccttaaacctgaaacatgtactccacaacgagtgggtttggtatacaatctatacacacctgaaacccgaacctaaaaaaaacaaaacccgtaaagctcagttgcccaatgtgttaccttagaaggggcatttgagacgaggatttcaaaaataatctaactaaagtaaatattattaaagaaaatatgccagcataaaaaaaagaagaaagtgtagtgttctcaattgaacaagtgaactttaaatattattttaaaaactaattaaaaaaggtggataaaataaaataattatcatcttatttatattttatatttttaagtataaaatttaaatagttatttaaaatcttacaaaaaatagttattttaaaaaaaaatcttaatagttaatgtcagagattttcaaaaattaatatgagctaagaaatgataaataataataaataagaagatggagatttttacgtggttcatgtgttaattaatcttagtcacgagccaatctattagccttaaagacgtatatgata

SEQ ID NO: 179669 - DNA, 388 bp, Cannabis indica
aaagagcaatagtctcttgcctcggccaccgattaccaccaaagctgcttctatgatccgtaccaccaccaccaccactactactactcattaaaatctcatcatcatgttgttgttgatgatgatttttgctattactaccactcattattattctatgatgatcttctactaattcatgacctgaattaccacccctcgattcagccgccgcataaccaccgccaccgccacccgaagagcttcctaacccagttggggtaccacttgagtgatcccccagcatagaattacaaaacaaaataaaacacacacaaaaaaaagaactatatatctttctactacctaacatctgatgatgaagatgaaaaagaaaatcataaaaaaa

SEQ ID NO: 179670 - DNA, 348 bp, Cannabis indica
aataaataaactaaaatgtaacataattgtatctttactcaacaatatacacgttcaaaatgaaattatagttttaaaagttaaccatctaaaataagtaacaaaaatatatatgtagataatatttttcacaaaccaaatagtattttagtgtcctatttttgaagtaacatctcataatttttaaaaaataattttttttgattaacaacatataaaataaaactaaaaagttgttttgatttttgaatatatggtttcaacatttttaaatgatcacattgaaaaagtatattgaagtggcactatgtttgagcctagactaatggtgtaactgatttttttttt

SEQ ID NO: 179671 - DNA, 568 bp, Cannabis indica
ctaagtattttatgtaaaggaaaaacgaaaagaaaaaacaaaaagtgaaaacattttataaaatgaaactgttacgggggttttaatgaaatcatatttacaacttataaaatgaagtttaattctatgacattggggatggatggagcacatccagttactatttagctaaatacttcatgatcagaaagtagatttattttttgtctttaatgtgtgtcaaaaaaataaaaaacaaacccaataaacttgtgtaacaacaatcaattctaatttctaaaaacacttaatagatttttttaaaaaaagtttggaccacttgtttataataatacctatgagtttttgacctaatagtgtatagttgtcttgtgcaatggttacccatttgataaggagacaaacgaaaaacaccaagagagaatccccatttgactgcacaactatttgtcccatcttactcatgtattttactccaacaaagaaaacagaagccagtgccttagaaaatttcaattagggtaatattatgtatattatattacaattttttattttttttaaaaaa

SEQ ID NO: 179672 - DNA, 529 bp, Cannabis indica
gtaaataaaattaaaaataataccaaactcaaatagctgatcaccaaaaaatatgtaaaagtataaaaattgagttatttagtactcaactaaaaaaagctactttttaatgataattttttagtcacaatataaatttttatgattaaatgtaacttttagtcacaacattgtgactaaaacatagtatttagatacaggttgtcactaatttagttttagtcacaacaagaaagtacatttagtcattacaaattgtgatttttgtgactaatacctttagccacggacctttaaaagtgataacatagaaatgatgatttataattactcataatatttttacttttaatcacaagttttgttgtgactaaaagtaaaattttctaaggacacacacaatataccaaatatataaggctttgacatttgttttttgtatttagccaataataaaactttttggtagggctaacaaaaggagtcagatacgataacatgatttaaaacctgcataaaagttagtgga

SEQ ID NO: 179673 - DNA, 867 bp, Cannabis indica
atattttaaaaatgatagtttgattgagttcaactatcaagaaaacttgggagtcaatacactattaaatattattaatatatattgtggattccaaagtcttaataatctttcctctaccattcaatcatcaaatcccttttaccttgtttattttaaatcttatttgttttcttttcttttatgaaacaaatctcatcaattatttggagctaggttagagtttaattaatttttgagtttaaaaaagtctctcttagatataaatcaactcttttgggttcgatctcgtacttacatgaacactatattccatatctgattcgtgcacttgcgagtataaatatttaaaacacaccattgggtgtacaactaagttttttgcgccgttgccggggagtcgtaagaagagaaacatatttatctcaagattagtaaaattcttctactagttattttatttttctattttgctttattgtctaaaaaaaaaaaaaaaaaaaaaaataataaatcattttgggtcggtcctactacctaatatttatatatatataatatttattaattaaaaaaataattgggtcgtattttccgtctaaatatatatatatactatatttatatttatatattatattattgtctatttttatagttgacggcataagcgcctcctattctctggtatttttttttcttgtctttattattatttctttatttcattattttctattattttgtttgtatttttctttttgtctttgtttaaaaaggactaaaaaatatatatgtatatatatatatcactctaagtacgctctgtggtcgctagttcaactatctcacatcaaaaattgactc

SEQ ID NO: 179674 - DNA, 541 bp, Cannabis indica
aatatttaaaattaccgcacgaaaaactattatattatctagtttatacataatgaattgtttaactttttgatgtaaaaatatagtgtaatctaacatttttacatttggttctccaaatgtaaatgaactgattaataatattctccctataaatttttttacttttagtcacaataaaatttgtgattaaaagtaaaaaaattgtgattaattataaatcataattcttatgttgtgactaaaaaatttgtgattaaaagtattagttacaaaaattatattttgttgtaactaaatgtactattgtgactaaaactaaattaatgacagcttgcatctaaatactatgtatattttagtcgcatgtaaatttttattatgactaaaagtcatatttagtcacaaaaaatttatgttgtaactaaaagattgttactaaaaatagctatttttgttagaatttaggataaggtgaatgaggttctatctcaaaaaccaattgaacaatagggaggagtaggctcattcatcttatata

SEQ ID NO: 179675 - DNA, 1234 bp, Cannabis indica
gtgtgagagttagggaaccatagtagtgggtacgacatattgaacctagctgtctctcacatgaactactccaactctgaaggttcatttgccttatttaaataattacactaggctaattatattagtttaatctaattcaaattgattagcaagataattaatttttgaaatatatgaaattaattcttcattagattatttcataattaatttaagaaaaacacacttagtttaatgaaataaattcaagataattaatttttagaaaaaatttatgtattttttttatatttaattaaatataaaaattaataataaagttgatttaatctagatacttaattaatttgattttttgtagaaaaatatatttaagttaaaaattaattttataccaacttaaactaaaatatctttttaaaatataaattaataattaagttgatatatttaagatacttatttaattaattttattttaataaatttaacgaattaagaaaactactttcaagttgaaaatttaattattttagaacaactaaaattagaatattttcaagatatttattttattatattttaattaataatgtcgaaatatataatttatttttatattagaatttcaaaagtttattttaaaattaaattaaagttaaaaattaattttagatcaatttaaattaagtgatttcattaataattaattaaaaatattttttttaataatgagctttaatataagacattcgatctccactgttagttctacatggttattgctttttgatgagattcatcctaaatagatgttgattcattataaaatttaacatcgtagaattttgaaagataaatattattgtaaattttttattcttagtaacgatcactcaattagtgactgctcagaataagatttacaaaatatgaaacaatggtagaagctcataaaataagaatgaccttgactctctcctaaacaggacaatgttggattcttattttgattgaataaaaggttgctaaaatggtgttcattttagatgagttgactactttattatagggttgtacgtcggtcggtttgggcgatttatcctatatattttctaaaccaatctaaagttcggttgctaaaatttaagtgtaacccgcccaatttaaaaaaaaaaaaaaaaactactgtaaactaggccaaacttttttttaggtttttctaaagtac

SEQ ID NO: 179676 - DNA, 588 bp, Cannabis indica
atcaaaatcggagaaagggaggaaacaagggaaatcagatggaaacaataataaatgcagaaccaggagaaattaggccaaaccaggagtaacaacagggaggcagtagagagaaaataattgcaaatcagagagaaaaggaaacaagatgacaagataaaactacgagacacaaaccttgagatgaaggaatctgacgccacaagcccaaatggagctaacccagagcaaagcctgtagtaggaagcttcaggaagaagaagtttcactgaaatagactagtagttcaacaagatttgttgtatcagagaacttttgaaaagcttcaaacacattttcacataatcctcattccttttgtagaaaataataagaacatcagcaaaacaaaaattaattagtcttaatatcttacaaagaggatgataaacaattttttttgtttaaaataatgagccaacaatttaaatagacaccattatcggaacaaaaagaggcgaacactagaaaaaaaaaaaaaaaaaaaaacaaacaaatttctatttgtaaattggactgcatgagacgtaagaatgacatcatcatgac

SEQ ID NO: 179677 - DNA, 917 bp, Cannabis indica
actgccaagcgatattttttactttttactgtgttttttataagtttcatactgcagtatactgtgttaagttttcactggtgttctaccggtattttttagttgttctactgttgttttgagttgttctgttttgtgttctactggtgttttataaaaacacagtatttttaaaactttttcgtgtgacagtatttttgtaaaagttaacctaaattccagtacttttgtaaatttcccttatttatatctacataaatggttttacatatgaaaactaaacaattaaaagctttgaacatgggaagaaaacctttcattgttcatgaaaactacaacaagtgaatcccaaaattaagtctcaaaatggaaagaagattataagacatagaagaaatccaagtaagagttgtttagggcttgatgatgttggtgcactttggccgttcttctgctttttaatcatgtctccagttccaccatacacttgctttgcttttgcaacagaactcaattcatcatcatcatgaccatcttcactttctgctaaccctaatttctgatggtagtcaatgatctctctggttgataattcagaactgatctctacaccattctcatctgcacaaacagaatattaattaatattgttattaattattataaagtaataaataataactatacataatatctttgaacaaaaaaaataagatatatatatatatatatatatgcttacacttgagttgtttgttcagctggttatcagatttgcatgaagaattagcagcaatgcaaagaatcatgaagaagagccaaacaaggtatttgatcttcatcatgatcatgatgaccaattttaattatttgattaattaattttctatatattataccaattatatatatatata

SEQ ID NO: 179678 - DNA, 696 bp, Cannabis indica
attataaaagatgaaaattagatagatcatgctatatgtatatgctatatgtataagacaaataaaaatatttttttttatagatacatcatacatatataaatatatatttatatagactcccactattttttttttttattctatgaaataaataataaaaaagattaatgatcaacaaaaacttaatatttacaacaatatattaactataatgtacacaacaaattagaattattactatttagaaagaatttaataaagttataaaattattttattgtgttatgtttttttgtgttatatattttttaagtgtataaatttgtagagacattaaagattattggaggatcagtgaagatcattagataagttttcttcatattttaattgctctataagtatttatatattgaaatttttatttttaaatttggtttatttttttataagttaatttcttactttatttatcttttttggtttttttgtaggttgtttgtctatacttcaaaacactaaaagttcacatattgcagaagatctgaactcattggttacttcttagtcattcaagcagaagctttagtcttaatgatagtttttttgctactttgctttccagttttcctaaggcatccctagttcatgttcatttctcatgaattagttgtgcatgcacttagggtggat

SEQ ID NO: 179679 - DNA, 572 bp, Cannabis indica
atagagtaaaatatagtacctcgatcacctagcaaatcacatctccctaagttgagagaaaaaaaaaaacgtccaaaattaatttgaccccactagttctaattgttttttttttttaattttaatttgaatttgaccccactaattttaatcgtcgatgaccagggcagcaacaataatcaattatattaaatttcctagttttccaatcacataattactccattaagtatgtaataatatcaccacatgtaaatacatgttatatatagagttagggataacatattatattcataatttaatttaattcaattcgattaatagaagaagtagtactagtaatagtaggctccaactgatgtggagttagcaaaatacatatggtgtgaccaatgtgggaaaccgcagagaaaaggacttgctaacggaaaacaggatgagagaggaaaattgagtaagagtaagagcaagagggacctacctaatacaattcatttccaatcaaagagaagacaaacgcaatgcgtggtcgaacctcacacaccaaaacccaaaaataaaaacctaat

SEQ ID NO: 179680 - DNA, 647 bp, Cannabis indica
ttctaattagtgtgtattatacataatgtatgatcatgtttgcgaaaatataagaaatcaaaggatcttagctctatcacatgactcggtctggaagtagattgattagaataattctggtaaatgtaaatcattgattcatctggtatctaaatatatgattcatttcaaaaaaagaaatttactagatcgaaaatttctgattaaaaacaattataaatccaatgtcacattcagtaaagatttatgatacgtgtatagggtgtactcaatgtgtccgagcctgccccacagatgtattagaaatgataccttgggacgggtgtaaagctaagcaaattgcttctgctccaagaacagaggactgtgtgggttgtaagagatgtgaatccgcctgcccgacggatttcttgagtgttcgagtttatttgtggcatgaaacaactcgaagcatgggtctagcttattaatacgttcaaaaaagccctactggcttgaatacaatctttttttttttttacttttatcgacaaaaacccgcgctcaaaataatatattttttttgagaacgggtttttacgtttagtctatttttaccttttggtccgtaacgtaggttattcttcgtttttttaccgtttaactgt

SEQ ID NO: 179681 - DNA, 992 bp, Cannabis indica
atcgcactcgtctcgctggcaacctcaatgattatttgcttcaaattaagcaccttgtagattctcttacctcatcaatcaatcatgttctgcctcctacaagatcacatcaaagcgatctttaatggcctactttgtggcctatgaagcgcaaaatgaaactcaagtatacttgagtaggatattttgaaacccgaagctaattttgcaactcagaccaagcctgctccaaatcaacctaatcattcctctccaccacctctaataccttcttttcacaatggtggtcgagaatctttttactcctcctccaaattatggtggatactacggatctagtcaatacagtggctacaacatgcctcctccatcaccttatcctcaatcctatgctcctcaagctccctatggtggttatcgtggtggtagaagctactccactccaaaaactcagtaccagctttgtcacaagcttggacacactgttaagcagtgtttttatcgatttgataagtcatcaacaagtcttgaatcatttcaaggttttaatgtctctatttaagttgtagatatgcaagtgatgcttgctactcttaaaactgtgagtgataatagttggtaccctgactcaggagccacgcatcacttaacatctaatgttaacaatcttgccaccacttgggattaccaaggctcagaccagatctaaatgagaaatggctcaggtttgcacattcaacacattggtgaatctactcatgtttctcccttcgctttccaaactctttatcttaataatcttcttcatgttccaaacataacaaaaaatcttgtcagtgtctctaaatttgctaaggatgatcatgttttcttttgagttgatcctgatcactattatgtgaaagacaaaggtcactatgaaagtatttttttttagttggttagtattgataaaggcttctataagtttcatcagtgtcaatctctccatc

SEQ ID NO: 179682 - DNA, 715 bp, Cannabis indica
cttttctttctttgtgtttaatgtttgaagtttagaggtaatgatcatgagtttatataagcatatatattgagtgtagtaatagtatatggtcaaaatattgagcctaatttgttagaaaaagtttctgattctacaaaagataggagtgaaagtgaatctaatgctcttttctttttccattttcatgtgaaatttcacgtttgaaagaatctatgtatagtaaaaaggaggagcattaagaacttttatgatagcagtcagggtcgacccttagatgaaatgggtcacaggaggcaaaaataacatttttgggcccttactaataaaaattattaaaaaaatctatatatttttaaaaggtattttttttatttgacccctaaaataaatgaatcctacgtacagacctagcctgtttatgctcagggtcggcccttataatagtgcttgagtatttgaattatatgccttaagctacttgaggaatatccaaaactagttggcataatcttttgtggacaaaaacagaaaaaagtttcttcaaaagactaaaagagtagatgctttttgttttatgtatataaagcatgtaagaaaacaaattcaaatccaccattgaactgaacttttgaagatagcttcagcagctggttaagcttttttaatttttttatttttttattttatcatattctagtaaagtttcataatg

SEQ ID NO: 179683 - DNA, 625 bp, Cannabis indica
aataacaaaggcataataatctattagaatgaattctaataaaatgctggaaaaattgggttagtattgtcaacggccccttagtgaggctagaaaaattggtatattctagataagatggaatatacgtgtgtgtgtatatatacatgatacaagaattgaagcaactaaagtgatcattaataagccttatcacaccctaactatctttttgtgaattggttaagccattagttttcttatcattttgtgatatcatgattaacaatcaacacaaccaaacaagagacaaaataaactttaagcaagatttttatttctatgttattaaaaacaaaaattgaaaatgtttttgagacttccattttgctatgcttttggtttagctttgaaattaggcttttctttttccttcaagtgaaatttttatttaagaaaaacgaagtgctgctatagtggggccaactccaaattttagatcttaagtttgaggttttattcttgagatgtgataaatagtatttattatatgttataatatttatctattcttctaagtcaattttttattattcaatataagtggcaaaggttttggataccttgaagctttttgtggctactt

SEQ ID NO: 179684 - DNA, 610 bp, Cannabis indica
tcaaataaataaatttattgtattttatttataggcttttgtattttgtctttttatctaattttatttatcgttaatcttaaaataaaaatgcagaagaaacactagttttttttttttaaaaatacttcatatactatttttttaattttttttaaaatttacggtttgggttgttttagtggtttatccgataatttttatgtgagttgctaaaaggattttagttgcgatttagatttgttacgttagttgctatagagatttttgtgtgaaattccgtaaaaatacaaaaaagaattttttaaagtgtaaaaataattttttttttgtaactgtctttactcttacctcatttaattaagttttcatttttatttataactaaaaatataaacaaaataaaatttttgacttattttaaatattagataattattataaagaaatttagctttctattgcttaaaattatttttctacatttaagttattatagactaacattttataaaatcaattctatccctctatctcatacacctaccttctctcttccttccttctctctcttgctctttgaactcactctaagaactcgacccacata

SEQ ID NO: 179685 - DNA, 538 bp, Cannabis indica
aaaaaaattactcatgaaagacatttctttttattgattatccaaaaacttaaaaaagaaaatttactctcaaactgagtcatgtttctggaccagtttttagctctatatatagtcatgcttctcttttatcttatgtttttataatgtcaaacatttcatttatttagatatttttggtggtgtatgcaggtagtaaagaaggaagttaccaaataaacaattgtttgttactctttcttccaagcaaccccaggtattattttgtattgtattttaagtacttgtctggctaaccaatacttcattgaaaactttaccctgtaaatttagtctcatttataattaggtcataaaaaaacatgaaacggggaacattttaccccaaaaaaaaaaaaaaactaatatacacgtgagctaaactactatgaaatagtatcatagtgatttgtaacaactacctttactttgttgttgttgattctatctacttctatcaaacaactttagtcattatacagtgtttaatttatttgta

SEQ ID NO: 179686 - DNA, 707 bp, Cannabis indica
ttaattttgacataaacatgagttattgttattttcaaaattaacaaaatatatatatatgacacacataataatagtttggaaaacatccctatcatgcacacgcgcagtgatttataagttccttgcttaagtcttagccatataatcaaccataatacccatatatatatgatccacttcttaataatagttctacatataaagtcaattatggtttgcctaagaacaataacactatattgctacaataaccttctttcttcctcttctttccaaagtttgcaatctatataataacaatcatcacttggtagatattaactgtgaaaaaaaagtcttgtttacgcattattaagtttctcttgtagttttcttatgttattatcgatttattgattttgaaataataaatcatttttaagctactaagtatgactatttttttttctttttttaagtgagacaatcttgtgtagattttttttaaatatatactcttaaaatttcaataataataaaaaaaaaataagtgaaatattagtggagaagtagataagttaagtatggtgacaataacataattagtttttctttacatattataaataattaaataataatcacttacaagaaatacaaattaaacttgtggctcaggcagctataagggataataacaacaaaataaaattaatatatatata

SEQ ID NO: 179687 - DNA, 747 bp, Cannabis indica
actttttacaacactttatcatattctttagccaaacaatataatccaattaagagtaatataactagatatttttattcataattaagcacaattatagtttacagataattatattctccactttattattttaattaatcaaattattctaaacacctcatgctaaataccatttaataattagtagctatgaaggtttaattctataataaagttttgataattaaataaattctatgattattgtgatttattaaaactcttttaatttcattttactaatatatgtattttttatatatattaacttttgattatccttttaatttctcttcaacttttcttttagaagaattaattatcttctactctgttaaataaaaagttatgatttttggcggaaattcatgcttattttacggtaaaagaagttataataacaattaaagtgtgtttaatagctttaataatacctagaccactaatttttattcttttaaatcacatcattattctagatctattattcctatttttcatttatgaattaacatttacaattaacaatatttataatactttcaattggttgcccacttgccccaatgtaaattttaatattaattgttatggaatttttacagtattaattgaaaatatactacatggataattaaccctgtaaattaggggtaagcaaaaatcgatttgttcggtttttttcaaaaaaaaaaaaacttaaaa

SEQ ID NO: 179688 - DNA, 549 bp, Cannabis indica
aaacaaatacatgaatttgtgtgtgtattccttgtgattcttgcacttatacgaactaattggtattaattaaaatgcaagagggtgttgacaaaagaggaatgattcttttctcttactactgactatagttttacattttttttgtattacaccaaatagcatcttatcataaggtaatttgtgcattagtcaccgttattatgtcagtaaatgatactaaaactaattgcttgcaaagttggagcagattaatttgcacccacttaatgttctgtatccatcctcatattgatatcatgttttttcttcattcattttttttttaataaactagtgaatttgaagttgttaacattagtgaatccatctccgttttttgcttctttttatctctaactgttgggttttatgccctaaataaaactcatttcaatataatcagatttacttattaatatagatcagaaataacatttaatgttgcatggttcacatgatttattttcatgattatatgtacataatgtatgaattcatctgaaaccc

SEQ ID NO: 179689 - DNA, 1062 bp, Cannabis indica
cactggggtcggagttcccagtatatgccgccatttcgggcatcttgaagtttttagggagctccgcctccaggatatgtttggcacaaggctcccgatcctcactgtccgagtcggagtcgtctcccttctgcctccgggagactcgagcaatatcttttcgaagtatggcaagttccgccataatcccttcgtttacagtacccgaggagaccacgggcctgtatcttttttggtcaaggtgatcccggaggtcaccttgattcccattgatttgatttctcagatcaatgggaggacatctctgtcctcttcttcctctaccccctggttcctggtgcacggaaacgcttttccggtcccctcgatcctgagggccaagactccctctttggggcttgcccctctgcggacctttccctttagggaaatctgagcggacccttcgcggatcctgcacctttttctttcgcccaggggtagaagtagggttttttggttttgtattttccttcagcagggtggccttatagggcgtaggttcccgtacggtctttgctgctgggaattaggcgaggacgtcgctggctccccgtccgagcccacgcggccgacttgtccttcgggagtgcacgtgaataccagcagcctccatggctttctgcatggctagcatcacttcctgcattttttgattttgcgctttctgagcttcgatctcagcttcatgatcgatagctttttgtctaaggagcaccaactctgagtaacttcctccgtcgtaggcatactcgtcgaggttttcctcgtagttctcgtcgggaactatttcttcttcttcttcctcggactcctctgctgctcttgaggctacatcttcctcatttggatcttgagcatcttccagagggcgaggatgacgtgtacttcttgtctccaccattgttgtgaagtcaaatgcttgttatgtagcagctttcctcagctctcaatgaaagcaccaaaatgttgaccgagattttcggcaactattaaaatatgattataataaagagctgtaag

SEQ ID NO: 179690 - DNA, 951 bp, Cannabis indica
ttccttgccagctgtccaggttgttagtcgtttctcctttagttgttagttggttattgtgcttgactcattgtatatatgctgtaatcaactcttcaatcaatgagattctttcttctccattttctttctctctgtcttttctctttctctggcctttcgttcttgttgttcttccttgctgttctttctgttctgctatggatcgtaggtttaacgcgggccagaggctcttgagcttcgtaggagatgatgtttagttgtttctattattagtgtttagttggttcttcatgtttagttggttctttgtttatgttgttctttcccttgttttattgtctggtgtttgtttctgctgtttagtcgttttgttcgtgtctttgttttgtgctgttggcactcctcttaataaaaaaaaaacctcaaaaatattattatattctgtggtatataattttatggctgtagtataattattttaatgatggtatttaattttattagtatagtatatatatttttttgttaatattattatatttttaattattgtgggcatatatatttttattgtacagtatatattttttgttgtatatagtatattatttacttaaaataatatttagtttctattttattgtatataatgactatataaatttttttggcatgatatatatattttaatagtaatatatataatttttgtttagtatggtatatattttttgagtattaatatactactttatttttgttagtattttttatggttataattttttgtgttatgataatatgatatattaaatattattgcatatacaatatatatgattaatgatataatatagttattcgttgtcattataataactgtatatgaagtactaataaatttgtatgatgtaattttatcattatataaatattaataaaaaaaat

SEQ ID NO: 179691 - DNA, 690 bp, Cannabis indica
tttaatagtgtgcagttgctgtcgtataaatcatataattcatgtgtggagtggatgagaagaaaaagaagtgaagattaattaattaattaataatatgtaaaaatatcacaaagcaattattgccacgtagtgaatcagagatttggtatgggatatactctcaacaaacaaacacatgactcatttttcttctcaaaataaaagagatgactcatttttatttattatggtcactttcatatattcatttaatattgtattttgtatcacagcaccaactaacctaatcttctttcctttcctgcctttcatcattcagtggacttaatttttttatttttattttttaagcttctttgaaagaaaataataatattaatttttctatttttgggtccataaaataaaataaacaatgaacacattgagctaattttcagccaagcaaaatgatattattaacattttgtggctaaacagtatttgataataattttcatttattattgaataaataaattgtaagacaaacaaaacgcggcctccatttaattatttagaaattaagaaaaatcttgaataataattatttaattgttcataaagttttttttttttgattaaaaaattgatgtgagaaagtggaaagtactattaattttactttgcatttaaatattcttgatc

SEQ ID NO: 179692 - DNA, 959 bp, Cannabis indica
gtattcaatttttgtgagattgtgacatctttatcaagttattcattttgttttgcctaattttcctgaatgtacatctgttgaccctcatattaactaagttatagcccattttagaaagcaacaattttgtcacatatatatattgttggttacatgtaacgatattaatttattgaatgtgtacattataggccttatatagcaaacattatctgaagaattagattggtaccaagcgattggtggagactcatatcggaaaatatcgtgttacaaaatctagttattttacacgcagtgttaatttttcattacgttaaaactaattaaccatgtatgtaataacgtactaaatcttaattagacatcttaatgaggagccaaaaacattaccattaaaaccatttctaggtactttaaactagaatgttcttcaaaattttgaagaaagagtaaaggttcatccagatgatgtaaacttcaaaggtcatttttcatcaatgatgttggacaccagaagtccatatatacgtcacacacacgtgtcccatgtctcattgctcccataacattatagtgaaactattattaggtgtctctctagtgagaatataaaaataaccaagatgcttgtcgattatataaggggcctatcatattatttggctttgcccagttgactataatgattatatgcatggatcaccaccaaacgagtggttatagttaccgcaagtctgaactcgatatgtatgggtgcgtatggtgtcaataggtataggcctaatatggccagaaatgtctactgagctatctgtaagtcaaaattttgcaattttctattctttggtcggcctaatactagtctatatgggatccagcccgttttcaaggaatgataaactcttgtgcaatgagaacaaataatttccatatgattttttttttgtgtttcg

SEQ ID NO: 179693 - DNA, 1284 bp, Cannabis indica
cacaataagaaactaatatataaattttccggttacattttcaacaaactacttattcatgctctcccccaaaattttctacatacatgactgatattgtagaaaaaaacactaactcatgaactgttctataccggttttcttgtcgataaaggcataaagtgaatcctcacaatattggttaaaacttatcctgaatgaatatgaatcaacgatcctcagatgggtcctcaatagtttcttctgaatccgaactgtcatcaaccattttctggagtgattcaacgtcccctgcttcagaaagtgtgtgcattcggagttggtcggcatcctcactgaggatcaaagaaaacaataaaaattaattgggcctgtggggcaaacaaaattccttcaataaaggcttgagtatgcttttaagttttaaataggaagaaacatttatagatataacaaatgcaatggatagggactagggaggcctactctgcaacaccaaatatttccttgatgaccaaggagctatcctttgtacagaactctggcaactgacaaaaaatcaaagagcatagatttaacatgtcaatggaaaaaagataatgctaatcagctagaagttagaagttagtgtaacaaaaaaccgtaccaaaattcagcaactataatatttgaaatgagatataacagatgacatgtagatgaatttctgttcttttagaaaataaatgtgaggttcatgtaaacatgtgaaactatagtatgaagtaattgattgcaatattactattgtgtgtgaaaaggaatgttgcatgatgaatatttgaacaaaaaaaatactagatggtaacgaaactatttaatcaacccatacttgaacttcaaactgaaagttaaccaaaaaaatgtttgtagcagacttatatggctaaattgctcatgggcttattcagacaagactaactgaagaaaacttgtttagaaatgtaaccgctatttaagagacgtggaaaaagaacgatcaaaaaccaaacagaataaaatatgctctagaaaaacacaagttgggtgtatattgtttcacacaaataattgaaaaaatggggaaacagcagttggttggggtcgtctctagactgttcagtgtcttacctcagatagatagaaaacctttccaaaaagagcttgaacagctagttttctcttgaaacccttttcagtgtagcctgacaaatccatcacaacaggacctggagttcataaacaagctatcagcacattgaatta

SEQ ID NO: 179694 - DNA, 754 bp, Cannabis indica
agcatgacagatatcacttgcttgaacaaccttcaacagttgaaacacaaatatggatgtttttcatacttgaacaaattcaagatttcagttatgagattttttattatccataagaaaatgctcattattattagctaataagaaaaatggatcaccgtgtttctttttttttccttaaaaggaaccactcaattttaggggataaaaatcataaaatcatatcatacatgtatttaacttgattattaaacaaataaaatatattacaataccaatgacgtaaaccccaaaactattaaattattatacatgcgagtactttgatttctttctttaaatttgaagacaaataaaaaccttatctatatgatttaagaatggctccacaaaaagtgcatatgatagctctccaagatttccaataaaagggaacataacagaaccttgtctcagtcctcatatcggcgacactggccccagcgccgcaccgggagcaagttccagcggctggcttgcttctctttatcttccttgtctgatccaccagaaaacaaaaacaaaccatttgttgtaatgctataacactctaggcactccaggtcctctatcaaattcgatgaatactcttttcttgactttattaatccatttatttattgtgataaatgctttacttagtgtagaagtctgactcaaaattgggttgatgtataaccttttctctatatggcgtttatatgtatataacgag

SEQ ID NO: 179695 - DNA, 518 bp, Cannabis indica
gtgtgtgtgtatacaagatgcaaagaaaaagaaacaaaaagattggataaaaaactatagacctttttctatcacattttctacccttattttcccaattctctaaattgtattctatagaataacaagcaaaaagaaaaaagatcacgaaatgtatgccctgcaactacgcatataattatttatcagcataaagtggaatacatgcagaattttggtgagtgacgtggagaatagcaaacaccttgcacagcacaagcatatacaaattgttgtgagagtgctcaatcaatcattaaagccatatgcatatacacagcttcattaattggagatctaagaaagaagttctatcacccactagtatagtttgtaaaacgcaattgatgatcatatacagaggtacaacattaccttcttatttattcccaatgttggatggtaacacgttgcattgaaatcacaatacagatgttaaggattaattctcccacgagtccagcactctcccgctgaca

SEQ ID NO: 179696 - DNA, 639 bp, Cannabis indica
acattattctatttggtaccttgagtattgattgttaaaaaaaaattatattgttttacttctgtaagtattcgtaatcgcaatttataatcttacatattataggaaataattatttgcatgaaataagatattggtaattagtttccaacacttaaataattatagcgttgcatacggttaaggtgaatgtcgactgagcaatttctaaagtagagaataagttcgattttggatgtgtggcctgtgatcctaatggcaatgtaattgaggcaagtcgtattggcctaatttaactaaagttgcagaattaataggaatcaaagaagttttaagttggataaagagaaaagtgatggtctaatgtgatagtcggagttgttcaagttatcaaaagttctatacaaatgctattttagtttggtttgttagcacatgattgtcgtgtattgcctttttctttaaataatgtatcttgttttttttgttaaacaatctactaataaagccgcttattatgttgctagagagtcatgttttatgttagattatacttatagtgagcttaatgcacctcatgccttaaaatttactgtaataacggaacgttattgaataaaataactttatattttaaaa

SEQ ID NO: 179697 - DNA, 1126 bp, Cannabis indica
actacaccattttttttttttttttaataataaaaatgaacaaaactttcattaaaattaataagagtaaaatacattaagaaaaatatagagaactatttaaaatagtttatcatccactttaaatgtatgtactactaatttatgattatgaacataaattaccttgaatgcatgtacatgtactactaatttatgattatgaatataaattaagaacgcttcagaaaattaaaaataaactagtactaccttataaaaaatcctaattctatacaaataaatgatctcatggagaacgtaaaaaaatctatttaatttatactacaccattttaaatgttatttctgtatatattttatgggtcttggagttttttagtctaaaattttttaatattacactacacatgtgcaaaaaaatatttaagttccattttttacacatttacatacatttttaactaagtacaatatacattaattaaaaaaaaaaaaaaaaaattaaaaattgtagtagatataccaaactaaagtctattataaaagtacctaaatcattccattataaccacttgaagttagcgctaataaaaagatatgtgtatattaaagattcttagttccaatcttaatttatgtattatgatatataaatatttaaataaaaaaaattccattaattattttagaaaataataaataaaatattaaaataatatattatagtaaatatgctaataattatttattatatattttgttaatatttttttctttcattcaactaacaaaataaattctaagtatacacattactcaatctctattcatgtcttttcacaaatcatatatacaattaaatttgataaaataagtaaatggggaagtagaaagaactcttataggggaagataaaaaagataaagaaaatgggcattagctgtcagttttttccaagaaacaaattaaatctaaaagttgtatgattggtgctaaaaagtgagatgtatgtgtgtacgtatataatggttttattgaatcatgaggtttattgatattttaaaaataaaaacatgtacttgttcggaaggccccactgaatgggatttttattttgttttcct

SEQ ID NO: 179698 - DNA, 900 bp, Cannabis indica
tatataaaatcaaaaaataaaagaatcacaattaactctattaaatatatcaagtgtcaccaataattcttttaataattgattcaattagacaaataaataaaggatattttgtaacaaaaaatacaaccaaaatatattaatataaatgtcatttttagtttaactactttttttcaatatgagctctacaacaaagtgttacttctctagaaaaaaaatattatattttattatttaataagcttcaaactctctcccattcctttatggcaaccataacaaccaaaatgtaatatgctttcacttcatttttatttttatcaagaaaaaaaaaaaaaaacaatattgagttgagatttgagaatctagttataaaaaattaacaaaaatctcaaaaaaaaatttaagtaaatgtcaattgtttcattatatcttcatagtttattaaataatttattattggctaaaacatctaatgtgggctataaaaattcacatgaaaattaatacatataatagatcccaattcatctatatataaatatatctatgtttttaataagctcacctcaatatctttttttcctctttacaaagtttacaaaatgagcaagaatcaaaagacaataaggcaaagaagaaagcaacaaaataaaaatattgaaattctattaagtgacttatcagcctgcatttcttgcctcctcagccttggattactactactactactccccattagacccccgatacgagtttggatacgagtcaaactctccgagtttccaaaaaccctagcatagaccatatccccgaacatccccacaacagggtgatgaaaacctgtcatgggcgatgaggatgataataaaactcatcatcctcgtcgtggtaatg

SEQ ID NO: 179699 - DNA, 611 bp, Cannabis indica
aggtgaattagacttgtgtttagagctcatctagttcaaaccctcaaaaaaatctctcatttaaaaatacgtatttttttttactgattttgaaaatataatttctttctaaataagtgtttaattttgtttttttacgacccactaaagtttaagaccaaccttgcatagctaacagatagtttatatgtggcatttttcaatgctgatgtgggaatcaacaccataagacacagatcaaaaaggtaatatggggtggttgaagatatcaataagcaatgagaaaaacctctattcttcaatctgaattctaatcacaattcatcagagatgtcttactcttagccatgtgattttgtcaaacattgaaaagtagtaagtgttgaaaattctacattatcacaaacaattagtaaaagtaaataggcacttaattagaaactcatatacttccttctcacaaatctgcatgaaaaaagaaatgacttcaattaatcagaaccaacattataataataataataataataattatagtcatcaatcactctgagctaaactaaatgattttctttaattaaaaacataaaataaccaaagaaatgaaatag

SEQ ID NO: 179700 - DNA, 610 bp, Cannabis indica
tttacagagtagagtactaaacagtgagttggagcagagtgagatatatgttgttgtttttgatttatggctagatagataatgattttcaaatagttatgaataggaagagctggactttttactgaaacgatttaccttcagtgtcttcctaagaaagacgtgttgcatttgatatgagaggaaggaaagacgtgtccacttacagagggggttaaaaatttgtttaaattaattatttaagctccatattcaagtttttgttctaggatcattgttcttttgtaatattttttcctcactctagctaatgtgttttttttctatttattattccatgaaaaagattataagttgacaaattatctgaacaaaacttactttttatttgttatcaatttcagagaaagaggagatattgatcaagcaaattattgtcattctaaagaaattacagcagaccctaaagacattcaattaagactgcatcgtgcatcactttatcttgaacttaaagactataaaagggctgctgaatcttatgatcagatacatcaactctctcctgaaaatatagaagcatggaaaacaagtgcaaaggttttttacc

SEQ ID NO: 179701 - DNA, 649 bp, Cannabis indica
atctaaatgaatttaattcaataaaaatataaaattattttaaaaaaaaattataaattaagctaattttttttatatttacttaaacaaatttacatttgttgagaaaaataaaatatactcaagtttgttttggtaaaatttagtttttacaaaaattttaatatctaaatgaattttttaataaaaataagtaattttttaaatcgtttatttagttttataattttaatttattttttaattttttaatcattcaaaataattttttcttaagatctaaattaattttttaagatttacaaaaaaaaaaaatgtgtaaaatctttctcatgtttattttgagggggtacgatttgatagttgttaaagtttagggagcaacattgctaatttacaaagacacgtcatcatttaaacaaaataataggacgcaacctaagagtaggactaaatttctatagaagtaaaagtttagggggattcttttcaagtggtatattttagaggacaaaatcagtattgtcgagtgaacaggtaaagtttgctaattattcaaaaaaaaaaaaaaaaaaccaggaaggataattagtttacatactgtgagatgcgccgtagtggccatttattttgaggaggtccaagtgat

SEQ ID NO: 179702 - DNA, 770 bp, Cannabis indica
tttaaagatactctaagcatctccaaaccatactctctaaaatactactttaactaaaataggaaagtggaaactttaaaaaaatgaagttccaaccatacaaaaaaattctctataatagaaaatacatagagagctttctcacttttttgcttaaatttttttaatagtattttaataaaaagtactattatattttataaaattaaattatatttggcaaattcaacttacaaaatattattaaaataattaatactaattaaggtagagagtatgattggagcaaatggttttctatttagctgaaaaaaataaagagtagtattctctattttttttttagctaaaatagttaaatggttaaaaagttaaaatggaaactctcgtctctttaccagcgtctcaagcgttatccaccaaaaatttgtgtagaactaattaaaatagtaccactcataatgaaaacattagtgaaaggatcttcagatcaatgagtacgagaaactcgattttgtaattgggaagtgaacttcaactggtgcttccaccattattaaacacaactgaactgatttcttataataaaatagtcaaaacaaaaattgttttaatgttacaataactcaactaactatgctagaccagtaaattaatactatatttccagaggaaaattgattaactaattatatgttcacatttagaaaaatcatctcttacttgccttcttatttgcttggtaaccaggatagttctggttcatttgg

SEQ ID NO: 179703 - DNA, 1130 bp, Cannabis indica
taaaaaatagagtaaaaaaggtttagatcttagcttggtgaatggaattatgtttaattaattattatgagtaattaaaatgaaataaagtgttgtgtgaggtggaacttgaaataaaatcacattaatatatgtagttgaagatgctttaattgaccactttatattttattttaatttaatttttttactatctcaattgagtttatgacaccttaatttttcctcatttaaatctaagacaatggtcttctttgggtcagagctaattaaagcattcatgaatctagttgaaaatatatgccataattatataatatatactaatatataaatataaatatatatatatatatatttaagtgattttgttaagggtgttcacttatacatttttttttttaattattattatttgatattgattcttcttaaccttttcttcactcttttctaatgaagacacctcaattaataattgattatttatttatagaattgtaactttataaatatgataataatggtggagatgcattaaaattgtacacactttttacacttaatagtttcatttttattatggataattatatatagtatcacattatttttgattgtgtgattaaaattaattacatatcattttgtatatacaatgtatgcaatttaaaggtatcacaattattattcattttattataatttattatactaacatcaaaaaaatactatggtgtgagtttacacaaaattgcatttattaatgtatgatgcttattactattgtgtgaaaaataatacttaagcttaatattttgtttcaatgtgtagttagggtttaatataaattcaagggtaaaactataatgtataggatattttttatgggcaatatctaaattaatcaaaaatttagttatttaattactcaattcagtctagttatatttatattttttttatatataaaaatatatttatatgtaattttttttttatttagtaaaaatagagaatcacatgcaaaccagtttacttatcatcctactttacttagattcatcggtacttatactttacataaggattcctatctcaaagatagtccaccacacagtaagtcaatc

SEQ ID NO: 179704 - DNA, 733 bp, Cannabis indica
atgttacttttgtggtgctcgataccttaatttgtcccttaacattgttgttgtttttatgtacaaatctttattaactttgattatatttttttttaattatacataaatttgcaagaacatctctaacggaaaatataaaattagactatatttgacaaattttctcttttttttaatgaaaaaaaagatctcaattatttgtatatattattctcaatcattttttaatcttaaattttttcaaaaaaaaaaaaaaaaaatatgaatcctttttttaatctcaattatatatattatatatatatatatttgaagaaaattatatattttttattttcctttttttttttacatttcaaatttttctttttttaatcttaattatatatatatatatcttttttaaaaaaaaaaaaaatctcacattttttataaaagaaatatcatttttttttcatcttttatgcattttttacctatgttttattgttatgcgtttttttttttcaattttatttgaccttttttattagttttttttttttttaaaatatcttactcaaattttaaatatatataacgtcaatatgtaaatggatgttataataacctaaatgaaaacaattgtttgtttttttatatacaattttttactgtttttagttttttatatactaatttttggtaaataatttcttacacttgctattggcaccataagatatttatt

SEQ ID NO: 179705 - DNA, 538 bp, Cannabis indica
tatttttatgttgttttgatattgatttcctgttactttcatgaagttttcttgttgatttgtgtgtttttataaaatactaataaaaaaaaaaatactttaaacgtaaaatataaaaattcaacaaaaaaaaaaaattactggttatttcccaattcctattgcattctattatcatttttacaatgaatcaaacactacattatattattgaaaatctcatagctaaaacctaatgaagcattttggcatctttggcaagaaaagaccattgactattgatcaaatatgtatatccaagttccaactaactattacttgtaaaataagtaaataaataaaaactataaaactctacacgcaatatcattctcaccaacaacttttacttgaataaatgttaaacatttcacatttagggtgtgtttagaaatcaattatatacactaaattattcccataaaccgatgtatgcaaatttgtaatgtacctctcaaaaaaaattgtaatgtatgttataactacaaaaatacacttt

SEQ ID NO: 179706 - DNA, 810 bp, Cannabis indica
caaactgtcatcatcaccttttttttattaaaagaaaaaatcaaataaaacgcaactataattacttgacaatatcatatcaattgcacacatatctatacattaaatatctaactactaaaatcactagtagaatagtatccatattaattggttttgacacacagggcaataatatgacattttttatcattgaaattaattggggcagaatagtaaaactgggaaatgtttcgcagattcggacatgtttgatctttttctttcatgttttgggtgggtaggcaaaactcgttgactaaaaagtatcatctcaaaaccaataagagagtgacacgtggaaccactagatatccctatcacgtcagatcatcaggtcaggctcaaacacaggaaagaatagtagaaagacttttattattttttttcttttttccgttttttttttttttttttaaagttattatattgtgagtctaataattggactaacatggtccagttgggcagacgacgcagacgcaattggtgctcatcaatctttgatcagcttatctttaacttccttcttttgctatatagtcattttagcttgaatgacacggactctgcttctcgatgaaaaaaacaaaacaaaaacaaaaaaaaaatagtggtactcatcaaaatggtggcggtacaaaggataacattacatcataatatataatataatacttaacataataattaacaataataatttaaatatacatattgacgtcaatagcgacggtgatggcgattacacttaagattgtttcaattata

SEQ ID NO: 179707 - DNA, 1077 bp, Cannabis indica
accgacgcttttggtggatgtggctgttttctcgggttttcttcctaaccaaacaataacccaactgttttgtctttccaacttccaagagccaactaaagaaaacgaaagagataatcgaagatgcaaattattaattaattaaatatgctaaaacaatacatttggataatgaaatgagttgttatatatagcttgaaggagaaaggtctttatagagaatagaacgagctttaattttaaatagtcggtttagtattactttagtacgtgttcataattttagggataattaggattatattaaattatacctttaaatttttgtgtaatttcattcaattttacttatttaacgattgtttatatactaaattatgttcctcaaattttaaaatttactaaatcatgtttctcgaattttgaaaaatatcaaatcatgttctttgaattttgatttatattagactttcttattaaaatttgacaaaaattcttaaatctaataatctcaataattttggaagatttttgactatcttaaaactccaggagataatttgacaaatgtccttctgcgcaaaaatcttaattggcctaattttaatattagtttcttgaggagtgttaattataacattctattacaattttttagtaaacctccacacccaaaattagatatcgaaatattttttggtaaattattcgaaattttttaaaaaattacaaggatgatgttgtaagcatcacaaacacctccacacaaaaaaattgaaaaaaaaaaattatttcgatatgtattttcaaatacagaagttaactaaaaaattataataaaaagttgatattagtactcctctaattttttttataattaattttttattttattttgtgttagagagagagctttttgaagttggacttttagaacctccaatttaaaaaaaaaaaaaaaaaacaaaaaaaaaaaaaacgtaaggaccttagtaccccgaccgtagctctggaggaatcttagttacgagtaggtccgacgtaatttggtagttagtttactttattaatataata

SEQ ID NO: 179708 - DNA, 851 bp, Cannabis indica
aggaatatcttcctgtggcgcaagtttgagctaaggttccttcgttaacgttttggccccagtagattgctattccaccagcatgagtgaattggattaaggctaaaatttggagtagtagtagtggtaggacaagttttgtagccatgattttgagaaatttggttttgtttatgagttggagtgtgaatgtgtgatctgataatggggtttgcttgcttcttctttctatttaagctgttgttagtgcctacaaaaactgaccaattaataaagtttgttggggaaaatacaatagagttgactataaagtccaagtcaagctaatttgttccattatatataatagacaagattgatggtcccactagggtttaacttcttttggcatgcttattgggtgagtagggagggaggactacaactagaggattcattttatttttataatttctagaatattgtccaaagcatctcaatccaatcatgtttttttttttttttttttttgaaatagatccaattatgttctttaaacacactctttaactaaaggctaattagaatttatgtcttctaaactttgacatgtaccaaatcatgccccttgaactttaaggtcgttaaaaatgcctcctgaactatttagatcggttatttttttaataataaattatttaatatttcattaaaatagaaaaataaagtaaaaaaaactatcgtttcttaatcttcaataatgatctctttccatctctatttacaaacaaatcaaaccaatatacatatatgtgagtatatatgtactcatcttagatgaaaaaaaacaaaacaaatcattacaatatgtg

SEQ ID NO: 179709 - DNA, 762 bp, Cannabis indica
acaatactccatatttattaaactatgctttaattaaccttaattaagtttttgagatattacatattataataataataatctttattgattaaaaggatataataagtatagatttagatctaatttgatctaaagtaggttttgaatgagatttaatctcagtcactcattattatttatcttattatttcagttaaataaatgatttaacctaaacttatggtgggcctatgtaaagagtgaaaagaagatagaaaatcctaatttctcatcttcctcttctctttctttagcaaatttccaaaatagtttccactattgggtttcaaatttttttatctctcctcctcattgattttagctgattacatattctaagtgagttgagtaccaatcgacactattcaaaatagtacccaggcctttgtgaatggccgtagctcaaataacaggatattggggggcaaaactattgagctttacattttataacacttaaccacaaaagctaaaattttgacggtaaaatctattgaacccaagttctgttttggcatcacccttccgtccaaaacctcagttaagtgacacagtggactaaccacgtgtacacttgcgtacacgtgacaaatttttagtgatccgcgtaatattaattattaaatattataaaaaataaatttaaaaatataaaataaattaattataaaaaagtaattttaatttaatttttttcttttctttttctatttttccttt

SEQ ID NO: 179710 - DNA, 921 bp, Cannabis indica
  modified_base (837)..(837): a, c, t, g, unknown or other
  modified_base (862)..(862): a, c, t, g, unknown or other
atgatataaatattttttaaaattgaaaatataaaatgtatattccaaactttcatataaataaaatataatttcaaaaagtagagatttaaatataatttattttcttctacttttagaattcgttattgcttattttatttattttaatttgttattagagacataaaataataataattttttttagttatgtgaaaaaataataatttaaaataattaatttattttgcactattctaaattgtattgtattgaatttgaattattatatggaaattaaatttgattaaatataatttattttcttctacttttagaattcgttattgcttattttatttattttaatttattattagagacataaaataataataattttttttagttatgtgaaaatagtaataatctaaaataattaatttattttgcactattctaaattgtattgtattaaatttgaattattatacagaattaaatttgattaaaaatataaaattcgcacttaatataaatgagatgcactatacaaagatagtaagaatttaattagacgaatacttttatttaatatttataaaaataacggtactagatgttgaacacactaggatgatgatctttagtctctaacatctttgatacctttcatttgactaatcactcccaataaatttccatcctctacacatctcaaatcaaaagttggtgccaagctgactaccatattgggctctttctatatgttggacctgctacgagtctttttttttagaaactttacaaaaataattagaatttgggttaatttttacaaaaattactgtcacncattatttttttcaaaaatctaatnttttataaattacagtggaacacaaaacagatcaactgaaaacaacatagaacactaaa

SEQ ID NO: 179711 - DNA, 708 bp, Cannabis indica
ttcacattgagtatcctcgtatgctcagtcgagtgacaaacgtacctatccccgacgtggtctaggctagagaatgggaaccggagggtctgacctcatccgggacctacctaaaaaatctccaatgttcgaaaaatataactctttttccttatagccccatcgggagtaaggcattagtcattgggaaaaatgtgtaggcagtagctataaaataagataacttatgggttaagtgggtccatagtgtttatctcaaagggaagattggtggagttacaatccactgcccaacaaaggtgttattggagacaagtgacaaaggacaagataagcaaagttgtaaatatgcaacaatttttctcttacaggtacacaatcagccaagattacttggctcttcatcctcctcaagcagaggttcattggcgcaagcatgtttggagtcatttatcagtttcaaagcatttgtcttattctttggcttacaattttaaatagattgtaaactaatgagagattattgatgtgcaaaatatgtcaagaatcaagttgtgtgttgtgtgacatacatacataaattgtttgaacacttattttttttttaatgttatattatagtaggagatgtttttgaatgagcataaaatatagttggtctggtaaggtgaatagtgtactgctgaagagtataatttttgagtatgc

SEQ ID NO: 179712 - DNA, 545 bp, Cannabis indica
aattaaaaattactcaacataatcttatttaattctcacaattaaaattaatgaaaaaatatttatatcttttttttttaaataaaaatatttatatcttaattatcaataaacttataactgcacgggtttgtttccttgttagaaaggaaataaacaaaataggaaatgaattttttttggctagacatacgttaattttttcaagccaaaaaaaattattttaattttttattgaattttcttactttttaaaagattttcttaggggtttgtaaatacgatattgtccgtatttgttaccattttaggtagatccactattatgttttgacaaatgtacccttatagttttattactcttttacgttattattttccaaaatattttaaaatattcaaatgaaattaattaaattttagatttcaaaaaaaaaaatcataaaaatttgattcaatataatgttttttttgttaaaacaatttattataattttaaattagaatacaccagttactttcactatttaggatttttgtttgat

SEQ ID NO: 179713 - DNA, 918 bp, Cannabis indica
ctcttgtggaggtggcaagttgttgcccaatagtccatagcaaactccaatttgggcagctgcatgtacaatattttgataaattattgaaattttttaataatttaatgtatactatattccataaatgatgaaaaatatttagggatttaaatttaaaattaaaaaaaataatgttaaatatttatattaatttcacttcacatcggctatataaaaatatcatgtgtactaaattactttctttcaaagtgctatttaaaattaaatatgcaataatatatatgcatagttattatacaatttatgaaaaaattaaatatgaattttttacttggcgacttgcaaataaattatcatatcccaacaatatgttaaataattacatcaataaaaatattattgaatattctaatttttctcaaataaattatcagagtcactggttgcacatggttggttaggcacctgcaaagacgtccccaaccaatttcgtgcagccatgcagttcaaagatagtaagtttaattagtaccaaagatttcattttcaattaatctttcttattacaaaaaattaggatcagatttgggttaacgtgagttaggcctgcgcctagagcccacctaacctaggacccaaaaataatatcctctttcttaaaatatacatatttttttagtaattttaaaaatactatatgtatatttgttaattaatgactcaataactttttttttttctaagactcacccaattttaagatcgaccttacaagcaattaaatacaccatgttagaggtaacgtaaaactagacacgactagaactaaaagagaattcgtagataaggggttgcgacgacctatatgtggcacaatgtgcgttcgtccctgaatacaatggtaatcatgaacat

SEQ ID NO: 179714 - DNA, 1375 bp, Cannabis indica
aatggtatgtagtctcttatggcatcgtgtttattttatcagtagctttgtactaatgatgaacttgactacatgagaattatgcaacaaatcgaagcaatttcccaagtaaatttttagacatttgaattattaagatttctgtttaagtatttgatttaaaatttcaatgatcattggtactagtttttagtattcagaccttttctaatgcctagtagtgaggcaacaaagtagtgaaatatcctgttattgttaatatcatgactcaaaggtttgtggcataatatatatacattgaaatgtgtatcttgatgaatgaaaccttcaaactttgctgatataagatatgcccaaaaatgttaattataatatttcaaggctgcattatgaccaaaaatgttataagcttgcaaattattgaaatttagtttacagaaggatgaaagtgtttatattgagacaaagaagcagttagtgtatactgtgaattggtggagaaaagaagagcttagaggatagaagtttgtatagaagaatcttgccaatctgctccagaaaaaagattttggaaaaattgttttaataattaaggaaaaaaaaataatagaaaatagcatgttaaataaatttaaatgcacttcttaaaatacatctcttgaaatggatacactaatacatttttatctgtttcggtataccgagaaaaaaatttagtctaaatttttttcatattcgtgtacattgtagtgatttaagacaattttgtaaaattttgaaaaattcgaaaaatttgaagacaccgaaaatagagttcaaacaatctattgcacatatgacttttttatattatacgtgtaaaatagttgtttaaacattactttttatattgtaaattatttcgaagagttagagatttgtagaagcaccctcatctttatataaattattaatggaaaaattacataatgatattttataaaacacaaaaaccacgtcaaagtaacaaaaaataacatcaaaataatatataaataacacaaaataaaaaataataataataataataatgatacaatataaaatattgtttttatataaataaaatcttaaaacccgtaaaaatatttaaattccataaataatatttttgtaattttttttttttttgggtaaataatcccattattaaaagtaatgtttctagtcactctcactttgagtctcaattttctcaccattttcattttccattctttctctgttaaatgctcttaagatgtcgcattttctcaggttcttcaattacgattggggattctgaatttgttctgttacgattgggaaatcggaggagggagatgttgaaccgagt

SEQ ID NO: 179715 - DNA, 643 bp, Cannabis indica
gatcaatagtatgacattttaaacttctatcacgatgaataaatatgttattttgtcattgaaccatgttagtacattaagtgaagagaggctcaaacattcacttacctaattgggcttcataaatccctcaacttgtcttaggaactctttcatggagtagcaattcttcttttgaaattattctaaggtttctactcgtagttttgcaaacattgtcattagcttcttgtcgcgctactcattcttttggccttaaccgccttctttggttgtatgttagggtcggtttaaacattaggcagcttggactattgcacaaagtcccttatattaaaatgtcccatttttaactaaatatttatatctaatgtatacaatatatataataaacattcataacaatgaacatgcacataaacaaaaattgataaaaacttgtggtttcaaatacacataattttaaaattttgtctatatgaagttttttttaaaaaaaactagaattaatgaagtattgattagtaattttttaattttattttaaataaaaaacttaattttaaatttttacgtacttctaaagctggtcaaaccagtccggcctggtgagcaccataaaattattaattaaatttcaaaa

SEQ ID NO: 179716 - DNA, 542 bp, Cannabis indica
acaaaccattatctcaatctacccactcacctcgatgatctttaagtttatgaatatggtttgtacgcttacgagcactagcatcggcatgaaaaaatttactattttgatcacccgcattaagccaaagttgcttcgaccgttgtctccaaaaaatttcacgttgatcaagaatggagaacaaaatcttcttcaccgcctgaaacttttcaaccaaagcactatctctcttgcttctaaattgctttaactcgttcttgcaacttttaatgcaactcccaaaatttccagttacttcctttccccatgtttccaagatttcactacacacatggattttggattgaatatccatggtcgagtttgcttcccaacagtcctttattaattgaaaacataaaggttcagttagccatgcattttcaaacctaaattgtcttcgcccatgaactatgattgctttttttggtctccaaaatagagggctatggtccgacggcgctccttccagattataaagtttagccaactagaagagttga

SEQ ID NO: 179717 - DNA, 594 bp, Cannabis indica
ttgacttatctcaaaaataaaccctgtcgattctcggggtcaacaacaacttttgtctccacaaatattgtcttgaaaaattttctcttaacaaattttgtcttttccctatttaattaatttgaaaaaattatttatttattacaaaaataaataaatactattttgccaattcataagtactagatccataatctgaactgagattacttgcaccaaagaatgggcatcagtgaaccgtattagtaaccattaattaaagattctataactttaatatgttggtgactgttttattcatagctaagtgatatttgttctctgtacagctataagtcaccacctcatatatgaataagaaattttccaattaataatttaacacttatgtatatatcaaaatgatcaattctttattaaaaatctgaagtatctttttaagttttttggggcataaaccttaacaatctcccacttgccctaaaaggaaattgggcatctcccttagtcccatattagttatatgatccattaaagattttactaggagtgtctttgtgaaatggatctaccaagttatgttccgacacaatc

SEQ ID NO: 179718 - DNA, 351 bp, Cannabis indica
tatcaatatcatctaaattgagatgcatttattttttagacactatagaatgtatattaataaaatatttattataattatatcttttaattcgatgaattataaaaattataactaattaattgagatcaataaaaataataaaaaaaataaatttatttataatacatatgtaaagatctactatcccttttaaataatattagattattacgtaaacttaatcttgtgttagaacttggtatgaataacatgaagcatatataagcgtgtatgaaatacaaaataaattgcacacaatatgcaatacaaagaaatgatcaaaatatatctagctattgattctatgag

SEQ ID NO: 179719 - DNA, 630 bp, Cannabis indica
ttaaattttagaggcgctaaaattctcggggtttggtaaatgactaagttacccttaggagtttatagttaaattatttaacttgaagggcaagaaggtcttttggcaaatggttattttgtcttgttgtgggattaaagttagctgaatataacttatcaattaagaaaataggggttttattctttttcaaacattcaagaaaactcaccctcatcttcatcaatctctttctttctctcattttcgaaacatcaagggcctagcttaggcttgatttttgtttgctgatttttggagttcctagctgaattggtgaagctttgatctaaggtattgatcccttgttcttctctttgattatagtaagcataaagttaggttttgatgcttaaattgggaattttggttctgtagttatagttgttgtttgaatttaagttctgaagattaattgagtttaattgagttgctatatgctgtttttgttatttgtagtaaggttttggcaaggtttgagtttgagaactcaaaccttgacctctaatggtgtttttgaaattgatgtgaattgttgagttctgctggttaggtttggtttattatggtataagcaggtattctggaaag

SEQ ID NO: 179720 - DNA, 637 bp, Cannabis indica
atttatttttcttgcattatccctcccaaaagagaaaagagaaaaaaaaaaaaaactgaaaaacctctctaaaacccccattcattatctcttatatgtgttcctctcagtcatccaaaaatgcatatctctctgaccctttcaccatccaaagttcctctgctattctcaccccaccaacccatttcagctgcaccatcaaagacttgcagacttccacttctcacccgtccgagtccggtggtgaacgccctcaaagagcccggctttttgccagccatcggccgagccatcgaagatgacgagtaccggattgctaggtcgcaggtcctcgaagggagtggatttggtaaggcgtattcgattgagggaagtttccattggtgggcaagagacttgcgtcatagtccctgaattcaaatgtgctttcgatattgggcggtgtcccacccagggcgtattcaccagaattttgttttctatcactcatgctcatctcgatcatattgtgagctcctattatttctttatatggatacccaacttcaatttctaatttatgaatgaaaaaaaaatgttactattgtcagtttgtgtaagttgtcttgtggttcttgccaattcgttcgatttgaca

SEQ ID NO: 179721 - DNA, 610 bp, Cannabis indica
ttagcaaaaatctaaagctaaaatgtaccaacccaaaacaagaaaaatggactaaaaaactatagatatgcaaatgcaagaaaaaccgtaagccaatatgcttcaaaattacgcttacatttttctctcaccacaaactttaagcagcacattaaataaataaaaaaaaaaaaaagtgagcaatcactaatgtttctcaataaaatttaggagcaatggacaaataaggtcaaactctacagcccatctgagtgtaaacaaaagcaatggtgcccgcgaaacgagcactggcgacattaaataattgcacccttctacaagcatgcaaaatacagtatcaatacgttctcaacgagtcgtcggacagtcttctacacaccgtttaaaccccctccaaactacgactcgattggccccttctgtaactctgtaagcaaacaaccaacccgccctttaatcaatgtctcggaaagaaaacctaaatttcatggataccactttagttaatgttctcaccttatgtcaaaattgttttaagatgaattaaggtccatgactatacccacagcaactgttttccctgtaataatatagaaaacatatatatata

SEQ ID NO: 179722 - DNA, 606 bp, Cannabis indica
cctaacattctcattttacatgctaaatattttaaaacaaacttcaattttttttttctcaaaaaggaaataaaattaattagagtttaaaagtgttgtttttttctctttccttttcagattcctagttaaagtaatccataaataaaattttattttcaaacatatagttggttgaatttgacaaattatttatttttatctttttccttcatattttgcaggtggtatcatttcctattttggaggaattagaattgtggggacttgattctgtagagatgatttgggcagatcaacttcaagaagtatcatacatgcagaatttaaaagatttaactatttctagatgtcataagttaaagtatctgttttcttctgctgtggcaagaagtttcattcaacttagagaactggaagtacatgactgtgagaatatggaagagattgtagtgataaaagaaggtggagaagaagaaggtagttccaatgacaccatttccttccctaaactacagtacattaagcttgatggtcttggaaacctcaaaaggttcagtggcggaaagcattctcaaatggaaggtgaaggattaatgaagagaa

SEQ ID NO: 179723 - DNA, 590 bp, Cannabis indica
tcctcctcctccttctactactgttacaatagctagtaatactgtttcgttcccgccaaagtcatcgaaggaggttctcatggattttgacctcgaccttgataatccatggccgatggaccagatcgcttttgtttctaatcctatgtctcctttactcttctcttcttcctcagctgaccaccctttctctcctctttgggcttttgccgatgcagaaaacgaggagaataatcataataatagtaataataatacgaataattgtaatagtaataacaataacagtagcaatagtaataacaattctaataagtttggtcgacatgcgaattcggcacccatggctgactcttctcggttttcctgtgagtttttcttattgaatcgctcctgttcgttttgtgtttgactagatttcgtttgtttatttctctagctagtgatctgttttttgctatggttgagttgaaaataatctgtgattgattgtgtttcttcttacataaatggcgcttaattgttggaaattatatggttttattgtagttttttttctaagctgtataattttttaaggaacaaacaag

SEQ ID NO: 179724 - DNA, 579 bp, Cannabis indica
atattgcacaaactggagaatgaagtgcaccaaactgttgagttggtaggttgtttcgagagggactctttcaaaaggtaaatttttcaatttttttttctttttaacaagaatactaggtgtgttcatcaaacttccgacaccatattgcacaaaccgcctgcaccacatcacaccgcacaaaaaatacagtttgaaattttttacaatgcgagtgcggtttgtgattttagatttaataatcgcggttcaaactttattgcattatatattacaataatactaatttttacacaatgatttctctttttgagcaactcatatagttacaaagtctaagtcacacaattaaatttaaagaacgtccaaataagttattctcatttttttttctaacttcttattgttaacatattattattgatatatatgtgtattatataattttttagagataatttaatataataactttaaatatataagttatgacgttaaacttttaataagatagattttttttttaattgttgaaatttattagacgaatctttactttaatatttaataatgatgata

SEQ ID NO: 179725 - DNA, 600 bp, Cannabis indica
gaataagctctatcaagttatgacattttatttagcaacaacaacctatatgtgtctataacagaaattaaacatataggctcacacaggcacacagatttggatggatcctatcatgttactaggtcatacacagatgaaagaagaatgtaaaaattacctgttacaaattatttacttgatctatcatcaattgaaccatgggttaaaatcagatcattggatctgtcaacaagttaaccatggcaatttagatcaagcaataataggttttagaaaacttacaaacaatctaaaacacatactcctgcaacaagttagatttggatagttggatgtaggatttatttaattttaaatattaaactttatttcgaaatttaaaaaaaaaatccggtttttaaagaattaaataaaaatatttaaaattaaacctacaattttgaaaaattaggttttgagtaacctaaatatcatttcaaaataaatttgctaactttccttttaaatttcatgttatttaataaacatctttcattaacttgtcgtttaccatgaaagaaattattcatatcataatgatgatcattagtagatcag

SEQ ID NO: 179726 - DNA, 548 bp, Cannabis indica
ggcgttgagcaagttgcttagattctttgttttgaagaaaaagaaaagaaagaaagaaaaagaaatggattgtggagagactaatatggataaatgattccacttcgggctcgtttggaatgccgtattaggtcgtattgtattgtattatattgaattgtattttatgcaattatttttatgtaaaactatatgtggtattaacttttatggacacctaaatatataatattttagtataaattaaagtttcacataatattatataaaaatatgatatataatccaattcaatataatacaatataatacaatatgacctaatacggcgttacaaacgaacccttcaagtctttaatggcatgtttgaatcaatattaaagtaatcattccttaaatttgtttacttattatttagttttatactaacattttagtaattaaataaatacatattaggttttttttgaaaaaatacaaattatattgaatcaagcatattttttttttttttagaaacaatattgaatcaagcatttagagttgat

SEQ ID NO: 179727 - DNA, 559 bp, Cannabis indica
atattatctccatcataaatgaggaagcttgagacaatgaaaacaataagactctttgctcctcttttttttgtttttttttttttctttttttgaagaaaagcgtactctaatagctataactgattagacctcacagtcattatataaagtatttatcggaatggaagttaacggaataaccccaaacctcttgtgggtaaatgcccacttagccacagtatgggcggcataattacagtccctgctaatataagagaaaatacaactagaaaacaaatgagagtaactattacaaaatgagatatagtttccaataacccagtgagactccccattaagtgcattgataactaccctcgagtcactctccacaattacaaacttggcaccaatatccttagcagtcgaaatggccaaacagcaggcctccgcttctccacaaagagcatcagaaaagtacaacacgggacgtctgaacccaaaccatcctaccaagatggtttttgacaacaactgctgcgcacatgctatcaagccctactttaacatcgcaatt

SEQ ID NO: 179728 - DNA, 713 bp, Cannabis indica
aattcagagtcaggataagatctcaccctttgtcccaccctctcttccttcgccaaaatatcattaaaatcacccatgacacaccaatattcattagtatacagcccacacaattccttccataagatatgtctctcattcctattattagatgcatacacaacagtaagaaagctattaaatccctcaattgttgacattctcaagtgcattagttgactagtacacttgacaatatcaacagaaaatctatgagggttccaagcaatagtaatcttacctcctggatgccatgcaatgttggaagagaaacaccatccatcgaacacattcgagtacaaggctccaagttttggggcctttacccttgtctcgaggagaccaacaaaatcaaccttttgagaattaataaattgctttattgattgttgtttagattgattgttagctcctcggacattccaacagagtattttatccatttgaaagagagggctctccccccctcttgtgtcatccataatcccccatatcggcttgaggtaggcttattcaaaatcccccctatttcccatctcatgttccatactgagagcttgaaaaggattggttgtttttactgctgggacctcctttgtcttttcaggtttatcaactttcttcccatttgatactctaataaatccatcttcatcaatatctgtggtcttcct

SEQ ID NO: 179729 - DNA, 555 bp, Cannabis indica
aatatcattaaatagtttaggaagaatatgtatgtattacttgcgtatctgtttttgacattttggagtaaacttttagttcgtttttttttttcataataattatttaagatttatttttatttttttttaaaaaaaatctaaataatttaaaaatgtcaaaaataaaatttaaacaattacttaccacgtgtataaaacaaaaagtcacccatgtaataaaatgtttgaattttattttcagcgttgtaaattatatgaatttttttaacattttttacatataactctaaataattacaatgtatataattataaaaaaaaaaaaaacaaaatacgactaaaatactcttctgaatgtcaaactagatagagatttgtcgagttctatagactttaccaataatttatgagaataattgatttcaataatttatgagaataattgatttcattggtgtttgttactaaataatataatatttttatttagtaacctacaaatatattaatttaaattaaaaaaataatgttaaataatacgtctcacatata

SEQ ID NO: 179730 - DNA, 903 bp, Cannabis indica
ccaatcaaatggacatctcacttggttaagtttgtagtaacttgggcttttacacaaactttttattataccactttgcttaaatctgaaaaataatacacaaattaaaataaattaaatatttccaattaaaataaattcatcattaaaaataaggaatatttaatttatattaattatatgtgcacaaataaaggcttaaaatgtatcaatttgagcctttatcagttatctatgataacatccttattgccaatgagcttattcatgccattaataatagaaggattagtaagagggtctgggctactttaaaattagacatggctaaggcttttaatagagttgaatgggatttccttaaaaaatatgatgtttcattttaacttcccagttaactttgtctctctagttatgaaatgtctttctactactaccatctctttctctattaatggttaagttaagggcattgttaaacctactagaggtcttaggcaaggggatccattatctctttatttattcattctttgttctgaaggactttctgctattctcagggatcattagcataggggtctttttaggggtatttctatttccagaagagctccttttatagctctctttttttttttgcttgatgacaacttattttttgttatgctgaccaaaattcttgtgtcgctctcaatgatgctcttagcatttattccaaagcttttagtgaggtcattaattttgccaaatcctccattctattttcccctaatactcatgataatattagaaacatgttttttcagaaccttttgctttagagaacataccttttcatttagtaagtatcttggtttaccccaatgctattctagattcaaatatcactcttttgttttc

SEQ ID NO: 179731 - DNA, 526 bp, Cannabis indica
atttctgtcgcgtgcttaaatcggtactttggccataactctttcaatacaacacaaaattagatgattcaaaatgttacaagaagttgagaatgagaactacaattttcatgttgatctccaagtccagttctacttataaacttatcaaaatacgaaattatattcagttttgtcaaacgaagctctctgattttcactattttccaccaaagtatgttaaaactcattcaaatgactctaaatgcatgattagtcttcaaaatagtctaacaaattaaaatcatactaatcagtaattttaagaatattgatacataaaattggtcatatttataagacaaatatggacttatcagattatagcatatcttcaccaacccaatatatattgagctgcaaatatttaatgtaactcgcccaattaaaattttaaaaaattaacccatctaattttttttttttgtatcaggttaacccatccactaatcttcacttcttttataattcttattgtaatttttag

SEQ ID NO: 179732 - DNA, 479 bp, Cannabis indica
atgaaagctgtcgaagctaaggtcaccttggacccaattgccacagcttgaaatatacaatttgtttttttttacttgctaaataaataaaaatatatttatatatattataacaagaaaagaaaaaaaaaaaaaataagaggtggtttctatgttttagccatgttgtaacaagtttttaatcatttgttaaaaaaatattattactccttttcggtgttaatttattattttgtagaaaggtaactaaagttgcaagttaataaatatatttgaagataaaaaggtttttgtttaatgttttcgatctattcttgtttattttcagtacaattcttttcccttagttttcgttatggctaagtggggagtagatctcaaaaagtcataggctgtccccggaagttagttaataacatataaaagataaaaacattacttaaaagagggataaacatactaattttgtagctgtttgt

SEQ ID NO: 179733 - DNA, 1019 bp, Cannabis indica
aaaagaaaattgtcgttgtagtctatttttcttgtattgtgttcttgtttcttggttaaaaagagtttttgaacaacaaataaatttgttgatgagtaaatagcgagttcaaatttagctttgaaaggagttcgaaacttttaatgaataagattgttcaaccatagctcaagtgatcatgaaattaaatattaaattatgcagtgtaatatctatataaatgctttaaataaaaaaattaaaaaaaattgtttagaataatatataaacgcttaaaataaaaaaaaaaacatcacttgtgattaaaattctcatttctatgaacaatttttccgcatcatgaataatttgaattaactcatatttgtattacttagtttgtgttctaagtaagtcttaggttttataatactagaagtgaattttctagagattgattttcgaattgcatgtaacattttgtaaaatcattatcttgaaatgtttgaatattcgagtagcaaagttataaaatcaaacaagctcaagaaatatactaagacaagaattgaactttaaataattagccaaaagagaatcagacacaggcaatgcaatgaaacacccaaaattgacaggaaaaccaaagatcttaattatgagttgtaacaagctcatattcaaaatatcaaaataaagagtacttaagagattattagcatatgaaaactgagtgaaaagagatcaagataacaacatgagaaaagaaaatacatattcaatgcctactatacattacaagtgtactacttcaacaaatgagtaaccaaaaactgcattaaaacttttcactaagaagtataaactcattattttcattaaaacaaaacacttttttataaaaaaagtaacgagatggtaatctatcagtaaccaaaatgttatttttgaaaatccagaaaaactcttgtttcttgtatgattgtgttttcagttttcagtttttaaaagtgagaataaaaaacagtttttgtcatttt

SEQ ID NO: 179734 - DNA, 662 bp, Cannabis indica
atcctgtttctttttgtagaaacaatgttgttagtttggttgagtagtattgtttagataaatgaacgtctgtgactgcagccgatctattttgatgtaatatatactggtcattaccgtagagtggatatgcaatttgtgcatgtattttttttttttatatatctccaaagagattcggaataattctaattttatattcttctcactgtatgagttgctgtttgccttaaacttttttcttttcagcttaagcaccatcgaaaattatatgaaggttatgttccaatgaagtacagaagctacctgaggaaaatgaaaaagtaaaacatctgtcttgttctgttgatttatttatttctaagtaattcaagaaaattttcttcatgtttctaaattcgatattgtcctaattatggttcactactagagctggcgtagtggggagatcaccttacattacaggcagcagctgaccgagtaagttcacacccacacctatcttctctctaacatcactcgggaaaatgtttagtttcttattgtatactttaaaaacaaaaggaaagttagtttacttctttggttcttttgaactctgacgagaatcctagcaactagatatttgtcaaggaaatcaacaattctaatatgttgtattc

SEQ ID NO: 179735 - DNA, 838 bp, Cannabis indica
gtcaatatcaaaataggcaaatgcaagacttgcttatttaattacactatataacaggattatttattttatttttttgggctttgtcttacctgttttatttttcccaatgtaattctagtttcaatttacatcatgtttcttttgttagaaacaatgttgttagtttggttgagtagtgttgtttagatgatgaacgtctgtgactgcagccgatctattttgatgtaatatatactggtcattaccgtagagtggatatgcaatttgtgcatgttttttttttttgttatatatctccaaagagattcggaaaaattctaatttatattcttctcactgtatgagttgctgtttaccttaaacctttctcttttcagcttaagcaccatcgaaaattatatgaaggttatgttccaatgaagtacagaagctacctgaggaaaatgaaaaagtaaaacatctgtcttgttctgttgatttatttattttcaagtaattcaagaaaattttcttcatgtttctaaattcgatagtcctaattatggttcactactagagctggcgagtggggagatcaccttacattacaggccgcagctgaccgagtaagttcacacccacacctatcttctctctaacatcactcgggaaaatgtttagtttcgtattgtatagtttaaaaaaccaaaaggaaagttagtttacttctttggttcttttgaactctgacgaagaatcctagcaactgatatttgtcgaggaaatcaacaattctaatatgttgtatcttttacctgtggtctgtttctataatttgatatgtgctcatatcttg

SEQ ID NO: 179736 - DNA, 907 bp, Cannabis indica
accacatttatatcaaatttcatccaaaattatgccaaaactaaattttaaataatactaacccaattaagcattgatatgaaattgagcttggcaggaagctccaaaaacaccaaaaatcaccattaaggcataaaatcatgaaactatgcaaaacccaattttcaagcttgaaactcaaaaattcaaaataaacccaaaaatttcaagataaaacccagaatttacatatcaaaaccaaactaaaaacaatctctaaacatcaagatgattctagcatagatctaacaacaaaaccatacaataaacactacaatttcccccatttagaaaaacatgcactcataatattcaaaaacaccaagaacaccattaataacctcttaaatctagaaattcaaacaaggaaaagagatttaaacaactaccttaagttcctcaagtaagagcatgcacataaatacaccaaatccaagctttttttccttctgaaattttaacttgaaatcacaaaattaaaagggagagagagagaggcggctgaggtttgttagactcagaaaaatgaaattttaaaatgaggaaacctgattttgtggaatataacccttattggccgaaagaccaaaatacccccaaggacacacatatattaccttatacacataaacaaagccaaccatgacattccactcacacacatatatcacatacttcacatgaatcatatatttcttcatttaacacataaattatatagttaaaccccgaaaatatattttaggccccgaacccggttcgatccaaaataccaagtggtgactatgtagaaagacacatgtagaaagacagaataaacatactatataataatatagttcataagcacaatataccataacatcac

SEQ ID NO: 179737 - DNA, 748 bp, Cannabis indica
agtgtacaaaagcttatgagagtgttggttgaggttagtgacgtaatttcgtgcatgttgtactggctggcatatatttttttcgtgtttttcaaaatatgaattgtatcatgtcgtgctataaaaaaatatcggtcgtatcgtgccgtgccaatatttttaaagggtaggcccggcatgacctgtaggcttcgtatttttctattgtactttactcgagttggcccatttttcttaaggtcaacccgcttccatagtgaggctcaaattcgtgctttattttttttatattttttttatataattattgaactaattattaaactatatgtattttttattattttattttttatataattttttaacaatagtttgctaacggtcatataaaaaaaattattagaattattagaatttaaatatttattttttaaatactcaaatttttaagtcacacactataaataaattaatagatagttttaattttacatttgtgtaataattttaataatagaattataatattcaatattatattaaagatttatttctattttaatttatttataattgaaaaatacatatttattattactattattatcaaattatagaattttttttaatgtgtcatgtcaatacttttctaatactttttgtattgtggttttttgtactattctattcgtacatacatgacgtgctttttagatttgttgtgttgtgtttaagtacatatttt

SEQ ID NO: 179738 - DNA, 724 bp, Cannabis indica
agtatttgtaagccagtaaatcttcttgtcaatcgataaaacatggacagcacagcacatggtacttcgttttcgatttcttctaaactaaatctctaaattcctctcaaatcccgaagtaataatgtaccactttttgtcggtaaattatagaattgaacaaacaagtatgaaaaaaaaaatagattatttcatgacaaaaattttatatttggttgaatctactgtttttgttttttctatgtttttgctatatatttttttacaaaaatacatttgtttttttttatttcaaaaataacgttgttttgacatgttgttacgagaaagtaatgtgattttgttttacattaatataaaatgatatttttctgttattttagaataattttgtttttacattgatgctacagaaaagcaacgtgaaaataatatattttttttgaaaaaatcagtaaaaacttgtaaataaacaatatttgtaaaaatgtaaataaaaacaaatcataaaatgtaaaaaaaaataccaataaaataaaaaaaaaaagaaaaaaaaaactaacttgaatgttaagtatattgtgtaaatttctcttactaatagtaatagcaaacaaaaaaacaaaaaaaagaacgaaaccaccaaaattaaagtaacttcaacttcttgtggcgcgatagtaaaagagctacgtctacttcgagtctttattatcacaaaaac

SEQ ID NO: 179739 - DNA, 636 bp, Cannabis indica
  modified_base (22)..(22): a, c, t, g, unknown or other
agttttttttttttttttttanattttaatttgacatgcttcagtatttgtaagccagtaaatcttcttgtcacaattgataaaacatggacagcacatggtacttcgttttcgatttcttctaaactaaatctctaaattcctctcaaatcccgaagtaatgatgtaccactttttgtcggtaaattatagaattgaacaaacaagtaatgtaaaaaaaaaaaatagattatttcatgacaaaaattttatatttggtagaatctactgtttttgtttttttctatgttttcacaatatattttttacaaaaatacaattgttttttttttttaatttctaaaataacgttattttgacatgtagttacgagaaagtaatgtgattttgttttacattaatataaagtgatatttttcctgttattttagaataatttgtttttacgttgatgctacagaaaaacaacgtgaaaataatatatttctttgaaaaaatcagtaaaaacttctaaataaacaatgtctgtaaaaatgtaaataaaaacaattataaaatgtaaaaaaaaaaatctataaaataaaaaaaaaaaaaaaaactacttgattttaagtatattgtgtaaatttctcttac

SEQ ID NO: 179740 - DNA, 800 bp, Cannabis indica
gctgattcgagatttggaacaagactcgctatgtcctgttaagtgaatattaagccagttagagattttcagtaacaaatgtcaccaggatcttgtaaaggaagttgtagcgaacattacctttgagggccacttaggaaatgaagatttataatcaggtaaagagcccactcctggccatgtatcctcggtcggagtacccaatattcttcaataaacaaaatagcatatgaagaattataatatataaatgcatgcattaactttggaattgtttgcagcttacttttttttccaaaaaaagaaagtcctctcctcgcgtaatcctaccagaaaactaaagcaattgacatggaggtactgggttcgaacctcgaaccttatgggactgcccctcatttccatcaatttctagccaactaacttttacaaactgattttacaactatttaaaaactatgacaaagtgagaatggaggttcaaaaactaagtttgaccacaataaggaaagtaaagtaattacagagtcatcagtgttaatgtaccctttttaagttttaaaatttcattaagtttagaggaatggggctattaatccagatgctggcctcagatgggaatgcgaaaaagaaaggacaaaacgactactttgttcagaaatagactcacctgaatatcttgaacaactcatcaatctcagagtccccagggaataatggtcgttgattcagcatctcagcaaatatacaccctactgaccaaatactcaacaggggtggagtaatgacgggatccaagc

SEQ ID NO: 179741 - DNA, 612 bp, Cannabis indica
taatgttctggcagattataatgccaaatttcaatgaagttgatatttcattttaaaaaaatatatattgttattagtccaactaaatatcgaatgttatataatttaatataataatttttagagaatattactaaatgatgggaaaactactcataggtaaaaaatagaagtagtattgatattagaacatggaattatttgtaagaaataaaaaataaaatttaaaaaagagaggtaatgaaacatatcatgtgaggaaaggagagagtatgtaaggagatgtggtataatgatttgtgtatgtgaaatgtgaggtgtgtgggtgggccacaacacaagagggagacagattgaccaaactgccccaccgtcaacgtcagacagccgtactctactccaccgcttcagcccccattctccaatcatctcacggaatccgctacaacgccacctttgccttgtaatcatcattttctattttctattttttctttttctttatcaaaatatccaatccaatattaaaaaatatacatcaaaaatatccaagaaaaatactctccaaatgttctactaggtcgaccacttagaatattctatacatattct

SEQ ID NO: 179742 - DNA, 566 bp, Cannabis indica
gaaagggtgtaaatgtgtacgaagggtatctttggacaaaaactgttattcttagtatatacttgatacataaggaattaaaatgcatctaaaataatacattatctttgagaaaaaaaaaacatattattatgggaaattactccacatacattatttttaaatttttttttctaattttaccgtttgaatttctaaagtagttgcagcgctagttgcagtagagatttttatacgatttttttgttgcaatttaagttgcaacgctagttgcaataagagtttctatgtaaaaatgaaaaaaaaaaaaattaattttaaggtgtaaaaataaaaataaaaatcctattattaattgcaatagattggaaatcttaccttttgtaatattacattcggagagtactagaagcaatatatacatattcctaaatactctttttctaaaaaaaaaaatctttattaaaaattagactacatatttttttagttataagtataatatttcttttggtatacatgaatataaatttataactatatgaaatatcaattaatataatttg

SEQ ID NO: 179743 - DNA, 750 bp, Cannabis indica
ttttgatattaaggttttattacctactctcttgggctatctcggcatgaaaaagaccgtttttttttttttaactatttgtttggtagggtgggttgaaggagggttgaattagagttgtgtgaaattagcataaaagaattgagagaaaaaaagaaatagttatgcattgcggattctttgggtccaccaaaaacaatcaatttatatatgagtgttattgaaaaaataattattaatttatttttcaataattaacatgtctagttttttaatattattttttttaactaggcccattgatagcgtaaagtacaatttatattgactttggaccggttaggtaaggtccaatttacgagataacagtcttccgtatgcttgggaccattttgatggtgacaagtgtcgcgcacgggcacgggcaagtttgtacaatacatgtaagagaatatggcgttggacaaaaagatatgttccttttggtggtgcacgctctcctaaagtctaacgtagaggacaaacctctaacttcatgggaccctacatttagaggatgccacgtaggatggttttcggatgcttatggatgtctctttagttgcctgttctagattgccccatgaaggtgtctgtatgcactttgatggactgggtgggtgttccttctcaaactaatacaatctagccttatcatgtttgtaagttggactaacgttcaaatctggagccataggccgattctgttgt

SEQ ID NO: 179744 - DNA, 442 bp, Cannabis indica
tacgttcaagggtaactatatatatatatatatctatatatatatatgcatgagtttttatgtttttgaataaatttattaagaatttaattagttaatattacataatgcacatgctagttagaataataaataattttggttttacacataaattatggagcattattgttatttgtcgggctagagcgcatattgttattaggtattttaagatttttaatagacgtattttttatattattattattcaaaaaaaaaaataattgtaagactcaatttagaattggaccaaaaaaaagtagtatttgaaatcttactttttaacattttctatttttgttgtaatattaaatgaaaaactatgataattagtagtatatttcattgccacttattatattcatgtgttcatatgttattttaaagataagatgatata

SEQ ID NO: 179745 - DNA, 707 bp, Cannabis indica
ggtaactgttttttgtagtggcatcctgatggtgaataaatgggaatggagattaaaatctttaatgaggatggggacgaaaagtactccccgctgtgtttgcatccctactatactagcacgattttaagaaattatgaataataaattgcactaaaataaattttacatatttaaaaaatattatttgaatttcatttttatttttttaaataaaagattcattttcaaacttttgctttaaataccccataaaagttagataggatcctattagatacacttagttattttaaggtgtggggtggttggagggagatgtgactgaggatgaagtttgattgttttacaactttgttgcatcttccgatttgatgtgttcttaataatgttattatagaaatattatttatatttctcattttcgaatactcagccaaaattacaatgattatattaaacacactttcatataatctactattgatttgtggctccaaatcctaactaatttgaattttgaaccaaactatttaaaatcgaactaaatgaatttggtgtgaataactcggtcaatctcgatcatttaaatttttttggctcggtcatagttttagaaatttcagtaacagttcaaaccaaaacaatctatataattattttatttatatatatacttaatatatttttttaggttatgtcaataa

SEQ ID NO: 179746 - DNA, 702 bp, Cannabis indica
atttgatccaaaaagacattaatgggaattaaattaaaaaaaaaaagcaattggagatcaatgattttttttttttttttttaaattacttgtatatttacatggtagagcacttcatctagagaagccccacaggtaacaccttgtttgtcatcttcttcttcctcttcactactttcattctcatcctttggtggtggagacatctttattcccaccttgacacaggtagtagactgctcctttgattgtttgatgacacttcctgttaatacttcaaatatggtggtcgggagatcatttatcatttgaaaaagtcttttcctgcaaattccaatcaaacaagtgagaaccttgtaacttaagatttaatatgctaataatggtatatttgcatattaatcttaggtggcaaggagaaggcaatattttctaaactggtgtagaatttcaaatgtaaaaagctcataatagttgatagtatctaatacagatttgtcttccaagtattaaaaagtttgtcagccaattacacaagaaggagtagggatgcacattttccccatggagatggggccccgcgtcctaatgggcggggattcctcggtctaaatgggaacgggcgggacggggagtcaaatttggtccccgtaatgttaaacggggcggggacggggacgtgacgactcccggtcccccgac

SEQ ID NO: 179747 - DNA, 621 bp, Cannabis indica
aaaatttcataaccacttacaaatatatattttatttcattcattttccgtaattttagtatttttgttctaaaatattttaaagataagcatttctaaaattattttaaaaatattatagaatgtacattcttaaaaaatgtctattgatgcatttcttatctgttttgacattgagaataattttttagtctaattttttttcataatcgtgtaagttatagttatttaaaatatcctgtaaaattttaagaaatttgaaataatttacaatatagagagcagtgtccaaataatctatttcataagagtataaaataaaagagtcacgcttgcaatatgtaattcataaatatcatcctcatgtgggatctccccggcatgctcctgcccggaagtcccatattatgtcgagtgtcaagtgaattaagctacgtgtaggtgccacatcaggtggttaaaatttgggataacatttgcccccaagtccttgtgtaaacacttgtccggatggggacttagtcttcgctcaaaaggcaccacatgtttaactgccatgtggctgttttggcaaagtatatatgcaagggtgaacggtcaacttttcgtcccttaagctat

SEQ ID NO: 179748 - DNA, 543 bp, Cannabis indica
gattcattatttatttgtttaatttttcccttttcttgaatttacaaaatttgttagaagttcgagtaattattaagtttgacgtatttgtttatttaaataattacacaataatttttgacagaaaagaaaaagtagttgcatagtattagtaactacatgtaattagtgataatttaaggttcttgatttctttcttaaatttttgtaagttgtgagaattgagagtgtaattataaattaaaactataaaatacaattaattttacacaatgttatttagtgcattgtgtaattataatgttaattttttaggcacaattgagagtgtaatcatttttaaataattttacacaatgttaataattaattttaaataattatgctattttatatccaaacatagtttgaaatagtttattattttagtatttatatactttcaattctgtcttatatactattaatcttagataatttttggtcataacttctatatattttgccaaacatgatatgtaataagaatttacatttattact

SEQ ID NO: 179749 - DNA, 507 bp, Cannabis indica
agccagaaccggagccagaaccagagccagagccagaaccagaaccaaaaccaaagcctttaccgaacccgtttggggacctaccagagccagagccataaccccatccagctccgggactggacccccaaccccaactgtagtcccagttaggaccatgagccgaaccagtcgccccagttggattcccgttgccacccccagatgggtctgaagacattttcctgttagtgccacctggtcctgaatgatatgctaaagcagttccagtagtaagcaagagaagaaaaagagtgaagaaatagagtgtattgggatacattgtctttttttttaaaaaaaaaatatatatatttggcttttgttattggttggttagagtgaagattattgtgtaatgatgtgtgtgatatgcaatggggttttatagtgggatggtaaatgggatttcatgtggatatgatcagtcagtcacccgtgaatgtgtgtgtgtgaatgtgaatgtga

SEQ ID NO: 179750 - DNA, 761 bp, Cannabis indica
gcattattatgaacattaatggagcggattttagagtcagaccgaccactatcctcggcaaagcttactgttctttattgttgtggatgatgaggagggtgtgggggttgctcggagtatggtgtcaaagtagtgtctgatttggacacataactattttcttgggcaggttggcgccttgggggcgtcctttgcttttgcccacaataagttggcctttgatgggcgcgatcttcatgaggagcggtgcgtcgcctatgcccctaggtggttgagcatgtggagcattaacacggaagtggctctccttggttcctgcatagtggtaccaactaacggatcgaagtaccttataggtgatggtggtgctcaaatcagataaggttggtctctctttcttctccactcatgttattattctcatggttaggaggaacagtttgggtcccgatgagtttcatgaccacctccatgtaatgatacatgggtttcttgtgcatgtctttcatgggctccaacacttggtaagggtttttggtctcccctccttgttggattattcgtgggggcatcttctctcctttgggcacccccttcttctcctaggtggagaaggatttcttggtacagggtgttggtccccatgcctttgggtttgctcttggagctctttattgcggcgcaggctttctgccaactaggcgcaaagagtttcattttcttggaacacttcatgcacaagtgtggacttgactagtggg

SEQ ID NO: 179751 - DNA, 799 bp, Cannabis indica
atgtaatatcagcagatgcaataaacataccaatcgaattcactcctggacttgtttaaatgtgtctcttctaagttaccaaaatagttccctaatggtttaactaggtgaaatgaagaaagtagtaagttataacccttaattcttaaagcctctgattctaacaaaactctctccatgaagattctcagttctgttcttgccaaacctttttcattatctttcatagaactcaagataacatatatggagcattttccaacaaactagatttaattgacttgttcaatatctttcacaataatcaatattgaattttaaaaattattgtcaatctttagacattccaaagaattggcctacatagatatcacaatttaacagtgatttatagttctcatcatgtttccctagtagtaaaactttattaatatttatacaacaaaaatcatgcacatatcatatactgacttcattcaaataagtaaaataaaattacggatataggaagggacatactggaatagaatctaaatgagaaagcctcttcccgagcctccgattatttttgagttgttcctcctccgctaagatacttgcaatggtttgatcatcctctgtatcgtgggagctgctatttaaactcgaggtggagctagcacttacattgctatagctttcactcatgctaactgatcaaaattatttgggtaaactacaaatataatctataaattccctttaaatccctgcaaaacaagttaaattgctatcacaaaacaaaataagactagcataa

SEQ ID NO: 179752 - DNA, 726 bp, Cannabis indica
gatgttaggacaatttaactaataaaaagccatatctaacagaaaaaagcaatctaagaaagaattgaaaaataatgattgaaacagaacacaaaccatgaccatgggaaagcatctaaaagggaatgaattaagctaggaaagagagacaggtttaatatactcagggatatgcaagcagggaataagctcaaaatttaaaagacatacgcagagagcagggcaacaacaacagcagaaatgcaagggatttcttcagtaagttggaagatgacccgaataacagtaaaaacttgaagatccttcaactgcagcaaatgttattgcaaaatattccaatcacaattcgctatgtataaagattaattgacagttgaaacaaaattgatgcaatgacctgaattggaattgaagcaaccatcgcagcttcaacacctaatatgatgctcggatcaccaccccacttgaaatcaatgtccattatgatctggccttttttatgactctggacacgaatacctgcaatgattgtttgtccaagaacaaatgcttttttaaaacaaaagggagggaggggagcgcatagagtaacatgaaaaagtgaatacagcagataatctgagtagcagataatctcaaaattaggaggaaacagcaacagtaaattcatataaaagacatagtggtctcaaaggacacatcaattgtcattaattattcaatatt

SEQ ID NO: 179753 - DNA, 524 bp, Cannabis indica
tttttttttttttgtgtaggcatttaaggacttgtttcatttcttcatttgacatttagtagaagaatcctaaagtacattgttttttgttggtatctaagcacactgatttcactttttccgttcgacattcaatagaagaatccaaactgcctttttttttttttggtagacatcaaagcagtataagatttattttctttcgttctatgttcagttgtcaaaattagcaacacttagatgttatgtttcttgatgctacaacttttgttgataagtaaaattgagcatgaaaaaatgattttttggttctgaggctattctgtgagagttctgatttatttatttaaaacaggcgagtacttgtttatttactttcttcttagaaagagaaatataacgccaatatcagcccagatatttaaaaggcatgtgtcgatgtctgtgttgctgtatcttactagactgtgactatgtgcttgcagtatattgtactgataaaagtatttactgatgtctgatga

SEQ ID NO: 179754 - DNA, 738 bp, Cannabis indica
gatcatcgcatctcacatagatttaagttttgttggaggatttacgttgtaggtttttcggtttaaagcttaggagctatttgtgccgttaatgttcttaagttggatatctccctttcgattgcagaacactaatatctcgtttgcattcaggtcataactaagaggctttcagaagaagaaattggcggtttaaaagagttgtttagagttggttatgagctcatgaaatctgaaatcaaagatctcatggatgcagtaagaggatattactaatttcaccattagattctaaaatgggcataacattttgcttgtgagttatttgcaggcagatattgacaatagtggaacgattaattacggtgaatttcttgctgcacttgtgcacttgaataagctggaaagagaggaaaacttattgtcagcattttcatttttcgataaagatggtagcggtttcataacaatcgatgagcttcaacaagcctgcaaagagtttggtttgaacgacttccacctcgatgagatgatacaagaaatcaatcaagataatgtaggcttttgttttgttttttcgatggagagaaaaatgtgttaagcatttaaaagttatgatccgaaattacagaatggacaaattgattatatggaatttcttgcgatgatgagaaaggtcaacaggggaataatgaggcaaacaatgcgagatcaaatcaacgtgggaaatgctcttgg

SEQ ID NO: 179755 - DNA, 810 bp, Cannabis indica
aattaataaataacatatatataataagaaacagtgaaatcaacaattattaatagaactcctaaataagttaatagttcatgcttaagacatcctttttaaacatttggtctgttagaatcatttgctggtgtgtcttttttctttctttctttctttttttgttttttgaaatgctggtgtgtccttctgatgtggaataaagaaataaaacactgacaaaatctagaaagacggaaaaaatgaatcggaatctaattgaattataatcaaatactaaacgcaatgagtttatttcatgtttgaaatcattgcatacccttaaatatcatattaaataatataaggaacataaataataaaaactcaataatttttatcatttatttattaagagctataacatcagaattaaaataaaaaattgtaatatagttcctctaaatacaaagatcttcaaaagttattcttgttatggaaagttacataatatttgaaagggagtttctagaagtctaaccttaccatctgaaagtaatcttgcggaatgataggcgtcatctcgaagggctttctgggtgcatatcatgtctatgtggaaggagttttcaggaaagctagccccccttcggaaaggagttatggatggctagatgtttcctcctagaagggtgtctcagatagttgactccaactatgctcttcctatttagaaatcccttcagcgtacactttggcttgtcttccaggaagcgtacatcttatttggaagcacttcttcttgtgatgacgtgcatatattattacgag

SEQ ID NO: 179756 - DNA, 538 bp, Cannabis indica
aattttatttttcttgatgtagatcggctcgttcaccttttgaagcttgtcagtagattttcacgatcatcctgaaattggtacactacatgacaattttgtgtgagcatccttcaatttctttgacaagaaatgttgctttatgtgctccgttattcaatcatttaatgattttagctgaatagtacttttaaacttctgtatccaggcacgcaattgatacttttcgagattacaagtatctgggaacacggatacgggttgatggaacagtttggagagtgagttacttatataattttggttctgaagttttattcgtatatttgtaattattttcattcacttttcatcattacaaggtacaaatggattgacatatggagaagtaggcactgctcggaactgcaattggttctggcctagtatatcatgggatttcaaaggtaaattttttaagtatatattattagaaaatttagcacacagtaacgaaacttcaccattgtaagtacctaataatctgggttctcttttc

SEQ ID NO: 179757 - DNA, 566 bp, Cannabis indica
tacagtaaggtggatcgagtcttcaagaaattttggtttgttattgttttacttaaataacgatgattgtttgttgtttttgtagtgttactgattgtataaattaatttttcacgtgttccttacctatatatacgaatgaaatatatatattgtttgtgtgcgttttatatagcttcttatatattattttttttgaaatgatatagcttcttatatattggttgtgccctgttttaaaatttagcgtgcattgctattaggtaccagaggtgtctagcatcttctcgacatatcgcgttccgatttgctagcgatacttcttaaaaactattatattaaattatatggactcaatacttgattggaccaatagcaatattgacatataaaaaggtgctagacattacattttagcatttctctataaacttatacgagaatgctaaaggctatagtattttgtaataattgtcatacaagtacgaggtgtcgtacttacctaatttaagaaaaaaattaaactagtactcgtttagtaaagatagttaaatttttttttctta

SEQ ID NO: 179758 - DNA, 721 bp, Cannabis indica
gtatttatctttatcctcggtgaatatgttagagttaattatttattaaagttggaaaaataattcatttactatttgaaccccaacattgaggtttaatttcattactcaataacattcaaattttcaaaacttgtttggcgttgtttttggttttttgtttttaaaattgtgttttaaaaaaatgagaacgcaaaacagtttttatagtttaaaaaaaaaactgttttgtttatgttttttaacagtagattttagatcattttcttaagagaaaaaaatcaataaaaattactcaatatacttatagaaagataaaatcttttaaaacttataaattataatgaggaaaaagtaatattgtggcaataatgagaaaaattaatttgaaagaaaaagtgatgaaaactccaaaaaaaaaaaaaactttttgttgttttcaaaatttcttagttcttgtagctttatttttatgtattgttttcatgaaacaatgacaaacattcccacttgtgttcaataaacggtttttggttcttaaaaaaagaaaataatttttttagttatgatgtcaaacattctcttaagttcttcagttttctctttactctcccgttcttcttgtttctctcagtagtaaactacatcaaacagtataaaaaaattgaattgaaatggtttatgcagtttataatccagtaaaaataatgctgacataaac

SEQ ID NO: 179759 - DNA, 876 bp, Cannabis indica
tatatatatatgtttatagaaaagcatgaaaaggtttatatacactaccaagattatcagtacacgtgattttttttcgttaaaaaaacagaaagaaaaagcgattgctttataactggcccgcacccacttatgtgtcaggcttgttttttttgttttttttgaaaataataataatgaaaaaaagaatatacgctagattgaattttcaatcagatggaattttgtctgtaattgggtcgtttacatagataagaggtaatgatattgtaagagagagagaaatagagatgagagagagaaaaataagaataaggattcatcttttataaatattaatattattgtttttaagttttcaaaataaaaaaagtatattattcttttaaaaatataaaaagtcttcttgaggatttgtgtttgggactgggtgaactttctttggaatctaaaaaacaagggtttccgagtggaggaagtttttctttatgcttcgaatgtagttgacaccatttggagggcgcgaatgaagctgtacacaatactaatcatcctgatgttttaaaatgtattgaccttatttgcacttcttttgtagaattacatgcttctctggtggcaagcccgacgccgattttgacggaaaactggaatccaccccctgaagattggattaaactgaattgtgatattagagtgggttttacaagcatgtgcacaactgttgttgctaggaatcatctgggtagggtgattcagattcacacggctcggttggatttctcagatgctttatgtagcagtggcatgctgtttagctatctccgtggcgattgagttggtttcaagtttattatattgagagtgactcgagct

SEQ ID NO: 179760 - DNA, 699 bp, Cannabis indica
tcaagctcctcatgtccaccctaaataaacaaaggacagcatcaataatactaatcttaaagttgcacaatgacaacagatagaacccgtaccgacatcacaaaattgaccacatagctgataggggatctcaaatcaaccaagtgtaagtatgagattagttggtgctctataaccacttggaacaccctacttaagtgattgtaacagctagtataagaggcaacaccctctggtggaccaacaacacaaaaagggtaacctaggtatagtcacctacatgttcacaaagtggaccaccaatgttatcaactctattaaaaggaatattgttaagattccacatacacatatcagggcttagtttgttgttaataaacaaaaccctcatcccataaacataggctagtattttggtagggatttcaacataagtagttgtcacacacatcaagctatttacaacttgaataaaattccaaaatgttttgattgtgatcgcattcacacatgtatgcaactatatgattttatttataagggaagaaccttatatgtcaaaaacaatcatatcttgacatgataagttaacaatcatatctaagactgagcaaagagtgaagtggtacttaaatttcaattcaaagcccatagcacaaatgtgttggtacaaatccaattaagtattaaacactttcc

SEQ ID NO: 179761 - DNA, 779 bp, Cannabis indica
atattagtattatttaatacaatactatagttagtattgacttgtattaatgtgttgtattgtattgtatagtattatttgggttcggatctagatcttgtttcgggatccgagtcgggatccgggtctgagttcgggaccgggttggattccgagtccagatccgagttcgggtcccaagtctgggtttgggtttgagtccgggtccaagtctgggtctggatccgagtacgggtccaagtccggggaccgggtccgggtccgggttcggggttcgggctcgggtctgggtccgggtccaggtccgggtctaggtctgggtctgggttcgtggtccaggtctggagtccgagttggggtcggagtccagatttgggtccatgtgtgggtcccaggtccagattggagattggtgttgaccctgaatcctttgtaaatatcataatacaagctaatacggatcatttgttatgtattaattaataaaacatgcattgtattaaaaaaatttggtcgcaataattaataaaatacattgttttatccaaacatagtgttatttattatttaaataaaatacgacgtaccaaatgaaccttttagaacatatccaatcaaaagagaggtaaaatttaaattatatttagaacaaatagaaaatggctttataatatttttacattaaattagtaaatattataccgattataaaatataaattttaaatacaaaatttaaatatatcatttcatatttatttaataatttattaaaaaaaa

SEQ ID NO: 179762 - DNA, 878 bp, Cannabis indica
taggatactattttaagttgcctagtactactatgaggaggctcattaacgattttttataatatttattagtaaaataattgaaatttgatattaaattacagtaataataatataatattatagtgtgtaagtttttaccgaatcaatccattatataatattatatattatatatgtaataatgatcacttgaaagttacacagtcaaatgattaagaaagaaaagaataggaaaaaaaaagagaaatttacattatatatttactttattttatataatttaatttttacttttatttttatattttttaaaatatacttatttttatagatgatctctctattatatcctttaagttaatgtaaattatgtattagacttaagtggaaggtaaagatatattggacaatttcctcacaaaggtgtgtatattgaaatataatttgagggtgttttcgataaatggttataaaaacaagtattcttaaacttattccaataaaaattggaggaaattacattgtatacccactttactttacttgttttaatttttactttcattttcatatttttttagtatatacccacttttatagattatgtctctattagaccccttagattatgtaaattatatgctaaacttaagtagagagtgagggtatattaggtattccacttaaaaaaagtggatatattttaataaaaaaaataatataagggtattttgtattaatgaatacagaaaaaggtaatttttctaacttatctctaaaaattagggtggaggagaaatgaaaaattacaggctgaagggattccctcaacaagctctatctccgttttgggtgcttatacttggcttaggccc

SEQ ID NO: 179763 - DNA, 913 bp, Cannabis indica
atttgaatcaaaatgtggtcgaaagaaacaaaacttgccataaaaatgtaaattcattctaaaattaaatttaatattaaatgggtatgactccaatacttaaagtgtaaagttcttcactattctttgttatatgaaggaatgaaaatgtaaattattaactttaactttattctttttttttttgtaagtttttttttttttactatttttacggaagtctatacagaaattcatatagcaattaacgaaaatctaaattccaattagaattcacacaacccacataaaaattaacccaaactctaaatttttttaaaaaaattaaaaaatagtataaaaggtaattctttttttttttttttttccagtatgggggaaaaaataatccctacagcttctaaatttgaaacaatagaataagaatacggacaaggaaataaacatcaaccatagaattgaatgaagaaaaagtgttttagtattgatttttatcaatcttagcgacacttttaacgtttggtccccaaggaaaaatatttacatagtatttggcaatgtctgccttacaaaattgtaacaataatttttgttaggctgtcaataatcagtgtgcaagcaaaaatcattaggcattcaagagcaataagattaaggcatcttcattgcagggaattgtaagaactcccattgggtgatcgaatccaaattcttcttcagcttgagttagaaagtcttggaatgatggcttattcaaatatgccaaagggatcacaaatctcttcattcttctctcatcaccaacataaactaccaaatgcccttttggaacatcttttgaacttgaaaaaggtctttcaatagcatgaactatgcttggaaatctaaatccgattcttgacttatgtcctct

SEQ ID NO: 179764 - DNA, 618 bp, Cannabis indica
acaacccaatctcatacttccttttgaagtaaaaatcgctccatgcattgacattaattcacttatcgtatttgattctgatttcatccaatgctctaactctctacctgatcccgaaggaacaaatagagaaccccctttatttgaatgagcatataaccattgattaaggaccacacgagccgaaagaataacatctaccgtagaagaagacttctcttgccaaaccaccgagtttcgggcattccacaccgcccaagccaccattgctgcctcttctctcaaaccaaatgcagaagagtgttgctgcaacaacttgccaaatcagtcacgaaaatcatgtccatttacgttaccataattcacgcttgaatgggaccaacaagatcttgcaaagtgacagctacccaacaagtggaaaattgattcagccgcctgattacacatagggcaagtcatatcaattagaacatgtttagacactaactgaaccttagttgcaagaagcacgccataaaaattgatgaactttatgagaaattttcaaatcccaagaaattttccacaaaaatacctcatcattatttgaaagaaaagcatcatctttatgaagaaatt

SEQ ID NO: 179765 - DNA, 513 bp, Cannabis indica
accttcgcaaaatgttcaatctttagatactcgaaggatagggaaactgcagatccccaccaacccaagaatcgcatcgaatttgaatttgggtttatcgaagaacgacaaggatagttctgtaacaggtgcaacagctaaacctgcgtatatcaatgtttcgataccaaagccaaatgacaacgtctcatctagtgctggtgcagattctttgcttaaggtaagaagtctgatataaatcgttaggtgctcaccttattggtatcatgtgatcggttttgtggaatcaccttattggtatcaccttattgatataaatccttcatgtactcaaataaggacagtggaattttttttttttttttttttaatgaactaaatccgtaaaagttagttgcttggattaggtcaccatgatcctgttaattttctgtggcttgtgacactaattattctgttaagttcttgctaaccttgtgctacatatggattgtttgtactgctagactgatg

SEQ ID NO: 179766 - DNA, 702 bp, Cannabis indica
ataattaagttatatttttattacttttgtagttatttggccgtttagtatcaagtcaataacacatgacagttcttgatcaatccaagttataccaataaaaaaaaataacatagtaaattttaataattaatggaaatatacttacaattcagtcaaaattagacttaggtaaataaaatttaagtatttacattgaagattactcgagaaataactattaatgtaggcaacatagcaatcaatgaagaaaaagatgattgtaactaacctgtatatattgctatcccagttggagccatctttcgtcttttcaggcatatggaactacatcatcatcattagaggtgtaaatattaaaaaaatatatataacaatagaaaatgggtttgttgattctcttacctgttgcatatccaatattggtttattcctttttcttctatgcaatgaggacacatccattctttgttctctctaacttcttccatttctataaaaaaatatatggtaatcagaatttcaattgttactttgttcccaagaaaagagaagagaagaaatagtaatggatttttaccttcaccatatcgaaccttcagacaagctcgacaaagaacaccattgctcgaatgacaaaccgaacaatcagtttttcctgctcaagaaaaaaatgagtaaacatcacagagtccctattag

SEQ ID NO: 179767 - DNA, 1201 bp, Cannabis indica
  modified_base (87)..(87): a, c, t, g, unknown or other
cactgtgtaggcgacaccttggtgtacaataccagtgtcatggcacctgacctaccagttaggaaaacatcaatcctcctatgcagnggagcacagcagtgactaattaccaacagacgtacaattatttttttatacttaaaaatcctaaatacgatgactgatggtattttggtcataactctctcgatattgctcataaattggacgattcaaactgttttaaaatataaaagaaagatctagaaatttattcccaatattttcccttgaaaatgaacgaatcatagcaaaaaaattggattgaatcttcatacttgattttcaatcacaaacgagtagttgagcatccaaaacttaaagttcttcacccattatatcttagaatgtcgaattccataataaattcatcatattcatcccatttaatatgtttcttctcattttcaattcatattatgaattttaccatttaaatctggaataagaaaaatgagtataattttgttccaacaaatatgtattcacaagaagaaacacaaatattgaaatactcaaaaagtaggtctaaaactagcctaacacttcactaacttaaattatgtttgcacagcgccactatttaatttgtcaaataacctggctacggtaattgcatgttgatctgttagatctcggtcatatgtcaaataacattgggtgccctttcctactttggtgcctccaggtttggcttgatccagaattggtttcggagtctgaaacttagttgtggcatgtctctcatgtgctagagtgcaatggcttagctaattgcacatggatgctgcctagccgaaactgatgtaaatcagtacccaagatgtcaacccaagcacccattattgacttgggaacatgttaactcctgagatgtttaggtgacctcttaagttttttattctaattgcttgggttggttcaagcagtatactccctaggggtttaatatctcaaataggggtgattagaagcatatgtaaaaagattagataggaagaaatctcatgtttttaagagaacctagataaatctaggttagtagttaagccctaatggcattctgtttaaaagagttccaaaggttggtaaatgtaaaacattccaatctaggagtgtcctgggtgtggggaaatggcattcctcattatatgtatgtaac

SEQ ID NO: 179768 - DNA, 748 bp, Cannabis indica
gacctcaaatttccaactgtaccaaacagaaaaacagatacattcactttctcattctcatataaacacaaaaaatccaaaacttttaccaaaaaattttaacactacctaccaagtctacaaaggttcatatttcttcaatgtacatatcagacctagaaaaaccattatcaccaaaaactacaaagaagaaaactaaaatagattggaaccactatagtacttgattggtatattttttttcaaaaacaatcagcaaaacagatacatttcacttcctcattctcactcatataaacacaaaaatccaaactttaccaaaagtttcaacactaccaagtcatcttagtctcaaatggttcatatttcttcaatgtacatatcagatctagaaaaagcattaaactacaaagaaaaacacttaaatagattgatttgtatctcttggatgctaatttaaagttaaaaaagtttttagattcatttctaccaatcacatataaatttgttcaattacatttccaaaacatattttcagacactaaagtcaaatttttaatttagaaattacagcttttaaatcacaaaccaataaatttttcattaatcttggaaatattcaaccaaaataagctctttcctctgtacacagatatgaaattacataaaataatacaaattacaaaaaaataaccctaatttttcacttgttttgttcatctaacaatgtaattactttctgatttgt

SEQ ID NO: 179769 - DNA, 507 bp, Cannabis indica
cccaagaaggtgaacctctgccttcgtctttgtcatcgccacagccaaatgcgcatattgaaatcgaaaggtacaatttttttttttaaaaaaaattacattttaaaaaatattgcttttgttagtgattatttttagattggatgtgaatttgtgaatatttttgtgagatgtcttttggatttgtgtttgtttaagaccttagatggtggtggttatggtattttctaggattgagcataaacttcagaaaatcaaaaaaaccattcaaactgacctaccgaacactgttagaactgaaatcgacggaaccaaaaatcgaaaaaattgctaacagttaaaattaccattgaacgatcggttttttttggtaataaactgaccgaaaaaactgaaaccaagtgttatacatatatattaatttatcaagttttttttttttttttgcttttatgtattgtagttactaataatatattattattttattaatattaaagttaaaag

SEQ ID NO: 179770 - DNA, 753 bp, Cannabis indica
aatactatttgatcatatcatgtctaaatttaaatacactgtttatataatgatattttggttttgtgtaattaactatagttgcccggagttggaagaacttgtaagcatttgtcgtaagtatggtgctcttggggcaaggcttaccggagctggatggggaggttgtgcagttgttttggtgaaagagaatattgtctcacaatttattctcaacttaaaggttagtgtatttataatacttattatgttttcagatatatgagagtgtatataaatttatatatatatgtatataatgttcaaatgtatgtatgtatgtaacataattaagtgtgacttatatatagtctttattttggtgcctcagtatgttttcagaactctcctccacatccaaggttgggaaccctctaccaaccattgaccgcttcttttcaatatacgacgacgtagtgagatcaacaaaaatagcagagtcaattgccagtagccgcattaattccgaaatatcccatgaaaaaggtacccctaccgagcaattaaactctgtttctctatgggtagaagccgccttggccactgatcttgagattgtctcccttttaactactcaagaagcaatgaaacttcatctaaactgcataaaatgtggtttttacgtttcgttgaggagacccttgatgcttcttttcgggtcttcggagagggtagtactgatggaagaagattgtccctcgctgtggctccatt

SEQ ID NO: 179771 - DNA, 521 bp, Cannabis indica
ccattcttcttatcaatatttaagtcgaataaaaaataacactactaaacaaaaaacctaagttaaaaataaaaatatatatatatatatatagcttagtaagtgataaaaaatagtcattttttaaatatctttaaaaaaataaacaaagctaaaaagccaaaacatataatttaaatgtgaggaaattacacctatggaattttaaaagttgtttacttaaatatggtatttttaactaagtttgaccaatttatatgatatttttttttaggtatttttatggtatttgatatgccatatatatgtaaattaggttttcaaagtctgtatttaatgtttttattaatttttaggcaattttatttgtcactagtgctgaaaaagtcgctagagtttgctaccggcaccagaaaagtcaccgaagtaactgtcggtgtcgaaaaagttaccagagttactgctagcgccaaaaaagtcatcgaaattggtattgtcgtcggaaaaataccaagaaactg

SEQ ID NO: 179772 - DNA, 954 bp, Cannabis indica
atgggggccaatatatttttttggcctaaggcacacaaaagtttcagggccgagggctgaggtggtagggactaagtggaatgatgaagaggagattttcttattaagtaatatacccattatcacaatgacaagttatatgtatattttttttaaaattttgattggctaaaaatggtagaatgggtcaatcaatctgacttctgacataataacttattgcaaaaactatcatgtcaaatcgtgttgctacattgtgagtgagtacaagacctattttatggcaacaacattgtgagttatttgctaaaaaggaaaggaaatacattagaaagaagatgaaacttgataatatatgctttgctattccaatatcttagggagagaaaggaacaagtggaaaaacaaaattgaaaaattacatgtaataatctactgccaagatcagatttgatttgagcctataaaaatacaaaaaccaacttgagaggaaaaagtacaatcatatgtcacagcataaaatgaagcctcaaaaggccatgcctgcctgcagtcttacatgaaaagtgaaagagagaaaaatcgatgacttttcgaggcgttctattcggaagacagaatcaatatttactttcctgcaaaccactattcttcaagaacatttaaattgttctatttttttgtctatgttgtaagttttcacttgtagaaaatcatacacctaaagtaattgtgagaacagaagcctacttgatgtcatatagagatggtacaacccaattccttggccgcgacatcaagaaactgtgtagacctaccggttgcgagtcggctatgagcttcccatcttaagcatttttcaatatcagctagccagttaatgtcatctggattaaaatacttgttataagaggggtctcgagaagaaccgtttacttctactggtttagaatt

SEQ ID NO: 179773 - DNA, 669 bp, Cannabis indica
caacattcctctttttcttagtttccctttttcttagtttctcaatatctcactcttgtatttgtataaataggggttcaccccattggaataaacaactcagaaattctcattcactttctctttctctcttcatcttcttcttctttcttctcatctactttatattattttatattattttataacatatagatgtttttaagaggtatttattataatagattggggatatttaaataatagaattagttaaagaatttaatgacttgaaaaaataataggaatgattttttttgaattgtactgaaatatttttcttaattaattaatcaattaataaaatattaaacaaaagaaaattaagtaaaatatagataaacatactaactaaaaataaacaaaaaaatatgtgaaatattacacactataataataattagaaactaaaatttaaattttagatgctaatcaaatataaagtaaacttgatatagtatattaaagtggttatttaaatttataaaataaatgaatgatattatacactaaaaaatggataattacataagacattaattttgtaaaaattaccattttacgttcaatttatttatttatttttttttacttatatttactagtattctataaaaataacaagaaaac

SEQ ID NO: 179774 - DNA, 573 bp, Cannabis indica
atggatacaaaaaagatgtatttatgagcttatctcaagtttaattaaggttttctatatgatttttttttatatatattttttttatatatagtggtagaaattttgaatataatattttaaaaatataattgagtcgtttttctcaataaaaatattacatatagtatcttaaaattaaattaaatatttttttttaataaataatatatagtaaaagttaaaaaataatattttataaaatgtatttgagctcttttttgttttgttaaaggattttttaaagaggaatttacacttacgatgagattttaaaaatttttatgatcaatatggcacatttaagtttaaccaatttatatggtattttttttttattatttttaggtctttttatggtatttgatatgccatatatataattaggttttctaaatcccatatttaatgtatttatttgttttagaaagttttatttgtttattgtttttctagaaaagtcatcggagtttgctactggtgtcggaaagtcgctggagtagcagtcgctgttgaaaaattcgccggagttgc

SEQ ID NO: 179775 - DNA, 645 bp, Cannabis indica
atgatgccacctgtcattatcttctctaacggtatcggtaactatctcttcctctttctcctctatttcaagtagttgagttaactaataaatatgttgcattaacataattatttaaatctaaaatatttataatatgtaagtaaatatttcaaattgacacaaagtgtaattgtgctaaaaatgcaaaaattaacacgaaatatgagaatttattattagatcattgtctataaacacaaagtatctaaaataatatatttttaaaacatttttacaaattatgattaagttttttttttatatatattttattatatttatatggaatctcataaaaacacataacacatgtaaataacatagcataaatataaaaataacataaatacaacatactataataattgttgttaaaaaaaatgtaaaaaacaaccgtgcataatttaacaaaacaaaatttcaaatccattaaaatgttgaaaaaactttacatccatatttttataatattattttttgtctttaatggatatttacgaaaaaaaaatactcatatttttttttttttagtttcttaagttactaaattactacataaaataagtccatgctcttaattagattagatttaactagttattc

SEQ ID NO: 179776 - DNA, 531 bp, Cannabis indica
tgtgtctttcagggtgtttcttcagtttttcggtaaaatgaaagttcgtttcttggttgggtcaaaattgtggaaaaagcgtgccaagctaagaaaaataatagttgaaacttgaaagtgaattgaataaattgatcgagtagttttttcttttctttgacttaaaaaaaagggaaattttttttgtttaaaaaaataatttatttatttatttacaactattttatctaaaataatataacaagtctttaagtaataatgcttattgatggcataattaaaaatcttctttctctagaactttctagtgggttgtatcccgttacagttcttctggttcccttccagcttgtatctctccctcgtggtgttttcctgttttagattaatcttttctcttttgtaattgttttctcttccttcatttattgtgatttaacttcttctttaagtgtttttgtccattagccctctaattaattactctgcagtcctcctttcacatcccttcttctctcttctttactttcc

SEQ ID NO: 179777 - DNA, 514 bp, Cannabis indica
atctagaagatctgaaaggagctaggttatttcataatctgtcattcactccaagaataggatagtaattaatcattaacaatttgggtaaacaacaacaggattctcctccctattgtctcatcttgctcaactttaaattgtgttattaagttttctgaatttctttcatattttactgcttttaattcataattgcttttgatttaccgaatagaatcataagtataatttagtggtacttaatccaattccctgtgggatcgacctcacctgtgtgagatttactacttgattgcgtatacttgcgtagtgtttaaaaatatagcaacacattgcggcggaggaagtcgataccaaagaagaaaaacaagagggttgttgtcgttaagcggtcgcgtgtttttcaatggtttttgtctgcctgtagaaagtgccatgctttttgaaccatccaaaaaactaaagttagaaatgtcaaatatatatgaactttcttttttttttttttagt

SEQ ID NO: 179778 - DNA, 791 bp, Cannabis indica
actctttaatttatattcaattttttagatcttaccctcattatgtgtattacaaaatctaattttaataaattatgtaaggttatatttggtactttgattataaaagagggtatttatcaattaaaattattttagagtcatatttcgttaatatgtaataaaaaatggctagtttttaactgatcccttcatttattgacatttgagaaaaaaatttaatctattttttttatagttatatatgttgtagttatttaaaacgtcttgcaaaattttgataaattcaaaaaaaaattaacgtaaaaatagagttcaaatagtctgttgcatgtgtgactcttttattttatacttgtgcgaaataggctgtttcaatattattttttatattgtaaattattctaaatttccttaaataaccataatacacgattattaaaaaaaaagaattatcctatatatttttttaacattttttttttatttttactagtttggatcgttctggtaattgttctggtagtttttatgtggattgctagatagatttggattgaaattttggttgttctattaattgttatgtagattgttgtgttaattttagtaaaaatatatatataaataattttaaagtgtaaaaataaaataataaaaaaaaactcaaaaatttcttaaatgccaaaattaatagtatatcgctgcaacctttctagatatgttgtattacaaaagtactcattaatatttatattatgctttcctgatcagtctctttctctgaattt

SEQ ID NO: 179779 - DNA, 734 bp, Cannabis indica
aatcagatcccgagttctatcgtgaagcttcaagtctccaatatggaaaggtactgtttgcaatgatatcatattttcatggaggatttgttaaaatcatcggatattatgaacaagcaatgatttctattttttctttatttttcaggcaccaaagatctcggaggataagatagaaaagatggtaaaggaactcaaggaccgagacgagaagcgagggtcatttagcaggaggaggaggttccatgatgagaaggatattgactcgatcaatgaccgaaatgaacatttcaacaaaaagattgagcgtgccttcggtaaatacactctggagatcaagaacaacctcgagcggggtacagccttgcctgactagcagcgaggacgagaattggtattgcaagacgttttctagtcatcgtcgagttttaactaactcatgtatgctaaaatgtaaaatgataaaatgttggcattcggtttgatttcggaatggctgtaatattatcttctcatttcaccataattggtacttgatgatgttacccaccaattttggtctatttaccgttttacattttcctttagtaaaaggtcatggtttcatatctcaagaggacaggactgaaaaaatgcatctggaaaaaaccataatgttcctacagatccatctaggtttttattctgctaataaaaaagcatgtggacactggaggagagtggtccggttgtcc

SEQ ID NO: 179780 - DNA, 749 bp, Cannabis indica
ggggtttttccatgaatcaaggagcccaagattctcagctctgataccaagctaaaacagagtaaaaaggaggagtaattgctctgtatattaattttgtattgattctcgcagctcatttacaaataaattcaaaagggaaataaatacacacaggaatgtactagaacaagcattcctattggtcaccgcaataacagaaaaatattctcttgggaccacacaattgatttggtgaatattctatcattgtcctatgattgtgtctgattacaataattaggcctcatcaatttctgggcttttctcttcgggttgggctgttgtaaggcctttcatttcaacactcaataagagattttaagttaataattgacgggaaatttgattttctatacttaaaaaactttaatattttatttttaaaccaatacattttaaactacaaaaaatatgatacttttttcaaaaccccaaaaatacccctctcataactcaaaccctttctttctcctccctcaaactctctctgcatctatctttctctctaactctcgacatctcttcacccacccaccaacaaatcgcccccaaccctcaaccatcatcacccacccacccaccgactgccccaaccctccacgcagcccccctctctcggaccacccaaccctccatgaagacccaaccggcccaaccctccacgaagacccaaccgactgccccaaccctccacaaagacccaaccg

SEQ ID NO: 179781 - DNA, 708 bp, Cannabis indica
ataagcctaaacaaaaccgcgcaaagcgcggtattattccctagtttatatatattactgctcaatgcaatgtgaaaaaactagagatgacaataggtaaaatatgtagagtatacttattttacgatgttattaaaaaagttctatccaataaatatatatatatatatattattattttaggtagaactagagtgttctcggtgtaggcactgcagtttttaattatttttttttaaacaaatttgcacatgtggttttttcaatttttcaaaccgcactcataccgcaaaattaaaaaacttcaaaaattgcaccacgcgcaaaaaacaatgtggtgcagtacggtttatgcggtttctgcggttaggactatcaccaaataattaaactatcacaaatataacaaaatttgagcaacacttgtcaaaaataccataaggcttgaaaataaatatgaaaaaaaaaatttcaagtttcacaatacaatagttagtgagcttgggctgggccgttcacatattggatctaaataaatataataattagtatctatagatataggatatgtctataataggtacattagttttgttctctatgtagggatatttttattagccatagatatttaatctaatggtaaattagtgagtgtatataaatagttaatattcaaaatgtactagattattggtaaatttattc

SEQ ID NO: 179782 - DNA, 690 bp, Cannabis indica
atcaaacactttaaaaagctcaagagacaaatttattaattgttctattaatgtcaaaattctatttattatatttactaaaaaaattgatgtgacttggtccaaaagacttccatttcgaatgagtatttgtttctttgtaattagatcttttcattaattttaggagatctgcaaatagatttgtgatataattatttttattttattttgaaaaaatattagttatttattatgattaaatgtagttttgggaaacttcggctagacattctagtgttttttttgttcaaggctagacatttttacttgtttaatttttttttttttttttgtaaaagaaagtcacttgtttatctttattatctaactaatggatagaatttatagaaagtttagaaacatccatatactcttggagtattgactcgaatttactatggtttctattcagggtgtttaattttgtttaagttactatgtatgtttgggtaaccattgatttgtatgaagttacttttttgttcatctaagttgccttgtatgccaagttttacaatttgggtgagagaatgaaattattttagtatttgtaagtgtaatattaaaatggtaaattcaataaattgggaaacattgacattatttataataattttttccaaaaaaaaaattaatttctataatcta

SEQ ID NO: 179783 - DNA, 622 bp, Cannabis indica
aatattaaagaatcctagctagtccacatgtcaatattaatgagaagttgtaaaaaatcaataataacaatttactcactatttttgcattgttttgcttaaaaacagaaaatgagaatcctctcaatttataggcaaatacccctcggctttgattggcaaagactcatttaattaagaagcttaattaaacactatgttgtgcccaattggggtgtaagtgaaaacaaatatggtttgtccactatgatgtgataagtttagatacaagccgctaatgttcactacaaaaaatagactttttatctcatttttaagttaacaaaataaaaaatggaataaaatatatattaaaatattttatcccacttttagatttagcgcctcaaatatgtattgatccatgacattctctttaaatccaaagataatatcataaaattttaaataccatcggcgggatgcttattttaatctatagatggacttcttaagcttgcataccaaatgctccccttcactagaggagaatcttctggttgtttcatgtatacctgcagtgcacctccagatcaccattcaggaaagcagttcttacatccatctgctcatccagctctaa

SEQ ID NO: 179784 - DNA, 1205 bp, Cannabis indica
aatgatattcttataatagagaatagatagattgctattgggcatcagtggagctagcacctctagacatgtcgcgctaacgatattctctaaaaactattatattaaactatataagactcgatacttagttggaccaataacaatgttaacacataagagaatgcataagcacttatagtgccttttagcatttctcgtttttaaatattatcttaatcaaaaacattattactttttcattattttaataaattaatttatatttaacaaattcaatttaaaaaatactatcttttaacttttttgaaaaaaaatttacagtttgggttactccggtggtttctcgtgtgatttttatgtgggttgttatgtgaattttagttgcgattgatgttgctctgttagttgctataggggtttacacgtgaaatactgtaaaaatacaacaaaaaaaaaaaactattttgaagtagtaaaataaaaaacttcttaataactaataattaattaattaatttgatcaggtgcaaagaagtgctgaagatccatctctgttggtggttacatatgaaggagagcatatgcataacaatagccacaatataaagaagtcatccatggtgagatccttagctaataattcaactataacccttgatcatcatgatcatggcccagttttgcatcaatttttggtcaaccaaatggcttcttcattgacaaaggattcaaatttcacagccgctttagctgctgcgctatttcaggaaaaaaaaatcgattattaattagacaataattaatacatatatatatattaattattactactagctagggtttatatatatatagtatgttttacaattatataaatggtagagaaaaatgaaattggtgcgtgtgtaacgtaccaactcgactcgatcgatctacagaggctttttgtcatgttatttgaaagaggagattagctatgaatatataaatatatattatgtaggtccatgtaaataatatctactcaatcctttcggcaaacttttgtgtaataaatattaaaacaagaatgagtgtaattatttgtcgatgattgtttgacattaattttatttttgaaagttaaacatatatacatgaattattgtgtgtacatgtataacatctttgtctcactcacattcaccatcgcctcaacgggc

SEQ ID NO: 179785 - DNA, 530 bp, Cannabis indica
tttgtagagtattgccttgcagaattttgcacgcatgcctttattataaatatttcaaacaacatatcaactagaaacaaatgcaatacaatatatttagtaacacacccacacttagagaaataaaaagaaaatgcagaataataagaaaacaaaacattaagacaaactcacaatacaaattctaattaggtgaataataataattagccgaaacagactaattaataacatttttagtcacaaatttgattcaccacacacttaaaataactattaaacttttccacatgatcagagtgaagagatatatatactgatatgtctccattactgttatcaaataatccatgatctcccctcattagatatagctccacaatgtgccaagaaaggtaggaccccacccgaaaatcaagcatcataaatcgaaaatttagaccaactattaatatcaaggttttggagatccaaattcaaacctacgtcttgtattgggatgaactttcaaaaagtcaattacagatctc

SEQ ID NO: 179786 - DNA, 563 bp, Cannabis indica
  modified_base (528)..(528): a, c, t, g, unknown or other
ctacaagcaaaataagaaatcagtattcatgatgaacttcacagctgatcacaacaactgtgttgttccttttacaaattcttatacttattccgatagcttgcaacaatgtttagatcaacaacaagaagatgactacttgaagaaattgatgatgaggaatattactactacagaaaatattaataatgttaggacgttagacttggaattggagttgggtttgctcaaaggtcatgatctaaaggaggatgataatgataatgtactggatttggagcttcgtctatagctataaattggtatgaatattatatatgttagctaataattaatacttcaattatatatattatatcttttaattctatatgtgtatatatttaattgggtgttttttttaaaattaattaaaaaaaaaacctaaaatttcatgtaattaataactttatcaataatgtctaacagtgtcacattattaccttgatatcaggttcaagaaatatctttggtctcctcatcaattcntaaaaaaaaaaaaaaacaaaaattgaaagaactac

SEQ ID NO: 179787 - DNA, 608 bp, Cannabis indica
tgttttatcatgatgaggacgaacatcgcatgtgcagcatggcatttttgtctgccaaaaatcgttttctttcttatcatcacacaaaatcctaaattctttacaagtgcaccctaatctgcccacatcattacctggaagaaactccaaaatcttcatcttaagatctggatgaagttctatcaagcacggaagactcgaaaacccggcctcttcgcgaagctttaccttgagaggaaacgcaagctcatctcttacactggtccagaattgttcaaacccatcacggtgttgtactgataatggaaatctaagtattgattccagtttatgattgtaaaaaaataattgaaaaactattgatccttcttcttgttttgacttgacagagacagataaacattgttcaaaactttcgaaatccaactctactgtttgtggtaatttactttcattcttcttcaaaatatcagatagagtgtagcaaaacgacaccgttgaggaaaaaggtagttgatgaaacttatgattaatttgatttcctgaaatttgatcatatccaacgaaatcagattctaaaaaaacagcatgaaccgtaatggccatga

SEQ ID NO: 179788 - DNA, 665 bp, Cannabis indica
agtaaaagaggaaactgcttatttggaaagttgtgctctcccttctccctatatatagcagcccttgttctcttctcttgtatgcatcataacccacgaaatcaagagagaaaagaagagagaatttcgaaaatccttgtgagagagaagtgcccacacacatcactcagtacctcaatcatagtttggaagactgtgaaggatcacatccaactgaaggacattcgggctcagatcttgattatactctgctacagacaggaatcaagggttagagatctgagtggaaggagacacttaattccgctgccatcactgtaagttattcttaacttttatgtgttttgttcatcgttttagaagttcatatttaggttgttaaatcaacatacttgtgagtagatctaagatcctggtaaaatataattccaacaactggcaccagagccatggtaattgatttgcttgcaagaaatttggacttaaaacgatttgtttgtgctcaaaatcccgctcaaagagatgctgacgtgactttggtcaaccaagaggctgaacaagttaattcatccgtgcaggcacagttggatgaactaaaaaatatgttccaacggcttggccggtataaagaacaatgacctcgatttggaccgagcacgtggatt

SEQ ID NO: 179789 - DNA, 789 bp, Cannabis indica
atgatataaagaggctaacacatagttgtcgtttttctagataactgtcgtttctagacaattgtcgtttctatataattgtcgttttcctagagttgtcgttttataagtaataagagtggtattttgcaatttcactgcctatatctccatctcacaatctcctactcaaacacagggcagtgaaaatggcgggaactataagtgcaacgattggtgaagaagtggactctcttctctccacgttcgaccatatccaagaggtaattcccttctagttttcagattatcatcgtttattattgatattttgaaacagaaagatcagatcaattatatcaggttcctgaatgattgagatttttattatagtttcataggctttcttggtaaccaaacagaaagtttagttaactccaagtgttaatggttgcaatggtgaatttgatcgtttgtaaggactttaagagcgccctaatggagatccagcggctgaaatcgaattccaatggagaaatcaagaagcgtgaagctctggaacttgcttgcaaaagtctcaaacaaggtcagaaaattccctctctttaaatttccaacttttgttgcttcagcttatttcgtagattattctttgcctttttttccaattcactttcaactgttattattagatactccaagaatccgtttgattctgccactaaattttgcaagttggattcgaatcaatcttgtctaaagtctttccagttgtagaagctgaaatttatggggtggatgacaatgata

SEQ ID NO: 179790 - DNA, 652 bp, Cannabis indica
ctaaagactgaatgaagtgcttgagcgttcactaagtaatggtgtagtgagttccactctaggcttggcaaattgatgagaacgtcacgtgtattggagtggatggtcatgccgaagcccattttgaggagctgggaatcttgggcagcgtccacgaagaggcgatgatggaatgttggagacgatgtgcggcaatcatgaagtatggaatgatcctcctgagctggtgaaggtgttgggttctgcgtggtgcagttcttgtattgctcaaagtaggtggaggcttcacgaatgatctagtctggggagagggatagaccctcatgaagccaaatgttcctgcagttccagagcttccacagcaaacaaacaaagagatgataatgtccaataataaattcagtggcagcaagatataataaatccatacagctaagtgaagagtgtgtagaaataaaagcattaaaatcagttagtttccataccttctgggcagcaggacatctgaagagagcatgttctaggatctcaacaaaacaatatttattttattattttacatcaaacttttacaacacatcggtttctattttttttttcaatatcttcttcatatcatttaagttagatatcttttaatatataatacata

SEQ ID NO: 179791 - DNA, 505 bp, Cannabis indica
caatataaaacctagtagttttactatgaaattgcaaggattattaaaagttaaaatacagaaagtaaatcaagatgaacaccatagatttacaagcttcacctgccttagaaacacattctaagtggctagtgcttgggttccccgaaccaaggtaaataacctccaataagaatcaatgtcaagatacaaactccagtttgtaaatcaaatgtaatgtaaaataatacaacaaaaattcttacaacaatttaccctattgattaaccaaccaagattcaaatctaagtccccttagattccaagacaagctccccttgcttcgattgagctgaaatcccttcaactatgactctaaactcccttcagatgaaacaacttccatcatcacttcatcatagaagcttgaactcttcaacaatggagaaccaacaagaaacaagaagaagaagaaaagatttttccctaagcagagaaaaatctctaatcaaagaatcaaatgagt

SEQ ID NO: 179792 - DNA, 648 bp, Cannabis indica
actttcatggccgccgagaagctgaacggcgtgaacaaaacgagaatgaagagaagttgtccatctcattcttggagctctcatattcctcttactattattcccaaattgattatgattatgatgaactcgattttccatactaggattgtaaaccctagaagaaggaagagaaattggaagaagattaggatatggcgggatttcttgatgagaataatacaacttgctataaccaccaccaaaacaaacagcaccgtccgatcttaatctcaattgatcggacggtgtgttgttattattgtaaattggtattcctttaatggttttggttttcatctgatgattatcagatgaaaacctagttggtgatgatgatgatgaagattgttttctttctgatcggcttggaaagttgtcgattcttcgaatccacggctggtggtggtggcgatggcggtgatttcggttgttgttgttgagagtgagagttctgtgtctgtagttcttactacctcgtgacttcttttgtcttctaattcttcggttttggtttggggtactaactgcttgattttttcgccatatatcaaaaggagatctttgagatgattcggtgtcgttttgggtgtttggaagatggatttg

SEQ ID NO: 179793 - DNA, 648 bp, Cannabis indica
ttggatatgattaatatagcaatagtaattttaagtgcggcatattactattcatgcaaattaattattacttgtgtgtcaaataatacaatgcatgcagcatgcttgaaattgaaatagtaatttaagtactattcaagaaacaaattctttatatcaatacaaaaaaggagagttaataatttcatatgagtaatacgttaaaaatgtgtaattatctatatcgatgattataacttatttgttccaaaaaataaaaatctatcatattacacatttcatatatagacaacgtataatattgtggcaatcatcatcttcaattattacctctatataggtggtgcgttggtcatgactcattaatatatatttgtaatctacctatgacgcactcacagtagatattaattaatatcaacacaagaaagttaattaatttgaaatttatttatataaacaattaaatataacaattttgtgtggattgatcatatataactttataattgggaaaaaagaacaataataatgaaattgtaatataatagataatattatttagttgagacaactccttggaatgactactccggaagaagagccacgagcataagcacaaagagaagctggtgatttcttgagtat

SEQ ID NO: 179794 - DNA, 812 bp, Cannabis indica
agttaattgattacacagtaattaaggaaactgttttatttggaaagttgtgctctcccttctccctatataaagcaacctttgttctcttctcttgtaagctataagccacgaaattaagagagaaaaagagagaaaatttcgaaatccttgtgagatgagtagtgcccacacacatcaagtggtatctcaatcatagtatgtaagactatggaatttctgcatcaaagaaggagaaaagaagatccaggttcagatcttggtgatgctctgctacagaaaggaatcaagggctagagatctgaacggaaggagtcatattattccgctgcacccactgtaaggttttctaactttatatgtgtttattttcattgttttagaattcatattaggttgttaatccaacatacttgttagtaaatctagatcctggtaaaataatttccaacattataaacgttaaacatcaagagattatgcaaagtaaagttctccaatgacctacaaccgatcaaaaaagacacttataggaataacaagtttgtcttttttcctttgatgaactaaagatggcatctatgttgacatttggaaatagtaaatgtactcaggcgcttatgcagttctcttatcaatgaaatgttaaattttttccttaacatgttgtattcatcactctcaacatgtctgttcaacttgttcactatacttgtcaattaaaattatcaaagtaaacgaagtagacaataaataaaaagtgtgtagcgatgttgaatgaccacatcaggccaatatatatatatatatat

SEQ ID NO: 179795 - DNA, 853 bp, Cannabis indica
gcaggacaaggtgatagccatcaatcaattatcaatttggttaaacactatgactcatgtaggacaatattattttataccatggaacatagggtaagaatcacacatctctttcactttccctatgatatttatttttatattaatataacattgttacttttttcagcaagcattggatgttgattatagcaatgacatcgggaagagttgtattcttaaacccgcttaaatctaaaatcccgtcagacattgctcagatgataaaggcgtaagtttagaactttaagttattcattctaatataatcatcaattaataaattctaaatgcttaaattataattttttttaatgtctttaacagtgcatatgcaaatattagttcaaatgctattgtatttggcaaaaatggaccggagatatggacctttgcttgtccaaagcaaccatacaattacgaatgtggttactatgtactaacttacattcgtgatatgcttcaacattcaaatcccattgaagccataaaagcaaaagtaagtatatactcatttttactataaatacaaacatataaaagtattatcttcttaattagttttattttttttaaattgacagtttggcggcctatcccaatattctgaggacgatcatctcttaccgcttcgacaacagtggttaagtcaattgcttcccttgatatataaaaattaactagtagtcttttattgtatttttttagacaatgtgtagtatttaatttagagatttatgcataatatgtaaagtgttatttagaattgaacttacaaattattattgttgttattaaaaatgatattaatcat

SEQ ID NO: 179796 - DNA, 854 bp, Cannabis indica
caagtcttataaagtgagcagccatttgattttgataagtatcctttttattcatgtatcttctaaccatgactcttttgagtgtgtggaaacttttctagctaagatcaacaatatatagtattctcaaatttttaataaggacttgcttaatatgaaggctcatttcaaaaaatataaaaatataatagtacgaatttttaaatatttttataaattttaattttttttaacaaatatttatattattctgttttttctttggtactatttttttttttgtttatctttattatgttatttttattttttattgttatttttatagaattatataaaactagttaacagctcgcgttttgcggtgattttttttttaaaaaaattatatatataaaatagattatatcttttatttatttaaaaataactaaataataatattgtatcaaattttaacctttattaatttttaattataatttttttttttgtaattaatatataagaagttatcatactatatttttacttccaactctttttaatttagtctaaaaggtaaaatagtaacacattatcatcgaaaaatattaaaatccctcactaaaaataaattacctataaaagtgaaataattttatataaaaaaatcttcgaaaaaaaaaataaaaacaaatatcatatgccacatgatattaaaaatcataaactatatacatataaaacaagtgtttgtataacataaattaatacttaaaaaagactagtcccacaaaaattgaacaccaacttcctctcatgatccaagtgccactgtattagaccgttgttatttgaccgaatcaaatgag

SEQ ID NO: 179797 - DNA, 601 bp, Cannabis indica
caaaatacatccactttgtactagcccaaatcatcctcccaacatgttctcgagccataacaacaatcatcatagccctcactctaactgccacatcgcagttaagtttgatctagtccataggcggaggagcccactcagtgatagcagtggatggatgtaattagtataaaagagtgaccatattttgtataacaatgagcaaagagtcaagataataatggatgttatgcagatggttgttatgtactaacattttttgctttccatacagtgtcaaatatgataaacgcatattaaaacatatcatcaacattcacatctctcacttgcaacctccaaataaatttgacccagtcccacatcttagtccccaattcctcaacatgaatggagacgctctccaaagatgaaaagccatattacaatgaataaaaagattctccattatttcttcctctctcccacaaaaagggcaagagaaatcttcaatatttattcattctctaaggttggattaaattggaagtgcattggatagaatgttccatcaaagcactttatttcgttcaaacattttgttatttcaaagtttgttcta

SEQ ID NO: 179798 - DNA, 833 bp, Cannabis indica
actttctgtttttattgtgtcgtttaatactagttttttgtgtatcaagatacccaaataatatggaaatgaatatattattgattttcaataataaattttctacaaaaattctacatgttcgtttaatgttggactatctttcactgtcatatttaccaaatccttctgagcaatattgggatttgctcaaggttctttttttcttcctacgtggtctggacaattttgctgtgaaattaattcaactcttgtacagattaggaattcaaatcgggctaatgatattgatagttgtaaaagagtcgcagtgcaaattaatttgcctgaatattgcaagagatgatgaaggtgactagagagagttgtcaatggtgcagtttctgctgatatcgatattcttttaacttctggtggtgtttccatgggagacaaggattttgtcaagccacttctgaaaagagaggtacaatgtattttagtagggagattaggcttctttttttttcttttttttttaaaaaaaaaaaatttaggcggtggaagctattttttagttttagtttgactttgtttcatgagtacacttacaaatatgtatatcatcattcttagattcgatgaactcaactaagattttcaatatgaaatgggtattgataatatttgatttgtcaagtttggtttgtgtctttcaaagcccaaaatctcttttgatctattattcatgtaatctctcataccaattgctctatttgttcactcaataaatggtggtggtatgatccacattttgagaatcagagacagttaattgagttagtacgactatg

SEQ ID NO: 179799 - DNA, 797 bp, Cannabis indica
ctggaggtatatcgatcctttcattgcatatatttttgatataattacagtttgttttccgcatttcatatcgtttagtatatgctatattacatacactacattatagtctaacatactcatcattaatttttttaaggaacaattgctaattgtttgcctttaattatgttgataataatatttatatatctatttatttgtttgttttattgtttttttttgatcactaaggcttaagaaaaacttgcactaaatgattttcatgattttttctaaattttatgattctatttattgtgattcaaaatttcaccaatgccacatatattattctaaagaattaaagttcgccattattctatttttttttttaaaaaaatatacatatttatatttgaagtaattctttaacattctcacattatttaacattatttagaatatatgatttacatcttctaatataatagtgctacttaaattaatatcttgattatgtgtcaaaatgaaatggtaatatatagttagactatataattgaagtaaatttattaattaatttttcttattgttattctacaaatatctttttttataaaatgttgtgttattcatggttaaattttacttaggttatatttttttttttcaaatttatctcatttttgtattttttttctcttaacaaaaaatatctaacaataaatatctataataaaataatattaataataaaaataaaaaataaataaaacattaatttattaaattgtaaatctatacatctatcaatc

SEQ ID NO: 179800 - DNA, 739 bp, Cannabis indica
ctagatgtgtcactttgtgagttactagcggtactctcttaaaaaacattacatttaaaacatataagacccgatacttaatcgcaccaataacaatagtaacaacgtaaaaaaataatactagacactactagtatcttttagcatttttacaaaacaaaaaaaaatactggctactacaaaatacaaacacacatgtattaatgaactgtagaaaaattaaatgtgaatgtaataataaaaacatcgacatattaaattatgagtcatatgaatatgatagaaagttaaagattaaatcttcgatctagctaattatatacgttgaaactcgtgatataaaaatatataaatatataatatatattgttcacaaaataaatatacatttgtcacgcattaactgtaatatattacctgtttatataagtacattaattatacctaatacagatcgatataaattgaaacactgtaattactaaaaataataataataataataataataataataataataataataataataataataataataataataataataatataattttaggttagttttagtatgcacccctatttgttttagtatttgaaagaattttttagtttaataattttataatcgtttaatttgtaattatgtaaaatattttgcaaaattttcagatttgaaaaaatttaatatgccaaaaaaaagagagaaatttacaaaaatattgga

SEQ ID NO: 179801 - DNA, 774 bp, Cannabis indica
ttagttgttgcagtcaccgactttagaatccatatcacatatctataaataccaccatactcatcatttctgaagtgtgattaagaagtgactttgaggttgaagaattgaagaacacaaagagatagaacctcattcatctaataccaaattctaacaataaatattagtatttagataaaaaaaaaattatatataataataatagcaacatatgaaactaaaataattatagtttggaatagaattcaaaaccattaaccacactacaattttgatgaacaatcctaattattattttttttaaaaaaaaaaaccaataatacgcatgattggagtaagactaaaaaaaaataaactattttgtatcttattacatcttaatactaataccacctaaaccacaatcaagatcacatcttaatctggaagaaaataataaaaaaaaaaaaaaaaaaaaaaaaacctcttaaccgataattactcaaccaataattgtccatgtaataaattaacatttgtttacatgcttatattaataaaatatacagacaaataagcatacatagaaaggtaataattttccactatcaagcaaaactccaaaaaaaacccacaaaatcaaaacttccaactcctactcctataaaaacatatctatatttatttatatacaaatatattagctcctggagtgtaaaaatttccaaggtcctgtccctgttcctatcctgcaaataaagtaatttaaaaaataataataagtggcttcat

SEQ ID NO: 179802 - DNA, 600 bp, Cannabis indica
cttttgtttttattatttttatagaaaaaaaaaaatatataccatccttagtatgttatattttcatttatttagatgagtcaatgatatatagagtatggtaaatagtttagtgatataccttatatatttattttttttttaatttttttttaatttacggtttgtagtttttaaagtggttgcagcgctagttgcaataggagttttcatactattttttattgcaatttaaattgcagcgctagttgcaataggaattaattctatgtagaattctgtaaaaaataaataaaaaaaaaaaaaaaattaatttaaaagtagtaaaaaataaaaaaaaataaaaaacttactaaattaaattattaaatatttaaatattttaataacgatataacacataaataatattagacctttagtgatcatatagtaatttgattaacgaaccctattttaattgaaacttacaatattaatatatttgagagtaattcatattaattaaaatttgctataatatatacataggcacttatactaggagggggtgacacgacagcagggactataacatgggcaatctcattactcctcaac

SEQ ID NO: 179803 - DNA, 706 bp, Cannabis indica
agaaccctacgacgatcgccttcacaaccaaaggtggctaggaacagcctagagtgatacttagagaaggtaatagggaaacgaagggtttaagctctctcatggctttctcaatccaaggtgccctcagagttttaaaggtgagaatcttaacaacaaggtaaaaagactcaaattggtacctagaaccaatggaaatatgattgaagtcatggatgagattttcttcctcagtaagagtacgaaggtttggcatttcttgatttgggttagaccttttttctgaaaatgaaaaaattagggaaataaagcacacacaagtataacactgacctcgaccacaatcatctttaaatagcaaaaataagagaagagtaaaagatacctaaatctcaaaaaccctcacaaaaagtgggaagatgccatatatgtcaaccatttaatccctcttcgtaggtcacaacaccccaagttagatataatcattagagaaaagcctattttactaaaaatggcggttgaagaacatagaaaggagcagtggagtaaacctccactgggagttttttgaagatacattaagggggcgtttggtacaaggtgttcaaaataatttgattatagggcatattatgaaggataatatgattataggaaaatgtgtaaaccgtatatggttatgcagggtaatatgtaatcatattcc

SEQ ID NO: 179804 - DNA, 527 bp, Cannabis indica
aaaataaaaaactatattgcaatgcaattaactttttctagtttagaaaaagaaaaaaaattctccttttttttaatttgttcatattggacaacattataatcccaatgtatttcacatatttagtagtcttaaattaattctaagttttgtgccctctaatatttaagaaattttatgcatgataattaataatatatttatctagctaatatggaattaatgaggattttgaagatatatgaagaccaatcatgtatatatttggtcaagggatcataattctaggaaggataaaatgtataaaaacaaatacattaaaaatagaataataatttctttaaatgcctagcttgttaataatttttaactctataaatacgtaagtttgagttgaaatatttaagtctgtctttaacaatattaagaaaaaataatactaaataatactaaaattcgaaactataaaacactaattactagcatggtatatatgtgtgtgtatattatatttactgtaaaatata

SEQ ID NO: 179805 - DNA, 813 bp, Cannabis indica
gtaaaggcaaagcaaagactgaacaatagtgagctcgagtaaatatatacatatcgggacggttagacctggagtgttcagatcttcgagatattgcaagtttcattttgatagtcgctcagcgacagcttttgtaactactgtatttaaaaaaatggttgtaactttacaacgggatctcgaattatgtaaaatatttatatattaaagattaaagtttaattgtggaaattttaattattcacgtttttagtaaactcgtttattattagcaaaagagtatacagtaatttaaaattacaatacctatctaatttagtaagtttttacatggttgttttgagctcgtgtgagaagagataaatgtgtgtgtgagagagagagagagagaggtaatttaggtaattaagtatagaaattagtagaattaaatggtaataaaaaattaagaggttttattttgtaataggagaaattttaagaaggtaaataaaaatgcaagcacatgcatgtaataattgtaataatataatacaaaaaagaaaatatatgtatgtatttatatgattataatttgtaagcgatccttttgacttggaatgtgtttcatagtcaagcacgactctattactgatagagctttaaagcgaatgatgccaagaagaagcagaaaatgcatatggtcatggtgcaatcaataattggcaattaaaatctctgcacattgctctccttttgatacgtgtcactgcccacttgtgtatcaactacgtacaaaagtactgttccttaatataataataataataataa

SEQ ID NO: 179806 - DNA, 583 bp, Cannabis indica
gctttaacgttttcaatttgttgacatcctcttcattcctgattccccaaacgcctctccgagatgcataatggttcccaaaacactgatgggtatactttctaccctacttcccatgagtcatgaccatgtcatgaaattagagtcacacaagttaagcaatttacctatcattacataagaaattaaagccccctcgcattatgacataataagtattaacagcaacagcatgactaaggacagaacaaagcattgcatataaagaaacttgtcaaagatttctagggaaagcattgtacctgagggttcacgaaccaagacttagtcacttgtaatcaccatgcttgccattccccccattgacatttaagtcactgcaacgttttcgcacatgtattttcctgtcacttctgcaagcgcctctattaaggacttcgggtcgaatagaacaccaacttttgggtcacgtacggaattcacatagatctgtatcagtaacaattgtttttttaaaagtccttgttcatcagaaacgtaaagtactggaagttgagtcactaataaagctacataccgaagc

SEQ ID NO: 179807 - DNA, 502 bp, Cannabis indica
ctgttttttgactgtctttttgtttttttctgtctagcttgtgtacgtgccttttgagtgtctattgtgatagtgtttttactatggcatctagtagtctcaatatggataatatagaagaacgttggaaagatatctaactttgaggaggaaaaggcagaggagactttttatgaagagaatgaagaagaagatgaagatgatttggctattgacaccagatagtgtctcgttggacgaatgcttacagggaaagtctcagactttcgaatttttcagaatctgatggctgatctttggagacctggcaagggtatgtatgccaagcaacttgatcagaatcagtttttgtttcagttttatcatgagttagatatcaagcatgttattgcgtgtagtccttggacctatgattgcaaacaattggttataactcgtctcaaagatggtgacaaccccgcactattggccttaatactcttgatttatggttacaaatcca

SEQ ID NO: 179808 - DNA, 589 bp, Cannabis indica
attggagcaaaggagggaactcaaacttggaagcaagcctttatgataagactgcatcttcaaccacaatattatattttttcattccaattcattaatttttttttttttgaattatattccaatcataaattcataatactaaaattcacaccaatgaaattataaaatactagtataataaataaaaagaaaagaaaaaaaaaaagaatgcacttgctatagcatacatgcagtgcactgtagttacaactgcatacatggtgatgaaacgattctacattgaagaagtttttttactgcaaccccaaatttaaatttaagttggagttgctctaaaaagtccattattatgtctatgcattattgtgcccttattccttattttttagtgtgtcaaaaataatgatcattattatcaaatgttatcaccataaatatcattattatattttttagtgtatataaataggatatcattccattaaaataaggaatttttatatcacatacttaaatttttaatttttttttcttttttttattgtgaggtagattttttttcaaaaatactccattttttttttca

SEQ ID NO: 179809 - DNA, 560 bp, Cannabis indica
gacttaaattgacaactaaaaaattttcctattgatagatatcatggaagtaccctaattattgagaaaacactcaatcgggatcttgggaaaaaatcttaagatggacccccaaattctgcctaaatcggatggcctgaaactccactatcccattttaaaacttccataactcctgaaattctaagccaaaccttacaaaattttgcagggtatctaaaaacatcacaatgaaaatttttcatgtggaaataccaatcaaattctcaacaaaaatcaaactaaatggccgtcctaaatctgcctaaatcgaatggcccgaaacctccctatccaagattggaagtcttataactcatccaatcctgatctaaatgttaccaaattttgtagagaacctaaaaacatcataatgaacatattttatgaagaaacctcaatcaaattcgcaacaaaaatcaaactaaatggccaatcctaaaaactcctaaaattagatggcccgaaacctcctattgtctgagtttggaaatctcctaactcatccaatcctgatctaa

SEQ ID NO: 179810 - DNA, 678 bp, Cannabis indica
catattggtgactaatgattacgacacaacaatgcatataactaagtgcgacaaaggatgatgtcgtcactcatgaataattgaaaacagtagtacatcccaatagtaaggagtcatatttgttcaatttatatctctcaacttacatctcataaaccttgagtggtggattttacctacctatattgaaataatttgagttattgatgcgaaaatatctaagtttttcatattataatacttaaatatttaattttttgtttttttatcatagtaattagaatcactaataaatttacaatgctcttcgcaatcaatacaaaatcctcttcgaatcaaaatatctcattgtctaaattatttttttgttttttttttacaagtttaaaaatcttccatctctaggtgcatttacaaattcaatgttttattaggctaactcttcaaaaccaatctaatcattgaaattatgttgtcgtattaagaacctgaaattaatatatatgtatataaccttctttatttttctaagttctaattaattttcttttctatgcttctgtagtctctttaactgtcatcggaaatacttggatgaactctaatctcactattcattttttccttctctctaaaacttgttgtccttttctagccttcggccgttatgccatccgt

SEQ ID NO: 179811 - DNA, 786 bp, Cannabis indica
atcataaaattacatcaagttagacctctcggtcattacaaaatagagtttccagtatgaaagagaccgggagagacccaaacacctgataggtaaaggcccatctagctacattatgagcggcaaagttacaaagtctactaacataagaaaaacaacaactactaaaggagggagaagaactagtacaaaatgagatatagttctcgattgcccaacgagaccccttcccattgatagtgtcgacaaccactctcgagtcattctccacaataacatacttagagccgatatccaaagctactgacacagccaagcagtaagccgcagcttctccacaaagtgcatccgagaaatcctcccgagctgtctgaactctaatcactctaccaagatgatttcttacaacaacagcagtacacatactctccaagcccacttttacatcacaagtcagttattattgttttattttattaaaaaaacgaaaaaagaacaaacttactaacaattacaaatgattattttgcattaaaaatttaatttattttttcatgtataagactcgtaaatgtggtgaggtaggtgactgacacactgatttgtttgtcaggagttattttaattgactcacgctgaattgaagattaggattttgctgacaaattcttttggttttgttttgttgatagtcaatttatttggcttcttacaaataattggtataatttttagaaatattaataggtgcttctaacatgaattcactatacatcacgcgctatc

SEQ ID NO: 179812 - DNA, 579 bp, Cannabis indica
attgcaatctgtgggaagctataactagctagctagctccctagtcttgctaccaaaggttaattacttgttctccatccaatacaaaacaataatgtgtgaaagtgatacaagaatgggtcatagactttacacatacccttaaaaaccaccaaatgattatttgtttatttatttattttattacatatatatgatttttggttttcggcggtgcactgatactacgtactccttgttttcgacattttaataattttaattttaatttttttatatgatagtgtatactgtattatttaaaacatcatataaaatttttgaaaaatttaaaataatgtacaatataaatctaaagtagagtttaaattatttatttaaaataaaaaagaatcacgttgtaaaacagactatttgaattttatttttggctcataaaattattctaaatttctttataatttatatacgtaatatctaattaactataataggattaaatagttacaaacatatgtaattttataggtacgaagggtagttgtgatttgtgcatatatatatgacgcaacaaagttt

SEQ ID NO: 179813 - DNA, 621 bp, Cannabis indica
aataatagtaagatattgaaacaaaagttttataaagtaaatattgtagtagtctttacctcattcagttgcagatttttcgtcaactctgaaatttggatgttagtcactatttcgctaatatatttaattgtgcttctaatttatgagcacgtgatcaaaaacagtgcttgtaatgtactctctgtatttgtttttttttttttttgcatctaatgcctcaggtttaattatgataagttttggtgggttttagtaaatgtttttctttttctggtttgcattaatagctagaacatggagaaattaataagattgacattcctttttgtcgcagcatgtacaaagcagcataattataataatgctttaagttgcttttatttttatttaacagaagacgaaattataaattttatggcttcttaattatactgtatgtgctaaaatataactttttcttttaatgagtgtttttataggaaaatggtaattctagaagagaagaagagaagaagaagagaagaagaagagaaaaatcgtagatgtacaacagcaaaaactcaatcgtatttttttagatttaatgggatttattttattatattttattatatatat

SEQ ID NO: 179814 - DNA, 798 bp, Cannabis indica
atatgtaagatacttttaagttttgagagtttcttggcaaaaatgggtactggaaatggattgtatatgaaaatggtgaaattcactcaaacggtgtcggaaacggagcaccagaggtggtgtttccagtcggtcgggaaaccgggttcgctgtcagatcgcacgacccggatctgacccgcgtggccagctgaaggttagggatgacctcaaaacgacgtgtcgtttttggctctccttcagacaaccgacgtgccgtttttgttaagggttgtgcatcgttttatagcaaacgacatgtcgtacagaccagaactttggaccattttttcaccattttgctctattttaattttttttcatttaattgtgtaattatatttttattttggtcaatataaataattaattgactcataatcacataattaaattaaggtaaattattttctaatatttataatctcacaattttattatttgttatttattaattgaaacataattatattcatgtcataacattattgtatagatgatcgatttttctttttttgaaaatataattatgttagtgcataattaattgagcgcttatgtactcacctatcgtgagtctaagcatgtcaatttcattaatcataaattgtgaaaattgtgacgtattgttgttaattaatttaatctcatacaaagccattttttatatgattatctttccataatttttttcaatatatatgccttttgtaatttttgagattcttttttattgaatttttattgttattattatga

SEQ ID NO: 179815 - DNA, 1164 bp, Cannabis indica
ataattgattatcaatttaagcgcgtgaggtgtgctaataccaaaatatatttatcaatctaaacttatctaactaaaaactaagttgcacgtataaccctatatactacaagaatcatactttttaatgaggataaattacctcaataaaaaatagttatttcattaataatgatttttaatggcgacatgtggttggtatttctaattttgcaaaaacaaaataaataaatttttataattgaggacacttaaatgttggtaatgtataatcttacttttagagtgaaaattttatgcggttagtgatacctattatttttgtatatatgtatacaagaaatgatgtataatctcttattgttacaacattatcatgtaaatttttaaaaattaaatttgaattattttatttgaaaagcacacatatgtttatatagcaaactagaatatttgtcagtactttaaactatttattagacacatataaaaaaaaaaaaaaacaaaaaaaaacgtaacctctaatatatattttggtacacatgaattaaaagaaaaatgattaaaatataagattaacaatagcactgtattaacatgatgagaaaataaaaataccaaaggggcgcttgaacaagaggtgacataatatactattggtgcaatttgatattccctatcacatattttaatttactatataatataaaaaaaaatattaatcacttataacgtgccacgttcataatatggtattgggcatcttaataaagtgactaacaatgatgttttgaacattactataaggcaccaactatctagatgtgacattttgtaattagttagtgatattttataataattattataagacatcatatatagtgtgtgcaattaattgacaaaatgcttggaggtgcctagagagaatgtttggtgatgtgaaaaaatacttggaaggaggtaatggatgccaaatcaaaaagtaatattgatgtcaaaattatatacacacttcttacacgatgatatgtaataaatattgtaaagtctttttttggcaagttaggtgacaaaataatttttcctttttatggtaagattgctatacattcattttcgaaatcttacctcttttattgggcatattaattttcctgtttt

SEQ ID NO: 179816 - DNA, 985 bp, Cannabis indica
aactttagggcttagttttgacctagaaaaatttacaaattatgatatagtttatttactacaaaatttatagatttttgaattatctttccaacgccactgaaatcaccccaatcggaattataaaactccagatatggtcgttttagtaaaacagtttctaaacctacgaatttctctaaacttacgaattttctcacattaattaaataataatattatttaataccacttatacaattatttaaatcaaataaatatattataaaaaaaaaaacataatggactttcatatcgggctttaattaaacgattacgtactgatgaaaataccataatattttactttcgtagttaatacaactttaactctctttagaaaattggtacaactactctaagcaatagtctctactcactaacaacacaaataaatgagataattatcctcgcaccattaatatcccaaaaaaaaaattaaaaactattttaatcttgatattacattaagagaatattctttattaattttataatattattatattattaaaaaataaagggatattggcggctaaaccacctgaattttacggtttgtaacacttaaccacaaaaatcgaatttttgacggctaaactacctaaaccctggttccgttttgctctacacacctccgtccaaaaatcacagttaagtgccatagtggactgtccacgtgtacacacttgtacacgtggaaaaaatttagtggtccacgtaatattagttttaaaaaataattataaatatttaaaaatataaaaaatcataatttttttcttttttacttttttaatttaaaaaaattataaataactaattttttattttacttttttttcttctttcttctttgtttatgaaccataaaccataaatatgtttatgaactctggaacctagcaagttgagtccctttaaaattttaaatggtaacagatgg

SEQ ID NO: 179817 - DNA, 1101 bp, Cannabis indica
gttgtcccctattccttttctccatggcttattctatgttgttggtaatttcttttgggttttgggcttcgtccagtgaaattgggaggttcgtccaattgggatctaggtaggattgttagtgtggcgtgatggtctaaggatggacttgcttacaaatcgagcaaggagtcagtttgggttttggtccatggggtggacaagatccaattaaattcaattgaaccaaattgatctaatctaattcaactacaaaaagttggatattcaattacaattagattgaattggatgttaaaaatttagattctaattggattggatcggttattagatgtcaatgtcaaaattcaattaaaaaccgatccaatctaatttttttatattttattgaatttttaatacttagttgttttgtctatttatttttgtatttttttcgttctattttattactcgaaaatattcttattttagttattttaaactttctgttgcattaaacctgtatggataatatctttatggagtattaaacttaaatgaagggtaatatatataatttttacgtttttttcttcatgttttaaaatcagtattaaaaattaggtatgtagttggatatctaattaaaaaccaaatcaatctaattaataattggattggactagattttgaggtttaattagattggattggatgatgattttctaaatctaattactaattggaataggaaaaaaaataatggattggatcggatgtccaaccctccatggtgttatgacgggaggtcggtgaaaccagtgcagatctaacgattaggttttactactgtgattggattttgctactatgattaggattttactactgcgactaggttttgacattactgcgattaggttttgaaactattgtctcctagtatgagttggaattagaagatggttaacctaaaattacctatatagttagtttttgtctcttatgactatggtttttgagttatttttttgttttggtttgtgtttttgtttttgtttttattttgttttctttgtttgttttgtccgtctttgttctttgtatggtttgtca

SEQ ID NO: 179818 - DNA, 610 bp, Cannabis indica
ataaacaaatataatgcatttgagccctccacgtgtctatatttatgataagttaacggaagtggtggtaacggtgtaagagaattgtaacattaggtatttttacctccaaaaataaacattaggtatttaagtgtataatatctgaaacataggtatttatgccgcaatttaccctaaaatttatgttaactaaacaacaaaagctaactaaaaaataaacacaattatcataaaattacactttcaatcaaactaaaaaaaaataaaaaagtactcgggaaaaaaaaaaaacaactacattgaaatatcattgaaatatgtgtatctattgaaaaaaaaacaactttcttcatcaactagaaataacaactataaacaaattacgggtcgtaaaacaaaatacttctttgtgtcctttggaggagcctcatcatcactatcaacataattcatttcttccatgggagcatacatacttgtagaacatcacaaccagcctatcacagtatttctcaacatcgaattcggagggaatatgtttcatgtcaataaagtaatttagcaaacgatactacaaaacaatctgcaatcactataaaacaacatt

SEQ ID NO: 179819 - DNA, 620 bp, Cannabis indica
agaaaaaaaaatcatttcctacctaacatgatgaaaagattcaattgcatgtgctcattgctatttttattttgataaatgcctaattgtgctgtccatttctctttccatccaattaaactacccccaccaattaataaattgacaccatctttttttagtgtaagtataatgttattacaatcaattaataggattcttgagttcaaacttatgtccttttttttttccattcttccctcactattaagctagccttagtggcgttgacaccatctaaatataccgttaatccttctcgttattttattcaacacatttactcatttttattattttttttaataatgaacataccattaaaataaataaatagagtatgcaaaaaagataaaccaaactatccaaataataaattttaatctaccagaattaagtacaacttatccatgagatgatatgggatagaaatatttcattaaagctggatagcaaacttaaatatcaaaataatagtatataagaatatttatttatggaaataattttattagaaatgatttcattaagaataaataataattgatttctaataaatgaatatttatattcattgaatc

SEQ ID NO: 179820 - DNA, 596 bp, Cannabis indica
attcgtggccaaggcgtaccacaacgtctcttggaggtttaggccacgtcccgtgcaagcagcataccgacaagctaatggaaacgtacccgttaacctctagcagcttcttagacgcactaccaggtcggcccaataatgtccatgaatactccaactcatggagacatatgagtcccctcgtggtcctcatatgcccaccctactagtcccactgactagtcgtagctcacttaacaccaaagtgccaggggtggtggagagttgacaccagagtctccccttaaagagcattctaagcttttagccttctaccaagaacatacatgattttgactctgtagacatatggccaaaccataaaccaaatcacagagtttctcaaatccgattgcaccattatattcgtagacccaaataaatggcgaataccaagttccgcccaatccgaacaatattaaagatatttacgaaaatgtactgccatacaaactaagtatcagcatgcacctcaacatgcgccaccatttgaccaccacttgaccaatttataaacatcacctaacttgtaacgtgcatcttggcactcacgtcac

SEQ ID NO: 179821 - DNA, 579 bp, Cannabis indica
agagagagagccataagaagcctaccaccagggccggccctgagcataggcgggctaggcctgtgcctagggcccacctagcttggtggccaaaaaaaaatttgtccccttttaaaattacacatttttttatcaattttgaaaaataccatatttttttctaaatgggccaaaaaataattttttccctatggcccacaaaatttcaaggtcggccctgcctaccaccattgccaccttgcgacccaggaggaagagtcatccctgacccccaactaaagttcaacaaagatacccaaccaccatgatcagcaactactcgcttgaaaactcaggcaccacggaaccagccccaaggattcgacacctaataaaaccgaccatcgtcgaaacccactagaggggacctccaccttagctcgaagatagccaaaagcaaggctctcgggcgcaccagcacagatccagtcggcgacacccatggaagcatcttaaaccctagacgagattaagagagaaatatgagaaagaaccctattgagagagagagagagagagagagagagagagagagagaga

SEQ ID NO: 179822 - DNA, 693 bp, Cannabis indica
cagcttctttttgctgagatgatttggttccaaagtaggaaagttgcttctttggaccaattcttgtctttacttatttttttttattatttatttaccttttactaatatatgtaacgtggagaatctttttgggacagggaaaagggacattttgttttcatttaagtatgtgtttttgaaagaacaattttggcttttcttttttcttttcactttgtgaaataaatatgtttgtcagcagtgttatgtatgaactaattaatagtgaaattgtaatgattaatgagtttatttgttgacatgtttgtgtcttattacatggcatggtaatggtattcaatgttaaattttacaagggttaaataatccatctacttttcaaagcttcttctcaagtgtttagcaaaagcagaatccatgcatttatgcctccagaaggttaaattagtgataatggcaataaaaagagaagaaacccataaataacttgaaagtaaggacttaacattctaataatcatatcatatctcagatacatatggtatttatatggtgggggtggtggcttttgtatcaagtggtaagaatgttttgttttagtacttgaaaaaattataatctaaatatattatggctattgtatattgtatgtatttatgacctcatgagtttttataaagttatgaataa

SEQ ID NO: 179823 - DNA, 606 bp, Cannabis indica
ctacatggtaatgacctctaaaatcacttgaatgacaaggtccgtggatgggatctcttggacagtgatacaaagaggttggaagaacagatagctgcactaacaatgttggtctgaaagcaaagttgcatcaattgctatggatcaatcatgtatgtatacctaatttttttttaattattattgtgttctagattatatacaaattgtattttgggttatttaattttttaacatgtggtattagattatcaactgtatatactttaggacttataatttgtataacaattaatatgtatatgttaattttcttcaattacatattaattttattattttttatgttaaattttttatgtattgatcttaaaattttaggagttttattccttattaaattctccttttaatgatatattataagcataaaattacttaataattgagagaattttaaaattgagttttaaagtttttatgattatatgatgatattgattttgagttttttatgattatattacaatgtctctacatttttaattttaaattggctaaaatatatatcataatcacgttatttgttcttaaatttttggatta

SEQ ID NO: 179824 - DNA, 617 bp, Cannabis indica
gttactatctatacaactcggatttatacattttttctaatttatattgcacttgctaacacattcttatgaacataatataatttttatggcacattttaattttttttttatatatttaaaattatatgtgtttttttaataataaaaaaataacaaagcccattaacttgccaaaaaaaaaagtccattgatgtatacataagcagtcctctttcttgctatttttatttacattttttttttatataaaatagccgctttttttaacaaaaaaaaaaatcacatatgtacgtacacactactaatctctatttgaatttaattttattggctaaaaaaactaccccataccttgaggtacaaattaagagtcctacaattaaattaccctaacaatatacatgtatggagagctttaaagggaaaaaatccaattacaaatgagtgttaattgagttgaatttcaaggtaagaatttatgcaatttatttactaaaaatgttgtatgatgttagaagaaactaaactaacattatatatattatattatacactgaaggggcatactttgttttataatataatatggtaatatgttaaaaattgaatataga

SEQ ID NO: 179825 - DNA, 671 bp, Cannabis indica
ctcatggcgcacatgcgttgactttacagatctaaacaaagcctgtcccaaagacagctttcctcttcctagcattgaccagcttgtcgatgccactgcaggtcacgcacttttgagcttcatggatgcgtactcgggatacaatcaaatcccgatgtatgaaccagaccaagaacatacctcgttcattactgatcgaggattatactgttacaaagtaatgccttttggtttaataaacgcaggtgcgacttatcaaaggctagtgaatatgatgttcgcagatcttattggaaagacaatggaggtatatgttgacgatatgctcgtaaaatcgcaacatgcggaggatcatattacccacttgcaggccatgttcgacatattgcggcgatacaagatgcgtctaaatccgttgaaatgcgtctttggggtgggctctgggaaattccttggttttatggtaaatcagcgaggaatagaagccaatcctgcgaagatcagggcattggtagagatgccatcaccgaccaagccaaaggaggttcaaagcctcacaggtaaagtcgcagctttaaaccgctttatatccagatcttctgataagtgcaaggagttttttcagattttgaaaggcaacaaaaggtttcattggaacgaaaaatgcgagc

SEQ ID NO: 179826 - DNA, 588 bp, Cannabis indica
ttatgagatattatttatggatgtccaaattaccatattaattatcaccattaatgcttgattgtatttttctttattacatattaatttaatttctcattcctttagtcaatacttttgtataaataggggttcaccccattgaaataaacaactgaaaaattctcattcagattctctttctctcttcatcttcttcttcttcttttcttcatatctattttatattattctatattattttataacacttttctgtatttgagcattcctatttgctaaaagaaattagtaaattgattgtgatagtatgagaaaatgaggctagaataatattttatttcattaaaaataaattaatgaaacataatacaggcatgcatacatatcatatcatgcacacgtataacattattattattattattattattattataattcatttacacttacttatacgatttgactttgttaataatatttaatatatatatttataaatatatagataaataaatatttttacttagctttccaaaatattatgaatcatataaatcaaagtaagattgaagaagttatgct

SEQ ID NO: 179827 - DNA, 717 bp, Cannabis indica
aaaaattaataggaatgcaacaggtatgcgtatgctacagtaaagtcaaaccaacaagtaaaaaagttttttttaaaaaaaaacaagctcatgattaagttaacaggtaaatcatgataatctataatgagcaacgttctataaaactattttcactttttaatttttaattagagttttgtttttaactagaaaaataaaaatatttttaacacatttttaatcagtcttttgtttttaactagaaaaataaaaatattttccaaaaatatgttctataaaattattttaactttttcattttttaattgagaatcaaaattttaaaaaattactttcaaaatttttcttaaataatttttttttcttaatcaatattttggagtccaatcccaacttggaccctagggagccaaactctggcctcgatcttaatctcgaactcggaccacagctcctgcccaagactcggaccacagcttcggcccgagactcggacttggacccgacttaaataaaatcaaaaattgaaaattaaaataaaagttatagtgcacacttttattttactttttttaaaaaaaaaataaaaataattatagaatataatttttttttaaaaaaaaaactacaaattttacttttaattttataattaaaaaattaaaaaacaaaaaagtattactaaacgtgcatgtgagtgttataatgacaaat

SEQ ID NO: 179828 - DNA, 613 bp, Cannabis indica
cttcgagactgtatatatatatatatcaactatatatataattgtaatgactcgatctttagttttatagaaatggccggtgctacaagttttatttgagttattagtgctgcaaaattattatatgcacacacatatatatacatatatgggaatatatatatatatcacatatatatgtggtcgatcatatagccagcacggccatccataatcgatttatatatataattatgttatagtaagaaataataataataatataatgtattatatgatgatcagaaacaaataataatatgatgaatatgtatagttggtaaatatataaagatataatataaatttaataataaaatgagttgtataaggagagagtagacgtacatgtacaaatgtttccttaaatgataatcatctctatatagtacacgcgaccatataacaaccaatcatatatatatatatgatctctatatatatagatatatacatagtggttgtatatatagtagtacgtagtagagtaattaatatttttattggataatatatgcatgcatgcatggctagagttttgatcgacatgggttttctaatatttactttttat

SEQ ID NO: 179829 - DNA, 771 bp, Cannabis indica
atttgatgaatataaatgtatatatacatttattgtgttatagttttaagtttattttttttgataaataaaaatttaaaatatatatagtatattgcatattaattttttttttttaaaaaaaaacaaaacgctttttaataagtgtgggtgttatcagaaaataattaaaaaaaataaaaattacttacagtgacgcgctgtaagtgtagttctaatctttagagtctaacaacacaagattctaaaaggctataatgacacgcaatgagagagtccaaaatattttagtgacctgccccagagagtcagtaattacttttcctgatacctacattagtgacctgcattgaagtgtcactaaaattttttagagtcctttaaaaaaagtcactgaaccccatatttgtggtagtgttgttttgtgtttttaatgtatttttatcgtttttatttaagaagttatttatttgacaacacttttcttaattttaataaattaaacaaaattgcaacaaattatcttactaattaattaagctgattatagttaattttgagacgatagaggaaagtttatattcttcaagcattgtcaaataattgttggacaatacttaacgcagttaccaacaaaaaatataaaaatttcaaaattaatgttgtaattaagtaatcatttctatgaatatgagtttaaaattttcaattagtaacggatagatctataaggcacacacgtaaacacatacttcacatgcaataaattta

SEQ ID NO: 179830 - DNA, 1013 bp, Cannabis indica
ctaaagctgatggaccgtgagcgagcttatgagattgtacatgtcggggcggttaggcctggagcgtacgatcatcgggacagcgaggctgaattttttgtaactggtcgttagacgacctttatttatgtatcagttaaacagttaaatctttttgtaaataattttataatcgggatcccgagtcttttgtaatattgttttataagtttaattaaaaagcaaaattttaattaatcacgtttttccataaacctcgttgattagcaacgagctgcacagtacgtttaaaaatcacgtaatacgcctatgctagttagggtgttacaacatgcgtacacgtgaacagtaaaaacttcgaagaccaataaaaacatgtcacgtatacacatgtgtacacaatgataattcaattaatatttaactgtgagatttcactggcgactctaactctttctgatattatttgttaggtaagaggtaagagtttctttcaactcactttatatatatttatatgtttatatatatttgtgtataagtactaaataattatgtattatgataaatttgttttagacttagtcatataattctttatagaaatttttataattttgatatagctatattatatattgtttgttttatttgatatttgtttccaataataagaggaaaaaaatatatatgatattttttctattttataactctcatttataatatttatatatttattaatattatgagtgaaaaaatttatattattttttcattttataatccatatttataatatctatatattattatgtgtacatccttattatatattgtaacatttcttttaatatttctatatttaataaatatgtaatgtttactataataaaaataaaaaataaaatatgtaacgaacatattattatgatagtattatctttagaagtattttagttatacaatgatattatttgaacaacaatacggaatcatacattttattaaat

SEQ ID NO: 179831 - DNA, 634 bp, Cannabis indica
cactttcatcaaaaagtaaaatgaagacacgttttgactcaaatctttatcatctttaattttaatttaataaaaataaactatgtaaaagaaggtttgttcaactttaatcattatttttaataaataaataaaaaagctgccacaaaattatcacatcataatttttacactcattaaaataagaaaaatgaatacaaataatccatgggataataaacttgaaaaagaaagtttgttcagctttaatcaatcaaatcataacttttacactcattaaaataataagaatgaatataaataatctatagtgtgacatgtatgagttaaaatggaataacaaatttgtttaacaaaaagttaagacacagtaaaaatataataaataacgctcaacagtaaaaatgaaataaaagtaaaaaatacaataccaggcgttaaatttccctttttaaacacaaatataaaatcaatttttttttcctaaaaaaacctcaaatatcacctctaaaatcacttcttctaaatctacacgactttttatttagctaattttctaaaatatcacataatttaaaaatcaataactcacatattttttattcacttactaaactctctctctctctatata

SEQ ID NO: 179832 - DNA, 771 bp, Cannabis indica
cctcaatgtcaaaataaatatgcaatgaaaaagataggggaaagagaacacctggaagatgacaatatccatggggcggtaattgaaacaacctgataacacaaaacaaacccaaaacaaacgaaaacgaaaacgaaaacacacaaaactaatagaaaagtaaaaaaatatatatatatatataaataaaataaaacatgtaaaagaaatgaacaactcagagtgtatagatagggtccttaagaaggacctcttcaacatgactcacactctcgatgtaatgcttcaatctctggccattgactctaaaaattctcccatcagttgggtcctcaacttcaacagaaccgttcggaaaaacttttttcaccacaaatgggccagtccaccgcgatctcaacttacctgggtggaaatgcaaccgagaatcataaagatgcaccttttgattcacctcaaaattctttcgcaggatctgtttatcatgagcaactttcattttttccttgtagatcctggaattatcatatgcctcatttctcaactcctcaatttcagacagctggagtttgcgattaatgcctgcagcactaagatcaaaattaaaggctttgacagcccaatatgccttatgctcaagttcaacaggcaaatgacaagctttcccataaacaagccgatagggagacatcccaagaggggatttgaaagcagtacggtatgcccagagagcgtcaagaagacgagaagaccaatcttttctgtctggta

SEQ ID NO: 179833 - DNA, 630 bp, Cannabis indica
atttataaattaattaattaaaagtcatgtaaatcagatcacatgactttagtttgggattttttttggtggggtaagagagaaagaacacccccacatgtcatgtgactcattcattattagttttgaaccttccttaattttcttttatttttatttttttttttgttttttaattgagggaataataaagttagactaattaatatttttgtaccataaattttaatatatattaaattatatttttaattttttagctattaaaaattttcttgaactattaaaattgttagattaaatactttacattaagttttactaatttagtgattgtttatatactaaatcatgttctttaaactttaatatctaccaaatcatgactctcaaactttgatatgtaccaaattataactcttgaactttcatccatgttagactttccatactaaaattggacaaaaattcttaaatacaactaatctcaatagtttaagggagattttttaacgtaccttaaaaagttctagaggcattatttggtacatgttaaagttcggggggctaaaaatcttaattggccataatgctataaattgaattaagagtaatttgcgggataaatac

SEQ ID NO: 179834 - DNA, 861 bp, Cannabis indica
ttgggaaattctaaattcccgaccaatcccgacattcccaatgtctaataaaccgtcccaatatactaacatactaagttgtgattttactgagccaaacaccgagttccatgttaccgggcaccggaaatgcaaaattatgaaatttcactatatgacataaaatgcatttcagaattcaaaaataacagcataaataattatttaaatatctataaataattttcataattaaacataattaactgctaatttccaaattaaactaagcggtctttacaactatccccccttaaaaggatttcgtccccgaaatctaacctgaataactctggatattgagctctcatatctgactctagctcccaggtggcttcctccaccttgctgtttctccagagaaccttgaccaatgctatggtcttattccgaaggactttatcctttctatccaggatctgcactggctgttcctcataagtcatgtctggctgcagctcaaggctctcataactgagtatatgagaagggtctgaaacgtattttctcaacatcgagacatggaatacgttgtgaactgctgataaagctggaggcaatgctaaccgatatgccacttgacctatcttctcgagaatctcgaaaggtcctgtaaatctagggcataacttgcctcttttcccgaaacgtttgatccccttcattggagatacccgtaaaaacacatggtccccctacttcggaaactccaacatctctgcattgcggatctgcataaacttttatgtctactctgtggaggtaagcattctagctttaattttctcaattgcctcatcagtccgctgcacattctcatag

SEQ ID NO: 179835 - DNA, 774 bp, Cannabis indica
tgtgcggtcatatgcatcagactctcttttctcgagaaattcttcctcagggtcacttctctcagagttcctcttagacagaccccttccttagtttggtctagtttgagtctgtgctccttgggattcttttctcagtcaatgtattgtctcttcttccacgactagttcatcatgttgagtattcatgatcctcttttaatgtttgagactaatgtccacatgtcatgtccatatttatggctcaaattatgggcataacaccttccttcttctcacactaaggtggcattaatggtatggtcaaaaatagccaaatacaggtacaatggttctctctcaattagcttggacaaaattggagccagttaaatattcttttagtttctagaaggcatcatcatactcgattgtccactcaaaattgttacttctacacaaaacattaaagaatggaatgtgtttgttggttgactaagaaatgaatcaactaagtgttacaattcttctagttaagctttgaacatccttgtatttttggggggaaggcatatctaggagggcttgtatcatcttcgaattagcttcaattcctctagagttaataatgaacctagatattttcctaaagaaactctaaaggtgcattttttggggttcaacttcattctatactttttgatgcgggaaaaagcctcttccagatcatcactaagctcttcgaaagtctttgatttgatcagcatgtcgtctacgtgacttccatgtttttct

SEQ ID NO: 179836 - DNA, 541 bp, Cannabis indica
agcaggtggcggaggagggaattggccggacttgagagcctcctcgccgtaaagatcgtagatctggcgcttgagggggtcgctgaggacgtcgtaagcttctgagattcgcttaaactttgcctccgcctccgaccgcttcgtcgccggattcttgtctgggtgccatatcatggccaatctcttgtaagccttcttcaggtcatcctcgctggcgttccgattcaccttcagtatgttgtagtaatcaacccccatttcttctcctctctgtctctgtctctgtctctcctgtttctctctctatatgtatatatattacatatctgtcaatatatatgtcgcattataaaaataagataaactaaaataaaaattaaaaaaaaaatctctaaaaaataaataatgtgatgaatcttatttataattaagattttctttttggtgaatcggtgatagtaaaattgatgttaatagtaatacaatgaaaaaaaaaatacattataacaacaatgaaccttatttataattaagattttct

SEQ ID NO: 179837 - DNA, 701 bp, Cannabis indica
ggtttgggctgtttattcgggttggacaatttataaattttgttgaacacccctaatatttcgtacgaacaatggttacatcgcatattgggcctcacctacccggcccaaaattaatattataatgtattttaccccaacgatgagcttatttgctcatacaaaccctaatgggtctagatttacccaaaaacttgattccagcccataaataaggttttacccctttacaataaggattacaaactttggctaaaaattctacaaaaatttggcaaaaacacacttgtaaaatactctatagctaaatttaataatattaactcgtggactaaatctcgttaatgctccaaccacataaaaatcttctttatttatttcaaaatcatcttttttagcttaattttttattaattcgatttttaaaaatctcgataaataattattgtatttatttttataaataagatatatatatttaaataatgtaaaaataatattattattattaataataataataataataaagaagtgtatgatgtaatgtaaaaatttgagataaaaagatgatgttaagttttattgatatattttcaagaataaagtagaaaagttgttgggactgcattaacaagaaccaacactatcacagaaagcaccacaaccatgtacaggcaatctcacttcctatagattct

SEQ ID NO: 179838 - DNA, 964 bp, Cannabis indica
cagtttgttttgtcttaattatcttctccatgacatgtactatgtataatagtacatattacccacattggagatatattaataatgtacttttatggtttttttacttgtcataattatgtaattttatgttttttttttataacttataaatgcgtacaacattagctagctagctataattttctaggtagaaaaatcagagcttatatgcaattcaaaacaatatacataacaaagattctaaaaaggagaagtcgataataagatgaaagaatcaaaattatcttttttttttacagattctctttacgtacaaagtgtttcatgcaatttcattaacacaaatcactccaaaatacatcatttaaactgctcgaaattattatagtatccgaataggtacaattaatatttaattaagaaactctagccaatatagtgaacaatataattaacggattgcttgagaaaaatcaaaagatattattcaaattagtagagtgttcttgaaatattaaatattattattagagaaataaaacaacaaaatttattttagtttgtagttagttatgtagaaaaaaaaaatatttttaataaatattaaataatttaatattaaaaagtaaataatctaaaataacttatccaatcagcacttttacggattgaatttgagttacaatacggattgaattgaatccaaaatatgaacaaagaatacgtaccctatagtactattgtatcctaaagtaccctatctcggcggttcgaaccgccgagattgggtctctaaattcaattttttaatttttttcttaaatttcatcaatctcgacgattacactcgactgtgacccatagaagggtgccgagatagctcaattttttagtaggctatcaagaacatgtagaacaaaggtcaaattcaatggattagaagaatgagaagaaagggtag

SEQ ID NO: 179839 - DNA, 961 bp, Cannabis indica
aatcattaatttacgtacatttccattaaaaatactcttaacatgtaatataaaaaattaagtgacggtatatttggggttcgtttttatggcagaagttttcactctcttggtgtaactattttggacaatagttagtcgaatccttcaaatctagatctcatggtccaggtgtttattagtatattatatattaattatactttaactattattagttttactttttaaaaaaaaaatattacaggtaaacgagacaaagtgatccactacattacatgaagatgacatttatatacgttttaatatatatatatatatatatataacattattaatatatgtgtcgtttggtaattatttttattttttatttttaatcataaaataaattaaatttttagttttaaaaaactaaaaagcgtgaccatttttatttttcaattttaaaatcagaaaacaaaattgtgtgttttgtaaagtatatttttattttattttttattttatttaagtcggctctaggtctgggatcaaatttgggttcaggtcagaggtcgggttcagcaccagggtcgtggagggatttggatccaggtctggtcggaatccaaaaatattgattaagaaaaaaaaattgtttaaaaaaatattgaaagtgatgatttttttttattttatttttaaaaatttgattctcaattaaaaaattgaaaaataaaaacaattttatagaatatgtttttgaaaaatatttttacttttctaatattttaaaaaaagtattaccaaacgctaccttagtaactcgtttccaataaaaacaaagaaaacccttataatacttttaactaaaagaataataagttgttagttgtgaagtatcaaattaaagagtgggaaaaatgttagattatgatcccaaatgacaattgtgaaattaaatctattaattataatt

SEQ ID NO: 179840 - DNA, 914 bp, Cannabis indica
  modified_base (167)..(167): a, c, t, g, unknown or other
gacaagcacttcacagtcgtgctcggtgtggctgctcttattgccaccgttgcttttcgcacgtccaccactgtcccgggaggcaacacgagatcagtggtacgacaacccctggaagataagccggctttttgaggttttcgcgatagcttcgcttgtggccttgngtttctcagttacctcagtggtcatgttcctagcaatactcacctctcggtaccaagaacgagattttggaggtgatctgccgagaaagctgttgatggggttaacatctttgtttgtgtctattgcttctatgttggtttctttctgtgctggtcatttctttgttcttcaagagaaactcaagtatgcagcatttcccgtgtatgccattacatgcttgcctgtatctttatttgctcttgctcaatttccactctattttgaccttatatgggcaaactttaagaaggtccctcagcgtagttacaaggttgcctttgccccttactaatactatgaaatggatccaacaataatgtcttccttaatggtctctttgacttgtttcctggtagctcattttctctttaataaaagatggaatggaaggttatggtatgtttcacgatgtcttttcttcttgtttaccaatttcacatcaattttgcctacttccaagtttaatttgagtttttctatcttttattaatttacttttttttttaaaaaatgaaaaagtcaactaattttgtgttttttctatattttattaactagcatcccgagtaacttatcttaaatttaatagagaggaaataaattaagatggaaggcaaaaactaagaaaaaaatttaagaaggaaaatagtaaaatgtgttttcatcaaggaaataaaattggattattttacaattactttgtaacc

SEQ ID NO: 179841 - DNA, 563 bp, Cannabis indica
cgtgacatcaatagaagtccttcaagcatatcgtttctggagacaaaatgatgtgtctctagtacttttaagataagcacaaagacaactcaattacagataggctgaattctatttttatattttagttttcactcagaatttgtaaactattaggtttaagtgagaaagcctatggatgtgacgttaccgttcacggattctcttcacaggtcatataaacaaccaacatgccacatgtttcatgagctggttaaacatggaaagactgaaaaggaagcacagcagtatttgaaggtgtaagcatttttttttttgaaggtgtgagcattaattacatggttacgagctaacttttgacttgttggacgatttaaaataatgacaatgtcatcctagagtaaaagaatttgtgtttctggaatctttatattttgtgacaatgtcaatatctctactttaattacttgaggatatttagggaaaccttattgttaatttttttttttccaatttctaattaacttaacaattattaattatgtttactcaaaaaaaaaaaa

SEQ ID NO: 179842 - DNA, 615 bp, Cannabis indica
gttaaatgacaaaatagaccctgtatttttcaaaatggtaaaaataggaccctaaactgattttttgtcaaaataaaatttaataataatccgatctaaaagtgttatgacaaaattgtttacattttctgtatctgttcgtattttcaagttggttatattaaaaaaaattgtcaaaaattaaattaagggtcatatttatactattttaaaaaatacacggtccattttgtcatttaacaaaataaataatccaattgataacttttgtaaaacacaagatctaaaatagtatttaccactttttattacatactaagcatcacggtacctcgtagcaatactcccctcaattggacaaactttacatattgacgatgtgaccgaattaggtggtgagagatgtgattagttaccacactaatgggacaaattaccaattcaaagtgacagaattacagtttgataacttaatttaggtagttttgctgcttatggtagctgctgattataaatataaatctttaggtaattttgcaacatatatccctaattatatttttttaagaatatatccctaattattagttagtcaagtttggaattaagcctgat

SEQ ID NO: 179843 - DNA, 604 bp, Cannabis indica
tgtctcgttttgtaaatgatgtgattgataacatatgaagttaattgtcatcactatccaaaaaaaaaaagagaattgctaaagagtactgttggtgcctagtactatctttagtgtcattctgttattgctgcaattaaatagcgggtcctatataatttaagaaaataagttttaaggaatatcgttaaccaattataaagtgacatttatggaaagtgttgggcaccgctatccaatagcaatgctcacaaaagaaataaaagttgtttgttgggttgattagtgtctagttgtgccctacaggttagtaatatctatatgagacttaatatttaatgagaatgttaattacaattttttatcaatctctacgctcgaaattacatgtcggaatattttttttttaattttttttatagaggtattcattatagttacagtattatccctgtaaatttttgaaaaaatcttaatagtttataatgctgaaaacagagtttttgatattttagtttctacacgtgtttacaaaaacttcaaacgtatttcggtactgtaattatacaaaaatttaaaactttactagagatgatatgtaagc

SEQ ID NO: 179844 - DNA, 549 bp, Cannabis indica
aggacaattataaaaagggtatagagtgtaattttctcaaaatataaaaacggggtaagttgaaaaatgcctcttttattaatcaattaaccaaatttacctttaattttatatttatttgaaacatacctctttttatatgtattgtacccaaaataccctgacataagagactcacatggagagtatcttgaagtgacaggggacaaaattggtacaatgtttaaaaaaagaggtaaaaatgatagactttaaaaaaaagagtaaaaatgaaagaggacaatataaaaagggtatagagtgtaatttcctcaataaaaactctccgtaattatatcacattttttggtctttagttgagctatgggcctagtcgtgacatgagtggtatatgggcctattcgtgtaccatagtccatttggattgcggttggcctcaactgttggggtttttgagccccaatgatttttatctttcataaaatattatttgtccgacccattatcatattatttttgcatagtatacaatacacccacaacattaaa

SEQ ID NO: 179845 - DNA, 586 bp, Cannabis indica
atgtatgtgtagtgtttttttttctttcactaatttacatttttttaaaaaaaaaaatacaaatttatacacttatttttctttttaatttagtggtaacagttttataaatatatatatcttttttttcttacatttcttcgtttcttttagttagaaaaaaaacacatttttatcaagtctgtacattttatttgttattgttgatgtagattatatagatttattttttaaaaaaattaatttaatttacttcattagctaaattcaattttttttttcatatttttatttatttttattttatttatctataattttattttaattattaggttgtctagttttcatttagcaattttattttattatttttttttcttactactttctactttttaggatttagactactttatttttattttttttttaggtttagtttgttagtatttttatcctttaaggtctaaaaaaaaaaaaaaaaaaaaacttgtaacttaaaaattttagttactattaaaataatttacctaaaaaaaaaaaaatctttaagtagtctaaagaactaattagtgtaaatagt

SEQ ID NO: 179846 - DNA, 665 bp, Cannabis indica
cgttttttagttttttttttttttgttttttttttttttgacatttttacagaattctacatagaaacctctattgcaactagcgctgcaacctaaattgcaacaaaaaaacgtacgtaaatttaaaaaaaaagtttaaaaataatacatggggtaatttttctaataataataataataataataataataataacaaacaacctaaatctttgaaatctcaaaaccacccattcttctccatcaatggcaccacctagaaacgagaaattccattgcacacttgaaatcactcaaaccccctaccgacaacaccaacactatttcatgtgcctccaattaatcgatcaaacccaatatacatagtaacttatatgaaattagttatcattttcttctaaactattaacagacaacaattcgaagaaaaaaaaacgaaacaaaaaaagtactctactttttcaatctaatatatgtgaatcatcttcctatttcttcaaaactatcaccggttctatcatcacatagcatcaagcacccattctaacaatcatagctaggatatcaaatatgttcgcaacatagaaaagggtgttctctcattacggtagtattacttcttcttccatatgaaccgtagaagtgttaaattagatctcactgta

SEQ ID NO: 179847 - DNA, 718 bp, Cannabis indica
gtcagaattttgccaaaataggacccattaattatttctattttttgtagaaactaaattataaacgaaatgatttcaaagtcaagaagaattttcctgacaaaaaaaaaacaaattgaagaatttatattttagagcagggtcacaaacaaaagagagctttaatttttgaaaaggaaaatggatggatggattttgaaccaaaatgaaaccaagggagcaagattatggaaaagaacgtagtttaatgcatggaagaccaccctctctaatttcagactggtcaaaacccattattattttatataagaaacagaaacaaataataagctctccctccaaggccccctctaattatgtacctgcacgtgtacccatggaaataaaattttgttttaaggtaagtaaccacagaacccaggagaaaatagaataactatttagtggcctggcaagctcaagccatgtgtttcacttctcttttcatgcaccgtttatgttttgagaatagaggagtctcttccaaatgccagcttcaaggttagagaaaatttttaatggacctttttggccaatggccggctcaactcgatgttccaatcaaattttttttgtttgcagtgttcaatgtacagtttcaatgaaatcattttttatcaaacatgacaggaccaagtggctcattttgctacattatccctcaaattattgtgagaac

SEQ ID NO: 179848 - DNA, 894 bp, Cannabis indica
agatcttcaaaagttggctagaactattcaaagatggcactacaccacattaatgtctcagtgttgtggggaaccttcgtctgattttttatgtgtcaattttggattttccttcttttgagttttgatcacaccacatatttatatatttaagacttttctcaatctatatggactttttttttgtattgttgctttacataaggttgatgtggttgtttttcttttctcttttttatctgtcaaatgtatgtatttcagtactgataaccatataacatgcacattttagaagaaagggtaaatggtatcatacgcatgatattgtgtaatatacgatacaccttaaccaactaaagtatgaatatttgtactttgcaatacacttaattctacttaaataaaaacttaataatttttttttaatttttatattgggccctgaaaagtgtgagcactaagtacgggcttaactcgcggcctatgtctatattttgaatattattaaaaacataagtcacatatattcaatattataatatcctcccatataaggaaaaatcatataaaattaagtctgttttttttttttttttttagttctttcttttctaacaatcaaagaaagaaagaaagaatttctcttcttgcattgtatataatcattagaaaaactataaaataaaaaaaaaaaaaaaattttgcaagttgagaaacttaaattggatctcttaattcttaaagtaaaaatatttccattattatgttttccgtagtttcattggttggtatgatttttactttcgtagtttagaccttactcaaaatattagggtattgtacttttgtaagaaaaggaagaagtggtagtaaggattgatctaaatgcttctg

SEQ ID NO: 179849 - DNA, 743 bp, Cannabis indica
tttttagtttaaaaaatattttttattcatatcatctcatataacctattttttttttcctccttattcatcatcatcatcatcgctggtcttctccccttttttcgttcattaatttttttttgactaaaaaatattcttcttgaaatgtctcaaattttacttcctcttctaagcatcaaaaaattaaaatcatatataaaatgttaaaaggcaattagctgagtgagatcgttgcccttgattgacctcaatgcaattagagcttgctccctttaaaggccaaaatagtattattaaagggaatcttataataatattatcaaaaatcatactatcaaaaggaataattttaaatttttattgtgtgaatcgatttggagagtccatgaactgatttataaacatggtttcgaagtagaatggaaaagaaatatgggatttttgaaagtatgggggttctgaatgaaagagagaacaaaaaatggattaattaatttgaggagattagaataaattagtaatttatttaaataataattatttaattcaagaatattattaaaaaataaatttatgaataatctaaattattaaccattaatatacacttatcaatttattattattagattaaatatctatgactctatatgtctaccataaagacaaaactaataaaagttgatgtaaaaatattacaaaattactttttgcgtcaaatatagcttaacttttatatc

SEQ ID NO: 179850 - DNA, 522 bp, Cannabis indica
tgtagagggagcaccatccttgaaaatcactcttcaacaacgttcacaagttcgtactcgatcagagaaaggttgttgtcttctttcacggtgaattctgcaggttcagtgacttcgacacggccccacttgtccacagctagcctcattgatcctttgaacatgtcgattttagcattccgaaagataacggttgaaccctctttcatcaggtccactggaaacatcaagtaagattaatgcacatttaaaaaaagtaaaacacatttgttggataaaatttgaatgaataaaacacatttgttgggaaaaaaaacacattcttggtaaataaaacataccagctacataaccagcactgcgaaagggaaaaaaacctttcgtgttcttagctaggatgcataaccatcattacaacaagaaatcttgcctatagtattttacaacagaaaaccatgcatatatctactcttagctaggaagcataaccatcattacaacaagaaatcttgcctatagtat

SEQ ID NO: 179851 - DNA, 615 bp, Cannabis indica
aaacctataaacgacaatatgtttgaagttgtacaacaaacaaggtcataaatctgaaagataaaacatgaagttgcaatacaacaaacaaggtcataaatggagttcctgagcaagcgtcggtagtcctagtcacacattcctgaaatttcacaaataaggttaatcccaaaattcactttcaataatcacataattaaaattccatttacagattaacatatagagctcaaaacgagctttccaacgatataaagaacatccaaaatgaagtcccgagtcaaaagttatggccaaaacaaaatcgagaaagacatgcattcccactgccaaacctagtcgtggcgaccaataatcccaccgcggcgactgggttcagaacacccaaaaatcccattttaaagcctaaaaatacccaaacacaactataatttcacctaagacatacataagcaaaaaccatgccaaagcaagatatttttcaggcattaaaaccacaaaatataaactcaattttaccaattcaaatacatcataacacaaacacaaattacacaatacaccaaaatcaagcttgaacttcaaacgcttcaaaccttccaaggaggcccaaaa

SEQ ID NO: 179852 - DNA, 593 bp, Cannabis indica
acttacacttattttttgtttttaatattggtatgcatggtgtgttgttttgattatatttgagattagtttttttttttttttttttgtatttttgtgtgtgtgtattttttttatttgattgtttgatgaaactggtttcagttaactttataattaacatttatattttgttatgattttttatagcgtcaaaactggtttcacaggttttaactgttctgtaatagggttgctccatttttatgatatttttgtgtgtgtgtgttatttttttatttgattgtttgatgaaactagtttcagttaactttataattaacatttatattttgttatgattttttatagcgtcaaaactggtttcataggttttaactgttctgtaatagggttgctccatttttatgatattattgtattttttttagtttgttataaacctagttttattattgtatgatatttgaacaactactttttatttattttattttaaataatcagtttctgacacactattattattttatttatttctaataaatggttttttttaagttaacttagtttttaattaacttggttttttt

SEQ ID NO: 179853 - DNA, 808 bp, Cannabis indica
gcttttcatggagatctctgatcgttggtcgcgctgccataactgaatatcgaatcaaagtttcttactggcattagtggtgatcgacgaaaagctttctgccggcatttatggtgttcgacaaaaatttctacatatttggtggtattgtttggagaatacgtcgattatggaggaaatttaggattttttggaggtgatccatgttcatgttgatttctgatctaaaatttttgagagaaactattttgggaaggtctcatgtagagaaatatttttgaaaaaaagaaagtttacttttctaattttgtttatttttgcacttagagataaaaaagtaaagtttaaatgtaataaagttataagagaaaaaatctctatattcttgaatacattttccaatgtaaatcatattgaaatgataatatttttccttatttagtagtatcatgaaaaatgtgatattttatgtggattaaataatttaagatcttgaagaaaatcaaagagtatctttgccccgttgtcatctaatcctagtttgggtcccagactatgacattgatatagctggtacgagagctaggaatttcatgtagctgttaaacaagggaatttaggtaaattctactgacattggataaagtttaataatgaatttacgcttttttaatcactttatcaaaataaaaaaattattcttttcattgattttttgtcaaaatgacatttactactattggccagaaagctgttgaggacggcggagtcatctgctattggaaaaattgatcgatggtatcactta

SEQ ID NO: 179854 - DNA, 988 bp, Cannabis indica
cattatcagtgggggatgccaagttgggaaggttgtggatggtgattttaaagttattggaactaattcacttcgagttgttgatggatcaacttttgttatttctcctgggaccaatcctcaagccaccttaatgatgattggccggtatgtcaatattattattattattattattattatgaaaatacgtatacttttacaattcaataggcaacacctttcaccaccataaaattaataatatacacatcacatttaattttaaagaaatatcatttaatttagattctaagttacttatcaaaagtatcatatcattacgatattaaaaaaatatttttggacctttatttatttttttttaaaaaaaataatatttttacaaattagtaaaaaaaaaaaataagtatctttaaaagggtataattttttttagattcctagattagttaggtcctaagtacaagcctatattataattattagtatattttaagagataagttgaaaaatatttttttttgtatttattaattaaaaaagtggatatatcttaaagaatataattttaaaactaaaaattaaaacaaataaaataaagtaggtataaaatataatttgctcgtatttatttatttatttatttttcttatactatttatggcagaaaaatataagcattttatatacaaataaaataaataatacaccatatgtaaataatattattcatacaatatggtgtattatttatgcaaattattaatgcttctatactataattatatatatagtatttttaattcatatcatgatgatttaaagtactaatccttatattgtttttcttcttctttaaatttgtttttttttttttttttttactttagtttattcttgggtcgtaaagatgctgaaggagaggaccaactaaacttagaatttctatgagatttattttactacatacagtaaaaaaaaaatt

SEQ ID NO: 179855 - DNA, 553 bp, Cannabis indica
ataaaagtgaaagaagagcatgatgatccatggacaggaggaacaccaaccctccacacctagtaaaaaaatagagaggtgagtaatcaactttgaaaagtaaaaacaaattgtctgtgtgaagaaaaatattgagttattttttttaaacacaaacaaggggctaatgttgaatgaagtaaaaagaaaaagaaaaagaaaagattagtgtaaataaaataaaataataacaataaaaaaagcaaaatagtaaataactgtgtataaaatgaaaaaaaatatgaatagtagccacacaaaacttgagatgaatgtatacttgggtttgggtgtgaatgcataaaggtaaaagcagctgccacttgattcttttacaaagataaggttcacctcgaagaggcacgataagctacctctataaataggaaaagaaggcgtctagtcccatcaagcttgtcttattaaacttgaaagaaattattcttgctttctcttcctctacacaggttgcttgtaagcgtcaaagcataacaacatgcttatatacaaacac

SEQ ID NO: 179856 - DNA, 569 bp, Cannabis indica
tagtaataaaatagggaaaaaacagtacatggtgtaaatttccctatataaatggtagagtagtgtgtgtgttgtgtttggaattaagccaaagaaacagagtgtttatactttcagtgaactcttcatttattaacggtaacttcattaattttcaactatatatatttatatttatattgtttacatattaatatttatatagctgagctattaattcctgtattaatattattgtttgttgctttaaatagatggataatgatcaacacttctgccatgaacaacatagtttgcacctaattatggatggtgagatcatcaccaatgacgaaattagttgtgaactatgtgagttttctgtggaacaacctccttattatgtttgtgattcatgcaaatattatgttcacaagtcatgtgaagaactaccaaaacaaatcaatcactcttttcatcctcgccatcctctcattcttacatcaagatctgtcccgtgcgattcttgttggaaaaccccccaaacgagtctcatgttctgttgtgaagaatgtggatttgacatggat

SEQ ID NO: 179857 - DNA, 587 bp, Cannabis indica
tttagatagaacaaaagactgtatatatatgaactacaactaaaaattctaaaatttttttttttgacgtgaaactaaaaattcgataagttataattgtagaaaaaccaatttaattataataatggacattataaaatatagcaagaaaaatcataaagtctaagactttaaaccaatgattgtttattataactaatgtttcgaaaataataaggcatatatctcaaatatttcacaagcttaattaataagtacaaaatataattgagaaatataattaccgtaaagagagagaaagaaaaaattaagagaaagtggctttgattgaataaaataaaactataagttgatcaatgatttaattttttttttttatttttgtaagggagttgatcaatgattaatgactcttataaatatatagtgaaacaatattagacatatgacttttaaaattctataatcataattgaattataaattaaaaaataaaagatgaatgataataataaatttaaaacgtaaaatattcttttttttactttcatataatatatctctttttattcttttttaaacgtata

SEQ ID NO: 179858 - DNA, 766 bp, Cannabis indica
agtaattgattctgctcaggaatcattactctacgagattgttttctcttgctcttaatgtacacaacttacataaattccaaagggattttgggaattcaccttctaattgattactgccaacatcaaggtatgtgagattagtcaagttccccaaagcttcaggaatagagcctttaaactcattcaaactgagacccaagtgtgccaaggtactcatctttcctagagcttctggtatgaaaccttctaagtcattagctccaagttctaggtattcaagggcactcatgttttgaaaagcttctggtatgaaaccgtttattcgattatcccagaggttaagatgaacaaggctacgactgaagttgaatatcaattgatacactgaaccaccagagagccgattattggaaagatcaaggatggcaagtgattttgaggagttgagtaaagaaagagaagaagggatagtaatattaggaagctgacacagactcaacactaagtttgtaaggtatgggagttgactaacagtttgaacccagtcaatggctttgctcatgtttgtctcagtaaggtcaagtactctcaaagaagaaagatgagaaacccatttcatgtttgtgatggtgagctcataattattgccaagatcaagaacctgcaagctagaaagatttgcaagctgaggaggaatttctcactcatttgtgtgtgagagagattgaggtaccttaattaagtaagagcatcaatgaaagtt

SEQ ID NO: 179859 - DNA, 548 bp, Cannabis indica
ttaataattatcagtccttgaagattattaattagataataattaatgtaataaataattcattaaaattaatttgttaattaatcgtggtaatcaagaaagttatcgagctagatagctagtttagtcgtaatcgtgcatgaaaatactcagcttttaatcaatatataatcaatgcatgcatataatagaagataagagaaattggcaaagcattctctcccgcattgtactggctgccgaagaagtcacgtacaaaaataatattaatataatataatataatgtagtccaaattaaaaatgtcaccacacatgatgaaaaaagtaatatttttattttttcattttttatagtattttgggtcagaacttatatgggttctagtcggtttattttgcttttttttttgtcattttactattaaggttattattggattaatttattaatttgcttttttaaattcgtagtgtagttttgtctatttgttatactatggtgtcatgcaatacactaaaaattacctttttttttgaaagtcacaa

SEQ ID NO: 179860 - DNA, 646 bp, Cannabis indica
aaaactattgtcgttttataaacacagtatgtgtcgtttttagttttatgcaatcttactgtcgttttcacacctttcttattttttcaagactattgtgtcgttttgtgcttttctttttctgttattggtaatgtgtcgtttatgaaatattaatgtcgtttgcacctaatctttaatcacaaatcaatttctttatttttcttcactgtactttcttctatttttggtattctgtcgtttccgtttatgctaactttattgtcgtttatcaagtttttgtgtcgtttcctctatttctggtattctgtcgtttatgctaaaatttttgtcgtttacaaacttttttgtcgttttgtaatcaattttactattttttattaatttgtcgtttaaagatgtcattgtcgtttttttgttttcctttttctatgtgtcatttatcaaatcttatttttgttttctattccttttttaattattgtcgttttttaaaacccaatttatgtcgttttatgcttattttgtcgtttaaatatgttattgttgtctttatgttttcttttttcttatgtgtcgtttatcaaatattattgtcgtttcattccttttttatttaattgttgtcgttttttaaaaccaattt

SEQ ID NO: 179861 - DNA, 729 bp, Cannabis indica
tttttatatatatattttttagagcctcaaaatttaattccccattacccaatagcattaccattacttgtcgggtgtgtataacaatgtaggttctctaaaaaaaatgtaggatattttaattcttaattaattagattagacgtgccacttaatttagagaaaaaaaagtacaaaaaagagtgggttagaggtttctctttaattagttttataatagcttaaaattagacacaaaattaatctataatactcgaataatcagttgacctatatattttttaaaatatatataaaatataagtaaataataagtagctttattttttgatattggataaagaaatttaaatttaagatttcctctttttacgataaaatcaaacaacaagcagctttagatcttacaataattaaaatatttattcttattaatattaaaaactataaatataactgtcccaaaatattgaacctaacttccttcataggatattacatgatgtagaaatataattcatccaaattaaagtaatgttagtcaacgaattcatctccaagtccatatatcatataatatattgactaagaagaatgaaaatcacatcagttgtttaaaaaataataaataaatcgtggtttgcttgtagttgttggtgtcgtatccctgtgcctctgaattcttcaattatttaaaaaatgttacaccatatatatatatatatattt

SEQ ID NO: 179862 - DNA, 507 bp, Cannabis indica
gaatccaattttttttttcttaatctcctctttttttatactactgcaatcagcaaattaaacctcataaatataataaatcatctagtgacaacttatcaatgatgcaataagccatatatatatagtgatttacaattctatcaatgtccttataatttacttttgaattaatgagtgctatttttaaaattctacaaattatatatgaattaattagtgatgtttgaaaaaaaaaatcaataccatcttttctaaaattctaatgacattcaaagtgttaaaagagtaatacaatctactagtgagatcattttggtgggatatacataatatatgttatattaatttccatgtgccaaatgtcactaaattatatatatgctgcattttatttctaaatttttttttttccttattgtgactagtgtatatatcatgttgaataatagagaagttatcattcactgaatttggtcatcacgatctattaatatatatatatat

SEQ ID NO: 179863 - DNA, 600 bp, Cannabis indica
ctccaattgcctccgctagctccggacgtacagtaccatgacaaagccgagagactccctcaaccataaaaccatgttcatttcgagccacgattccatagccatatgcatgactaccctcaaagattgaagcatccacattaaccttgatttcatttgcattaggtgcgcaccatcggtctaacccatccccggccactaaacctgtccgtgatgtctccaaatatggagcttgagccgaattccattgttcaagatagcaagtggagaaagcaacaataaaagaggcattcgaggttttattcttccataccttgtcattccttgcactccaaatggcccaacaaattatgcagaagagttttcgggtttcagcattgacagtgctaaaaaccgtcccacaccagtccaaaaaacaagtgtcctgctgaatcggtatcatgatattcaccttttcccaacattgtgttgcaataggacaaaaagcaagtgcatgcatgattgtttcattggtggcatatactaattgtgctatatatataccaaaagatcaacttactatggacgtaggatagtattagaaagtctcacattgataat

SEQ ID NO: 179864 - DNA, 618 bp, Cannabis indica
aagagtaattaaagcattttgcaagcaataagtagtaaatgacatcgctttgttcaagaggaaattgtcaagaaaaattcacataattcatacaaaatttaaaaatttaacaaaaatacataacacgtaatttttattttgttattttaatctttaaatttatttatgtacaaaatgtcttttcagttaatttttttggttattttattattttattatagttgtcatgagttgtttttcttgttttataatttatttgtagatgtcataaagttaatttcttgttgattttagttgtttttttttttgttttttattgagcaaagtgtgttttcgtaattaaaaattttagcttagaaaattataaataaaacataaaaataaaatatttttaaatttccccgattgtcaatagttccttcaatatcctttgaaaatttgaagaataaagagcaaatattttatcaaatgtaaataaacgtaaaatcatttccaatgtatattttgggttaaatttagtctaaaatataccacagtgttatttggcttaatttttgtatttatactccaataaatattaatttaattacctaacttgccaagcgagagtattgttat

SEQ ID NO: 179865 - DNA, 610 bp, Cannabis indica
gtacatcatcaaagttctgcaaggagtagaattttgttacacagtttgtataaaataaaatacttaattacaaatacaaatctatacttgagctttccaaagtaaattccatactagaaatgcctaaaaacattctctcatgtccaaaccaaccacaataacctgaatagtttcataataaagtaataaaaatacataaattaaatacataaaaaaatcaatgctgggaaatacttaacacaacttatcctcaaataatattaatgaaaaagattgaatacaaacaaacaacagccaggtcaaatggagtcttctagcaaaaattaaagtagacaaaaagactagaatattaataaatgtcagagaaacaaaataactgtaaattgtatatgttgcatcagcatattgccaatataaatatgtacacatatctgcagacagaggcgaaaccgctaattggagtacccatgaaaggattgacctctaactaactgtgcactcattcttgagtgtacctgttttacagtaaccaatggacataagtcatcaaacttatcgaacttgttggagtaattagtgtcaaagtaatcataaatcgcattcttcagaa

SEQ ID NO: 179866 - DNA, 569 bp, Cannabis indica
acactgtcatctgattctctctctctctcatatctctagttttttggttgatgagtagtgacaaatctccctttattttcttttttagacaagtaaatatatataatgtacgtttatgcatgtcacaagtgagatccattatttgttgtcaccaacaacaattatacatatctatatattcaagaaattcacatataattcaaaattaagtccatagcatacatgtataattcatttatacatatatatatcccgctaatactttaaaccttgttgtattaatggacaattcagatcatttaacagtacacttaaaactaacttcaattttagttatattaaaaaaataataaaaattaaatttaaaatataaaaaatttaatttatcatttaacaaaataaagagaagagttcgatatgtaaattttgcaaaatatacaatcctagacgatatgaaccagtactgaaaatttaattaaaataattatttgtgtttaaactgagtttttaacattataaactattcaatttttccttaaaattcaccacatatatatataaattatata

SEQ ID NO: 179867 - DNA, 614 bp, Cannabis indica
gtcattgtaacaaataaacattcaaaatagtctctcttgaatataaatctcaaaaaaacttgcactataatattaatgcaaatacaaattgaaaaaagaattatggtatattaaatttgcactataattcacacaattaattcacatagtatgtcatcttttatggtatattaaatttgcctatatagagcaaaggtgagaaatacacatacccaacaataatggaaaaattggtaggcttgtttggtgctccaactataatcaacttttcttgagactttaatagaccaatcaaaggcataagtgggtgcactgcagagactgtgtcgataattccatccattgtactcatggcacccttcataataatttttaattaaaaaacatgcataacccattaattgaaatttaaaaaaccttttaataactaaatgaattagtacctacatttgattttggtcacgactgaccaaaaatgagtcagcaccaagattatcaatagcttcttccttcttatcaggtagaggtacttatcactgtaaccttaacccccatagcctatgaatgtgtcaaagagaacagatatcgatctatatgtgttaaaaaaaataaaa

SEQ ID NO: 179868 - DNA, 613 bp, Cannabis indica
ttcacatatttgtttttttagagccctatttatttttataagtttcatggctgaacgaattttgatttttttaccatcttgttgtattgctttctcgcatttgttaggacaaaagcaatgaaaaagataaagttctgatttttgagcctatgcaatcctttggtaggcctttggttgatgttagtaaggagataccaagaatcaaagagcagtttgtattttcatctagtttgacggatgtggctttgtgtatgcatcaagaagcctttgatgaatggttttctattggttataggcctggcaatgtataagttttttattctttgtttatatttttagtttatgtaattactttaagtttttaatgtattttatatgtgtcaatttcacgaataacaagttcttgaagagatatcattatactgaaaagccttttgattttgttgttgctaaaattgatcacaagatgtggttctacgatttattaatacctggaaggaatatatcatgttcggttagtcatgtttaaatattattttttttaacttttcgttataactaaatttgtgtttttggattctgtaaaagtaatgatggaaaaaaaaactaactc

SEQ ID NO: 179869 - DNA, 757 bp, Cannabis indica
gtttcttttaggcttaaattttcaagtgtgtgtttccagaccagatatattatagtttgtttagtaggaaaattccagtaaatgtctggactgaaagcataatgattcgcatatggcctactagtttgtctttttattgtgtaaattatactcgttatatatatttctttttaactttccatcattgtggaatttcccactttgttatttaagtttgtcttattgtttattaaaaagtgcaaagtttaagacacgccgcctgctttttgaccgatttgggttagttggtgtggtgttttttttttttttttggtagaaatttaaagtacacaccgccgtctgtcttttgtttgatcgatgtgggttaacgtggtctggtgtgcacctcaattgtttttagtaaaaaataaatttatatagaaaaaattaataatttacattacgtatatgtaatcaaaaacagtagtattattcagtgtggtgtatttttaagtattatgtactgaaaatttagtattttttaattataattattatattatataataattatatatattattagaatttttttagtttcatacatgatgttgtcacttgtattgtatggagaattaaaatcacttatccacaagagggcttacaattatagagaattttctgatcagttttattttaaattataatccgtttgatattgattttctagcttttatttttaaattataatctgtttgtatatttgatttttctaacc

SEQ ID NO: 179870 - DNA, 582 bp, Cannabis indica
ttgtttttgccatggttccagctagaagctgcatgagcaaaatgaaagaaaaacggttagaatgaacattatttatcccactttttatattatcaaatgtaaaagatgggataaaaatttccttttattgtagtgtctggtcatatctttgtgtcattattatttatttatatttttcttatttattatttgagtagtcactattctaagtgagtacatataatatccaaatttacaaaaaaaaaaaaaaccaaccaaaataaacaaaaataaacaagtgaatttcttgtattcacatttaagaaaagttatttgtgatataacacactttgtttttttagaagtggttagaatttaaaaatcaactattaccaaaagatagcgaattttctacgcaaaagacatatttagccacattaaaaacctcaacaaaagatgcgacccaacatttgataaaaactatccgaaagtttttgaaaataaatctataaataaagagcaaatagccctccaagttagggctgagcataaaattcaaaaataaaataaaaaaaaaactattcaaaccgacctgctgaacac

SEQ ID NO: 179871 - DNA, 517 bp, Cannabis indica
aattccacaattcacaacataatcatttttgttttcttcattacatttttttaaaaagaaagaatgcatatattatggtagctttaggtaattaaaatagttaattaaaaccaatatggtacaaattaaaatatggataaaaaagcttacatacattgttttcttctggagttttcattcgtttttaatacaagtataaatattgtggacattattattgagtttatattggtggcctactttgcttttgacttatatatgtaaaagaaaacaatacaggaaaattgaaagagactagttgattaaagatccaaattcaaaagtaaaatttttggcgaattaatgagtgaaataatctcatttagtgattcacactttttctttcaaaaaagagattccaagttcaaatacattactctcctaatgtcaaaaaaaagagaagtaaattttaagtggtaatataattattagagtctgtcaaatttgtgtgactttgtaatgtgccatctcagaaatc

SEQ ID NO: 179872 - DNA, 576 bp, Cannabis indica
tgtataaataagagatcacttattaaaacaaaatactaaaaaaattctaatatttttctatttttttttaaattataatactttacaatttcttagaatttatttttttaagttttaaaaaatatatttagagagtatgatttgaaatgcttcttgatttggcttgggttcaggattctcgaactctttattagccaagttatatttttatgaagaaacaacagaaaaagtggattcaagcaaaagtaaatatcacaagtttagatagtcgtggatcaaatagtaagaatatagattggttttttgtccactgctattattattaattattaataattgttttaagtgacaactttttcataaaaagagaattaagcaataataacataattaataataaataatcctcaactgaatagagtagaaagttttggtaacactcttgggcgagcatataatacaaagtctttggattcgatgtgctccaccaccaaacctatccctacttatatacaaatacacatattacatgctacatattctaggagaatgaatcaaatctgcgacttcgacagg

SEQ ID NO: 179873 - DNA, 920 bp, Cannabis indica
gtttacaaatatgagattttcatcttcttttacaaaaatatggcataaaaagaccataaaaataaaaaataaaaaaaaattaaaaaaaactataaccccttagtattatttatttatgccataaaaaagtaaactattaaaatttctcatatattgtgtaatttctattttttttgaaataatccctatttttatacaagttgtgatggcctttatatttaaagaatttttgaaaggaaaattttcactcagtactatttttttttttcaaagtttatatttatactttgataagaaaatttttacattatactttccttacataattttttttttcttgtgttactgtttttaacgtattaaagcttctaaaaaagattttttttttcttctttatatttttttattcaattttagctgactttttttaagtcaattgctgacctttttcatatttttctaatttaaaaaaaaaaattaaaagtactattttttatattttttttatttttacatgactaataaaagtagtatatatatatatattttttatgttttgtagtttattcagaattactttatgaataatttgcataatttagcaagatttatgtcctattatttttttttttgttgatttataattgtcttttttgtaaagttggtacaataaaaatgtaaaaagactccgtattacaatatttttgtaaactttcttcaattttacaatatttttaaactttttccaattttagtgtattttacaatatttgcagcactcatatactttgcggtacaaaaagcacaattttttttgggaaatttttatatatatacattatatacattaatattacaaaaacaacgttatataaaaacaatccattcatataccgtgacacgtcatcaccataccgtta

SEQ ID NO: 179874 - DNA, 987 bp, Cannabis indica
ttgaaggtttacaaatcaaatccaacaaggatggtcactggcttctcgatgctaaaccatctcctaattcttttgtggtcttcgcaggcgacattttaagggtacatatacttaattataattacttatatatatatatgtatattcatatataattactaaaatatattaattgtttgtatatatatacgtacaggcatggagtaatgataggatacttcctagtgaacatcgagtgattatgaaagaagggaataaagatagatatgtaattgcactgttcacatacatagatggaattattgaagttcctgaagagatggtagataatgacaagtaccctttacagtataagccaattgatcacatgacctttctacagagttattttgaagaccaagaactgcaaaaagctccatgtcctattaaatcttttttggtctttaattaatatatatgtgtttaagagccccttattaattagttattgtgtgtgataataatattgttatgtactttgtttaaattaatgtacgttctctataataaataatccagtggtggttatatgggcctaaccatcatgcatgtcatttgtaactgtatgtgtgtacgtgacaactatatatgaatgctggtttgaataataaactatatattttgaagatttattttctgcattgtacgtacgtaaactatttcaattttctcaaaaaaatttagtgtgtgttttcacatcacaactaaaaaaattgtattttgcttttaaaaatagaaaattattttttttgagaacaattaagagtgtatgactttattttttgaaaacattttttagaaaacaaatttacaaaaaataagaatttttactacaaaaaatcttacttttagtcacagcaaaatttgtgactaaaagtaaaatagttatgactaattataaatcattaattctatgttattatgactaaaatgtccgtggctaaaaat

SEQ ID NO: 179875 - DNA, 777 bp, Cannabis indica
ataattaatctttattaaaattttataaagaaataaattattaagtaattattaagttactggttaattattatttatttttattaaatttttaaattaatcacaactattcaatgataatttaattactaaaaaaaatgtaaccggttatatatttaatgtaagtattaaaatttactccataggaatatatatatttggtatacctttttgatccaattcaatatctatatatatatatatgcaagtatatctggaacaaaaatgaaatcgtaaggaatctgattcctccgaatgattaagcacatttgaatccaatcatctgtgttcgatataaagtggtcctaaccaaagaactgttcttagaatttcgatccacaagagcacaatcatcacactcgatcgtgtaaaagaaatattctttccaaaaatataaagaaaatgaagacaaaaatacactatcaaattctctattttattacagttttgctctacatttatataccttttataattcctattatcttataaacattttcttttaagtatttctcttctttcttacatttgtacgtacctttatataacatttaattggtatatttataagaaaaacaatataaataaatattatattttgaaattaaaggatataaaaggttttttttttttttttttttgttcatgtctataaagtaaaggtatatatcctttaatttcgtacagtatcaaactaaaagtcatatgcatacacacatatcttttgagctttttctt

SEQ ID NO: 179876 - DNA, 830 bp, Cannabis indica
  modified_base (785)..(785): a, c, t, g, unknown or other
cctcttcctcatcaaataaataagaaaaaaaatatactgactatttggctttagtaagaaataatttattggcccctttaaattttgttttttgcttattgacccctcaccatgtatttctgcctccgtcccctgtatgtatatgcactttttaatagaccttctttctaactattcagaggtttttaactccaatggcttatgcttctatattgcagataaaatcattaatgacttgtttcctttgttctgttttaatgaatttttcatttcaatgtaaaatcattttagatctattttctaaaatattcaatatataaggaaaatccttacaaaatatagatgtctataggaaagtaattttaattataatctaccagcatcagaccaacaaaactaagatggtacaccaaatatataaatggacatcaagcactaatatcagagtccttgactcaaaaaagaaaatattagagccgttgcatgtatatatgccacgtgccatactacgttacactatgaaatagtgtaggggtttattagtaatttcaaaaaagtgtgaatcactataaatttataattgtaaggctattgtgagatagggattgagaaaatagaacttttagttcaattggagtttggcactgactcgaagagtgtattttaggagatttgtcttgtctcgaagaggactattatctatcaattgatgctttcattgagagaatcccagcgagagatttcattgagagctccacaatatgactgacgaagagcgttcgtgngttcgtaaagatcccataattagatccgtagagttgcgtactgcg

SEQ ID NO: 179877 - DNA, 634 bp, Cannabis indica
atatatatatatatacaccatctctcatttgcctctaaacaattgcgtacaacgaagttattgttgttgtgagaaacactcaaacattccctaaagacatagcattggtagatttctggtaacgccaagaagagtcttcgcaggattgaagtgtatgttggagaagaagagatgattggtacttgaatgagccttcttttcaacaactactgatctcacttctaacttagaattcaatattgtagattatagaacaaacataatttagcagagaaatccattgacctttaataactactcagtattaattatatattactattaagtattcagtaattaaatagcgggtcccgtataatttaagaaaataagttttagagaatatcgctgagactaattttcaaaagataattcaattgaaattatattatgactctacttaggttaaggtttttacgtacatacattaattctcctttatatatagaggttaggctatgtattaggggtgttcatccgatccaatccgcacttttttggtcaaacaacatccaatccgcactaagtgcggattttatattttggatccaatccaatccgcataagagtttaaatccaatccaatccaatccgc

SEQ ID NO: 179878 - DNA, 740 bp, Cannabis indica
aatagtgtttagctattttttctaatgtcatatcattattaatttaatttaagatcatgtatgatataatttaaagataaattaaattttaaaattattgataaccatcataagatgctacttcagcatggtactaggcgctattgatatccaataataatgctctaataaattaattatgatgatgataattatgatttgagttcaaaatggacatgtctcaacccccaagtagttgatttaagtagcattagttccaaacttactcttattttacctttttagacatgggaacaaaatgtgatgaaacaaaaaaggaaaagaaattacatttttcatagttttaaggaaaaaaaaataaactttatagttaggagtacattcctcaaaaattttgtaatttttttttaaattcttccactaagtagactttaagtataggtctagtccctctatgcttatgatcgggcctgcatcttccaaatagcatatactttggactctaaaatatttagctaacaaatgagctaacattagtataaataaaaaacacaaatacattattaattattgagcccccttaggccgaaaatcacaatttaaatcaaattcacatcatgaaaccctccaggtatatataacaaacaaattacaataaatacaatcacacttttcaaaaaaaaaaaatacagtcacacccaaaaataattataatgaataaataaatatcaaataatcta

SEQ ID NO: 179879 - DNA, 862 bp, Cannabis indica
atttattagtttaatggtaggtatgaagaatggtatctagtaattgattgactctatagttttacttgtgctagcactatagttttcattttcagactctagtttcaagttactttatttatgtatttttttttttgaaaattacataaacacaaaattataattttacgtttcaagttttttttttttttcaattttttacgattttctataaaattaacacggaaacaataagattactacataaaagtaacagaaaaataacattcaaacaacaacaaaaaataacatatgaataacaaaaaaaaaatcaacaacaaattaacaaaagtacaatataaaaagactgtattttctataaataaattataaaaatcgtaaaaatatttaaaatttcgtacaactatatttttgtaatttttttgttatttttgtgtatttgtaaaataatcccttttttacgaaaaaataaattaatatatataacaatactaattaactcaacaaacaaacaaatgaaaaataacaaaattttagagaacaagaatagagaaattctagtgaactttgttgaaatttgtatgtaaagaatttccaaatatttcatgataaccccaattttaatttcccaaataattagaaaagaaattgaagaatgttgggtcaaaaaaaattatattactacttttttatgtttatttacaattttatagtctaaagtttttatttaaaaaaatacacttgtaaaattttaaaattacaaaaataaactttgttcaacaaaaagtaaaaaaaaaaaataataacgagaaatcaacctcgcgacagttataaatcaactataaacaaccagaaaaataac

SEQ ID NO: 179880 - DNA, 799 bp, Cannabis indica
catgatcaattcttgaatagatccactagagccatcatgtttgttttgtcccaagtgaaattcgacccacctcttttcatttcttcaacatgcgcttgactaacccacaaggtagaatcaatcaactcctgctgagaaacactattcccacctgttctatcatcaaacctgaacactgaattaaaatcacccaataaaatccacggtttgacaggctgccttaagattagtaagtttgaccaaagactttttctctcatctatggtattaaaaccataaatgaaagtggaacaaaaagcatttgtcatccctaccattttgatgtaacaatggacatattggggattttcagcaatcactataactcttgcaaatccttttctccaaagcaccaacaatcttccttctgtagtaggactcgtgaaatagtcccaattagagcatttattttccatcatatctgtaacattactacccttcaactttgtctcaagtaaagccgcaacacccactttattcttgttcaaaaactccaccacagagtcttgtttattcttattatttataccccgaacattcaaacttgctaaattgcaattatccattagattcaacttgatgctgtttgcctccaatttagaccttggaatcaaagtaccctatctcttagcttgagtaactttcctaggagtttgccatttttccaccaactcagttttttcaatatgtttagatgtaggtacttgccctatagattgaggctgctgctctttttcaccagctgtagcaactggtttag

SEQ ID NO: 179881 - DNA, 789 bp, Cannabis indica
atgattctggatcttcacttgaatctctatgctcttcctgccgctctcagctgtgttttagggttccaaatcgctctccctgacttccaatcgcagttttctatttataattgaaatttagggttcgatggacgaaaatgcccctggtccgtacgggatctcgccgcggccaagcttcctctcgccgcggcgagaatattgaaattttgggtgctctctgtatctcgtaactcgccgcggcgagcctcttcatcgccgcggcgactgatgccttctgaattctcgagatctagccgcggccaagttgtgtttagccgcggccagatatgcacaaaaactcaaaaattgagttttcttcggctcagcacgtcttttaatgaatttctgcacccgagacctcttttattccaaagaacctgaaaacatagaaaacaagcgtaattccgtcccaacacagctaaaaatgcacataaattggatccaaaacataggctaaaaatagcctaacaaatatatagtcaatatttaccattagattacaattcaatttatcaatttagtgtcacattagtaacacattaacaatttttttttttttttaggaaaaatataaataaagaaagatatttacaataatttttatagtttggagtgatttaaaaaatggtaaattcaatcttttggttttagggatgtacattttctcaacctgctcctaatgaggtggggattcgccgtttaaatgggaaacgaagcgaggacaaggattattctttattcttgaatgtt

SEQ ID NO: 179882 - DNA, 1079 bp, Cannabis indica
atgtagtcacccgactccaaaaaaaaagaaataaaaaagaatatgtgtcatctagtgctgtaaatatgagctatagattttttgacacagaggctcaagcatgactcgatttgaaaaaaatatgtgtttagacacgatacggcgcgatacgaaaaaaatatgagtttaagcacgacacgtaagcacgaataaaatagctcgaaagcataacacattaaaatgtccaataattaataataagaacaataatgataaatattaatttctttagtaattaaaataataataatatttaaattataatatttataatttttttataatgattatgtagtaactattatttaaaaagatataaaagtaattaaaactataaaatatacatatattttagtatttaccttatcaactataataaaaatgcaaaatatagagtacgaatttgagttcgtatgaaaaaacaggttggtctatttaaaaactaaatacagttcgaataaagtactacctgaacccgacatatatcgtacgaaattattagacttacaggtcgtatcgggcttatcttataaaattgttgcacgacacgattcatattttttataacacgattcatattttttttaatagcaaggtatgatgcggcttatattttttatgattcggtacggtacagtctatatttaaaaaacaaaaaaaaaaaattatagaccgaactaacataatacataattacaatatgatctaatattaaattgcataagaatataatgagatcttaaatgatgttgaacataatttgtttaacttcccatctttctcgaagagatgaaaagaattatttggcaaatgaatatatgattgaaattttcttatgattccctagaactttcgtagaagagtatttatacttatatattttgagaaagtatatatttctttctttggcacacacatttatatattataaaaacaaatgtatacacaaaattacaacttatacaattaataatcaattatatgaatttcatatatttttatatatgtaaagttaagtgtagatctaaggttgaatagtt

SEQ ID NO: 179883 - DNA, 541 bp, Cannabis indica
ttttgttttcttctttagttaggtttgtcatagttagtttacaatgtttagttaatctttttccatttaaaggtaagggcgaggaccaaagaaaccttttttttttttttttttctttttgtattttggttcaataaaaaaagttctgtttcttcatgtgaatccaatttgtatggtatttgttcctacatatattttatttcattactgtgtttaagtttgggataattctatgtcttagtgttggtgaagtatttggtaacatagagaaactttactacaaataaaatctaatttattgtgttctaggcaattcgaattgtaattattttaactactcacagtgaccaataagttgcctggaataatgttgggttgttgactggagaaataatttgtagttgtttcaaattttatccggtatattaataggagaagcaaagcaacacttcactgaatagttactaatgagtaacctgttagtagaatttgtgaacaattatggttcattcattggcatctcttcagcgatgttgttata

SEQ ID NO: 179884 - DNA, 622 bp, Cannabis indica
tgattgtcaaagctactagaagagtggaaaagagatttgcatcacgtgatccattttttagttattaagaaatgaaatattgatactttgtaagaattgattatttgttatattatgaattttgttagtactaaaatgactttttcttataaaagacactaatgtgtgagatttcctatataactctacctaattacctcccccatatgttatatgcctctttaattagcaataaccttttagttattaactagatcatcaccaattagccatattattatctatacaaaactcttttattatttgattttagtttattttttaagaaaaggataataaaaaattaccttaactaagacatttcattttattgtaaaataacactactattttgttacaaattggtgattaaattacaaatataagatgtaaccgctaagttattttattttatttttttatttttttgacttttaggtaaaaaaaaactgaagaaaaataataataattaactatattgttttaatttccttttataaagaaactaatttggttgtaacttatattggccccactacaaagttgtgactcaacttaatttagtgataatttgtatttaaat

SEQ ID NO: 179885 - DNA, 1201 bp, Cannabis indica
tgatggggatacaagagtgaaaagatacgatgcaaagcggggaccattacccgttatattaccaacagacaaacctgttggtaatatttattgactatttctatttggccccctcatcaatatagaaattgtctaattggtatccacatattaaaatcatgacaatcatgcccttaagtcataaactttattccaaaatagaccacataaatttgacttatttatttgatgacccaacacacattttatatatacaattgtgaccccaataaattctaacattttctctataaactcaatctcgtcatccatttcttttctccattttgaagaatgtggactattgagtgttttactataagtgagaggatccacaaaatgaccaatatcatattcttcttctccaaggtaaacacaattatcatcacaccttgttgatttcttttatccttgcaatgtttttagaggaggtgcttctagaataacttctatttgtttatcattattttgaatgacatcttccacaactggaattttaccgataataggaccctcatcaacaataaaaccttttcaataataggtctttcatcaataaaaggtcgttcattagtaataggatcctcgtcatctttgataccaggagcaatatattcatcagcaatgggagcaatatcaactggagtaggaataagactgttattattattatcatctcttaaaaaagtcaggaataaaaattcccttagatgacccccgtttcaagatatgtcgaaagaatattttcagcaacataaaattctagaaatttagcagtctgagattcaacaattcacgtaccacgagtaggacagtaaaagcggagtcttttgagtgcattggataatcaatgaaataacagcgaactgttcttaaatttaactttttttaagttcataagttcttacttcagctggaaaaccccatacacaaagatgattcagagtaggttttcttccagtccacaactcaaaaggggtttcgggaacagatttacttagagcacaattcaaaatataagtagtagtcatgagtgcttctccctataagagctctgacagatttgatctgcttatcatgttgctaatcatgtcgattagagtgagatttctactttcagcaatgccattttactttggtgaaccaggtatagtgtatttga

SEQ ID NO: 179886 - DNA, 698 bp, Cannabis indica
gattattatcatagttatagtagtattggattattcccaacactgaataagagtcatcaacaatgaaaatcggtataataggtaagcgaaagtttttcctccaatgaaaaaaaaccgttggaatagctattgctaacgaaagaaaatcgtggacaatactaaataaaaaaaaattctcgataatttataagtgttggaaatactaagtgtacttaacaatttatcagtgttggaaattaatattctcaacagtgataaattattgggaaaaattcttttttgtattctttttagcatgttattttgcattagattttgttttgttttattttaattaattaattaattagggtatatctaaaaatagtgtaaccctaaatgaaaaaaaaaaattaaaaaattctaaattttttctctctttcccgatcctctctctctttctctgttcttgttgtgcggcgtcggaaccaagctagggccaaccacctctggctgacgacaaacctagttcttctccctagctcacgccctccctagcactccttctcttttttcgtccatctcccctaacttctctctctcatttctcttggctccacaccgatgagccatttctgacgacatttggctaaaatggaggcaacgaatggtctcgttgaaagcccaaatccctgagccccttccaccctctctctctc

SEQ ID NO: 179887 - DNA, 571 bp, Cannabis indica
atatcgccaattgtccaatatcacaatcaccaagtgaaaaaaaaaaaaaagcaaaccaaccaccaagtgaaagctccaatctaaaaaataaatatatatatatatatatattatagagattagagaaagagaatatatataaacaatatataaaccttatgtaacatttatattatataatatatataatatatatatacctggcttttttttatgagaattgatggcagccaaaaattaaaattgatttaaaaatatgagaaaggaagagaatgatactggttttcttaaaaaaaagagaatgagagaaagaggaagaatgagataaaaatgggaatgttaattatgtatttatataataattgtacataacattaatattaacgttatgctatggaaaactaccaataacaacctttcctattctcaatattaattctttttatattttcaaaataataataataataataataataataataataataataataataataataataataatcccctattattttggggtccctgtgcaactgcccaggttgcacaggttattagccgc

SEQ ID NO: 179888 - DNA, 658 bp, Cannabis indica
aacataatgtgttctcttattatttttcatgtctggatgtaagagataaatataagtttttgttttaacatgtaaaactatattcttttaattgttgaacaactagtgtagcgtatgaacaattcataacaaactttacaacaacatgaaaacaacttgatattatatattattttcaagttgaaataagatgttgcgaaaaaaaacacaaaagaaacttcacactaacatgaaaataacttaattattcttttgtagatattgtgtagtttttatttttgttgttttcaatcaaaacaatattaattgatgaacaaataattatagcaaacacacaaaacaactcaaaatcaactactgatgtttttattgcatgagtatttgtaaattttcttcatatttgcaatatcttcatgtcacattgatcgttatatttgtgttgttattcagtcgcttgtacattttacttttattttcaggaggatgaaaaaaaaacgtaaatgaaacttaaaaacaacgtgaaagcaacatatttttgtattgaaattttaacacatactcattgttcttattatatttcccagaaattcaatgcagtaatttcttcaaaatttttcgaaaattataaaaaaataactgaaaatatatgtaaatcaac

SEQ ID NO: 179889 - DNA, 668 bp, Cannabis indica
ggctccgtcctcatcactaccgcccaaggcacttaagtttttctcaaatggattcgatctcgcctgggcccgatccgccgactccaaatcaggcgccgtcactcgcctccgtcagatggtcgcttcctttaagccagtcgccgccgaactaatctccctcccgatgccgacgatcgctgcccttcctggccacgccgctgccggaggctttttattgtccctgtgccacgactacatattgatgcggagagataaaggtgttctctacatgtccgaggtcgatttaggacttccgtttccagactacttcgctgcagcaatgaggtcgaagataggatcagtttcggctcggcgggacgtgatgctcaagggggcgaagatcaagggcgatgacgcagttagaatggggatcgccgagtcggcgcacgatagcgcggagaagaccttggaggctgcggtgcgcctggcggaacaattggccaagaggaagtggaatggcgaggtttacgcggagataaggaagagtatgttcccggaattgtgcggcgtgcttggagttcccacaaaagttattgccccaaagctttgatggaaaacctttctggattttcaatcaattaaaaagttttaaggttttttcattaaagataatatcccgtttcaatgat

SEQ ID NO: 179890 - DNA, 572 bp, Cannabis indica
tttaagaacattatttataagtaatattatcactattattattgttgttgtttggattgggattttatttggggtttgtttgggtaacagggttaatataattctaggtgtgaataagaatatatgatgatgatgaatatggaagaacttccaccagggtttagatttcatccaacagatgaagaattaataagttattatttagcttccaaaagtttctgattcttctttacttgtaaacctgttgctgttgttgatctcaacaaatctgagccatgggatcttccaggtatgcatctctatatatatacattattattactgaaaaattgggattttccatgactacactgtaaaactgtcttggcaatactagaagaatttatggatatagtttgggataatatatgaaattaaataagtctaatagtttgtggtatttatcaaattaatatgtatatatattctaatttgtgattgattaaatctttatatatattatacaacaaaaatatgtaatatttttttattatgtagaattaattaattttgtaatgtatctatagttatgg

SEQ ID NO: 179891 - DNA, 749 bp, Cannabis indica
ctcacgatcgtggccaactatggtccttaaacccccattcaccttgaatcttcatctatcctcagttttttcgtatttttttggctcttgcctatactttaaagtaaatttattgttagcaaaatgagcaaaaaatcacaagttaatagatattcaatttttacttactcttttagttttttcctagtatgcaataacctctgcctacacctctggtgtcaccatatctagacgtgatcccctactcacttccacctctctatatttctgaatattctccttccacgcctttttcgtatccgctctcgagtcacatataaccctttagacattaatttaacagcataatcctcgaacataggattattagttgggaagtctgaaaaaaataaacattaaagtcatatatattttttgtataatagtttagtttgatctattgcaataaaaatttgaatgttacagctaatttgtcccacatagtctaaatgattgtctctttcacgtcctcaaactcaaacttgttcaaaagaatagtattgtgaacaagaaacttgatataattgttaaatatgttgccatataatcgtctactagggcctctgttcccatatgaaatctacacttattttagggtaaaattttaaatgggtacaaaagggaaagtgtgaaaccctaattttaacaatcatatttatctctcatctttgtgcagcttcccctctcttcctcgtgcggcgccgaaggct

SEQ ID NO: 179892 - DNA, 777 bp, Cannabis indica
atatataacttaaataataatgtctacgtacgtgtttgattgtttgattatatatatatattcatttcaaatatatagttaattattttatataagggatattaaaaaattctcaaacatatatatactccatagctagctagacataacacacatttaaaaattaattggatatatgcatgcatgtgtaatatacaacatttactttttaaattattattttcataattttacgaatatggtatggaaactttatatatacaataaatatatatacatgatttattcagaacttgataaaagtgactaattaatgatagtgattctatatatatttatccttttcccttttcttacttcatagcttctttaattatatataaattatttttttaattcgtaaatatatatttttatcgtactttgtagtgtacgtacgctctgctcgagtttttcacacataaatttattatatatatgtatttgaaaaactcatgagaatcactacacattaatgttttgtaatatctataatggtgagacttaaatcttttatatacatgccaactatatcttattccattgccatcttacaagttttttagaatatatataattgtacataattcatcgacaatatccctcgtaccaaactctccctctaaactaatctacttcaattaaaaaagtagttgatgttgaggttatccctaaaaaacagttcttagctttcaccgttcggaaaaaaagaggtctcaaaatacaaaaaaaggcaca

SEQ ID NO: 179893 - DNA, 624 bp, Cannabis indica
atatagtttttattgattattcaataatattttagtttcactcatcacatgtaaaacaagtttcaaaacattaaattatttttcaacactagttgaattattcataatttattaaaatatatttataggagattctaaataattaaatatacatggtaaaaaaataataaaatataaaagaattgcaacctgttcagccatttctctggtaattgacttaggtttaaagtttattattattgagagtgactcgagactagtgatcaatgtcctcaatgggaaggagtctcattgggctcttgagaactatatctccttttgtttgatatcaactccttcttttattagttgtaactttatgaatattagtagacattgtaactttactgtccataatgtggctaagtgggcgttttcccaccagatgtatggatgtattccggtctccgcgatctgccggagaacctactatgtaatgacctcaccatgctaattttacaaaaaaaaaaaaaaaaaaaaaaaaaaaaaaaaaaaaccctaaatcaatatgccaaaatataaaaataagttgttttgatgttttttcccaaccataaattatttggaattttttttaaaaaaaaa

SEQ ID NO: 179894 - DNA, 712 bp, Cannabis indica
tagtagtgatggagacaagtacaaagggaagtatacacaggctctctctcagatcaatgacttggaggaagacttgaagcaagcaaagctggatgtcaatgattcccaacaaaagctcacccatttatctctagaatacgataagcagactctaattgtgaatgaaaaaaatcattcttaaatcactttggagagagaggtcaagcatcatttggacttacaaaaaaaggtagaaggagctgagaggaaaggtatcaaaaaaagggccaagacgcgaaatttccctaaatctaacaattaagttaataaatgtccctttttataaaaaattaacagaatgtccattcacttaaaaatttgatgatgaaattacaattataaccttggataataaaccccaactttctaccctattctcattttcttgtgtccagagaactgtctctttcttctccctccgcaccaagacgatctcgcctctaccagtctgaccaccccccttgagtattaccaccacaaattgtcaccaacccttgccagttaccatcacagatcatcaccacctgtttccatttaccatcgtagatcgtaactgtcccttgccagctaccatcacctcattataggttattttttcgaactattcttactctcttccttactttgttgttaaatacttgaaatatccaagaaaatatattgatattttaat

SEQ ID NO: 179895 - DNA, 839 bp, Cannabis indica
  modified_base (709)..(709): a, c, t, g, unknown or other
atcaagtgatgacagaagaacacgatcatgatggtcttcgtcaattttctgatcagaggctacaacatccttattattatctttattaaaactgtgtccaagtccaagagctgagaacatcaaagggtttacttcttcttcatcctcggcacaagtgtcatcgctcatgctgtcttcttcatcaacatcactatcatgactactgtcttcaacatcatcaactgaaaattcttcatccttgtcttcttcctcctcgctttccagaaccagatactctttctgtgaataacattgctggttcaatggttttcgaggatcaaaaccaaacgtccctattgctaaaatgccatctttccaaccatcaagtgcatcgattaggacaacctttttcagtaatgcttgagtgtccttatcattgctatgatgaagtaattcatcatcaccactcttttccacttttcgagcaaagtactcgtgatctgatcataaaaatgtaattagtacttattgcattataattaagttgaatcagtgaaagagttcttaccctttgggaggggatcatgatgaaaccgtttatgaacccaattgaataactgacatgatgaagaatggaaaattgtttagaagaaattaattcaaaaacaagaaatattagacaagtatactataaaaatcatcatgtaaatcaccttgttattaccttctntgttttttgaaattggaaaaagtttgtttagtaagaaattaaattcaaaaactaaagaaatattagacaagtatactataaaaatcatcatgtaatcaccttgttattaccttctatgtttttttttttc

SEQ ID NO: 179896 - DNA, 998 bp, Cannabis indica
cgatgctcttcatagtagctcaggatgtgatatggactgggcgagtagatacagtatagcagtgggagtagctcaaggtcttgcttttcttcatggaatttcctctggtccaatgctcctgcttgacttatcaagcagaagtgtctttctaaagtccatgaaagagcctcaagtgggagaaattgagctctacaagattattgatccatcaaagagcaccggaagtatttccactgtggctggttcagttggctacatccctccaggtcagtagtaactatgtgactacaactcacactagctagttttcaatccactacacagcccatattcatatgtatatatcagttaatgattgatattgagttctgataatactggttaatttgcagagtatgcatacacaatgagagtgacaacagctggaaatgtttacagctttggagtaattttgcttgagctgctaacagggaaacaggcaatgagtgaggggactgaattagctaagtgggtattaagtaactcggttgaagaagataatgggagaacatgcttgattttagcatcagtagaacttcagtcttagccaaaaagcaaatgcttgctgtactaaaggttgctattggttgtgtttgtgtatcgccagaagctaggccaaagattaagagtgtctacgcatgattctcaatgcaagataggtgtgagagattccattttaatcgagtcaaaagtaagtacgtatacggttttgcatgtaaaatagtaatatgatgagtttgtttagttctctactagattagaagtggtcaaaatttgttgttgccttttggagtattattacatcatttaaatatatttatatatatatattctagcaaatgaaaagaggaaaaaatgtaaaagtaaaggaatgtgaacgagttttatttatgttattaattcgtaaaacaacaacaatgataggaacaatttatacttgaacggcggagactgtcatg

SEQ ID NO: 179897 - DNA, 522 bp, Cannabis indica
ttgtgactaaatgtaaaaaaatttatagtactagagaatttgaagttaagacaataaaattatggaacccttacgatatttttttttttttaaatgatcatataagttactaatttattaaaaaaaaataatctaatatttaaaatatttaggcagaaaagtaacaagagagtccaatgtttaaaaaatacataagcaatttgactaattaaatatgctatttttgatgcaaaagtactttaaacttttataataaatcttttcagatcatatcacacttaataaataacatgctcaaattaagggcatctctaatggagaaatccgaatttgatgttaaattaacaccaaaaatctactatttcaacactaatttttttttttcaatttctaaccacaacactaaaaattacatcaaatattatattctttattattctattatttttattaatataataagaatattttaaaactaaatatttgttaaatccaataaatcatattagtaaatatttaata

SEQ ID NO: 179898 - DNA, 713 bp, Cannabis indica
caagaaaatacatatagtttagcttagaatataaaattccttaaactatatttttcttaaattaatttcaaaataattaatattttcttaacgccccaaccacgtaaaaatccttctctaattttcttacagctcgctaactttataatattttattagttgccgaaaacctcggtcaataatacatatataaataaaaacaaaattataatagaacaaactctattactaatttaaagatacaactaatacatttatatatatatatatatataatgtaatagctaagtatttaaagaattataatatatatatttatagtgtaagttaagtacttaatttattaaaaaaaatacatggtattttaataaaaataaaatgtgaaataatttttttttaaaaaaagagattaacttttcaaattaaatttatatgtatagaaagtaaataaaataagatatttatttattaattgattttttttttcttttactaacttaaattattattttcttttaccaataaattagtaacatttattattgttaattatattttttatacatttggtttaaaattatttactaatttgttaactttcatcttaacattaaaaattaaacatgtctcctttgttagaaattttaatatgaaaattattttataaatatatattataaaaaataatttaaaatttaatgtgtattttgatt

SEQ ID NO: 179899 - DNA, 1240 bp, Cannabis indica
ctttagtggatagcaacttttttgaatactcacaggagttttgttaaaaagtggggctatgagaattgggtagagtgtcatcatcacaattgacagaatgaacataaaggcccaataatatatggccaagtatggacctcctttctgtaattacaacataattttttaccatttcaagagaggaggttactcaagcatagtgtaaaatagaaaacattattagttattacaccataatatatttaaagaatttttccacacgaagaaaaacaaaataacgcatccaatttgttttgaatacagaaaccagagcacttatctagtcatcccttgtttctttttggttatattaataatttcagcactgtttctttaaaaataaataaattagattacccttacctgaactatgaaaataattgcaaacacaataggaggacccagaatgatggcaagaaagattcctttgattaagtctctaaataataaccataccatttgctaaaaaaaaaaaaaaaaaagtaaaatatacatgtgtgcgagtgtgttagaaaataacaaaaaaaaaaaaaaataataacgagacaaaatcagagcaggaaaccaaaccttattaaaaccatgacgggcctcaatcacaaaagtagaataaagggaaaatggcaaatcagtgatctgcagacattccaaagaacaaaatgtcggtaattcataactcagaagtagatcctaatgcattataagacttcaactttatacaataaaagtacccacacaattatgggtttggttacttttacactacatacaacactcttataaagtacactaatactacttccttgaatgcaattcaatgtttggagaaatcatgtcccacctgtgaccaaaacataacaccagctaaaaatgccagagtgtgtagtatctcattctctgcattgagaccagctaacaccacaaaatcccctgatttctgcagttgaaaagtaggattaaacatccataacacaacagcaaaggaagagacattaccaaaattccatcactaaccttccaaaaccaaggcaataccccaaagaacaaaattgcagaatccattagtatggtcacaaactcatggacaaaatggaagtggctgaaagttaataacatccatcagaaatgtgaacatgcacacacacacacgtatagccataaggggccatataccacacactcacgctgtgaattaaaaacc

SEQ ID NO: 179900 - DNA, 1130 bp, Cannabis indica
gtagtgttcagattgttttgaacactactttcttgattcctacttttaaagtaattcagtttcgcttccgcttttagttcaataatgattttcttttcgttttgccaattatagtgttgacattatgtttgactctgaataattggaaactgtttttactctgatattcttttcaaattatcattgacttccttagcttcctttttcaatgctgtgaatattgtgggtaagaaatcttatattaagataatatccttattattatggaacgatagattgggtcatatttctaaagaaagagttgatcgattacttctagctaaaattcttcctcctgttgatatttctggttgggatacttgtgctgattgtacttgtggaaaattgactaaaataagaaagcagactgctaactgtagtcactctttataagagattatcgacactgacattagtagaccttattccaccacgttgtgcaaaaacaagtattttataacttttatcaatgattttcctcgttatggctttacctacttgattcaagaaaatctaacgctcttgataaggtcaaaatcttttgaaatgttcttgagaaacaattagaaggagtcatcaaagttattctttcagatcgtggaggagaatattatgatcgttattcagaatatggactacacatgaggccttttgttgaatattttcaagaaattgtgtagtttctcaatacaatatgtcaggttcacctgagcaaaatggcgttgctgaaaggagaaatcgcactctcatggatatggttagaagcatgataagtagatcaaatcttccagagtttttatggggtgaagcacttatgactgcaacttaaatctgttcccaagaccccttttgagttgtggactgggcggaagcctagtcttaatcatcttcgagtatggggttgtccagctgaagtaaagatttatgatcctaatttgaaaaagttagatccgagaacaaatcgctgttatttcattggttatccaatgcgctcaaaaggctatcgcttttactgtcctactcgtggtacgcgaattgttgaatctcagactgctaaatttctggaatttgatgttgctgaaaaaattcct

SEQ ID NO: 179901 - DNA, 613 bp, Cannabis indica
caccagtttcgtaacaaaatcacaaatcgatacagaaatacgggttcgacttagcggcgccgatgtacactcgcaacattgacactatcacattagatgtttatgggtcccgtgacacgaagtatgtaatcaagttaggggtagtgtatcgcagtcactagtttcgtaaggaattaactaaccgataccgaaataaggttatagttagtggtgtcgatgtacactcgcagtagtgacactataacggtagatgtttaggggtcccgtgacacaaagtatgcaatcaagttaggtgtattgtatcatagtcaacagtttggaaacgaaatcaacaaccgataccaaaataaggttctacttaggagtgtcgatgtacactcgcagtagtgacactatcattgtagatgtttagtgtaatatcccagaaaataaataatatttaaatggacatattttattaaatatgtaattacttgggaaatgaagtaggattatgatcttacttaggtaaattgttgagaaattatttaatgaaatacgctatttttggacccggcaattgtggaaatttagctatggggtgagtaatgtcatgacattaaatgaaagaatt

SEQ ID NO: 179902 - DNA, 1121 bp, Cannabis indica
ttatatttatttgaaacatacctctttttatatgtattgtattcaaaataccctgacataagagagtcacagggagagtatcttgaagtgacaggggcaaaattggtacaatgtttaaaaaaaagaggtaaaaatgatagactttaaaaaagagagtaaaaataaaagaggataatataaaaagggtataaagtgtaatttccttcgagaatagaggcaagtagtgggctcagcccacagccgaaataaagcccatgaatttgatccatggttgcttattgtacatcctttattatttttgctgcacctataaagagttcagatctaattgggggctaaaaggttaagagaaatcctcttttttttttttcttttctatgaatttataataatggcttaatattgtcttaataagtgtacaattttcattttccaaacaataacaagctaacccaaacccaacttctaagtgcaactccaatcagactttaaatttaaagttacagtagaactattaggccaacgtagcattattttattatcacatatataattttagttacagtgcacagcatatatacagtaatattatagcaactgtatttttcattaatgttttatagttaattgcgttaaatatattatattttattaataaataataaatatattttttagtgtaaatttggttgaaataaaaaaaataattgaggttaaatttggtaatagtacgaaacatgtataagttggagatgctctaaaagatgggctacacctacacctgcatgacttacataggataggtagacctatatttgaatttcttgtaatataattgtaataagtccttcacacagtactagtgtgaaactagacagctttgtctatgatatatatggtgggactgggaatgggaagggatcggtccacaaacatatgcttatctctaatgttgaaataacttcatatatatatcttaggtaacccccacgtgtctagtacttcttttcttttatattacgtatatgtgcacgtgcacatttagtgtacctttctacatgtccacttgtacatataattcacacttgaaagtttatcacacaaagctcaaataatatcat

SEQ ID NO: 179903 - DNA, 719 bp, Cannabis indica
agtaggcctgtaaaatgtcagagaaaactgggctcttgggagggtcaatgctggagctgaaacttggggtgtaaagttaggagttgtcatggaaagagttggagctgtagggactctaaaagcttgtatgtaagcatcctcaaggttgatgaagccttgggcctttgccataaattcactcaaagttttagctctctttctctgcatttctccacatagcaaagaggtaatacctaatccagattggagggccatcaacttcatgtcgtcacaaaccttagtcttggcagctgcctccatcatcctctgaataaaagccttcaagctttcattatgatgttgcttgacattggtaagagaaccaacttccatatccttttctcacacatcaataaactattaacaaaaggtcgaaagtaaagctttccagctatcaatcgatctggagctaattgcttctaccaatcttttgtagacttgatcaaggttagggaaaatcataagcacttggagtcatcactaactcaggcgacttgcatcatttttttatactttgccaaatgtgcacacaaaccagtccttccttcatgtaactcaatgtggggcattttaaagtttctggaagtggggtctccgtaatcctccttacacagggttttgggtctttgtcttccgagttcgagaggactccgcttcgtttcttgaccaacttggtcaga

SEQ ID NO: 179904 - DNA, 512 bp, Cannabis indica
aaaataatttataaattatatttagttataattttttaagtttctaactaaataaaatatagatatgtaattaaaataattacatacgtaataaaatatattattttttaaatttatttatgtaaaattaataattttattttaaattataatttattaataaacattatatttagtctaaaatcaaattatattataatatagtattattaattgtttattattattattgttagattaatattttttgatattttaatttttttttctacaaactttatttaattataacttctcaatctctctatatatatatagaagaggtttcaatcgttacatttttattgtaaccatcatggttacatttttttagtccattggattactattaaatggttgtgattaatttaaaaattaaataaaaataaataataaataacttgtaacctgaaagtaacctaataatttatttccttataaactttaattaagattaattatattttaaaatt

SEQ ID NO: 179905 - DNA, 649 bp, Cannabis indica
cgggtgagagaatgacttctcgaggaccttggaaaggaattgcatcactttactttttagataaagtgaagcgcgcaaagagaacataagcaaaccgatggggaaaaaaaggaaagttaaattatggaggactacgacactgttatgggcggtgtggacagagagaaatagcagaattatttatggactggaaaggtctgcggaggatgtttgggaaagaatcaaattctagactgtcacttggatcttaagaactaaacatttcgaggatctctcctttccagacttaagcaggaattggggtgtgctgttgtaataatcctgggattttgtgattgctgtcacaaattttttctacagttttttcattttttatttttgcttcctgttttatttactatggttttcctccaccttaagtgaggcttgcaatatatatcgagggaatatcagtctaagacaagtgatctctttctccttttttcaaaaaaattatgtgatgaaaaattctgaatgcttacaaagaaaaatcttagaaaggtaagtaaaggaaggtcacaataaaagctacaggtgattaattgcaataaagaaacaatgattaactgcaaaatcagaaaacaaactggctcctgtatgtacctatgct

SEQ ID NO: 179906 - DNA, 531 bp, Cannabis indica
ttttaaaccctatattttgtaaatattattaatttattacataataatattttgagctcgagttcagttaaactattttttattctaactcttgaaaaacctcttttcaactctaaaattttctattccttaaatttaataattatagttgatttcttttccattatatttggtttcacaaaacacagaattcagaataatatttactattttaactttgactaaaatagcttaaatattaaaatggaaagccatttttttcttaattttactctaagtatgatctctactttagttaaaatcaattattttaaataaagttaatttgtaaatatagattaattaattaaaataataaaaatcaattataaaactacccataaattttcaaaaaaatctgaataatttaccattttaaaaataatattcacatattttattgcaagtgatattatttttaaacttcttaaacagtttttttttttttttttttttttttgtctattttatttgaattacttcatagtaata

SEQ ID NO: 179907 - DNA, 761 bp, Cannabis indica
gcagtataaaaattatttttgtcatgtgtcagtatttttgtaaaaattgggtcaaaatacagtatttttgtaaattttccttaaaaaaacttccactccctatagttcattaattttcaccaaatatcttttacgctttattttggtaactcataattatctcaatatttttatttatcatttacttaaaaatttaaattataattctatttttttttttttgttttacgacggtcggtagtactaaactaaaactccaaccaactagtagttaaacttaaaaacgaaacgacgacgtacttacctacctaaattaacggtccggggccggggccggacccaacccctacccggtaaccgaaaccggaaggtaagtacgtcctactacgttccgttaacccgtaacccgacgaaacgaaactagtcgtttcgtttccgaaccccaaacctaaggtaccgggcccgtaaaacttaaaacctaaccgaaaggacggacggaccccgacccctagggtacgggaaaaacctaaaacgtcccgtccccggtaaacggtttaaaagtttaacgaaactaaaaagtaaacgtacttaaactaaactactttcctttaacctaaaaccgaaccgtcccctaacccctaacctaactaaattaaattaaacttacgtaaggttaaccgttacccctaccgtaaaaagttaaaaaatttactaacgaaaaagtaaaagtaaagtaaaaaacttttaaaaaactttttaaa

SEQ ID NO: 179908 - DNA, 750 bp, Cannabis indica
ttatttcaaataataatctctaccatacgttgttgaaaagaaaagatgaggggacataatatttaaactcgttttatattatccgaagagcatccacactaataatacaaaaaataacatagggtatgtttggtgattatttttttttaattaaatttctatttttttaattaaaaaagtaaaaatatattccaaaaataaattctataaaatttttactttttaaatttttaattgtgaattaaaattttaaaattttttcttaattaatactttacactccgatcccaacctgaatcttgagatccgaactctgcctcgatcatagtcccagactcggactcattgtctcaaccctagacccggacttgaatatatctgacttaaataaaataaaaaataaacaaaaataaattttagaatacaattttatttttgttttaaaatcaaaaacaaagtgatcattaaacgtttttttttttttttttggttttttagaaacacaaatttcactttcatttttgttattaaaatttaaaaataaaagtgttatcaaacgtcgctataaattaataagagtatttcttaatttcttttatttatttgtttcaaatgtgaatgaggaaatattaaaacaatagtgaaagagaaaggaaaatggcatgtaaagaacaaaaaatatagtctagctcccaattttctaaaataataataaaaaattatatatacattaaaaaaataaataatcat

SEQ ID NO: 179909 - DNA, 512 bp, Cannabis indica
gaagcttatgggattactgttggtctaaaagttcctctttttcttgtaccgataccctactcaccttaattaattactcttaatcttaatgtactttttaaattaaatatgtcgattaatggtaggtagctattatctgtattaatgcatttctgttttatgcttgaaagaatattaatattattctccaataatgaatggaattattattattgctatcctgaatttttgttgatacacgtggtttcctagcaaacaaataggtgtcgagtggggtctagttgagaggtaactagtgactaattatgttggggctcaagaacatatagctctgggagaaagatatcctctcgtaacgtcgtaccggtcctatggagcatttggatataatttgaatatgattgaatctccgcgaagggtcaaaacctcctagatccccttatcgcattggtcccaacttgtgcaacacattcctaggagtagtactattgtttgtcccctccgtacaagtg

SEQ ID NO: 179910 - DNA, 1517 bp, Cannabis indica
gattgttgaagaaagagatagagaaagttaagaaaaaataaaaataaaaaaatattatttatttatttattaataattttataaatttaaattatttttttaattttaaaataaattctaaaaagatgtttttataatttttaaataattatattaggtggactaatataaatatgccacgtgtacatgatgtacatataggcagtccatatcagcagttaactgaaataaatagatgacaccttaaatttgataacggtttagcagtttggagagttttaccaccaaaatttgagattggatggttaagtgcaagtgaaatgatagttgggagggtttagccgcaaattactctatataaaatatacaaaaataaaataatgattgtaacactaacacgtgttattgattggtttgagagaaaagagagtgtaacattagaataataataaaaaaaagtagtattaaattataaaattaaaaaataaaaagtaataaataatcaattatatttaattaaaatatatatgctcaggattatttttgtaacgatcttatatattagaatttatttttaaatttagttttttttttttggattaatttagtaaaagttaaatattttatttactgcacaattatttttttcacatgcatgtaactgtttaactttgtttttcatactctaaattatttgattttttttaaaaattaaaaaataataataaataattacacagccttaataggaacagggatatttgcttgccaaataacaatattaaaattcatccttaaagcaaatctaactaaactatgtatcgtatttattagcataattttttttcacataaattttcaataatttaaaagcagcattagctaaggataaatcatatatttttttttagtttaattaggatttttatccctgaactttgaacatgtactaaattatgccccctgaacttttaagatcgttaaaaatgtcccctgaactattgaaattgttagatttaaggacttttgtcaattttttttcaattttactattttaaagattgtttatgtactaaatcatgctcccaaactttaatatctaccaaatcatgcacctcgaactttgacatgtacaaaattatgctctctgaactttcatccatgttagacttttttactaaaattggaaaagaagtcattaaatctaataatctcaatagttcaaggggcatttttaacgatgttaaaagttcaggaggcatgatttagtatatgttaaagttcaggggcaaaaattctaattagccattttttttatatataaaatatttattctttttctttaatataaaaaatataaataaataaaaaaaacatgtcacattagtaacattacacgtgtaagaaactaacactgtgcgtttcgtgttcgtctttcgccgattttgggacggtacggacgacggacggacgacgaaaaagaaaagaaccgagaaatcgcagagcaatgatagtct

SEQ ID NO: 179911 - DNA, 1275 bp, Cannabis indica
gaaaaacattctctcaagtgtggaatctgtattaaatacatccattaataacaagactcgtggactaaggctcattaacgccccaaccacgtaaaaatcctcatctcgctttcttacagctcactactataatcatattttaatagttgccgaaaatctcggtcaacagttggcatcaagattaagcattgttcatgtgtttgctatctcaattagatttttcttttactatatatgttgatggcatactcatagttggcaaagacaaatctaccataaaccatttaaagcaaaaacttagtagtgagtttgagatggaagaccaatgtgcagctaacaaaattctgggcactgagactataaaaataggccacatacaatcactttaactcaggaaggcatctaaaaaaaaatgattgagaagtttggcatgaaagattctaaacctgtttctagaccttattccaaacagtcacaagaacaatctcccaaaatagaggctaaaacagtaaaaatgaagaaggacgttccctatgttagttgtgttagtagtctcatgtatgccaaggtctgtacatgaccatacatcactcactgtatgagtgtagtgaggaaatacattataaatttaggagatcaccattagactgcactcaagtgcattatgagatatgtcaaagtaacaatgagcacaagtccggtatatggatatgaaacaaatcaaaatgaagtagaagtgactatatttgtaaactctgactatgctgcacatctatacataaaaaagtcactaactggttatgtgtttacagctctaggaggttctgtaagttaaaaattcaatctacaaaaggttgtagcgcctcaccaactgaggtagaatatatgactacaactaaagccattaagaaagctatatggattaaaggtctgacaaaagaaatgggatacgattcagacaatatcacagtgcattgtgacacccaaagtacactctatttgatgaaaagtcctatgttccatgagagattcaagcatatatatagatataaagttgcactttatatcagagatgtatatcttccaagatagttggtgtgaagaagatcagtactcatgtcaactcaactgacatgtttaaccaattacaagcgaaaagtttaggcttttcctaagcttattgaagattgaaggaagatagatttctgttcaaagacactagatgattgatggaacgatcaaattctttatttattatttttatttcattttagc

SEQ ID NO: 179912 - DNA, 549 bp, Cannabis indica
tcgattaaacttgtcaagaggcattcggatttcagagagaactagcacatcgggtttatgatagcgcacaagttgcgccaattgtcgaactgtcgcggtattcccgagaccacgacaattccaagctatgattttcatggcgaccttggagacttttccgggcaagtctccatagccccaatctgaaaatcctggcgattagtgcatgatgactcatgtcggcattcctcaatctccttaattgtgacattactgctttgtttttgcttttgtttcttctcaataataacaaaatgattatccaaatttaccttgaggtcaaatgttctgtcatgccattgacttgtggtagttgcttttcctcccgtagaaacttttgtctttcttcctcctttaaaggacttcggcgtggctgctaatggagattgggttttcagaggccttcctcttcttttcttctgccccaaatcagcattgacttgcctcgttatttcctttccctttctcttcgacgaactggcgatcggttgttctgtggccccaggagag

SEQ ID NO: 179913 - DNA, 712 bp, Cannabis indica
acgttcgaaaacatatggataaaatatattttatatatatatatcattagtgatctcaactcaaacccttaatatatgttttgggtatactgatcattttaatataaaaagcaaaaacatagtcttttcaaatcataaattatcattgatatttgataccaaagaataatacataatgatgcaacacattttttatccttaataaattcaatataatgtgatactcgtttaaaaatatataattgatattaattacaaattatagtatacaatatatatatgcaatttgagtgtattatcttaatactccttaattcaactaataatttctatatgatttagtcccaaagaaagtagtgcagaatatttagatatactaacagtagaaaattaaacatttcaaaaataccactgcaccaacactccaaagtcacaaaaactaagatcaaacttgacctttcccccttgtgcggatcaagagggttttcccttcaaaactatgcctttttggcagtataaagccttctttattatgctaaaaccctagcagccaacaaagcctcttctcctttgaaaaccctagtagttactccgtattcttctcaaagaaaagcttcagccgattctccttcttctccctttcttcttgctccagtagcagctcttcgatagcagccaattctccttcttctccttttcttcttgctacagt

SEQ ID NO: 179914 - DNA, 756 bp, Cannabis indica
ttttataaaaatacaatattttcaaaaagatttccgtgtgacagtatttttgtaaaagttttcctaattaaatggcattatttttgcagtgtttatttttgtattatctttgaagatttttttttttttttttactaaatgaagtgaaagtgagatatggaatatgtggtatgtgcataattttgctaatattgatggcccataatctttaatttattgtaaataattattacttaccttttgactttagtttttaagaatgaaacaatatgcagcatacattttataaggttgattgtaaagagtactattttcattcatttttatgtttttagcataaaatcgtttaatgttttttttatataataaaacattttataaattttaaaaaattaaaataattataatataaaaaaaactaaggtttaattttaatttactattggaataaataaaagagactgatatatacatatacaacaaactgtttaaaatcttgcagcaagtaaaatattattataaattttttaaaaattgataattttcttagaaaacgatttattattagagttttttacaccatatattaaaatttttaacttttttactgttttattgtgagacggattttttttaaaaatactgtgtaagttttatattgtgtactatgttaagttttcactgttgttccaatattattttaattgttctattttgtaattttataaaaagacaatattttttgtaaaaaatttc

SEQ ID NO: 179915 - DNA, 570 bp, Cannabis indica
attccaagaaatttattggtatcaatttctattacaactgtaattggaacaaaatataggatcatgaataagttcttagaatttgctagtttattcattatattacatccatgtctaatcaaaatatgtgtaacatagagatattgtggtgtattgtgcatagtctagagttcgaaatgaactacatatgtcaatagccttatccacccctaagtgttatagagatcatgtggagttatgaatataatctagagttcaatagatgtaaaagatcgttgaactacatatattatttcttaactttttctaccgtatcagatcaagagatcgttttattaaaccaaatcataataattgcttaaggaataacaattattcataaacattgaattttaaattctaagtgtttatgtggtatgatctctttgcagagatgaatataccattgatgttgtatcattaaaaaaaaacaaacaacatacaaacaattgtaaacaatataaataataattagctattttggtcatacacaagaacagaaaaacaatagaagactcaattcataaatgc

SEQ ID NO: 179916 - DNA, 753 bp, Cannabis indica
tatgtacaacaaaaccaaattgtgggagaaaacaaaaagttataaaacagggggaaaattgtatactaaaatttaaaattagtcccttttttgcaatctttattttgctcgatagttattttttattttttatttttggtaaatagcagtataagtagcaaagttttatatttataagtgtcataaataaaatatttatttttagcggcataagtatcaatatttgtaaaactgtaattttcttctgtttcgtcactataataactgaaattgatgttattacagtataccgctaaaaataaatattaagtttataaacataaaactttgaatacttatgttgttatttactctttttttttatcattattatatatattaagataattggcagcataattatataaaaaaaaattggataaatctgccaaattttagttatgttgtcgttttcaagcggttaattctcatcaatgaaataaaaggttggaaaacctaaattaatagtatgttaactcaaagagtaatataaattaaaaagcttgaagattgaagttttttaatttgtattatttcattaaagcttcttaatttaaattaccttttatttaatatattaattttagttttctgacttttcatttcgctgataagaatcagccctcaataatttagcacgtttatgagaaaacaagcttagtttacctaaaaacttaggtttgatgatgtggacactattttgtacacgtagcg

SEQ ID NO: 179917 - DNA, 836 bp, Cannabis indica
gatcttgttggcttagtaatatcaatgctacttttaggagattttagtttagtgttgcttacgtttctccagctgtattccttttctcttgtggacgtctttctggttttgtttattttacctttcggcattcttctttcatttcccgctggaatcaatgctctattcagtcatggaccaaggcggtcggcaggccttgcacgagtctatgctttgtggaacatggcatctttagtcaatgttgtaagttgcaacgaaaacttttggtatctttgtttttgtttttccaggttgaaaaacagttttcatttcttctgtcattcctgttatgtattacattcgtttgtcattttgaaatgttttctgattcgtgaaccaggtggtcgcatttctgtgcggatatgtgcactatagaactcaatcgtcgagcaaaaagcatccaagctttcctccttggagtagtatgaacatgtgagggtttcatcttttctcatttaggtagcactttacaaactaacgatgtttgttttgactgtttccatggtggttgtgaactcagggatgaaagtgaatggtggatttttcctgctggactggttttgtgtaaaatatttcaatcccaactcgtcaattggcatgtggcaaatctagagattcaagatcgttccttgtacagcaatgattttgagctgttctggcagtcgtgatattattcgactagaagatatactcattaacctgtttttatttctttcttattttatatgaaaaaaaaatcatttatcttgaacgtagttgagtgatgacaaaaaaaaaaaaaacgaaaagaaaaaaaa

SEQ ID NO: 179918 - DNA, 710 bp, Cannabis indica
aattactactatattgacttcaaagttttattgttacatatacacatgtgtatgtagtagttattagttgatatttaacggtaatatttaactggcgtatcaaatttgcaaagaaggagattttgctgcaaaaaaataaaaataaaaagatttagtgtataaaaattataacataaagaaattttgtagcaaatataaaagttcaagggtcacaagtccaaaaagaaaaaaatactaattattcaacaaaatatagctctaaatcactatttttacccattatggagatgctgtgagatttgttgttgatagaaatgatgacatcttattggtatattttagtagtgtattccacatatataataatataatgatattggacaccttcgaatgctcattagaatttccaattcaaatgatgcatcatctttctacaaagaataccacctggtttggagctcaatatcaagtactctcaaattcaaggactgttcgttctgtgactgggtacaaataagaaattgacaggaacaatgacaaaatcacacatttttttattgttaaaaataaaataaagagtgagactggcttttacactctgctgtacacacttccatcctcagtaatccatacaaagctaagtagactgcattgcaagcccccctaattgatctaacataaaatcaattttgaataaataataaaattaa

SEQ ID NO: 179919 - DNA, 570 bp, Cannabis indica
gtttatatggcatttacagaggatacagatgaaagtgactaagtcacttttaaatgaaaagaggatagataatcatgttcattgtaactactctaattagctctcatcctccaattaatgctagaccttagtaatctgagatatgatgtaacgtttcccttcccttccaccacaatgtatttttgctaaaatattatgatcattgctactaggtactaacctagtgttcaattctggattggagctgaaattctacggtggtagaaatttggctccctccgatacttgtctttgcaagttttcattttcattctggttgctttcagttcttatttggatcagcaaatgtcttgaaccagccaatattccgacaagcttgtgaattagcctttggtagatgtattgctgcaggaaatgatagcgtttcagagcaagaagtacagtacttaaaactgcttttcctttcttttttcaatttcctttcaagtgttctgataagttgacttgcctaaaattttcaatgttttttttatcacagctgggagattccatcagattagcaattccaga

SEQ ID NO: 179920 - DNA, 642 bp, Cannabis indica
tactagaaggaattatatccaaacaaatctaaatgtttctagagtacaacataactagtatattctagatttaatctaatctagaattctcttaagttcttagataatttttctacaagtgtatagaaatgtctagactaaattgtgtagaaatgtgtagcaaatttcatcactcctccttggtacacatttcggtaactccaatcatgtctcgcagtagctcaaacttgcctcttggtagtgcctttgtgaatatgtcggctacctgctcttgagtcttgcagtgcttgagctcgatttctttgtttgcttctgcttccctgatgaaatggtacttgatgcttatatgtttagttctactatgaaatactggatttttcgccattgctatagctgatttgctatcgcaatatatctttgtagcctccttctgtgattctcccatgtcttcaagtattcttttaagccatatagcttggcttgtagtcattgctgctgcaatatactctgcttctgctgatgattgcgcaacagttgcttgcttctttgatgcccatgaaaatattcctgatccaagtgtgaaggcatatcctgacgtgctcttcatgtcgtccatggatcctgcccagtcactatcctagc

SEQ ID NO: 179921 - DNA, 516 bp, Cannabis indica
tttaccttatccacaatggattatctactaaagttgcttgtttaatcactaaatcctcagtacaaatcaataaattaacacataaacttatgaagtgaaatgtgaacatgcactcactctggctcatttgcatcaaaatggtaaataccattatcaaatccccagtctgcaagctgcttcttcttcacaatgcttgtgcaagtaccaaacacatccatgataatccacttcagaagctccaacattcggaaactttttctaaatatattaacacagtaaaatcaattcaaacaaagagatcatatgaatttttaccatccttggctcttgagctgttgagcaaaacagtgcccgacatatcccataccgaaaatgaacatcctttttcgatcctcaggttccaaggaataagtttccatacgtgaatgttccatcactaccataaccacaacaagatggctcatatgccatacgtgacaatggcaacatggattctgtctctgagttccagatctg

SEQ ID NO: 179922 - DNA, 530 bp, Cannabis indica
gtacaagggcctcctctgcaatttgcaccacaataatctttacctttgccgcaaaacccatatttgctacaacactcaccattgccacatgtctttgatccacatggtgttttactcaccacacttaaacctaaagttgctaacaaacttaggcttagtaatatatttctcatttttaggatactcattttttttttggtggatgagtgggagttttgagaattgagatgatatttatagaaagaaataaagtaaatgctcaatggaaattcgatttagaatccaatgaactatttggcatattttgaaagctagatagtattgaatgttttttcctatttatgctactaatcttttttctttatttgtatagtgattaataaaaatcaataatcataatcacgtcatatttgtgttggattgtttaagtgttgttcagaaactttcagaacaagttatttttaaatttttattggggcttatcttatttgacattagatgtgttaattctagttttcgtaatatttatt

SEQ ID NO: 179923 - DNA, 774 bp, Cannabis indica
atattatgaaacaaatgtgattatttaattaatatttagaattatttaaaaaatatataaaatgttaaatatttttatgatttttataattttaattatatatattttttataattttaaacatattaaatgtaaaattgtaattttctcttaatattttagaactatatgtaattacaatattttccctaaaaatattaatgtagatttttgtctccaaatatatttcttacatgagatcattcattacatgcaacatcatcatatatcggtgatatacccttcaaaatcatcattaaaaaggaaaaaatgtaatattaaatttgatcatattttcattaaaaaaagttaatttttgtgaatgtattaatttgtgtaattaatatttttagtatactagaaagaattaaggattatatatacgtattaattaatttatgaagatttgatttgtttcttttaagaagaaataaaaaaaaaaaaaaaaaccaaaaaacccgaatattctcgtcacaattatgtaactaaattcagcctaataataaatggaaatatatggatagaaaaaagtacaaaactgaacagcataataattagagcgtaggaagcaatatacaataaatatatatataatataatatatgagcaccaaaagtcgacaaatatgacagaaacttacacttaccttatcaagtatgaacactactacaacaattaacttatcaataattgtatatataaatggtaatttttataagctgtaatatcactata

SEQ ID NO: 179924 - DNA, 713 bp, Cannabis indica
attaataatttaaagcctatttctaacaataaatccctaattatgtacgaattttcaaaataaagctaagcagtcattacatgtacacttgagtagtacacgttggcactcaacattacttttctaacaggagtgtaaataacataatagaagtatggttcagaaggttttaccaccaaaaaattaatttacgggggttaagtgttacaaactgtatacttcaggtagttttgttgccaatattctagattttaatcttcatcctcgccctaatgtaaatataaagtttatattaaaaattaaatgtataaaatataaattagataaaaattaaaatattacacattatttattactcaatactaattattatccaaaactcaacttaaaatttaatgaaaaagatactaatttactaaaaaaaaacttaaatatataaaatataaatgtttttcaaaaataataaaaatattaaacagatttccaggacaaggagtaccatctctgtccttgccccatttaacattcgatgataaaaaactaatttctaatccctgctctattccccattagatggggaatctcaccacattaggagcggatcctcacgggaccatctgtggagaaatatgcatgcattacataatgtactcataacaaaatatattgacttgagtacaaattataatcttatatcattccaaaggatacct

SEQ ID NO: 179925 - DNA, 604 bp, Cannabis indica
tttctctcttcttaatttcattattactacctagcacacgcgacacttgaaatgcacgtggaactgagatattcaatgtagttttttctttttcttttttgcaagaggtattaagtactcttattttattttaggctaattagtatttttgcttttaacatttaccaaatcatgcttcatgaatttttgaggtcgttaaaaatgcctcttgaattattgagattgttagatttaaggactttttctaatttagtaaaaaagtctaacatggataaaagtttaggggacataatttagtacatgtcaaaggggcatgattaaatagatatcaaagtctgaagagcatagtttattacataaacaattaatgaaacagtaaaattgaataaaattaaacaaaagtactttaaattcaacaatctcaatagttcagggagcatttttaacgactttaaaagttcagaggcatgatttggtacatgtcaaaatttaacggggcaaaaatcctaattagcctttatttatttttaaaattaaatattaagtagtagttgataaggggaaaagaaaagtcgaaaagtgctaatgagtagagagtaattaa

SEQ ID NO: 179926 - DNA, 976 bp, Cannabis indica
agtgtgattcacgagcattattactgctatatttacaagtcaaatgaaataaattgtatttatgtttgttagtcttcacattaaatagaaaagatatatattatataatataataaataatgcacaactctagattatatcttagttttggtggacaaaaatgaagcccaaaattggggtactgtattctggtgctgtcttatcctacatagcgatatatcttggagcttatttcctccttttttttatcatttctgtcagaacgtctcagaaattatagaaatataacctttttttttttaatggaaatagaaacacaacatttttcaatatatatatacatattagggatacgattttgtcccgtgatgtactttcacggaatgtattccgtgatctaaggcagccgttaaatgggggagttatttgatctgagggctgggattgatctacaagtaattagggttaaaaaatggcaacgtactcatctaatgtatcctgaaactcatctaatgtaccacgaaatacattccgtgaaattacatcacaggaaaaaattgttacgaaaattatgaacaatacgcaagtgcacgtaatcaagtcgtaaactcacgcaggtgaggtcgaaccacggggaattgaactgaataccactaaattagacttatgattctatttggtagataaataattttgatagattttgaaataaaaaaaataagaaaattaaagaaagcaataaaggtgtttaatcaaggatgagaaattgggaaaagaatctgttgctttaattcccaattgttaatgcaatttcattctctttcttattgtgaatgacagattatgaaaataaacctaaactcttttcagatcttttagtcctaaatcacatgttatctaatcatctctgagatagattaaacatataatcaacaataagcaataatctaaatgtcacaaaggctatgtaaaatac

SEQ ID NO: 179927 - DNA, 734 bp, Cannabis indica
attcctgagctagtatatttgctataaaaataaaaatggcatttcattaaggcaatctaaaaccaagagaactcgaaggctcaaatattagatttttatttgagtttaaattaatttctattagttttattaaaatttagattgattacatagtattagtccatattgttggtgattaatagttaatgacttaacatctgtatgtataaaatttagttgaagtagaagtatgaaattttctaattaactgaaatctttaatgagcagacccagtttaattagggttatatagttctccataactctataaatacatattgtctcatcacgattatatactcttttgataattagatcaataaaaaaacttctgatttagagatatagggagaaagacttaattgatagtacctatcaaattgcgataattgctatggatcaatcagatatatatatctaattaattattatatatattatagtgttttatattgtatacaattttatatcttgagttttttttagttttctaacatttggtatcaaattgcttactctatatagtttaggcactataatttatgtagcaattgatatgcatatgttaattttttttcaatttacatattaattttgttattatttttatgtttgaaattttttatgtttttgatcctataatgttagggtttttatttcttcattgaaattatctttatattaatataattcaa

SEQ ID NO: 179928 - DNA, 798 bp, Cannabis indica
catacatacaaaagcttatctgtatgcgtaattaactagcacacacttgtcttacaattacagatccgcatgggtagtactttgggtacggtctcagggtgagactgaaaatagaatttactgggaattaaatgtttccaagttgaattatatatctcttagagtgatgggaaagagactattatccagtatatatatctttatatattaaaagtgtctatttaaaaatattttttgttttaacagaatatacttaaaagaatattctgttaaatttatcgattaggtttaatctcccgttaacaaataaacccaataattaaaccaaaaaattaaacaatcttttaaatattaataatctctttttaaatgaaaaaaatcatcttagccacatatctctctaacaaacctatattaggaaaatataaataattttttttattattttttaaaaagatctttatttttttgattccgatacataatgtgatgttattctttttaattgtctttattaatttcttttctattataatgtgaaagaaattttttggcaacagagagtcatcaaattagtccaagtgtttgcactccataatctatatatatatatatatctatatataagtcattactctttttttaacctattaattatacaggtatattattaatttaattgatgataaaatttaattttactattagtctatcatataaggataactatttttttattgttaattatttttttctactattgattgtttgtagtattattttttttgtactaaataa

SEQ ID NO: 179929 - DNA, 733 bp, Cannabis indica
atgtatggatgtaactcagggttgagagtgtgttcaatagagtgaaacacttgtgagatgagtttgtgccattcccattcaactgcagctgcattgtactctgattcaacatcaacaaagatacttagagttccaaagctggagtgggtgtaagttcacactgaaattgcctttgaacaaggataaattccttgtgttttatctcttattctgcttgctttaattttccaaatttttacataatagaaccaaaaattaaaaaaaaaatacattaacaaggaaaattttacctatttttacgaattgaactgttttatttacaagattttctacattcttttttatagttgtcttgtggagatccggagactgctgatgaatccatgggcagacaagagacaacttgacaaactaaaacatcttagtagccagaggaaaagaaagcaaaagcgattctcatagtagcagagagcaaaatgggagcagcctaaaccacgaaaacgggattgtgggagagcaatacaagcgtcgtgctactaggcgatgaggttggttttcttgttgtttaggttgttgtgaggttgatttctcattgtttcttttagttattttcttacgtttttggatttgttctaactattgatttgtctagtttgatgataatgagtatcataaagtacaacaaataattccatttagacatttcaacaaacaccacaagtacatgaaaatc

SEQ ID NO: 179930 - DNA, 546 bp, Cannabis indica
aaaatttatgtgaattatcatttagacccctcatttattgatgtaaagtaccataataaaataatggcttaaatagaaaccagttacacatacttataataaccggtggaatattgatttacaagtacaaattaataaatatgagcattgctattgggtaccagtagtgcatagcatccttaagacgtatcgccttacgattggctaacgatacttcctaaaagctattatattaaactatatgagtgcttgacaccactagtactttttagcatttctcaataaatatttatctatagttgataaaaaaacaggtggtacttatgtataattgtctatcgtgttgggtcatgttttttggcagcaaatgtactgtagccaacccccataatataaatttatatatatatggttatgagttgtcattctatttttcaatcaaaacgtgtgtccctgaaacatttttgatcattaaaaaaaagtttgttataattcctttccaaaataaaaaaaaatgaatttttatttagtatacttctataaata

SEQ ID NO: 179931 - DNA, 503 bp, Cannabis indica
gcatacactactccatgtaaatccataaataacaagtcaagagaaagaaaaacaagctcagcagcaagaaaagtctcaacactaaataaaataaaattactgtaaaaaaaaaaaaaggtaacttcttcctaatcttccattggttcaactgcttgaatggtgaactgattgtactttgaagtcattgttcggtttgcatctacgtacaactgaattctccattttttggctgataattgcttcgtagttttttggacaaacaacttatgtttctgtaaaaaaaaaatgattagttataagttttaatgtatttctatgtacgaaaatgtataaattttacatatttatttttttatagttacctcgtccgaatatgatcttaattgaactgcagtacatgagaatatgttttctgcaacatcaccgaacatcacagcatctagcaacacattaaatacattaataaatataaattaaaatgagtaaaaaaatacatgatattc

SEQ ID NO: 179932 - DNA, 558 bp, Cannabis indica
ctattctatataaaatgtgtctacataacagaatttttggtatatgaaaaattattcggtgacttttttttttaataaaaaaaataacaaattattagatgttgtgagtgtattcatgtagttagttaaacctaaatataattaatccacctaaagtgttgcaattaataataaatttgttcatattatttattttttattaaaaattattttcaaattttgatatttaaaattagttaaattttaaatattattttaaattaaatttgaatgttttgataatttaaccaaaacattttaattaattccgaagataaatttaggacgaataataaatttttttttttaattactattacaaagtataatagtaatttttatttttatttaaatcgttattatactttcaaatttcaatgatcattactatattgaatattattattttaaaattatgatataaaaaaattaaaaactaaaataataaaattaacatacgtgacttggcacgtaacatttatctagtatatatatatatatatatatatagagagagag

SEQ ID NO: 179933 - DNA, 800 bp, Cannabis indica
ataaacaaatactattaattatttttatcaaatgcacataaatttatatttgaaaaaaattaaaaatatatgaaaatataaaataaatttttacatatttgtgagtataataaattagatcataccattattattatcattataatagatcttaacaactcacagtactttataatttaccaaacactcagctcagcttttttctacagtttttgctacagctgtttttttctcacagcacaactacaactgttttttcccacagcacagctataccaaactaatcattatacttgtatatctattcattataactcagatatgtggaattttaatttactaatactttacttatttctatcaagattaaataaataaataaatatatcttttttaattttctattccatatcaaaatatttaaactaacgtaataaaatataataattaaatattttgttcactagttacataaaactaaaagaaatagctataagctattttaactcatcattttttgaggtacaatttcacacaattttttaaaattttagctaagaaattattttaccttttttttaagggatgctctaatatatatgtaactgaattcaaattacactatttttactcgatgatatgtattttattttagtcataaataattttaaatagactacattattttattttatttgtaataattaagattatatattattttacaacataataataaatgtgtacagatcaattattagtatgtattataatttttttttttttgaaaaaactataca

SEQ ID NO: 179934 - DNA, 537 bp, Cannabis indica
gtagctaatgcattggagcaaaatactcgactactcgagttgctacacaggggcaacggtctacgggtcatagggtcaacattttgtatttttttttaataaaattaaagtacaatattgaagataaatatagtgtgtgggaccattgtagtaactttttaagtactggagtaattttttagtagtaagtggtcaaaaaatgatgtggatgaggagaaaaataaaatattatattatggaataacgtggaattttgtggcagcttttagaattgtttgcattggagatgctcttaaagaatgccaccattggagatgctctaataggcataaacttaggacaactctaataataaatgttaaatttagtgttaaatcaatacaaaaatgataaaattttagtactaatttttttctattccaatcataatactaaaaattacactaaaattatattctttattattatattattttattaaattataaataaatacaaataataaatacaaaatgtttaagtataaatattaaaaac

SEQ ID NO: 179935 - DNA, 713 bp, Cannabis indica
aaagagacgaaagagatgactgcctttgaagatagcgtggtttgagtatggtcaaacaaacaaatcattcttaagcttcatcccccttttgattgtcattatgagtgttgtacagctcccggattttatggcaaaatgtggttaatttgactacagggttggaaatgatcagtttagtttataaagaattccttttagagttaggagatcgttctgtacctttaacagtagaagagtgggtttaacatgtgatctttgtggtcacgtttaacctcatggtttcgagtaggattcattgtgggtcagcttattattgaaatactaatttaaatttaacctttctttctactgcccaatttttattattttcttctgagtaaggcacgagatatagccatggaaacactcagcatttctgcatttcatatgggtgtttgcgtgtaaatcgtttatgtcttaatgacttaatctaataattttcgtctccaattcactattcactcttaatacgtaaacttgttcagcaaacggaagaaatcaatggtcaactaaatatgtttgaccatggactacagcaaatttctctgccagttaccatttacaactcaaaaggttaaagtcgaatgttaataatccttgactagggagaattatcgttttcatttttggcccttcaataagatactaataaagctatcaatcacgattattca

SEQ ID NO: 179936 - DNA, 881 bp, Cannabis indica
agacacgtgtaagtgatgagcgcatgaactggcaaagcaactaacgccatcaaatgaaagtttttcgggatccgaaacgttttgggccgttcgggcagcccaaatgatgttcttgtcggctattatgcaagtaggagtggggtttagttgttggaagagttgttctaatggttgttgtaataagctaacggcagacatgaaattcttgaataaactcagagaagggagagtgtcggtgctttcggatccttggggcaaacccgattgggccagtggaaactggagctccacgatctggatcgggtaacctgattgaatgtcacggtcgatgattgagttgaatcggacggcgttgagtggcgtggtcactatggtgaccatcgcgccgtgatgggctagcaatcttgctatgtctatcattggaatttggtgaccttggctcattaagggtatcactagaaagtgaagttttttctgggcttgtatagccatatccatgctttttttttataactggatatgctcaaatatttggctctatggattatgtactcggttgtaaacatttttatatataaaagagtgctgtgttgtctatccaattcatcgagtaggttacaatacccataatcgtataatatattataatatatgggacacttaaatttcctctaattgcacttgttgtttgattgtcttccagatctaatctccatgttctgacgtaagagcatacataacaaaggttagaactattactagtcgtatataaaatctgaagaaaataataagataatttattgtacactttagcaacaacttgtgacgagctcgatcttgtgttttcataatgtcgtataatattatacactattaattat

SEQ ID NO: 179937 - DNA, 620 bp, Cannabis indica
tatgtagggacaaataagtttggaagttattttagttgtaagttgtattccacatacattgccctcaatcctcggaacacgaaagtatctcggtgacagtcagtggctttcctactccatctccttatcctaccattttataaattctaatgaaacacaactacatatacttctaaaatactcactcagttccattttaaaaattaaaaattaaaaaaaaagtactcagtcagtcagttttttttttttatcagcatggatatactaaatgtgtggaatatgattacgaataatgagttatgagtttgtggtccgattggtcaagactagactgtttccgaaccaaaacaataaatcccatccatacatcatcatgatcaatgaaatctttcctagtattttttattttttgataaaaaaactttcctaattaattgaggtcaaatttgtacatataatctaatggactggacttggtccaaatgcttgtgaccttcttgcttgagatttgattatattaagtcattctattattaaatccacaactattcctcttgataaaatcgcttaaaacacattgtagaaacattaaatgttaatacaataatcaatgaaaaatc

SEQ ID NO: 179938 - DNA, 817 bp, Cannabis indica
atcaatagcgatatgacacattgaatggtgctaagcatcactggtgccttttaacatttctctatttgctaccatgttagtaattctgaatgtttaagcaggtttagactaacagatatcgaaaacacccactctaatctgagttttctaatcttgcagggtttacgatcaaatgcccgaacctaggtggggttatctcaatgggaagctgcgcaaacggtggtggatactaccactactcgtacgctgttgttcggggttgtgacaggattgtccccgttgacatctatgttccaggttgccctcccactgccgaagctctactgtatggacttcttcagttacagaagaagattggccgacgtaaggatttccttcactggtgaccaaataagaaccttcctttcatttctatccatcaaagccagtcatgtttgacaatctttggctatgtttcttctttttatggcataataataataaaaatcaaatcttgggtggtttgcctttgattaaaactgtgtaaagtgtgttctatggagttttgacacagattatgtaaaaccattttgtttcttttttttttgattgttataattattttcttcttagaaattgttcaaaggtttatttaatcttgggattccattgactactcatatgtatacaacaaaataatgtatgaactcaaaattaagagggaatttgcttacattatttagtaatcaatctataactagggttacatttgcaaattcactatggttagaaggttattgtaatgtgtctagagatggaaatagtcaaatgtttattg

SEQ ID NO: 179939 - DNA, 517 bp, Cannabis indica
tgttttcttttcattttctttttctgtgactttggttaaacattttagtagtttacatcttaatgacttaaaaagttttttgtacatctctttcatcttcacttaatatgagttttgtttttaattatacgcatttgcttgtgaagatcgaagatattgtgataatgatccttgctatactaaatcgaactagtcttgattatttattatctggtgtttgtccatctcataattccttaaaaggtgccaactttccctagtactgggtggtccttagcttagcctaacttctttgtttcagtttatattagcttatacacacaacatgtcagtcacaaataatattttacacaatgaagtatcttcattttggtaagatacaattttggctttaactgttttagttgacagaatggctcagtatgttgagatatttgatcttttgacaggtctgtattttgggctctttttggtgctatctatttgtgctttggtatgccagaagtgtatcgagttc

SEQ ID NO: 179940 - DNA, 790 bp, Cannabis indica
ttgattttatttaagtcaggtcaagatccgaggttggattcgagttcaggtcagaagctgggttcagcgccaaggccgtgaggaggggaattttggtccgggtctggttgtaattcaaaagattgattaagaaaaaaactgtttataaaaaatattgaaagtgattttttttttgtttttaaaattttgattctcaattaaaaaattgaaaaagtaaaaacagttttatagaacatattttttaaaaatattttcacttttaaaaacagaaaactgattaaaaaagtgttaccaaaccccacctatataactcatgcgtgaatttatatatatgcttaatattaaataattgagatcgtgttatcaacttgaataataattaatcgcgaattgcaccatacatatacacaacaaaaatactaagctatgtactaattttttcacagttggatctcatccatatatattacatgcagtaaaaattgttaagcaggtgggacaaccttccaagagctaattaattgattgttatattatatataattgtatggatttaattttcaattagatgtttagaaatagaggcttatatatataaaaatcatttaattttattaattacaatatgtaatccaatataaacatatcttctattggatggaaaaattaaaattaaaaaaaaaaaaactcaattaattaattagtctaatttccgagttgtttaacaaaaaatactaaataaaagacaaacaaaaaacgaaatataacattataatatttaactttaaaa

SEQ ID NO: 179941 - DNA, 494 bp, Cannabis indica
gtttcaactcgcccctttttgcatttttttagtttttgacaatgtcgtgaaatattactaaatgtcgctatatcgtaaaacatcgctaaatgtctctaattcacaatatgactaaatatcatgaaattacactcaagtttttacgatgattagtgatgtgatgtgtactttttagtctcatatcacaaataaattgttcatatcattactaaacatcgctaaatacgcaaaatctcacaaaatattgcaactaaacttcatcactaatatcaaatttggtttatcattgtaagttcattgctaaatattacaaaaaattagaaaattagaagaaaaaataaaaaaaatgagagagaatgtgagagaagacaacggggcttgcagccgagatcttaggtgtgtgttcgagggcaagagttctaaattaaagctcaatgtttgagagaagtttctttttaaatgtaaaattttttaagtaaaaaaattaaaattag

SEQ ID NO: 179942 - DNA, 1383 bp, Cannabis indica
atttctttttaggaggagctcgctcacgtttcgacaattgaggagcaaaatcggagtcatcgtcttgaacaacaggacgtttgtccttattcctattagctatagatttcaactgtgacagtcagtagtcccgtgatccgtaaggggaaataccgggtaagctgtgcaatcccacatcgcctggggaaggtcaagtgggatgattctgagactgtgtaggtatgggactacacagttgaagagagcttaaatggattgattggtactacctatatcaacaaggtgcatcttgtttttcggtagcccatctcgaaagaactccacagttaagcgtgcttggcctggagcaatttcaggatgggtgacctcctgggaagttttcccaggaagcgtgcgagtgaggacaaagcacgctggaaacactcgtgttggtctgtagggtcagtcatcaatccaggaagcagccagagtggcgtactcgtgtataagagccattcattccgtgggtgtaaggacccaatggaggcttgaagcggggacgttacatcaaccccattttagaacttttctttggcacaggggaagagaaaagttcagctatggaggttttattaaaaaaaaaaaaactgaaaaaaaaattgaaaataatgaaaaagaaaaagaagagaaaaagaataagggaatgatgtaatgtgtgaattgatataagtcatcaatgacgtgtgtggctgaatggattgtgtgtgcaagtggtaaaagtgtaataaaataaagttaatgagtataaatgtttgtttaaccgtgtgaagatatatatgtaataaagtgtgtattttgtattttttgtgtaaatttttttatatttttttacatttattatttgttattttatttattttaatttattagttgagacataaaataataataataataataatttattttattttactattatatgaaaaaaaaatatttttttaataaatattaaataatttaggggcttttcatttttatacttcaaaacagttttttttttgtatttttacagaattttacattagaaacttctattgcaactagcgctgcaacaaaaaactcatatggaaacccctattgaaacaagtgctgcaactactttagaaacccaaatcgtaaatttaaaaaaaaagttaaaaaaatagtacatgaggtatttcttaatattaatataaagtataattgattgatttttttttttcgtattatttgtattgtatttgatgaacacttctgctgctgctgcgcatataccgaatagtccaaactaccctcctatcgtattctaaattttagaagaattttccgctttacgagcgatgtaattgacacgtgtgaaga

SEQ ID NO: 179943 - DNA, 654 bp, Cannabis indica
tgataggaggcatatatacactaatattgctactatagttaaaaaatctcaaaaattatagtctcaaatctctaattctaaaaattaaaaaaataaatattatttaattaaaaaaattaaacataacacttaacatcacctaattaaatctaattaaaaaaaaaaccaattatacgtgtattgcacacataacattaacctagtatatatattatatgtatttatattttgtcgatctatctctattaagttattacatatttatatggtttttatatatagtattatgtgtatatggaaaacttcttaatggtattacccattaatgggtaataaacaaatttaactttaaatattaattttaaaaatattaaaccattagattttggtccgatagtgaataataaaaaaaaatttgaatttttatacttaatttagctacttaattaaagaagaaatataaaaaatacctatttttacacaatatcaaaaataaatttatatgaaaaaatatttaagttaaattcaactttttttatcacttttttgttgaaacacttttttttgttattattttttttagctgatggaccaatctcagcccatataatgtaaaaaatgagtaaaatttttctaaattaaaatagaaaaatt

SEQ ID NO: 179944 - DNA, 893 bp, Cannabis indica
tactgtcttgctaggcttggctcacgggtgctctactatgcaggaaagggtaaatctgtctctgatcagccatgagtatgggagttgggcgatgtatgtacatgttcgggccacactagaccaagcgggttggggtctaccagtgttgaaacttttgtaactctattttgccgcttaggtcggctaaggagaaaagacttgtaatattttgtaaaataatttttgggatcccgaaacatttaacttttgtttgtaaggttaaaattattacaggtttattttcattccgttttcgtttaaagtttaatttctacgcttattttattagtaatcccgtttaggggattagggtttcttaatcatattgggtagcgtgcctaaatcttagggcgttacaatatgataaatagctttctctaagggtcatagctcttagtctccttaggttcatcctactgtatccacccctaacaaactcatgcaaagcttgaatttttttaaggtgacaatcttaatacccatgtcagttgggttctcttctgttggtatcttttggatgctaacctcttctttagttatcttatcccttatgaagtgatacttcaattctatatgctttattctgtcgtaaaaatataggttctttcgttggtgtatatagctttggctatctaaatacattttaggaatctatttcatttttagtaacttcttctaggagaccttgaagccatatggcttcctttattgtcttatgtgatagcaatatattctgactcagtggttgataaagcaactactggttggagttgtactttttagctaataactccctcctaaaacgtgtaaaagtgtaagtgtagtagtgaatttttctattgtctctgtctctt

SEQ ID NO: 179945 - DNA, 588 bp, Cannabis indica
atgttaagacgggttagacacgtgcctaaagcccactcattattttagggacccttaaaaaaatattttaaaaaatatcatttatctttatagtaaaagttttaatttttttttttttttttgtccgtatgatccatttcaactcaagatcagccctgcagtagaatatatatgttcagctcattactaaaataataagagggatgagcaacattatactcttgagcaattaaaaatgtgtaatatatgctattagaattagtcaaatatgttagttaattattgtttatagattgttataggttgttacttaagtcagcttaagttagttaaattactaactaactcagctcctctaattgtctatataatgtaaactcttgtaccattcttttatacataaatacaattcaagcattcaagtttctcttcttcttctatgttctctgttttccttcatatgatatcagcagtaaccttgcccactgcgtcaacggcgagaccttctagacactctcaagatggtgtcctccatccaacaaatgagcaacctcaattggagtccaatcctgatgcaacttctgttca

SEQ ID NO: 179946 - DNA, 558 bp, Cannabis indica
ataaaattttactattgaactatgtgataagttcctatctttttgtaattttattgaagttactctataaaattaacttatttaattaaaatatttcattgtaagttttagacctaaaatattaaaatactttcttataactttcagaattgtttggtataataagctctgtttaaatcattttagttactatttggatgttaaaaaattattcttttattaatataaatatatatatatatattttaatggtaagaaaatatatgctttccacatgttcaattgattattttaaaaaataagttgtaatggtatatttttttagccaaaattattagtgtgtaattagaattgttttttgaaaaacctattaagagagagaaattaatatatttgattttaaaatattaaaaaaatacttagttttagtttgaaaaaaccactaaaaaagaaagaaaggacagaaaaaaaaaagaacgtgaaaaagtgcacctagctacttttaaagttctgattttataatttaatgcatatagtatagtactatgttgaatacac

SEQ ID NO: 179947 - DNA, 779 bp, Cannabis indica
agatagagttatgtacgtggaaacactgttctaatttttaatgtttcataacagttgcataaatattttgataacaattatttcatttgattgaaatcttcgtatcatgcaaccttcggccaaccacccagcaaccttcgtctgattgaaaccttcgtctatgcaaccttcggtcaaccacccaacaaccttcgtctgattgaaaccttcgtctgatgcaatttttggccaactacccaacaatcatcgtttgattgtgtaagtgatagtgtaagaggtattttggtaattaaaaacacataaaaggtacaaatattgtccacacctaatagaggtatttttgtaaataaagtgtcaatttatattttctatgtaataattcttgtaatttttttagttattgtatattattatattgtaacaaaaacgaaaaaaataatattagatcattaaatatatacaacaatatttgatatattgtatcactgaaaattaatataccgtatagtaatactaaattattactcaaaaatatatgtatcatgttaacaaaattatatacaccactattaaatatgcatacataccaaaaaactttaatatataataaaataaaaactaaataatcatcttaaataaatagatgtaatataaacaacaaaaattaatataccatacaacaaaaaatatatatctattaactaaataaaataaaataatatagtattaattaaaaataattatatatacctatgaacaatattatatacaaccataaa

SEQ ID NO: 179948 - DNA, 526 bp, Cannabis indica
tatttaatataaatctcacttatatcaaaactaacttatcacataaattatgtgttacatatatatgtaatttatatgtgcacaataattttgtaaaaaaatgacaagtatacaatgtaaattttcctaaatataatatatacacatctatataataaattgctttaattaattatttttatttaataaaaatctcacttatatcgaaaactaacttatcacataaattatgtgtgacatatatatgtaatttatatgttcacatattattacttataaaaattaataagaaattttataatataaaaatctccataatacttttatttttattttaatatggtaaatataattttaaaccctatatttgtaaatattattaatttattacataataatattttgagctcgagttcagttaaactattttttatttctaactcttgaaaacctacttttcaactctaaaattttctattccttaaatttaataattatagttgatttcttttcctattatatttgg

SEQ ID NO: 179949 - DNA, 582 bp, Cannabis indica
gaagctattagcggtcctgagaattctgagttcgctgggagtttcgctacagtgccacataaccctgaaggtggtcataacatcaagacggagctgaatttggggatatctgagcttttggaggatatcggagctgatgatgatgataaggtcgtagtcactttggttcccaagagtggtttgggcaaagttaagattgatggcatcaagattgatttcatttcttgatgaacccattaattatatatatatatatatatatttatatatatacatgtacactaacgttacgtatattactgtgtaacgaggtatatatatatattttcatgtttttttcatttcaataataagctatagagctctaagctagctaagtgtgatgatgatattataatatattatgtttcagttaataaataagcaagtttattatgtagattattattaataaattaatattaaaatcaatttatttaaaaaaatataattataatagcaatatatcactacttattatgttaaaattaattagaaaattaattaacaatacgaattgagtaattcattcatcttatatta

SEQ ID NO: 179950 - DNA, 545 bp, Cannabis indica
cgcaaattaaacaaaaatattcacatgatatagattaaaaaaaaaaacaccaaaaaagtaactaatgtgaatgggatgccacctaactcaatgaatttagatttacctatctactaattagtaactctgtgaatttcattctaattcgatggttaattgcatttggaaatgataattataattacacacctaactacttaagaaactagttactagttaccaaattttaatatgtactcgagactttgaattaaagttaacataagactttctattcgaaaaaaaaaaaaaaaagttaaacataaggcttaaaatattaaaatcaattttttttttataagtaaagtaaaatctaattaatctcccaaaaaaaacacctataaaagaacataaatccttctaaagcacagaaattaattaatagaatggagctactcaatttcacatgcatttggtcaaatatgaacagctgaaacgcggaattgttccacattgatttaattctgacattgtcgcaatggataatgatggttggcaatatatat

SEQ ID NO: 179951 - DNA, 724 bp, Cannabis indica
atgcatgattgtaatatataaacgcttaaatagaaaaaagacctttttttcaatgataaatggagtcacttttataaaatttgaagtttcatatatttattcttcagtaaaatcattgtaatatatagttttgaatcttcatatatgtatttacaaattaaattttagatttaataagtcactctacttccagaattaaatatttagtatttgtattttgaatcaagtatctctaatctcttaatactatttattaagtttatacaataaaaaatcataaaatgttgaagaagataaaaaaaataatttttgctttttttttaaaagtaaaatatatatatttttttggagaaaaatcacaaagatcacctttcaagcatagagtcagggctggtcttaggctaaggtgggttaggcccgcacctagggctcactcattttaggaacccaaataaaaaaatactttttaaaaaataatatttatctttattgtaagggccaattttttttttttcgtcttatgacctatttcaactcagagtcaaccctgcatagagcttaaagagaatgtgaaggggagactgattgcattaattcttctcgtggaaaatgagctcatggatacactaggccactatacctattaatacttatgacaaagcatattttgccgatgggtagcagtattagtagttcttgaacagaaagaaagactaatatagtg

SEQ ID NO: 179952 - DNA, 789 bp, Cannabis indica
accaaaatatgaggttggataattttttacaagtaaattgatagttgggggattttaccgcaaattactcattaaaaaaatactaacttgtttatattgttgaccggcaactggtacaattgctttagataatgcgtaattggttgtcgtcttctgttcttcatcatcattggagtaaggattattggaagaaaatgcagatgatgatggacacggtttcatcaaatacgtcttaatttctgatgaagaacgctcatatttgggctataatttcacatgtcatacgatatccatttatttcacaaaaaattagttaaaatttactaatataacactttttaatagatattactggtagtaaataaatttaacgataaatattaggaaaaattatggtataagtctccaaaaatttataattgatgcatataagtccctaaacctcaaaaattaacagtaataatctacaacgtcactgtttatgttatctcccttggtaccaaattttaacatcaccgttaaatagtaataaaatgccacatgtatgtttttttttagtagagtgatataccacatgttacatgtgtttattggtacaaatcatatttattaaaaataatttaaaaaaaactaaaaaaatatatttaaaatcatataattatcatttttttgttattttcctctttgtcttcttcaccaagctaccaccccgacctcaccccacccccatccccacgccacacccaacctccgagctatcggtagatccactacttcagtcgtcatcta

SEQ ID NO: 179953 - DNA, 720 bp, Cannabis indica
ataaaattgtatcactttatttgttctttcgtgttatatatatattaggttgggtttggtgtaaatgtaactgagtattaatattaattagaatttatgattgtaatttctatttcttttgcttttgagtttattttttatgtgttataaaagtaatttattgttatattttagtacatttaaaaaagaatgaacttccataaaaggtttgttaaatttaaccaatgttaaaaattaggtaaaatttagcatgaaatatatatgtgttatatgtattataactgttgtaattagtacaattgaatacttattattattattattattattattattattattattattattattatttgtaagagtctatcatcataattcacaatttgtaaccactatctactacttataagtagatgaatccttcattcaatgggggttggactgatctgactaatttaattaacaacttatttacatgtgtgatccatttattaattatttataaattaaggtggtatttagttggaaggaatgaaaatataagaataagaatgagaatgagaataagaataagaataagaatggaataaaatttaaaatgtataaaaaaaattaataaaaaaattattaaattttttctcttgttacattggaatgatctttcatttctttttaaaatagaatagtcatttcaccaaaatggtagaaagagcattc

SEQ ID NO: 179954 - DNA, 711 bp, Cannabis indica
ctaagctcgaagggaatcatcacttgacttctatacaccagtagaagctatagattccatatttatgttcagcactcccactcaatcatactatcatgttcccaaaatatacgtatcaccctgacccaaaagtaggcttaactaataaatcaaagaacatgaatagcactcctgagttgagcctaagcatatcaggatttagattcttttaatcttaagatcaactactgatattgacttggaaagatataacggtaagtttgtaatatcttaactaagttgcaatatcggtccagtccaatgtatactccatacattcgaaactagtatactttactaatgtcctggaaagaacataacacttactccaagtgtaagtacacatcatcgctgattatcacattagtgtaaatccaaaacactgatgaaacagggacttagtcttttgattcatatgatcacaatcacattccactgtgttgacgatactgtaattgtgaataaacatatgatctggatttaactgattttgtgtgtaaatgtaataaacatattaaaccattagcatgtaaaattcatgcaaacataaatcacttcaaatttcttatattgataactaatcagattgtaaagagttttatttagggcacaaaacccaacatgtactacatcaagccttacctgtattttccacattgggttctatatggt

SEQ ID NO: 179955 - DNA, 590 bp, Cannabis indica
accgtaaccggaccaggtctcggactccaaatctgacctagacccgaattgggagccggacccggatctgaacccaaacctggactcaggaagcgaactcaaacctgaaatcagacccaaacatggaaccagactagggacacagaaccagggtccggacctagaaccgcaccccagtctcggtcccgaacccaaacttagaaccagaccgagacccgtgacagtgatccagatcttgactcgggattcaggtaacggggcctggaacagaccagtggtcggtgtctagatgtgggactcagactaggaccagaacccagacgaagaaccaaacccgaacccagacctagacctgggacccaaaattagaacctgaacgagaattgccgaaccaggaccctataacaagactaggaccgtaaccaggacccggacccacacctagaaccgaacacagaccaagcctcagaccaaaacttagacaggaactcgggcccagacacggtcgtgtaaccagagcgtaactgagacccggccctggacctaaatcttggatccgatccccaacacatacttggacctagataggg

SEQ ID NO: 179956 - DNA, 805 bp, Cannabis indica
taaatcatttatcatctactcgcatctctgcagtaattaacctatcacttgcattaaaatcagatactaaaaaacacataagctacgtaatactctcttttttacatcaacttatgtttgtcctattagagcattcctaatattcacttctcatatttcatattagaatcataagtcacatttatgatggctagtctaaaatatgtaactaaaataaataagaacaaatcacacaatcagggaggaaaactaacaatcacattaactgaattgaaaaagcgtcatctaacaatcatcatatccctaaattgagagtttagttcatattcatatccataataatactaaaacaaaatttaacataaatgaaatgaaaggagaagaaagaaactgatggtggaatgaatacgggatcctactctgctctttctaccatccttgactgcttctaggtctaaaattctctcctctcctttccttactcacagtctatttttaatagattcagtcccagactcaaagaatagagaaaagatgaaattggccttgaattgtacggagtttcgcggcggccatgaaatgccttaccgcgacgagattcttgagactgaattcaatgatccctgccaggttctcgccgcgaccatgaataaatccatcgcggtgactgggccagttaaaatcctccattctaccacttttggtcgcagccacgaataaattcgtcgcggcgaagaatgcaccaaatgctaatttttttgtttctctttactcgtcttggtctcttatcacacttttgaagccc

SEQ ID NO: 179957 - DNA, 829 bp, Cannabis indica
aattttccattgctgacaatgggatgctgttgtttaaggcacgggtgtgtgtccctgatttcagtgagcttaagaaggaaattttagaagaagctcatactaccccttactcattacatccaggaaccaccaaaatgtatcaagatttgaagccctatttctggtggtatgggatgaagagggatgtagtggactatgtcactaaatgcttaacctgtcagcaaatcaaagctgagcatcaacgaccggcggggttacttcagccattaacacttccagaatggaagtgggaagacattgcaatggactttgtggttggcttgcctagaaccacaggaatgtacgactcagtttgggttgtggtggatcgttttacaaagtcagcacatttcttacctgttaaggtaacctattcagtggatcagtatgctgatttgtatgtgaaagaaattgttcgtcttcatggagtaccgaagtcaatcgtttcagatagggatcctaaatttacctcaaagttttggatgagtttgcaaaaggctatgggaactaatttgaaattcagcacagcctttcatcctcaaacagatgggcaatctgaacgaaccatccagatacttgaagacttgttacgagcttgtgttatggattttggagggtcatggagtaagtatttgcctctgattgaattctcctataataatagctatcaaagtaccataggaatggctccctatgagctgctctatggaagaaagtgtcgttccccaattcattgggacgaaacaggagaacggaaatacttgggccctgaattagtccagaaagacaa

SEQ ID NO: 179958 - DNA, 1129 bp, Cannabis indica
attttttatatatgtgctttggcaacattcaggatggaaattcaaaaccttctgaactagattgagttattttgtactgctccagacaggtgacttgagctattaggtttctttcttagtaaatgttgtgcttacattttgtgaatgtttattgtgttttcttaaaattttattgagtagtgctgtcttaatattttcaaattttaaatttcaggccttggaacgaagctccttatgaggatgctgcagagagaaccgctctgggtaatttatctcttaatgggtttctgtctgaggtctgtatgcctatatagcctattcattctcatacttcgcacagcataactggttttgactttttcatatttattgtgtttcttatatgattatcattccatgatttccatccccaaacaaacttaggaaaaccatgatgaaacagcacattctatgtcaaaattatagtaatatctctaaaccattattaatacacaacccctataaatagtcaaatttaacaaaaatttcacctttgtcctattttcatttaattgggaactttatttattttttttaaaaaaaaataaaatttcctacccccaagcggggtgtatgtgtaactatttttgtagttttggcgaaaaactagtggtatctgtataatctatgcctaaaagttagatgtcgacatgtatacactttgtagtaaatataattagccacgagtcatttacagctcaggcaatatttacgttttttattgtagtgctatgctatctggagaaattgaatcataatattatttataagataaaatatttgggttgggaggagttgggtgatggggtgttgggacattcttgtgaagctaaatgattttgtttttatattcttcctgacattttttgtgtacataagatatatctatattccttttattggtttttcctttccatttttctgatgatatatctctcaaaaaggaaaataactttattctactaagtcttttgtaattatacatgatcatgtgattgcagtgggcccttatgacactactagatccagtgcgtagtttggctaatctgatgtacattggatcagtggtgatccagcttccgtgctccat

SEQ ID NO: 179959 - DNA, 815 bp, Cannabis indica
ctaactagcatatatatatatatatatatatataaaggtcaaaggtgttacagcacaaagtcaaactaatgtcctttcaccaaaatcaaaaatcaaaaaaaattcactccactccaccaccaatcgactatatgaaaaagaaaaaaagacagacagatagatagattagatatattgctaactatagaaattcccaaaagtggccaagcaaatatggattggatggaggcatttcgtcagtcttctactgctctttcctttttatatatttacacctttacacccacccaactccaaccccttctttcttgtttgtatatataaaagtagagcaacaacattcatcatttaaaacacctcaactactactactccaaatactactactatacttatgaattatccaaaaccagcaagcagtcttgtttcttgcctgcccgcctcttctttctttctctatacttcttttctttgtccttcaccaattaacaccgataccacctcaacttgctcgctgcatccatgcattcttttaattacaccaaacccccgcatctgaactctgaatcaattcagattggattggattctcctgtcctctccatttgagattaacatatgttcaaactcacttgtttacaactcctcatcatctgactaccaaaattaataaaacaggtaagtaacttacgcggtactctctatatttggaagctcttaaaaggagaaaaacttaccaagtcaaaaacactaagaacccaaactagacttctgaacccatacttgtttctgcaatttcattgaccacagagatt

SEQ ID NO: 179960 - DNA, 815 bp, Cannabis indica
gaattagctttttgacatttaatatttattttttatttgaaaagaaaaataaataaaataaaaattaggttacttggcattctccacattttggtccttaatcaactatttatatttatatatataattgtggaaggaataataatgataaaaaaaaataaaattaaaattaaaatgatataacgtgaaatgaagaagtgtcatttatcaacccaacactttgttttccaagttcattgaactatatatatacatacttttaatatcaccctcttattatttttgttaatttccaatccattattttatgtataaattatatgtatatgcatgtaataataaattattagttattattattatttggtggaagtctattgttaaaattataaatattttgaatgattatcaacacaaaatacaaggttgtgttatgtcatggtcggatgtatgtggagcatgatatttataaaggtgaaattaattaagaattgatatgaaaaaaagggtttattaatttctctctatatatatagctccttttatatttttgttgacatgaataatgtagtattttttcttttttttcaatgatgaaaaaagggactttcgatctctttctatcattttcaagataaattaacacttactaaaaaaacaccacaaggtaattttgactaacaatttattactacaaaggaaacttatagcactacacttacaataaaagagtgaagtgcatataataatttaatatgttaatatattgtagattatatacttgtatatatatctatcatatatatatatatata

SEQ ID NO: 179961 - DNA, 626 bp, Cannabis indica
actgcttaccccaaaagaaagcccatatagtttaattatatataggttcagaatacagggaaaaaaaacaaacttgagtagagtaccagcattttcaaggtcagggtcagcaaccacatttctgccaagctttataccaggcaaatatttaacattttcctgatacaaaatcaaaaattcaaaatgttacaacatagaattaactacaaataagaaatgttatcatgacattacattggttcgattgatgacttctgtgagcttttcaccacttggcaatgtttcctcaaatacccacatcctcacttcatctgaaattaattgggttatcattaaaagcaacagaatcgtcagaagccaaatcaattcaacaccaattgtagtttttgttcttgtaaaatttgcatgcaaaatagaataaaaaaaaaacagactattaattaattaccatggaaagaggggagagtgagggtgttggaatgcaatgagcttggaagccacataccccagttgccgcttccgataactgtgactctggatttggagaaaggcggttgttcatcgttaatgggggttaaagatggttgaactcttgagctggaggagccatgaatgaagatgaagat

SEQ ID NO: 179962 - DNA, 1021 bp, Cannabis indica
atagggtaccttggaagggggtacagaaattgctgtgaagagtctatcaatgaattctggacaaggagtcaatgagtttaaaaatgaaattaaactgattgctaagcttcaacatcggaatcttgtcaagatatttggttattgtactcatagagaaatgaagctattaatttatgagtacatgtccaacaaaagtcttgactattttatttttggttacactctttcctcgttcttttaacacatgtgatgttcaatttgtgaaaattgccaattttgttcaaattaatgaaagtagaaaaactaatatttgcagatgaaagtcgaagcatactattagattggcctaagcgcttccaaattgtgtgtggaattgctaaggggcttctatatcttcatcatgattcaagattgagaataatacaccgagatctcaaagctagtaatgttttactagatgaagacatgaatcccaaaattgcagactttggcttggctagaacttttggtggagaccaaatagaaggaaagacacgcaaagtagtaggaacctagtaagtcatctataaaaaactcaattcttttgtaatattaatcaattgtatactaattataaataattattatgcaaatgtagtggttatatggcgccagaatatgcctctgatggcaatttctcaataaagtctgatgtattcagttttggcatattgatcctagaaattgtaagcgggagtaaaagtagatccctttatgatgaaaatagtactctcaatctcgttggatatgtaagtgtacatacgaaaatatttaattaatgttacattaatagtgaattttgtccattttatttatgtttgatttaatattgttaggcatggactttgatgaaggaaggcaatgaatttaagcttattgagaagtgtttactaaagatccaaatgacaacatggaagaagaattgcgttgcatcacattggccttttgtgtgtggcaacaaatgcctatttgataggcctga

SEQ ID NO: 179963 - DNA, 802 bp, Cannabis indica
atatttttataaatcgggatcccgagactttttgtaaaacggtttataagtttaatgaaaaagcaaaattttaattaatcacgtttttccataaacctcgttgattagcaacgagctgcacagtacgtttaaaaatcacgtaatacgcctaagatagttagggtgttacagaaaccgttagatgttcatattttatatataaagatattccaaaccactcactaaataaattagtttagagctttgttaccattccatttgagttccattgtaataataataattaattaataggtcgctcctccaaacctattggaccttaaatgactaaaaccaatgtcactcctccaaatttgttggtgggttccgagcctttctctgacgagtgtgcagcggactgctgccttcttgcttctcagattattttttgtcagaaattagactccttaggttacagatttgggtttttttttaatggaatcgctagtttggagagggctttattttggggtttgttcttctggttttggttggtcacagtgggttttgcccgttttgatcctgatgagttggggtaagtttctctaagcttcgattgcctcgttcctccttttgaaatgtttccttcccctatttgtgggtgtctcgaactggtttttggttttttccctctcgactgtgttcttgctttctcttgagggatgttggtgtggtttgtgttggatcagttatgctctatcctagtgaccggacaggtcgtctgtgccctataagagttgaatccctttctcgccttcaggga

SEQ ID NO: 179964 - DNA, 893 bp, Cannabis indica
tatgtattcatctctttcattatatattcatcaactatataatgaatattacgtttgcataatcttcaggatatatgcaagattttattgaggacgcataatcttcaggatatatgcaatattttatcgaggatacataatcttctggatatatgtataatttatatagattttctctatcatatcatagacacacatatattgtaaatattatgaatgataagaacataatatatatatatatatgaaatcaataataaacatataaaaacatatacatacacactagcggacccaatgaaagaccattgtgggcttaagctcatgcttaaaaaaaatatttcttttacttcttaactattttttttaattattttaattgcccacaacaaatgcttaacaaaattggagatcaatagttgaatgatagtttcacagtatatctcgaaaagaatgtattcaatggtattaacaacgagcttatcattcatcgttttcaaaacatgaaaactcgtcgatgacaactctaaatatatgagctcaaaaattgatatattttctaaaattttaggatattgagtatgttatatatcttgaacattgttttagattgccttttttttttactattagaagatttttagtgcttgatatttaatatctttttagttgggaattaaaatattgaattgtgtttttctttatatttacttgtttttttagtaatatttttatatatgaaaaaaatttacgcccaccctccaattaaattctaggtccgccactgtacatacatatataatatatagatatatagataaaaagaaaaaaaataaaggaattacttgtaaagttagttttagttgtagatagagtatatatataaatatata

SEQ ID NO: 179965 - DNA, 708 bp, Cannabis indica
aaagggtgccatttttaaaataatgggggggaaagtcccatttcggattatttttctttcttccgtttgacattttgtagggtgtgcaggcatgagagagtctgtcaacaagggagaaatttgtttttgttgctatatatttcttttcctcttgtccatgattgcttgtttgttctcaagcattttttttcgtatattttaatttataacttgtggtggttcgcaaggtcaacacacgatcaatcattgtaataattttatgccacaatgcttagtacatacatacatggacgctgataaatatcattgtttgccttgataaaagaatacaaacttaaaagatttcaaacataagtagattaatatatatatttatgatcgggggacatcaaatcaataatctaattttatcagctttggtaattctcaatattcatcggagctggttctttgtatgtattcacaaagaagatagagaagagataagaaagaaaaataataatacgtggctcaaaacaggtgacaggaataaagcatgggaaagggaatgtataaatagaagaagagatttttgaaagaaaaataaaattatagacaaagactcttaccccaatcaataggaggtgaaataatagaaaacttttcctttcttaggatatcttttcttttttttttcttctagcgactagctgcaagttccacctttga

SEQ ID NO: 179966 - DNA, 722 bp, Cannabis indica
catcaaagccatcatcctcatacgggacttgtggaacaacaaacactgcttactcaaaacccagtttgtaaaatagcatatgcttttcattttgatgtcaggagttaatattacaaactttttcttgaagttaatatatttgtgcattttgttgtcagaagagcttggaaagaaatgaactggtacaagcactaaggagagtatccatggaagacagaacagttatactaacaggtattgttgatgaagcctggacgagtcctggctctgtcctagacctctttctggaaagctttcgactaggacaaggtactgaaatgctcttgaatcacttgttggttgttactattggaagcaaagcatatcaacaatgccattccttgcatccacattgcttggagctcaccccaattggttccatcaacaatttattgttggatgtgctcaaactaggttacagtttcttattcactgtaggttcttcacattacttgctagttgaaactatttagctatatcatgttggtttattatgtatgttgatgacaaattgatctggattgcaggaagtagatgttatgtggtttaggactctagttttcgagataaacccgttgcatgaaatcacaatcccatgtaatttactctctcgtggatctgaaagtgaaagaaacagaccgggtagaggactattctacgtgaaatcaactgagcgagcaatc

SEQ ID NO: 179967 - DNA, 619 bp, Cannabis indica
ttcaaccttatcgtttttagcaaaacgttcctcaatttgttcaaggaaattcttagccatagtaaccccttcggattctgtgccccaaaaaggcttctggaatgctgtgtttcataatcattagactcatgcgatttgaacgatcccacctctcaaattcccttttatcatcatgggaactttccttagtgagaggtgcaggttgttcattccttagtgcatggtctaaatccatacatcccagaactataagtaggttccttttccaatccttgaaattggtcccattaagcataggaatagaattaatgttagcagatattgaggcagcagaagatgaactagctgaatatagaacaaataaaacaagctcacattaatatgcataattaaacaataaattcaaaaattggttaatcccatctcaagataccaaacacacattaatatcaagtctttggacagtaatattaactgtaagcggtactcttggtgtagcaatcaaatattgacaataaaactgtgtcaaacaataggtcaatctttggactaacgtattgctcacacaaaataccttataattgtcacacatttatcgccacaggtatgtttgaaatct

SEQ ID NO: 179968 - DNA, 646 bp, Cannabis indica
atccgggttcgggtcctaggtcctagtcttggtcaaggtctgggttcatcaggtcccgagtctggatttgggtctcgagtctacgtctgggtccaggtctgggtctcatctaggtccaggtccgggtcccaagtctgggtttgggtcttgttccagttctaggacccgtatttcgatcccgatttgggtatgggtctaggttcgtgtttgggtctgggttcggttctaggtcaaggcacggatcctgatcgtggtccaggcctgggtttgggtctacgatcaggtcccgagttcagttcggttccttgtcttggtttcggtcttggtctaggactgggcccgggcctgagctcgggttctgatctttgtttggattcggggtagggtccatgtctagttcttggtccgggttcttgtcacggtcctagtcctattccaaggtcctaatctagttcatgtttaggttccagttttgggtgttaggttcggttctgggtttgggtccttgtccgagttcaggtcctagtctgaatccaagctccagacatcgactatggatcttctcaagccccagttcccatatcctgagttaagatctggatctcgtcacaagtcttggtgtggtttagattcaggttccggggtc

SEQ ID NO: 179969 - DNA, 826 bp, Cannabis indica
gatcatttgatctaggatcaactaggcgatattgacttgaatagatattacggtaagtttaataaatctaagtcaaagttcaatatcggtcccttccgatgcatactccatgcatccaacctgagctttactttaaccaatgctctggaaagaacatagcacttctccaaatgcaagtaaactctgttgtagattatcatatcagtaaaaccctatgtctgataaatctaggaaactttattcacatagtcatgtttactttccaatgtgttgacggcacaataaacaggatcaagtatgtgaaaagggttttagatgaatttatacattatgtacatataatcatgaaataaatcatgtgaaccatgcaacattaaatgttatttctgatctatattaataagtaaatctgattatattgaaatgagttttatttagggcataaaacccaacattattctctttctcacctattggatggtgaaaaatggactgagcattagactataccattggtaaatcacatcaaggttaatgttgatggagcattgtttgagcaagagggtcggtttggtattgcctgcgtggctcacaatagtcagggccaagtgatgaggctatgactttgggtaaaataggacgagttcaacttgaagttccagagatagttggcatcaaagaggctttaagctggattataagcattcttggcgacatgtaccttagaaatcgatagcctggtgtgtgttcaagcaattcgaaagtagcatctcctttgccatctcagttttggtctttttagtctaggatgttcataccttttaat

SEQ ID NO: 179970 - DNA, 605 bp, Cannabis indica
ctttttcagtactcaaagtaaaagtactatatattattcctacttatgtatttttttcaaagattatattgtttttgcaaaaattttatgaatacattgatatattataaaattttctagctatatgcaaaatatttatagcaagagaaaaaactatatttttgcgtaaaataccccttaataatatattattttacttaccaggatctttttgagtactaatgagctcaacactgaaatttgctacaccaagaaaatcattagttttatccctcaaactctggggtttctcaattaatggagctgtttcacgttgtaccacaacattaactgtaactctctcagtggctgttttgtctttacttgataccaatcggccaagtaaactagctttgataatattattgcctttgccacgatgagaaattgaaacaccaacattatttttgttaagtgtgtttagaggggcactaacaatgaaaatggagattgaaaatgataatttccatggatgaatggtttgtttagaacaacactagtttggccactgtaaacttgaacatgaggcttcaacatttttgttttgattaattagtacaaactaa

SEQ ID NO: 179971 - DNA, 789 bp, Cannabis indica
atctcgaatcgaacttgacttccccttctttttcttcatgaaaaaccacttcatgttcttcttccccatcgatacaaatatcaacccatttggttttttctccttaatggacccactactagaagccataggagatgattacaaaagagaaaagcgacacactcaaaaccaagcaaaagaacttaacaagtaaacgaatactctctaaaacagatagaccgagaactctctaaaatagagggaattagtaggtggttatgctccaattggggtattggatgatcattttttaatatataatactttacaaatttaaaagaaagtacatgtatctgttaagcatatattaaaccgttaaggaaaatatgatatttttttttgaacatataatatgatattttaattgagttgtaaaatatatcagttaattatgattgaagtcttaaataggatgtgacatttaaatgaattgtaatagtttaattggattgggacatgatcatacaagaagtgggacataagatttggtccctttttttatgattattttttttttagcaaatgggatgtatttaccaaaacttcaattttacacatgaaaatgaaatacatacatatattttttttggaaaaattaaattgttattataaatcaaaagtcgtttataataacaaagaaaataggaggtggaatttctcctatccaactctagtgcatgttttgctaatccatgagcagcatgattagcatttctccgaacatgagaaataacaatactagaaaaagta

SEQ ID NO: 179972 - DNA, 768 bp, Cannabis indica
attcgcttcagcattgcttcagcaatctgcctcaatttcagcttatgttccacttcttccttgcttcctttttcaacaacaaacaagcacaattaattagaaaatcacacctaacaatatcaatatttacaagacttaaaagttagcttactaaatagaaaatgacactaaaactaactaaaattaagcaaacaaacacattttcactactcttctcacaatacttttagtttaaaagcataaaaataactctataccatagagttatcaatggatttcatccgtgctatgataaacacccttatgtattggtattcgtaactagtttttcattaagaaactagtttttcatcacgaaactggtttttatattcaaaagtaaaatttataataaaaaaaagacaaaacacaataaaaaaaataaaacaatttcattacattaaaacagaggtgctcgaatattactaaaaattaccttataaaactgcctaaaaacaaataaaaacattaaatatgggctttaaaaacctaattttcatatatatatggcatattaaataacataaaaatacctaaaaaaaaatactatataaattggtcaaacctaaaagtaccatatttaagtgaagaattttaaaatctcacattgagtgtaaatttctctttttatatttgtgctccaatgcataaagtgcaaattagctataaaagttaatattaccattaatactcattaaaaatatacaaaataattaattttagttatat

SEQ ID NO: 179973 - DNA, 718 bp, Cannabis indica
aaaaaccttgccagaaaaacccagtgggacaaaatctgagctagggaaaagagtacaatatatatttcatattcataattatttgcaagttgcctcgttaaaaaccttgccaggaaaacccattgggacaaaacctgaactaagggaaaaagagtgcaacatgaatatgtctccccctccctacagtcgaccaactaattagtagtacctacctaaatttaacttttttcggttttttgggtagtaaattaaattaattacttcctactaaagtaaagttaattttagttttagtttactaccttttaaaaactttttaaaaattactacccaacctaattaattaaattacttttcgtttagtactactaattaatttttacttttttacttaaacttaaccttttcccttaacgaaggtaagttagttagttagtacggttacctttaaactttaaaaatttaagtaagtagtaggggttacgggggtttcggtaacggaaacttaagtttacgttttacttttacctaaccctaaaactttaagtttagttactacttacttactagttggttggttacgtaaccaaacctttaacgtttttcgttactaacttaaaaacttttaaaaaaaattttttaaaactttaacgtaaaggtaagtaattagtaacgaaactaaactaaaccaacttaaatttaaggttacggttaactt

SEQ ID NO: 179974 - DNA, 1018 bp, Cannabis indica
caggtatataattgtcgggatgccccaaaacattaggagcataaaaaatccaaatggaagaaaagatagcaaaagctacccaacctactagatcctttacataaaaataagggtaaaaagcgattttatccatctctgaatgtacacccaatggattatttgatccatattgatgcaatgcggccagatgaagaagactggcgcctactaaaataaaggggagtaaatgatgaagactaaaaaaacgatttaaggtggcattgtccacggagaaaccaccccaaagccaagtcactatggtatctcctactacaggtatggcgctagctaagcttgtaattactgtagctccccaaaagctcatctgaccccaaggtagtacgtatcctgtaaaagctgtcacaatcattaataggaagattacaactccgagacaccgaacaaattccctaggactgctataactcgcatgatatagaccacgaaaaatatgaaggtgaaccacaatgagaaacatacttgccccattagcatgcatataacggagcaaccagcccccttcaacatctctcataacgtgttctacgctgttgaaagctagatccacatgaggtgtgtgatgcatagctaaaaaaaacgccagtcactatctgaatgactaacaaaaatacaagctaagggaccgaacccccaccaactaacttaagattgtctcggggttgggtataatctatcaaatagctgattaagtgtggaggagtataggttgtttaagtaagagagaatcgttggttccgttacgagtcattttcttcttccttatcgtgacaactcttgttcccctacccttttagtcgtctgggcccgtacttactattatataattattatatatatataatatttattattattatattgtagatcttcttctctcgtgaagaggcgaagtgtgtggagaagaatctaaagggagagattcgtcaccagcggacgagagtgtgaccctaacgcaatt

SEQ ID NO: 179975 - DNA, 789 bp, Cannabis indica
ttagatacatatagattgtcaagaatctaaatgaatacttgcgtatatttattattaccaaattccatcctccaataatattttcatgcaatatcattgttttacctattttataataaagatattgcataaacactattttatttcaaaatttaaaatagacaagaaattatattatagaaaaaattatctattttacgtgtggttggtaaaattccgagattacaactgataacaaggcattattttcacgtgacaatatgtgagtggggtcatttttacaataatataattaccgtttaaaattgaaaaaaaaagaccaaaatattataagttattttaggattgaaaaaaccaagtggcaaaataacgttattattacaacgtaactcaaacaaaaatatattaataataaaataaataacaaaattaagttatagaaaaagtaacttgcctcgtacattataaataaatacttaaataaataaattttacaagtatttaactgttaagtaataatttatctttcaattttttaattagtatatttaattttttttaaaaaattaaaatttaataatttgaactaattaaaaattattacataataagtatttatttaaaatcatacataacttaaatatttataccataatattcttataacaaattttgagccagagttagccatggcccatggtcataataaactcgtaactcattaacataataagccattggtttcaaaaaaccgaagtggcgagtcatgagtgtgagccaactcgagtc

SEQ ID NO: 179976 - DNA, 722 bp, Cannabis indica
aaaaggataaatcatttatgatttgtttcgtaaaagttattgactcattcttttattttgttaattaatgataattcgagtactttgtatatatgttgcaaatggaatataaagcatgatctaattggtatctttattattatttttttatatatgatgatagttattgtagtcattacagattttttataatttttttttttgaaaaaaaaaatgatatgcttacgaagaaaataataaacatatattattgctccttatatttatacataaaaaataatttgtatactatatttagaagaagagtgttaatactacaacctcttagttaattatcgtatttgaaaacacatatcagaatattttttaaaattttaatttttcataacagtatttattataattacaatattatctttgtaattttaaaattgttaatagtttatattactaaaaataaggttgatatttttttaattacacatagtaaactacactactatatataatattaggctttagatttgtggttgtttctgttaatatcataaaattatttggtcaagatctattttgtttttgttaatatcatttcagggtatatttttagatttattctcttcgccaaatatgactctctctctctctctctaacctattctcggcctatttgactaaaaacaaaaactaaaaactaataaaaaaactacctataatttcga

SEQ ID NO: 179977 - DNA, 872 bp, Cannabis indica
ccaatcccttctattagggactgaaataatcagtagagcatgggttttgggtttgagcagaaggtaatggatggaaatgggggaatcacaggtgaggtttggtggaaaagttggcgggaaagtgaaaagttgaaatttagggatgtgagattgttgagcattaggggcggagttgaaagattattaggggcggtaatagggaatggtccgccggtaatagtcattttatatatatgatatgaaattgggttcatcttcttcatttggttgcgaatctcttccactctcagccccccaaaattataaaccctagaaaatcatattccctgttaccggtgttaaggtcggccgcctctctcagcctatcacacaggtaatgtctcctctctatttatacaaattttgagatatatacacacattgtttatttatttatttattttaaagcaatgtatataaacacacatgatttgttagggtaagccgataaataaaataataacaaaataaatcttattacttgtatatgtttatgtgtatttgtgtagatttgtttatacattaggatgtctttattttatttttaattttttttaatgaagggatgagtttatgtttagtactaagaggaattacataataatgaaatttttttgtagtagactccctatgaggtttttggtaaaattttttatctgtatcgacatttaaaaaaaaatagtttaatttttttttttaattaatcacatacattgtagctatttagaattactcgtaagttttaaaaaaaattaaaatagtttaatgtatcgaatattaaacttaaataattacatatgcgtagaaaaaattagcgtaagctaaaaatatat

SEQ ID NO: 179978 - DNA, 894 bp, Cannabis indica
atgaactaataaggatgtctcagaaaaaaatagaaagtaaattagcactatcctctaacaatgattatatatagatcagtacaagtaaatgatctcatagagaacgcaaaggaaatttgttaagttgaaaaaataaaagtgaaagtcgaaagtcaagcataaaagatcaatcaactacattattatagttatcttgagtatctgtgagcttcctacaaaataaataaaattaaattagtagattaaatattagcatatattaaaataatattcataaaagtaatattttttttttcaaaaaattaaaataaaaaaaaacttatatgatgtaaggatgtaaaacaataaatgaataaattaaaagatggctattacatttttcatacaaaattagaataaattatcaaaataataaataaactaaattcatatatatctactactgaaactatatatttaattaagtaaatttataactcaccaaaataaaaaaaaataatcctaattgaaatagtaattatttaattaaaaaatgataatgatgtaacgagaaatgaaaaaaaaaaacaatttaatactctatatgagtaagagaaggaaaacaaataaaacatttaatactctataaagaaaaagataaaaaaaaagaacaaataactatatcaaactaaaataagtctagaaggagttgaatgaacttgctgcaataaatctactattgtatcttctaagcgatggattaaactgaatgtaagtgttcttaaagttaattataatgctaaaatttttttctatctcactttattttagtttttttttttgttattataatgatatgggaagtcgggtgaccgattagttgtactcgtttttctaattcttaagttggttgtg

SEQ ID NO: 179979 - DNA, 946 bp, Cannabis indica
tcaatttaaaccctttaattgtttctgctagaccaacatatttccccggggaacctgtaaatacttctgctacgaaaaaaggttgtgacaagaaacgctcaatttttcgtgctcttgctacggttaagcggtcttcttcggataattcgtccaacccaagaatagctataatgtcctgaagttctttgtaacgttgtaaagtttgtttaactctttgcgcagtttcataatgttcttcaccaacaatccgaggttggagcatagttgacgttgaatctaaaggatctactgctggatagatgcctttggcggccaatcctcttgatagtacggtagtcgcatctaaatgtgcaaatgtcgtggccggagctggatcagtcaaatcgtccgcgggtacataaactgcttgaatagaagttatggacccctctttggtagaagtaattctttcttgtaaagaacccatttcagtactaaggaggttggtgaactaacctacaggacggaggctattcgtcgaccttaaagtaacgggcggtaacttaccgttcggacttccgtgtcgttcggaaaacgaaaaaacggaaagtaattagtttcgtactaaaattaaaagtaaggtaaacggttaccgttcgttttcgttactaaactttaaacacttccggtaacggtaaaacttacccgtccccgacctaagtttaaggttaaggacgacgttaaaaccgttaaaaaccctaaccttcctactaacgtaacggaccccgtccccggttggggtttcggttacttacttactacttcgtaccgaacctaagtaacgtaacgtaaggaccgacccttttacgttttagttacggttccggaactaaatttttagttttttcgttacttaaattttaaacgttacccgaccgaagttactttttcctttactttaccttta

SEQ ID NO: 179980 - DNA, 684 bp, Cannabis indica
tatatatatatcatatatatatatatatttaaacttttttaatcattataaataatagatatatttattttaaattgacattcaaaataatataatataactgaataacagaatcagggtattacctttattattttatattatcctttaattttaaattcattatcttataacatatttaattcaaataattaaaagataatttatttatttattttaatttattttaaataatttaaataatcaaaacaaaactattttgcctttatatgtcacctacacgtgtaagccatagcaccacacgtgcgggtcatattttaaagctcaaaattaatttctcaaatttgtcttaaataagatttattatttattttacaataaataataattgattgattctcattagtctcttatttcacttgtgtttaacgagttttttgaaaatcaataatttaaatgtaagagccaaagaataataattcagaaataaaagaaataagaacactcaagatttttacgtgattggggcattaactagccttagttcatgattcaatattattaaagtaggttagaaaagccttaggaattacaagaaggtatgagtactctctctttttcctaggcaagttgagtaaaaaaattctaacccttttcatgcaggatccgttgagtatttatagt

SEQ ID NO: 179981 - DNA, 822 bp, Cannabis indica
ctaccttgtacctcaccttgactcccatattaatataatattgtccgttttgggtctaagccctcacggttttgtttttggacaccttcccaaaagacctcgtactaatagagtagtattcatccttatatacccataattctcactacgatatcaactcctaaatttccctaaattcgtttgataatccctcaaacacatgaaaagggatgagctccaagaacaacacagatggccgagcttttccagtaagaggcctcgacttcaacctcattcacatcaattttagcaattattaatcacccaatttgattggcttagtaaaattaagcttaatagagggagtccttatctgattaaccttgaattcggtccaagcatcctttgctaatgattgaaagtccttcacctcaacttcctctgtccaggatcgaattccaaatctaatcagataaatttcattcgaaagccccaaatctatcccaattatgactgagtactgtgaaaatcctcagtctagctagcttcttccacattgttctggatcggagggagctcctattccgtcatgatgaagtcaatagtctaaatctcaagcttgagaaaaaaatgattcttcatgacttagaatcatactaattaacaataaggttttaaatagtttgatgtatattataatttatataatttgaaaacacaaaatttataattgaacattattaagttctatatgtcatatactaaactgtacatacagttatattagtaactagttaagtctgttttacttctcccttttctggtcttatgtcagaagttgta

SEQ ID NO: 179982 - DNA, 837 bp, Cannabis indica
atattcacatatgtttattatatcactctatgtgtcatgtttatttttagtaattttaagtattgatttatatttatatacattaatgtttataattttgatattgtattttattaaaaaaaatcttatcaaataataataattcatactaaaatagataataaacatttatattttaataaaaaaaatatttaacttgtttatttttataaaactgtttaattaattttacgaaattgtttattttgagttttaataaacatattttattatttaatgattaaaatgtatggtttcatgtaataagttttcaaaatgtataagtttttaaaataatttttttttgcacatttttgtaattatgttgtttttgttgtacatttatgaaaaaaagcccaatttttatatatttatgtagtttttagttgtaggtgattactaattgtacgaaaagagttatttttgtttacatatgaggcagatgatgtggaaatcttgctttctttccatccacaatgatctgagggtttttttttttaaaaaaaaaaaagttggtttttaaatttactctactttttagttcttactttactctattataatgtttttttaatatgttatatatatatatatatattgttaagtatttataaaaacaaatatttacagtatttaattatattttaaagtgttttaatatagaaacctaaatatatttataaacctttagttaatcatagaagaagaatatgaatatagataagcgaaagtattatctttaagctattgttagagattgctcaaaaggttatgtatcttctaagaatatactatttc

SEQ ID NO: 179983 - DNA, 634 bp, Cannabis indica
tttttatgtcccacaaaaatagtgttggacatgaaaaatcttatggggagtttcatagtccaatattgttggacttggaaaaaattacattatgtccaataatgctggactaaaaaaattatagtggacgttataggttgaaaattgctcattataattttttattttattttatttttgtgatagagccacgtccaacactgttggacgtaaggcccaattaaaaccccaattaataatagcagcccattatcatactctccgttcaactttgaatgagcagcacaccagcgcaaaaatggcaaaaaaaaccagcaaccgcgcgaaagagaaaaaatcgagcgtcgttctaaacatttcgaggtagcttcgttctccactggagaagtaaagccaatagctccgcaagtccgatttcagccactgggggttagttttctcaaattttttctagagtttcgttgcccttttctgtacttgattgttttttttttccttgaaagtttacagtggtttcaaaacaattttgttgggtggataatgtttctcactttttttttttttaaaaaaaaaaaactctcaagacaaaaattaattatacaggttcgtaatttcttgattatggttttagtta

SEQ ID NO: 179984 - DNA, 725 bp, Cannabis indica
gaacactattttctgtattaaaaatgatttcgaatttcttaaaattttacaggaaattttaaataactacaatatacactatcatataaaaaaataaattaaatttttgaagctcccattagcttttcaggtttaatcaaacagtcatagtaattgtttagacctttctctttctctaactttttatatctttgtgtaaaaatatgatatgtagttgtggcaagctttagcaaaaacactatcagaacaagctgcttgggctttagctatggatagaatggtgaacatggtttccataaactcaggcctagtccttggcccatgtgtcactcaacaaaacccactctcaacaacatcttatctcaatggtacaactaactaactacattacattctcttcactacaacttctgttgatttctttctcaaacaaacactcttcaatttggtatatataggggctgctcagatgtatgaaaatggggtattagcatttgtagatgtggactttttggttgatgttcatatcagagctttggaagattcatctacatgtgggagatacttttgctttaattcagatagtgaatactgaggaagaagctgttaagcttgcagaaaagttgagccccttaatatccattccttctaggtaagaagaacatataacaaaaccttacatttggtagggatgtttgcagcaaactctcttaacatttacaatt

SEQ ID NO: 179985 - DNA, 830 bp, Cannabis indica
gattttgattgtgatttaaattgtttcgttggtcgctaaatgaatttttgtaaaaatacaaaaaaaaaaaaaaacaaaaaaactactaatttaaagtataaaaattaaaaaacccctaactaaccaaatttttatagatacactttatgaagataaacaatcatatataataatagcaatatatacatattaaagataaaagtcttattaatacgatgttaatttaataactataaaaaaaagtgaataacattttgaacattttaatatggcatatactttccaatttcagtcccaaataattcatcatgtacagctatataaaagatatttcttgtattatcttctcatttttttcctcctcttattatgctcgaaaatcttcatgcataactcatttatgctgttatacacacatgcattattttatttatgatgcaaagatatatgtggtatttttagatattagtagataagaataagaaatctacaaattggtagtggggtatcaggtatagaaaagaaatcctgattactaggagtgggcaaaaaaaaaaataataagaaaatgacttgtgagcaggaaaaaagaaaaaaaatcctacacaaaaggctagaatcaatggatcaatgtttgatagctcatacattcccaattatatttgtcatctacattatataattgaaaaaacttatggtttgtgattgatctattcatgccaagattatttatgtagtaatgaaagtaaattcttaggaatttcaatgcagcaatcagatattcactatcaatcaatgctcacatatctcatgatttttcttttattgta

SEQ ID NO: 179986 - DNA, 968 bp, Cannabis indica
ttgtaatgggttttatttagggcacaaaacccaataaatactccaatagaatggcctcaataattgatagtatggtgcgtgacttttggtgggggtttgagaaggataaccgcgggctctatctcaaagcttgggacaagttgcatcttccaaaatccctaggaggattgggtttcaagaaatctagataaatgaaccaagcttttctagccaagtgggggtggaacatcctgaatggaagtcaatctctgtgttgcaaagtgcttactgtgaaatacctaaaaggtaaagagttccttaactgtggttccaagaattcagattccaggttttggaaaaacatcattaaaaccaggaacatccaaaagaaaggtgcatgcaaattggtggcggttggaagggatactcgaatttgggaggatccttggattccccacttaaaggagttcagaccaaagccccgctcttctaatactggaatcacagatttgtggctaaattgttaacttcagatggtgggtgggatgttcataagcttaatagcctattcgatcgagagactgtgtcggctatcttgagaggagggtctccttttggtatgggggaagataaatgggtttggactcttgaaaaggatgggcggttctcctctatatttgcttatctctctcaagctttggagagagctccttattatgttgtagctccttctctctagaataaactttggaacagtaaagtgttagaacgacataaggttctttggtggtgcatccttcccaatgctctccctcttagatctgttattaggaagagattttcatattgaggaggtcaaatgccctctttgtgggagggaggagtcgaacatctctttctaaattcctgtgatatggctcatcatgcctggcactctttttccttggggtatttatccgatcagtgatctggaatcagaatgtgattcc

SEQ ID NO: 179987 - DNA, 994 bp, Cannabis indica
aataaactacctttaactgaataaaaggtcgaacctgatttttgaaaaaaatcaacaaggtcaaattaagaaatttgtaaattttttagaaataatgaaagacctgagcagtaactgacacaattagtcgataggtcccaaatgtgtgaatggtaattaaggtatatagaattctatctcaaaactagctgacagtaacagaagtagcttatacatcttatgtatttctacaataacaatgtgagactattatcaatacaccctcctcacttggacttagaaagtatgggtataatgaacaatcttgaagggactacaacttcgaatgtgacatttgaaagaatcccataaggctaaattggaaaatttatgagtgtatacgtcgagaaatttgtgaatttttttgaaattgatcaaagaccccaatagtagaaattggcacacattggccgaaaggtcttaaataaaaggtcaaaggcagagatagcggaatttttttattactatttattttgataccatgttaaaatataagataaagtgagagtataataacatgcaaagagtatatatttcatacatcttatatatggtattatatttccacacattactaatgtggaactattaataatagatcctccttatatttggacctaaaaaagtgtgggtataataaacaaccgataagggaccacaacttcaaatgtgacatttgaaaaaatcccacaaggctaaattggaaaatttatgagtgtatatgtcgagaaaattgtgaatttttttgaaattgatcaaagacaccaaaaatagaagttggcacacattggccgaagggtcttaaataaagatcaaaggcagaaatagcggaatttttttattattattatttatttcgataccatgttaaaatttaagataaagtgaaagtatcataaagtgcaaagaatatatataagatacgagacaaacacaatacgcaaggctctaatac

SEQ ID NO: 179988 - DNA, 1092 bp, Cannabis indica
aggaggatggttcgtctgggagaacgattgagcacaataggtcaaaatcacagagttagggcagtagggtttgaaaggaagagatggcagtagatgtcaacaatggagagaaagagaggggagcggagcggagtggtcgacaatggcgaggaagagaggggagcggagcagtcgacaatggaggatcaacgatgggtcgaagatggccaattgtcaaagctttttcatcttcaaaatggttgaagacaaatgtgaatagtgaaatcgatttgggggattagggatttagaggttattttcccttagccattatatttctcgtctgttttaaaagctcacaatgagtttactcgattataatgaattgacgagaataaatctcaacttttaattttctatggtttctttaccgtcagtttttgttatagcgtcattttgataaaagacgcaaattaatattttttaacgtcgtttagtaaccgacacttatattttttgcacactattcacgtcggtcaacgctacgacgcaaaaactagtttgtagtagtgtcaaagtgttagaaaacacttccacctctctaaatatatatggattgttctagatttttcaaaagggttagtggtgactttcagtgtataacacccaactacaacttaagtagcttgtagtacttgtccaacctttgaatcgttcactctaataaattatttgtttgtcaacactcaatgacatcaaataacaacatgatcaatttaattacattattttatgaacaataattttaataacattatcaatgcaaacacatcaataatatggcccgtctagctagtcaactaaaattgcaaacaaaatttctacatacatgaatattatctccatatggaaaataatgctcgaaaaaatgaaagtcaatgttgttcatcatttggcttttcagtccatctttcttattgctctatctttaaagtttggattgtaaatgtttctctcttctcttgtggtaaaataattaccaaacataagattttcccttttgggggagaaatctaggccgtactactgcggctatccaccgctaaaaagctc

SEQ ID NO: 179989 - DNA, 651 bp, Cannabis indica
accgaactgctcggggctgaaccactataaaatttctgtgtcttctgattattattatttgctttattacgtattcttacaacgacacatcgtttatcgcttatcagaaagactcattgtcgttggctaaaagcgaagtcaacaattaggttaaactaatttaattaccgtagtacagttattcaaatcacgcaaatgggccttcacagttggggttgtttatgtgagggagggctgggttcagtatgtcgtacccactgctatttgccccctaactctcacacaagacccaaaagagaggaatttaaccttaaaatgaaggggagttttcctaaatatggaaattaagagtataatttactttttatggcaaaactaaataacactatagggttatgggattttttttttttacatttatatgggtttttttatgccatgtttttgtaaaaaaaaaaaaaagaaatcccatatttgtaagacaacaataagttttgccaaaaaagtcgtcgacaccaaaaaagtcgccagaaaaatacatggtcgacggaaaagtcctcggaaaagtcaccggaaaagtcaacatccccggaaaaagtcaacatcactggaaaagtccctagaaaagtcaccaaagtaaatgtctcatat

SEQ ID NO: 179990 - DNA, 1088 bp, Cannabis indica
gttatatataacgggtgtttgggatatatggcttttctttttatttgaatttaaatatgtacttctttaaattctttgtatccttcatatattaacaaaattaatttaaggtgtgatttcttaatttttaataactatgaatttttcttaagtatttggctatattacattttcattgttttttcatttagttagtgaaataaagcgcaaaattatattcatataagttgatcacttgataagaagatatccattacctttttcatttataattaagcaaattttttttgaaaaaataaataaataaataatatgacatctatagagtcgacccttttttctacctacatctttctaacttagtaagaaatattttaaatatttacacgtagaggatctatatatataaccttaatggataacatgaaatattttttgaattttgaatatatttaaatatttattacacgtcctgtacatctgtttaaattttgagttttgaagtcctctatataaatatatatatatatatatattaatatatatattatcaatgaattaattattttgactatctttctaactcttagaccatctccaaatggtacacattccaccaaatattttttttttcacaaacccatattttaatttattaaaaaaataatcttacatttaaccctaaacaaaatttattacaaaagtaataattaacttaacacactataatatatttaaatataaaataacaataactaatattaaataatataacttaaattattttaatattttaaattcacatatattaattatttaatttgtaaacagtattcatgttagatcataaattacctattatgtattattattgtaaataatgtaaaatgtgaaattttttaagtaaaatatatttatttggtgtgacatttaaattttagtaccgtacgtagtttgtagtcaccaaaaataaaaagttttaacgctaaattaatgtaaaaaaatatactaaaatgatgtaactattggagatagttttaacaagaatatttacaactcctattgttattattatataaatattgcac

SEQ ID NO: 179991 - DNA, 666 bp, Cannabis indica
tctcagtatcatatagtggaatgttactttataaaaattggttttgtgtcccgaatagtggtgtgctcataaagagatttttgatgaggctcagaccacttcttactcgttgcatcaaggtaccatcaagagattacgtatccaagtgtttaacttgtcagaaattaaggttgaacatcagagacctgtgagtttgttgcagcctttgacccttaatacaactcagtaatagtttttatttttattaggctaaattgttgtaaaatatcaatatttaaagaatgtaatgcttaaatactcaatttaaaattctcataattggataaattttatgtttagtttgattttatatataaaaaaatagttttcagtgacaaaaatacttaatattggttaattataatatttaaataccaacactattttagcagcaaaaatacctaacatttgttaataataaaagttaaacacgtgcacttttttcggctaaaatactaatgtttaagaccacaggaaccaacaattcaaagcaatgatttacctgatcttttccatgtatgtcagctttaacaagcttagaataaaattctttaggaccctttccatcagcaccaccatcttcaacttgtatgaaagcaactcgaagtgcctcattcctatgtgaaa

SEQ ID NO: 179992 - DNA, 928 bp, Cannabis indica
cattcaaactcttaaataaacaatgttaataagtttattatataagcgttttcttattgaaatttatattattaaatactgggcagcatcagaaagtaatcattaaaggtaatatttttctgtttagacaaaaaaaaaaaaaatcaaataaaatgtacactttgcctttttttttttattactaaaaaagaaaataataaaaaacaccaaaagctagacaaacatacaatacataaaatgaccttatatatagaccaagaatttatttataataaattattggattctttagttttgatgaacaaaaaaattaattcaaataataacaaataaaaaaaattaataaatttatctagctagcttaactaatgatacaccaaaaatacaaataaatccatgatatattcaaaaagagttttgagagatttttacttaattaagattttgtttattgtcgttgaattgtgacagcccaatgataatggctaagatatcattcacaatattatgtgacatgaaatgaaagaaaaaatgatgagttttgtatgttctattttgtagtgatgaaaagagaatttaatgctagtaaaaatagatgaatttaacatttttatttcataaatattctttgttgttggcatgtcacaaaactcatcacgaaggtcctcaataacaagttttattatttgacacttatataattagtatatatccaacttgttggaatttgactacttcaaaataccttaattttattatgtactgagtggtcaacaatggttgaaacgtacatattagtggtggggctgttcaaagtaaaagatcatttctgggaaattggcttatccctaactaaaatgaaatctctacctctattttggattggtctgtataaataaattgaatccaggtcatttcacacttaatt

SEQ ID NO: 179993 - DNA, 761 bp, Cannabis indica
cagattgtttcggactatgtgcgttactttcttcatcagcacacgtgagttaattatatatacatagacattttacacatgtatatatgtgcttatttgttcttaaataatgcattttttttttcataaacaggatacagctaggccaacctgcaactgtcaaagttgctgccaatctcatcaggcttttggcttacaataacaaggttggttggttaggattttcgccttttcctctgtccaaatattgaaacaacctttcttttgcttaagaaatattgaaattgccccttcattagctttgtaccctctgttctgtaaatattgcaggatatgttacaaactggtatgattgttggtggatgggacaagtatgaaggtggaaagatctacggagttcctcttggtggaaccatagtcgagcagccattctcgattggtggtatgttattcttctcgtctaaatttccctctcaatttttaacctcttacttaactctactgctatattttcattcataattggttgacacaccacacctctgttaatagttatttaaactagaaaacctctttgcataaattttgggtagcttctccaagccagtgataggcctccacttactattgtctatgctatataaaagaggactaggaaggctaaggatggggtggcagcagataattaaatttaaatctgctttaaacttctgttatgtgggaatttattgggtagtagtagtactgaggtgtatgataag

SEQ ID NO: 179994 - DNA, 810 bp, Cannabis indica
aattagatttacatttgggcctattgaacctattcaatccaattgtaactaaaatatgggctactttgtaatttaatatattatttgttttaaacaaaaatattgttgaatgaaatgtgggaaaaagtttttgtgatttgatgaatacaattgttacaactataattatgtttatacaatcaaattatgcataaaataattaattatgtttatcttagtgattgaaacggtgtgtttttggatcgcttggttcgccaagattgcctctcacaaataatcatagggtccattttctaatagcatatagtatgatttatctttgcggtttggattatttcgataatttgttatagattttgattgagatttaagttgttctgttggttgctatgaaagtttctatgtgaatttctgtaaaaatgcataaagaaaaaaaaactagttttaaaatataaaaataaaaaaatactttaataatcaagtatctaatgacactaatctacaagtgatccccttttggttagaaaatgtcaagaaagagaagtaatcacttaaaataaaataattttgatatctaatctaaaactatacctagatataccaaaaattatatttacaccacatttgttctattttctttttttggttacttcaaacgcatacattttgtccacttaatcataactcgttccctactatttgggcctcatcaatatttttctaaagcccatccttttctagttaagtttggattaaagaacccaatggttccataaatgctaccaagtaagtccactccatgaaagagag

SEQ ID NO: 179995 - DNA, 743 bp, Cannabis indica
ccaccgatcaccgtcaatgacaccttacaaatcccaagtaatatgctcattccttatcacgacgacaacacatctttaaacctcctaatagaaaatgtcttccacaacatccatcactacccagaaaatgtgtctaccatgatgaatcgagctatattaacaccaaagaactcttttgtcgatgaaattaatttgatgttaattgcacgtttcccgggagaagcacatcactactacagtcgagatgaagctatagatagcaccgagcaatcagttatggaagatttcttaaacactcttacaccaaacggccttcctccacatgaattgcagctaaagaggaattgtccaataatgttgcttagaaacattaatccttcagatggactctgcaatggaacccgtttgatttgtcgagcatttgaaccaaatgtgatagatgctgaaattgctgtaggacaccatagaggaaaaagagtctttataccaagaataccattcttacccaatgtggatgaaaatagcggctttccatttaaacgaacacaattccccataagattaagttttgctatgacaataaacaaatcgcaaggccaaacgttagattatgttggagtttatttgccacaacctgttttttcacacggtcagttatatgtggcattgtcaagggcaaaaacatcgtctacagtgcgtgtattaatccgacctgtgaccacaggccagcacgataagaacta

SEQ ID NO: 179996 - DNA, 541 bp, Cannabis indica
cgcgaaaccaatatttttacccgtaagtcactatttatttttcccttacggtgaccttgaatttgatatcatgtcttctaagcctcgtaaatcaaagaccccataggatccccaatgtcacctttgaggctgaactcatcgaatccaatgttaggtctatcagggcttatgtcgacggcatactagagtcctgtggtatcgagtagagtaagggttgtatcataaggttcgttgctcttggggaatttagttgttttcctcctaaaagggtactttgcgaggagtgcagtggacctagcactagcaattcttcaagcgttggtgcctggagcgtcgagcacatcaaggctgggggtagtccttcccctaaggggaatatttcaaggatttctgcaactatctcggagttgctccctttcagctgaaccccatctcgtataggattctcgcaagcttgaaggtcttatactatattttacgatgggattgccctactcccttagagatagtatattttactcgattaaagcagttcatgcaa

SEQ ID NO: 179997 - DNA, 778 bp, Cannabis indica
atttataatacgaaatttccttttaagttatggtgcagcttatattggtgctgtttttaatttttttaaatgtctttatatattctaaaatttttaaaaaattcaaaataatttattgttcgaactaaattattacaaaattttcaaaattcaaaattaaaatctaggttatatataaataattactgaataagtaaaattgaattaaattagacaaaaaatttaagtaaaaatttttaaccaccagaataatttaaggcacatgatttgatagatgtaaaatttaaggacaaaaatcataattagctttttaatatatattaattgtaattaaattagattagataggttagattaacattcaataatgatccaggcatacccaaaatcttataaaaatgaaataaataaaaagatatttttttttaataatttagaagcgataggaccgactcaagggtgaggctcacgcccaatgcccttcatttggcccaaaaaatcctttaagctaacttaagcgtggtgtatagatattatggttttttttcttaatgaactccttaaatggtttaagttaaagttgagatttaatttacagatgaaaccatcaataaatctgattatcaaagccaaacttcaaatgctaaataaacaaagtctaaatatagagtaacctatatatataactgtcctataatagtggatctctttgaccattgcattgaggtaggttagtttttcacgtgaatactctcaatgcatacataacttaaagtaa

SEQ ID NO: 179998 - DNA, 559 bp, Cannabis indica
ggatcatcgcctccgcttgggctccctttgcttagcctctccttgaacttggccttagaaggggcctcctgccgcgcaacctcctcttggagcgcccgcctttcagcagacaggtcctgcaggatcttcacgacttcgtctatgcccccaaattcggacaagacgaagccgtgattaattatggttttggaaaggcggccggcctctgcagtaatctggaaaaggaagcaagagtgagtgaaggccttaaataaaataatgagaaaagaagtaaatcacaaagtacttaccgcggccaaggagtggctgagatcctgaacttggaagacggagttcaaggatgcacaagcagcgtaccgcttaggcgcgcaccgagtcagctgggagacgtactcaccggtcatctcagcggcaaaaggagccaaggtaggcccgaggaaacggttgaaccagtccgtcagggggtccaggtttagatcccacgggttctgaaagttctcctcgttgagggaattttgcacctcctctcgcaaaaccctcctcaaggcctccacctcag

SEQ ID NO: 179999 - DNA, 709 bp, Cannabis indica
gtgtcaaaattttcttatacattcaataccgaaaaacatgaaaatttaaacaaactaccctaaataattaggggcccaaccatataataggtgctaaagccttataaggcgccaaagtcatatataatgacgcaaaatagaacaaaatcaatataaataatgctatatttatccattaaaaaaaatgctatatttataatcatgattccaaaaaaaggtaaacgtataaatataattattactcccaaaataaaagaaaatgcaaattaaattaaataccataaatgtagaaaccataattataggaaaaattaacactgatatcaatcaataattaagtatacacaaacttacgaaaattaagtaacgtccttcaatttcgtcttcagctaagtggtcaaatcgaatatccaccacatcctcactcaacaaaaaccagggttggtcacatccaatgtacagtaatgggacacaacaatgacaaaagcttaacgccggcattatagagagaaaaaaatatcaatgaagatatgaatccttttagcacacaataccataatcctgaacagacctaaatatggacggaaataacaataggactaccaaaatctctaccacactgttagcaaaacacatatatacaatgaaaaaattaaattaaccacaaaactcatacaaaattatagaacacattacaattcaaagttat

SEQ ID NO: 180000 - DNA, 571 bp, Cannabis indica
atgacctttttgatattcgaaagaaaattccatacccaactctcaaattttttgaggaataacaccttgatcgacccatataaatttagcttgaacaattattgctctacatcataatagcccactcacatagcaatctagtaaagtcaaattcagtgtcctaacgttgtaaaatggatgaaccaccctacattttgtgcacccctaaagaaaagaacaattgtttttctttaatattgaaattaaataatttttaataattattctttaaaattaaaattatatatttatttttggagttttgttttcaattttttttatgctttatttattatctataatttcaaggcttaaattattatttacaaagatatgattttaaagttttaaaattataaaaatacaattttctcgattaaaaagtaaaaaattaactaaaaaataacaagaatcaatcttacaacaactataaatatactataaaataataaaaaaaataacgagaaaactaactttatgaaaattataattgttgtgactataaatatactataaatattctatgtattaa

SEQ ID NO: 180001 - DNA, 596 bp, Cannabis indica
aattttttagttcaaattttttctcatggtcatgtaaattatacttatttaagtcattttgcaaaattttaagaaatttgaaaaagtttaacacaccgaaaattgtgttcaagtagtgtgttgcacgcgtgactattttattttatacgcgtgtaaaatagactgtttgaacattgttttttatattgtaaattattctaatttttttaaaattttgtaggatattttaaatagctaacatacatgaatatgaaaaaaattagagtacaaaacttttctggatgccgaaacaagtagagggtgtatcaatacatccatagagggtgcattgtagaatcatcctaaacttttgaatttgaattttgaatttgaattttgttagatttaggttgttcttttatgttagtcgtttttttttattgattatttagcatttttgtatgtttggtatggtagttgtttttaatagatttttaatagttgtattgtagttgtgttacaatgtgtttaatcatctaacttttattttggtcttttttttcaaggaatgggaatacaagtatgttgaaaatccgatcactataaatcgaaggtcg

SEQ ID NO: 180002 - DNA, 863 bp, Cannabis indica
tttcggttcagttggcaatgtggactcatataaaggatgttttgctgcatgatacgacttgggtttgtggatgccattctgtgatctagtcaccattttgtgaattcttgtacctgtaggtaatgatgtctcttgaatggatatgggggcattgtgtgtgataggttgggaggttgttgaatcagttggtggtaatgacgatggtgactcatggtggggttctgctgcagcaggttgtgtggtgggtgaaattttatctggtggtgagtttgagggttcaacacgtaagatattcaaggctgaactgggttgaggagttgtgtttgagtgattaggtgattgaatagttggggaaagatttggtgtagggctgacagacggtatagagtactcagagacatcatttgcagaatttatatgattagtgtcaggcatagtagtattcgaatcagtagagaagaaagcagtaggcatagtaaaagaagatgtacctgagaaggagttgttgagtctttttctggaaatgattcttcatcaaagacaacatttcctgctatagaaagtctggcttctggttttcacagagatatcctttgtgagatgcagaatatctcagaaaaatacacctttgtgatatgaactccattttgtgtctattataaggcctcaaatgagggtagcaagcacagccaaagggctttaatatattgtagtcaggtgtattaccaataagcattcgagtggagattgctggtgtaaaacaggagttggtaaccggttgatgtaaaaagcagcactatgaaaaacattccaccagtatttgaatggtaaaccagattaagcaagcattgtgagtcccattt

SEQ ID NO: 180003 - DNA, 1600 bp, Cannabis indica
ttgtgttcaaatagcgtgttgcacccgtgactatttgattttatacgtgtgtaaaatcgattgtttaaactttgttatctatattgtaaattattttgaatttctcaaaattttgtaggatatcttaaataactataacgtacatgaatatgaaaaaaaaaaattagactaaaaaatttttcaagatgccaaaataagtaaagggtgtatcagtacatcccttttaaggggtgcattgcagaatcacccaataagatatatttgtgatataaatactttaatttttttaattttatatacttatgggaaattttatttgcacttataaaattataagtgcaccctaatattaaataataattaatttaaattaatttttaaaaatcacttttaacacttttttagaatttattttcttttaataaacgtagtactagatttattttatttttacattttttttaaatcatgtatgtatttttaaatttttttaataaaattttatataatattttattttaaaatttttgctttaacatttaaaatatattttatttttattttattgatttatattttgtaagtgtactaaaaaaagtatattttttaaggatatgtacaaaaaattttaaaaaaaaatgagtataaattatagatttatatttaatataaactaaaaattattaaaatgaagtgtatttataattttatagggacaaataaaacccctatatactacattttttttgacggaactaaatattacattgttatttagttttacggattatattactagattgttacgtttttattgcaacttttaatcccaatttcattaaatcttattaaatctacactaaactaatacctgccaattgattaattgtctattttacaatacaaaataattaaataattttaaaataaaaaaaactaaataataattatttaatataaaaataaaataaataaatatataataacatattattattgttctttttttcgatattgcaacttctattgttatttattttaaaaattatttaatgattctttagaaaataaaaatgagttcgaacgctaatatattaacatgtgccattttacttaactaaattaacacttagcggaatttattgtaaaaactgtaacgtcagtcgaaaaaaaatattacttattaagtgtgatgtgtgtcgtaagtcgtatcaaatttattaaattattttatttctatattacaattactttagtataatagtaaatacaggtcagtctcacgaggactataatcaatttttattcaaaaattagtaataagaatgaaaagtagaaatttttataattataaagattaaacaatgaactagaatacaaataaatatagatattacactattaggaaatatttaagaatctcataaatcattcaagatcaataataataaatattattcaaatttctcatataaatacttttgtccaatatctattttactataatataatcaataatcacctctcaaattttgtattgaaataataaacaaataattggtaatcaagcacctataagcattaaaaagaaataaaatag

SEQ ID NO: 180004 - DNA, 698 bp, Cannabis indica
cagaaacacggtattcagactgcttctgggtcgagtggccttggcgaaagctctcttgagagaggagggaagataccttccaacaggtcctgccaaacttgggcttggcccaagttatcttctctgggcccagtagtgggctttggatgctgacctggagtccatgtgtcccttaccaaaaatgcgaataacatttaaccccaaactttcagaatgttccgtattgtggaagcttgccacaatccatatgagtagacacgtggaggttttaaagtaatattcttattaaattccaaatgctaattgatcgtggaagatgaacttttcatcttcagctttgggaagtaaacatggcagtcatataaaggtggaggagtgcctaaattgaagagttactttctaggaaagcttttattttgacggctacttattattggcgcgaaaattaaaaaaattattttcatcattgatctgtacctcgattccaaggagcattaaatgcttgacatgcctggctactggactttggagcctttggatatgtttgtgcttttgtagagacgatcttggacagttcattttccttcacatggataaccaaccaagggtataaatacccttaaaaagataccatttaccaattttttcccatttcagactttcattcgctcgaattcaaattttcttgagatggaaat

SEQ ID NO: 180005 - DNA, 742 bp, Cannabis indica
aatgagtccacctccttcactagtactcaatgtaacaattcttcaatctctgagtatgatatatggcacaataggcttggccatccatctaaaaagattgtcaaaaatgtgcttcaatcttgtaatctcacagttaataataaaaatcctttctctgtttgttcatcatgttgtctaggcaagattcacaaattaccctttccaaaagcttcccttactgtgtacaatgaaccattgcaattaattgttgctgatttgtggggtcctgctaaaacaacttctttaaatggatataaatattacatccatttcattgatgcctattctagattcacatggatctatatgcttaaaaacaaatttgaagctttaaaaacatttttgcaattcaaaactgaggctgaattacaacttgggaaaaagattaagtgcctacaaaccgattggggaggggaattcaggtcctttattgaccatttaaaacaatttggtatcatccataggcatccatgtcccactacacatgagcaaaatggaatagttgagagaaaacatagacatgtgttgaaaatggtctaacccttcttgctcatgcttctatgccactcaaatattgggatgaggcttttagaacttctgtctatctttccaaaaggctacccactcctactcttcaaaacaaatcaccaatagagaaaactgttcaccatctcacctcgattacactacctctctaaaaacg

SEQ ID NO: 180006 - DNA, 777 bp, Cannabis indica
  modified_base (771)..(771): a, c, t, g, unknown or other
ttgaaggcctcatcctttctcttcaataggtatacccacactttcctagagaagtcatctatgatgctaataaagtagcttgcacctttaagaatcttgattatagagggcccccacaaatcagagtggatgtatgcaagtttctctttagttgtgtgttgtccagtggcaaatttgaccctgcaacttttgccatacacacattcctcacagaaaccaagcttttcccttaatccaccttgaaacaaccctttcttgtcaagctcagtgagccccctctcactgacatggccaagcctcaaatgccacaattgtatatcattcttggcattatttattgctggtgatgctgcccctgttacagcagtgccaatcatatagtaaagaccattcttgagtctacttctagctaccaccagtgagcctttagagatgttgagggtgccattgtctattctaacagtataaccatgattatcaaacatacctatagacaataagtttctcttaagatcaggtacatacctcacattctgaactgatcgagtaatgccatcatccatcttcatgttgacaaattaaccaattccatggattttgcaggcattgttgtttcccaagagaaccgtccaactgagctttcttcaaagtcagtgaacagatcctcttggggtcatgtgaaatgagcaaccgatcaaggatccattcacaccagaatcctcactggaaaccaccaatacatctgcagatcataaccactcgatgcaaatntctact

SEQ ID NO: 180007 - DNA, 511 bp, Cannabis indica
gtcaaagataagattgtatctcgacagaaacataactcctattaaacactcgatttgagaaagaacaaaatattctaacaagattatgaacaatcatgttagcagaccgtttaataaaaaacaaaaaatattatttaaaaatgacaaaaaaattacgacaattttctataataactaccaaaaaaaaaagcatgagtaatgaatttcgaatagtttagactaccactaaacaatttgattacatctccatttttcgtcttagttgagttttaatttagtttagcgcttcttttataccaattgattcagctaaattcggaatgtctataccagcaaaattaccgatttagccatcactattttcccttgagagtttcgaatgactatgccataactaaatactgttcaatcacagaaaataaccgcatcaacaatatggcgtaccaaacaatcatttatggttgaaatatattaatgatgataatgaatctgagaaaaatacaccttgaac

SEQ ID NO: 180008 - DNA, 1111 bp, Cannabis indica
aagttcaaaagtttatagtgttgctagtcctctgttagttcatgaaaaatcaaattcaaggatgctgcagctttagccaacatctcaaatacactacttatgagaaatctaaacagccactacaggaagaactaagtcaaaagagaaataaatttgcgaaaaatataacaagttcctggttttcaatcaagaagaaattgtttccaaattataaattcacctcaaagttcaaaggactaaaacaaacaaaaaggtataaattctcaaaaacaatgctaattaatatagggaatgagctcatcaattatgaacaaattgcagagtgctgaccctaagtaatctcttcaataaaaaaaatactcacaaaatatgtaacagaatccccatccccaccgcacacatatacatttgtatcttttgcttgagttgcaataacagcaacaagaaaagtaaatctgcccaattaatcaaattttcgacaattggaaatacatataccgaattaaaacgcaattacctaaaaggccataacaaaagatctaaaatgttatacccaccaaaacacgaaaagcaattatgaaacgaaaaaaaaaatcacgaacccgtagtgttctggaagcctctgtgagaagaacagtgaaggaagtggtgccatggtgagatgaggaagccgaggaagaagacgaggaaagacaatcggctacggctcgacgcagtggctccggaggctttttatgggaggaagatcttagcctggagacaccgccgagtccacccaactggaacctcgaactgccaccaacagcaccaccattgccggggctccatgaaggactgaagctcgaagacatagatggtttccgcccccaatccgaaattctggaaaagaaaaagaattgtgtaattttgaaaaaacggtaaactcagtctctccagtgtcgccgcactctacatttgattaatcaaatcagaaaaaaattgaaatccaaaaacaaaatcacaaaactttgtttccgtttcctcgattgaaaaaaagaaaaagaagattaagaataataataataattaaaattgagaattgagatgcagaaggaagaaagatttgattttg

SEQ ID NO: 180009 - DNA, 893 bp, Cannabis indica
gtaggcttaactaataaatcaaagaacatgaatagcactcctgagttgagcccaagcatatcaggatttagattcttttaatcttaagatcaactactgatattgacttggaaagatatatatatatatataacggtaagtttgtaatatcttaacttagttgcaatatcggtccagtccaatgtatactccatacattcgaaactagtatactttactaatgattggaaagaacataacacttactccaagtgtaagtatacatcatcgctgattatcacattagtgcaaatccaataacactgatgaaaccacgggacccaacgaaacgttttcgttttagtacttactaattagtagtactaccaaactaactaccaacttaacttaacctacgttggtttggttacggaacgtaacttaacttaaatttaagtttggtaaagtaaaaactaaaactaattagtagtacttcggtaggtttaaacttttaacgtagttttagtttttggtcggtcagttagtaagtaagttaagttaaaaactaaaactaatttaaaacttaaaactaatttaaaaccttaaaaccttaagttacgactagttaaaagtttaaaacttactagtcgaaaaccaaaactactaactaactaccttaccttaaactttaaactttttactttagtttggttagtaaacttaaaacttaactacgaagttagtttaaaggtaaaaggttttaagtttttttaagggtttacgggactaaaaaccctaaaaacccaaactaaattacttacttaattaacttacgtagtagtttttagttttttagttttgggtcggacgaagtagtccgaccgtaaggttaggtagtttaagtttaagtttac

SEQ ID NO: 180010 - DNA, 637 bp, Cannabis indica
gtatagcctaaatgacttctcacctacccatgtacctaagccatgtgattttaaccgaaaaagacctattgattccaaatagaaatttgtcaacattagtggagagaggtatgtcattcaaacttattgatcatgtgttagtgggatgttggaaagttagaacagttgtgatattgatgggaattgcgatgctttatgtttgtatgaattacttacttgtaaattgcacattcaacttagttcttagagttggcaagttgaaattctggttattgatggattgaagttgtgcaggtggtggtaacaattaaattgttggaaagttcagctatcattgtcagtttttttagtttagtcttagtttactcggggacgagtaaagagtcagtttgggggagtttgttaggctatttttagcctatgttttggatccaatttatgtgcattcttagctgtgttgggacggaattacgcttgttttctatgttttcaggttctttggagtaaaagaggtctcgggtgcagaaattcattgaaagacgtgctgagccgaagaaaaacttaatttttgagttttttgcatatctggccgcggcgatgaagaggctcgccgcggcgagattcaacttacagaaaa

SEQ ID NO: 180011 - DNA, 539 bp, Cannabis indica
aaacatttggtatctctttcagtttgtggggtcaacatctgcagtttgccttggctttatctttcctggtgctattgctgtaaggtttgttatcgtttcttttcacccactctttgtttggaatgacattatgctcatttttatgttcaagttattttgttggtgttgttttgatttcgaatcattttacaggaatgttaatggtgtgtccacaagaaaggacaaaatcatggcaacaataatgatagtcttggcagtagtaacaagcataattgccatttccacaaatatatataatctgcttggagatggagaaaagtcatagtattatctttttcatatatattggttgattgaatgattgttaattctgttgttgttggtgtatcaagtacgaacattgcttttatctcctctttttcaacgataattaggataaaaaatacttaatagttgatttgattgttgattgtacaaatagatatatttataatgataattatgattgaaaaaaaaaaagaaatgatgttttttatgta

SEQ ID NO: 180012 - DNA, 507 bp, Cannabis indica
ttaaaagggaaatttttttttgggcccctggactaggtgggccctaggcataggcctagcccgcctatgccctgggccggccctggctgcttatgtgttcattcttgtacacatgacacgtttatattggcacacctaatattatgatttaaaaattattttcaaaattcattttaaaattaaataaaattataaaataaaaataaaatatttttaaaaataaaaatattataaattttgaaataatttttatatttttaaaataataatattaagtgcactaatataaatttgatacatgtacaaaaagtatacacataagctgtttatattagtaattaaatataaaaaatgaatgacactttaaatttgtaaatttgtaggattttaccgttaaaatttgaactaccaaataaaataatagttgagatggtttagcttacccaaaaaaactcatttttcttcaattgtcatttgagtgacagttactttcggttgagtgaggat

SEQ ID NO: 180013 - DNA, 579 bp, Cannabis indica
cttcttcatggggcgttgatttggtggccatgtgggaatggagtcggtggtgaactggtagagagcccagtttttttcttctaagaatggttttttcaacattaaaactgcgtcgttttgatgtagaaaacgacatcaagagtgaagtcctatgttgaaaacgacaacacactttagttatttaacagaagtttatttatattattattatttaatttattttattttttgttaatttaaaatacatgaaaattctaccaagcatcgatgaatctttatttgtttcgttattcggaaaaaaaaaaatttattgtattttttcatagttatgtatacagtacttatttaagatattttgtaaaattttaaaaattcgtaaaaatttaatacgctaaaaacagggtttaaacaatttgttgcaacgtgacttgatttattttatgcgtgtataaaatagattgtttgaataaaactttctatactgtaaattatttcaaattttttaaaattttactgaaatatcttaataaatatggaatatatcagtatattcgtgcaaaagagagttgtctcaagcta

SEQ ID NO: 180014 - DNA, 526 bp, Cannabis indica
tgttggagttttcatcagttcccttgtccgcattctcttcaccatccattttactttttttagcagctcgattcttaatacaagagaagattggaaagttatcttcatcatcttcactgcccaataccggaactgtagttctaccattcgacttaatcacctttggaaattgttcctcatcatcagactcaactagttggtacttcttcctaagtcgtcgtctagaatttctctttccattcagaggtttcttatcatccagaccatcctctaaaccaaactcacaaatagcagacacttcagaatatataaatataaatataaagaagatgaaaaaaagctgtgaatttatactgataaatttgaagtgatagattcaaagggggaaaaaccattatgcatggtttagaagaacagtggtacctccatctccatcattagaaacgggagagggtgggtaaacttctgggtcctcatcattaatgaagctatcttcaaaatcttcttcttcttcactattatctga

SEQ ID NO: 180015 - DNA, 729 bp, Cannabis indica
ggtctgatatgatttttaatttttaaaaaatgtaatagtgagttgaatttgaaaaaattaaaagtttaaatacaaactaatctttaattaccctaaatttaaaaataaataaaatattatatataagtaatttaaagaaaataatagagaagctgttgtgacttgtgaggtgtgatgtgctgtaaaacgttgcagtaaaattaaaagaaaaaaaaaggaaataaaaaggtaaatttgatgtattttttttttaacattaaaaaaaaaaaaaaaaacagtagtgggggattttatacatttaagcacatggctctaatattaaaatttctaagcctatggctttgtctaatgcttggcgtgacgaaactctctcttttccccctttacgtgtttttggctagtttttctctcttgattgatctggctgcgtgacacaagcatttcatgttttgtatttattatgatttttatttaaataagctacgtgttgtttatcatgtggattataatttatagacccacctaaattcctgtatttgattcttttctaaatattgccactttttcaagcatctcattttattaatgtcaaatgtcaagtgtgtttaaaacattttaggaattaatttctttccctatacagtatttgggttgtgtttatatggaaagatatcaattataataacttaataaatagaatatgttaccaatttaatgtcgaatttaata

SEQ ID NO: 180016 - DNA, 719 bp, Cannabis indica
ataaagcttcccaatcttttcacccatcccaatcatttgcctcttggtactgtcctgaatatcacaatttttatcatgaaacaaaaaggagtaagcatcattatctgttagagtagatacagataataagttgtgttgaaaagtgggaacatacaatacattgtacagaggcagatttggaaaaacattcacagttccaataacttcaactctagcactaccaccatgtggtaatttaacatgagtgacagaattgtcactgtgaatatcatgaaacagatctttatcaaaacaaacatggtgcgtagcaccagtatcaataatccatttagatttagaaaacaataaattctcaccagaaaaatgagagatcataggtgcttcctttgggaaatttggagagtctgctgctctttgggacagtaatgccatcaatttttgacactgcatagcacttaaacttgaaaccagatcttgatctcccttaacagcatcaccaccattgttttcgtttccttcagaattggtctcaatatttgcagcagatggcttcacatttccattcccaacaggttcagcatttctattaggaaacttaccatataacttgtgtccagggggatagccatgcaacctgtagcactttgacataatgtggccagccacaccacagtgatgacaaattgtcttaggtttaaaaggctggacagcaccagcga

SEQ ID NO: 180017 - DNA, 685 bp, Cannabis indica
ggttattattagaataaaaagttttttatttaattttatttatttttactaattcaataattatccatgtattaataatttttaagtcataatttgcaacatgtcacaaaaattttaattaacccaaaaaaaaaataaacaatattaataataataaatcattaaaatttcaaaatgctcacatatttataacaaacaataataatataaagttgaaaattcagaaaatcccaaattcaatcaaaacagtaacaatttactttaccttttcatcaagagctgcagcattacggcgaacgtagcgatagaggccgtgtcgcacggccacacgtgcgagcttttcggtactcacattggcggagcgggatcaatgagaggtggccggggatcaatgtcagggtaagccagaaagacgtagttgctgacggcgagtcccaacgtggcatcgcctagaaactcaagccgctggtacgacgccgacgccgacgccgccgtcggaagtccatcagcacccccgcccgaccgagtgggtcgaaagacgtcaataaaagacctcttgttcttaaagtcagtagccgacgatcctctcaactgctccgatcgccgcaagcatcgtccggtggtggagtgatccagttcggcggcggcagctcgatgccggcgtagaagaaaggaggagttcatg

SEQ ID NO: 180018 - DNA, 560 bp, Cannabis indica
ttggaatgctgttaagtatattttgaaatacttaaagagtacaagagattatgtattagtctacaagggtggtgctttaaatcccttaggctatacagactcagatttccagggatgtcttgaagacaggaaatctacatctgggatggtgtttactcttgggggtggagcagtggtttggagaagtgctaaacaaactgcgatttcggattctaccatggaggcagaatacatagctgcggctgaagcagctaaagaggttgtctggcttaggaagttcttcaccagtcttggtgtagttcctggaatggaaaggcctctagtcctgctttgtgataacactggagctatagccaacagtaaggaacctcggagccacaagagaagtaagcatatagaaagaaagtatcatattatcagagaatatgtggcaagaggggatgtactggtggaaagtaaggtggtaacgtacgacggaacggaaaccttaaacgttacgtcgtagtacctaccttacttacccaaaaccgtaaacgttcggttcggacgtaaacgtttaa

SEQ ID NO: 180019 - DNA, 598 bp, Cannabis indica
gataaaattataactagtattacactaaaaatgcatatataaattgtaccaaaaaatgttcacagcaatcaaatatcaatttatgcgtgtcaagggccaaataagactgccaacaacttctatactattattttaagagtaattaaatctgcccacaaaattactgcacaaacataaaaacataatacttaaacattaggcagcttgcccattttagggtttgagtttaggtgtttcaggtttgggtgggcttgggttcaaattaagactgacctaaacattaggcagcttgaattatggtacaaaactccttatattaaaagaaaaattacattgtatatacactctcctttactcgttttaatttttatttttatttttatattttttttaaaatatatccatttttataaataatattcccattaaacttcttaaattaatataaataaataaatgctaaaaaaacgataatagttgtggtggaaaatcctttttatttatttttaaatatcttattcttataattaaactgtgttcaatcatagtatctaacatcaaatggccattagtaacatacccgtcgcttccaactatt

SEQ ID NO: 180020 - DNA, 672 bp, Cannabis indica
ttttctttttcttttcttttatagttttcttaaaaaaaaggtgaaaaggaattgtaacataattaattatatggctcttgtatataaattttggttgaattgacaatattaattaatgttcttaaattaaagctggtatgtgataaattagcatgtctacctataaaatgtggtagctagctagtaagtaaatatctctacgcatcacataaatcatatgatcaaaagtataaattttatattaattttgcttaaaattttccatcaaccatgtaacgtcctcgcttcaagcctccattgggcccttacacccacggactaatggctcttatacacgagtacgccactctggctgcttcctggattgatgactgaccctacagaccaacacgagtgtttccagcgtgctttgtcctcactcacacgcttcctgagaatacttcccaggaggtcacccatcctaaaattgctccaagccaagcacacttaactgtagagttctttcgagatgggctaccgaaaaacaagatgcaccttgttgacataggtagtaccaatcaatccatttaagctctcttcaactgtgtacgtcccatacctacacagtcttagaatcatcccacttgaccttcccaggcggtgtgggattgcacagcttacccggtgtttccc

SEQ ID NO: 180021 - DNA, 712 bp, Cannabis indica
tttatttattatcatacatatatattaattttttctttttaactcggtcaaaccgagtcttactataatagtagggatccttgaagaaaatcgaagagaaacacaagtgaatgaacaaaaataataaatatagttgtgataaataaatttaaaagttaattagaaaagtaatatatatatataattgtgatacatagataagtttaaaaattagttaatttatttttaaaatattaaataaaaaataaaaattattatatatagaatgtattatatatattgaatgtttagaatgtattttatatatattgaatgttggtataagatatttattttaaaattaattgagcaattttttaatttaaactgtgattgagcaattttagatataaagatataaacatatttatataaaaattgaataaataaattaattaataatcaataataaagagaatcaagagaataaaaaattatataaataagagaatgaaagagagaacaaataacactagttagagagattttagagtactatgtcaccaccttatatttcttaaaaatatatagatataaatatgtagatttctcatgaattaattagaactaaattcagattacaatatattaacaaaatgctaataaaattctagattatctttatctcattttattaaattttttatattatttatattagaattcaatatat

SEQ ID NO: 180022 - DNA, 715 bp, Cannabis indica
ctactcgacagtgtgctaaaagcaagttaattacaaggctcaactaccgaagtacacggaaattttttcatcatggctgcagtcggcattcagcaattcatccactgcagagtgccaactgataactatgttggtgtgggctagtttggaagagtcgaaacgagctggtgtgggacaccaaacatcgtgctgtaggtgatgttgtagtattggcaaaaactgtccttgatcaatggaagagcgctcaggagaaaacctttgaagcttcatcagagttgcaaatatctgatgttggctatgagcgttggcgaactccaacagatgacacgatcaaggttaacaccgatgctgcaattttttcacatacgaactgtttcagtttctcgttcgtggctcgtgatcagtctggttccttagtggcagctaagtcaaagtgtatgcaagggaaagtccagccatcaattgctgaagctataggcattagagaggccttaagttggataaaggatcaaagttgaagtagttttgttatcgaaactgattgtcttactttcgtccaagccattagaagctcttccacagttttaacttactttgggaggattattgatgaatgtaagaggttgttatttagtcttcagcataagagtgtttctttaaattttattaaacggactgcaaacacagtagctcacttcttagcaaggtctactag

SEQ ID NO: 180023 - DNA, 602 bp, Cannabis indica
agtgtgtcatgagacatttggatatgctgtaaatcttatgaatttccaaggtaaattttcttttggatgtgtgcagatgttggtgattgtgtttattgttttctttctctctacatacataaacatatgatgcgggcatcgattcatagtccactcacttgaatctgaaacaaactagtcgttgttgttgttggagtcttacaattctgaaagccttttcttttaatctagactacaaacaaagaacttgattgctaaaaagcttaggaaaaaaaacagaaaaggaaaagaggagagcaagatgttggcacctaaagaatttaaatttaaacaaccagtcgtatgaattaagtactattggttatttattcgctcactagtctttcgaagatgtgaaaggatacccataaaaacttaacttgaccattattttagaatggaacaacggccactgctatcagtggtgtagaagtgaatgattagatgtgacactaggatgtgcaattttgaaagactttgcaaggttaggaagttgtgttacaagattttttttgactttcactgttatattggatctgattttgttctggaacctgatttct

SEQ ID NO: 180024 - DNA, 677 bp, Cannabis indica
gtagcatgcagatctgtaaaagagttacaaatagagtcaatacatcttttaacatctactggactattattgtgtacctgtcattatgagtcctccagatggtgtcgacaataactgaagcataaaggaatacatcatccgcattaacacccttatgcttaaggtcccaaataaattttacccaatcctaaggtcggataccagtattacagacaagataaataccccaaggagaagatctccataagtgcaaggctacctcgcatgaaatgaataagtgttcaaaagtttccttcccctcccgcaaagaggacaactagtatcttcaatagggaatcttctattaatcacaactctaataggaagggctttggacaaaatacaccaccaaagtatcttatgtctctcaagaattttactgttccagagtttattccagagagaaggagcaacctcacacggaggagctctttccaaggcttgggccaggtaggcagaattacatgagaattggccgcttcgtttcagagtccacacccacctgtccttaccctaacctgagggatatccccctttaaaatagcagcaaccgtttctgatcaaagagaatgtaagttacggatgtccaaacccgttaggaagtaaagattggcccccttagtagcatcatcattacc

SEQ ID NO: 180025 - DNA, 1092 bp, Cannabis indica
gaatgagatttggttgaaggattcttctcctcacaagtaagcttcttcaaattgtgaaccttatacaagctgagttaagtgcattcaatctcgcgacaagcttcaccttcctatttgtgtaagttataccttatttcttgtgatatgcgagatacaccttatcaatgacacaatcttctcgtcgatcatcttaatacatttgatgtttttcaagaagactccttttatgttttctctttgcaatgagattatttaatttttgatacacatgtcacatgaatagcctacacatttaaatatgagtataacaattataattattataatttaaaaaattactatcattttaattgataaataaatatttattattattattattaaattattgaactttttaatgcatcatgcttttgagttaatttattcatattcagggacgaacccaagtgtattagtttgggggctatagccctacttagggctgttcatccgatccaatccgcacttttttggtcaaacaacatccaatccgcactaagtgcggatttcattttttggatccaatccaatccgcacaatagctcaaatccaatccaatccaatccgcaaaagtgcggattggatcggttactttggattggttactttttaatattaaattatttaatatttataaaaaaaatatttttttttcacataactagcaacaaaataaaacaaattatagttattttatgtctccaacaacacattaaataaataaaataacaaataacaaattcaaaggaaaaaaaaattgtatatataaaaaaatatttaattttattttaaattgtatgtagaaaaaaaatatataagaatagaatatacattttatctattaagttttgcaatataattgtattatatgtattagacttttaaattactattttctttacattaaaatgttatttgtatatataatttttaattttgttataaatatgtgtggattggattggatcggttacttttacatgtcaatcaacatccaatccgcacaagtgcggattttgaattttccaatccaatccaatccgcacaagt

SEQ ID NO: 180026 - DNA, 978 bp, Cannabis indica
caatatgtgctaaccttagaattgtgctgcattttgataagttagtcttgaactacaatttgcatgtatctgaagtaaatcattcacaaacttgactgaacatcttaggaaatcaaagagacaatggaggaagaaaattggaaacagttaaatgtaaagaaagctcaaaaaatgccccatctgtatccttagaatatttcaattagacaactttggaaagaactttttcttctctattaggtttctgtaaatgaactgaaaaaattggtcaacatcgactacttagcgtaacacttttgatactgaacaagcaatctaatcttgtagggagctggtttgattggcgttgacagtcttggaatggatgttagagtttctattgggcgggaagtacagactcatcgttttcccttcaaagttcgggtaagtactttccagtagtctttagaggagctttgcaatttgtttctcagagttcctgtactgtttcctaagcataaaacatatgcccattttagataggaacaaagtgttaatagatttgtgtgaatgaacaaacaactacaggccacttctgaagttgcagcagaaaagcagattcaacaacttttgtttccgcggtctcgtcgtaagaaattaaaaagtcacgcgactagttttagagaccctgctttttaacttaattccatcttttgtattgttagaatggagaataaatcttcagaaaaatctcccgaggcatgaaaccatttatctcctttttttttcttttactaaataccttttagggaggggtttggaaatcctcttttgtacattggtattgatattgtatagcttttaattttcctagcaataaagaagaaaggtaccggttttcatctgccatgttatcagaaaaaataagtttgtatttgtattatttttaattataataactaatttattgttgtagagtcaaataatacattagttatt

SEQ ID NO: 180027 - DNA, 796 bp, Cannabis indica
  modified_base (711)..(711): a, c, t, g, unknown or other
agaatatttcaattagacaactttggaaagaactttttcttctctattaggtttctgtaaatgaactgaaaaaattggtcaacatcgactacttagcgtaacacttttgatactgaacaagcaatctaatcttgtagggagctggtttgattggcgttgacagtcttggaatggatgttagagtttctattgggcgggaagtacagactcatcgttttcccttcaaagttcgggtaagtactttccagtagtctttagaggagctttgcaatttgtttctcagagttcctgtactgtttcctaagcataaaacatatgcccattttagataggaacaaagtgttaatagatttgtgtgaatgaacaaacaactacaggccacttctgaagttgcagcagaaaagcagattcaacaacttttgtttccgcggtctcgtcgtaagaaattaaaaagtcacgcgactagttttagagaccctgctttttaacttaattccatcttttgtattgttagaatggagaataaatcttcagaaaaaatctcccgaggcatgaaaccatttatctctttttttttttctttttactaaataccttttagggggaggggggtggaaatcctcttttgtacattggtattgatattgtatagcttttaattttccagcaaataaagaagaaaggtaccggttttcatctgccatgttatcngaaaaaaaatgttttgtaattttgtatttattttttaaattataataactaaattttattgttgtagagtcaaataatacattag

SEQ ID NO: 180028 - DNA, 563 bp, Cannabis indica
agaacgtgtttttgaaaaatattttcactttttcaattttaaaaacagaaaactgatttaaaaagtgttaccaaacggtaccatagtatttttgtaaaaaattcagcataacagtaaaattgtaaacttttgctcaaaatccaatatttttgtaaaaacccatttattaattgtttggagttttaactttactttttatatgagtatatatgtaaatattaatattatatgtttgaaattagtaaaatatattaaaatttgaaaaaaaaaaagtaaaatttttgtgatgtacaatgtaatgtaaaaaattgaagtaaaataaaaaaatgagattttagtgatgcattttaaaagatagagtagagaaaccgataaaagtgctcttagttaaatcatgtattattttactattattgcaacatttatatgagtgtgttaagatgcttacggcctactcaacgtaggtccaaagaaaattatttagaaatacttgtatttttaaataatttttaaaatgctacatttttttcttcaaaaataacctaataatattgttgctactt

SEQ ID NO: 180029 - DNA, 648 bp, Cannabis indica
ggagtaagttttcttgtttgtttttaatatatttcgaaatttaaatcttagttaatcattttaaattatgatatagagaccagatatgctactgttagacaacaattgggtgtacagggtgaaggcctaccgcaatggggtagagttgcctaattttctggtaattatgtatactttagagagaatctttgtttgtttttatttttgttttactaagtttatttacttctctttcacagagtaaggacaagctcgaatctcttacgcggagattggatgtcgaaaatcttcctcaggaggtagaaaataaaggcgtggagacattgtttagtcaatatggaatcgttggtatacatatgttcaagaggactgtggatgcgatagcaacaatggagttctccaccttcgagggggctcacgaagcttttcttcgcgtaaatcatacagtatgtactattcactttctagctacatacaattacaacaaataaagtaaaaagaaaaataaataaagtaagatgtgtataaaaaaaattacaacacttactaatatgttataactttaattttttttttttataacgaattctaactatctcaataacagcgataccaccgatacacttacatgccactgttcatctctgt

SEQ ID NO: 180030 - DNA, 496 bp, Cannabis indica
atgagaattagagaatgtaattgatacctctcaattttctctaattacataattataatttaattacgtgatcaaataaacaaaaaaaaattgtaataattacctcaattatacttaattacaatttgcttgtcaccttccaaacagggccttaatatcttttttcaacaaaagttagttttataacacaatgatccttgatgcaatttaaatcgcttttttttttaacgaaaaaaaaaaaattttaaaataccgcacgggaaagtcacgtgccaccatcttctcatttctgcaacctaaataatctatctaattggattaaagcctttaatcccattcgtcgaaatgaaacgtcgcggattgccagcgtggcagtcccctttcccctatataaatttgcatctgcatcaaatttcaaaaaccaaatcaaaacaaaattgaatttccctccaaaaccctaacaatcgtttcagagaaaaaagctcgtaactttcat

SEQ ID NO: 180031 - DNA, 724 bp, Cannabis indica
ggatattttcattagaaggtatcacttcaagcatagaaacttaaattctcccaaaaaaaaaaatagcaacgccactgctggaatatgaaaatttgtactcaacattctcagatttgaaccaagtatgaagatgattataatttttaatttttatatgaaattaaatggataattactaatggttgaaaacgctctgcaattgaagctctagctggagacagcttgatgtgtcttttatctcatagactgcttgaagttgcaacttaacgtggtcgagacctttatcagttattggttttggaagggcaatttgtacaagcatctctccatttttggctgctaaaggaacctgtttgtgtatgaaagagaagctttgtatattttaatcaacaatagtgcagtatctttttttttattatatgtcgaaatagagattaggaaaatattcccagacaaaagaatttgatccaattgtgtagcctagcctagctacctgattcagcccaactcctttcaattttgtcattcacatccccaaattgcatgcttacaagtaatgggggaaaccaatttttttgtgtcctatttttcacttctttccttctatactagccaccattcaataaccccactccaccactcatttcccactaacttcaacatttgacaagcagcgagaaatctacatagtcagaaataggaaaaatcgtgtaactgtccttta

SEQ ID NO: 180032 - DNA, 720 bp, Cannabis indica
ttttgtcaatattctgcatagaagtaaacaatagataatcatataatacataataaacatactaatcaagaacaaaaaacaagccaactggtattattatgtttaccttatatatgtcaaaccagtatgtacgctttacaggatacatgactcttaaaccagataatattggactatgaagaacaacagctcttaactgaggcagcttagctgcaaggtccaaagttgggccacttccaacagattggccataaaggatcacatcttcttgcctagtaccatagctctcttcaagacacttgtatgcagcttcaatatcagcatatgtattctgttcacttggctgcaatacagacagttttgggccatagatgagtctctgagctcaaagtttccattaatttcaaaaaagaacagttataaaaataaatcttcaacaaaccttgccagatgattgcccatatccagaatagtcacacctgcacaaaactatacatatatgagggtgctatgtcctttttattgaattttatttacaccatacaagcccagatgttccttatgcatggaagggactcataatttacattagtctaaatacaagcaaatggaaagtagaatattactcttcaccgattggactttagattgatggacccaaacctcagcaccactagtactttcttttctaaaaatttttgactatgtactatctaaagc

SEQ ID NO: 180033 - DNA, 797 bp, Cannabis indica
cttgccatgaggagaacatgatcacgcacgttttgatggggttccatccgtgcattgatatatttcttagtcgcgtcgaagcgagactccatacattcgaaactagtatactttactaatgtcctggaaagaacataacacttactccaagtgtaagtacacatcatcgctgattatcacattagtgtaaatccaaaacactgatgaaacagggacttagtcttttgattcatatgatcacaatcacattccactgtgttgacgatactgtaattgtgaataaacatatgatctggatttaactgattttgtgtgtaaatgtaataaacatattaaaccattagcatgtaaaattcatgcaaacataaatcacttcaaatttcttatattgataactaatcagattgtaaagggttttatttagggcacaaaacccaacaataacgactacacgataagtatgggtaatgaagacaaagtttacctcatccaaagtacaagtggaagagagagcttttgtgctattgagaatgcctaagacatcagactatctgaggtactagtttacctagtatgaaagtgacctgacactctccaactaagggatctgatggaattaaaattgtgggaagtcactataaataggtccttttaggtatttgtatggaagactttttttttttgggaaaaaaataaattgggtgatcgtcgaaatcattaccctcaatatcatctacttcccgcttccttaatggatatggatcatcaaataaatgatcgccatgctaataatgcca

SEQ ID NO: 180034 - DNA, 460 bp, Cannabis indica
attttatttctcttttgtttgttgaagaaagtcgtagtcgaatctttaatattgatgaattagattataatctgttttgttaatgagtaaataatgtataattgataattaatagagttactatagcaattttaaaaaaaaatagattactagtaactctactaaaatattttccagtgtcattatatatacatatatttaaatagaacaattgcaaaataatggagaaactatcctacatgcatgtgatctgataaatttataggctttaaataatatctgtcgttcgaattcataagtcaaatattcgatcggtgctgaaattctcgagttgccttaaattgctgataactcatgtaatcatgcattttgaccaaaaggctcaattttcgatcaaattaattaataactaaattaactacaacaagtggacatatattctcttccctatatatacttt

SEQ ID NO: 180035 - DNA, 584 bp, Cannabis indica
ctgccaagtttcctcggcgctgggaggctgccagcagcccttccgcgcgcgtgggtaagggtggatcaccaccccgaccgtttacttttcgtacgtttctttaaaacttaaaacttactaaacttaaaactttaacttaaacttaaaaaatttaaacgtaaacgtaaacgtacggttacgtttcgttaaaaagggttaaaaaaaaggtttaaagttcgttaaaacttttttaaaaccttttaaaccctaaaacttacctaacctaaaaaaattaaaaaaacttaaccctaccgaagtaattaagtaacgaaactaactaacttaaatttttttaccctttttacccgaaagttaacttaccaaaaccaaaactactaactaactaaaccaaaactactaactaaattagtacgaaccaactactactagtaaaccgaaaacctacctaaacctaaactaccaaaaccaaaaactaaacgtttttaacggttttaaccgtaaacctttaaacttttcgttcgaacgaacgaaactaaactaacttaaaccttaacctaggtcggtccttcggttgggtccgaccg

SEQ ID NO: 180036 - DNA, 671 bp, Cannabis indica
agaatgacatgtccaccgcctcatatttctcatttatagatatatatatatatatatatatatagatttactcatatataccatatttagtaatatacaagtatcttgcgattaattattaatattttataaaattattacattaaattatattaaatctgatacttaattatattaataataatatgtaagaacaaagaaaaataaaatttaaataagatagttacatatttttatattacatggagatttaaaatttttaataataattataaaattagatataataaactaaaatgcaaaataatataattttattaaaataacctttatggatgacattttacatttttaccttatacataattattttatggttcaaatctcattaataatattgtagttctttctaaaataataataaataacagtgtgaagtaataaacttgtgaagatctttattactagactaaacaacataacttatcttgagaagaaaagtatttgtataacaaagacaaaaaaagggggaaatttttataaacaactttttttttgtaagtttatttacaattttacaacttaaaatttttatttacaaaaaaaagacttgttgttcactggaaaaatagctaactgatttggaatcaaataattaatgattaatcacc

SEQ ID NO: 180037 - DNA, 1107 bp, Cannabis indica
cgcaaattactttattttaaacaataatatttatcaaagttaatttaaaatagagcattgctattaggcaccagtggtgcctagccccttcttgacatgtcgcgttgcgattggctagcgatactccctaaaagttattatattaaattatatgggactcgatacttaattggaccaatagcgatattgacacataggagggtgttagacaccactggtaccctttagcattcctctttaaaatattgactaaaatgcatatgtgccaaataccacactatggacaaccccataaacgtgccagatactgtattcaagggatctacatcccttgaataccttcaattcaatgaagctttggagatagtgacagaataattaagatgcttgctagttgctactagtttcgtataagagaagatttggtaaaccttttagatcctcgcttatgtatcttacggtgaatggtatacagttttggttgtttctatagtattattctccaaccgagtttttttttttaaaaaaaaaatacttcaataatattttaaaaaaatatattaaatttaacacatattaaaaattgtattaaatttaacacaaaaatataatattatacaaaatttagtctaagttttacttttttatttactactaggtaattaattacttttttaatataataattataattttttaggttgttaatgtttgtgctaaaattattgataccatataaaattagaaaaattacagttaaatccgtatttgctagatatgtaattaaaaaagatgaagagtgtatttgtagatgctagtgtcagaacttattttttaatttttatgcaatgttataattttttcttttcctttataaatactttggactcgtttggaacgccgtattaggtcatattgtattgtattgtattatattgaaatttggattatatatcatatttttatatagtactatattaaaacattaaatttatactaaaatattatatatttaggtgtccataaaagttaataccacatatagttttacataaaaaaattgcaataaaatataatttaatattatactatacaatacaatacggt

SEQ ID NO: 180038 - DNA, 663 bp, Cannabis indica
aaaaaggatatttaagaaaatgtatcataatagttgtttaaaaaagtgaaactcataatgcaagccttttctaaattcttacgctaacacagtgtttggtagagtggagggagattagagaggatgtagagtaggagagagattagagagaaggagaggaaagttatatttcagaagttaattgtttgttaatattttttaagagtatatttgctatcttaactcagttgttgtttgaatataattttttaacagagtatatttgctatcttaactatctctctctcagacatagcttgaggcatgcagtaataacaagttagaagttactcctgacataactaatcacaacaccaatggaaaataatagggtgagagtggaaacaagaggcagaataatagagttaactaggttgatacattccaacctttcatccaaaaggccttggtaaaatttgttcaatcatctttttattctattgaaaaaatgatttgtcaaaattaagttaattgtcatgtgcatcaaattcaataagaatgaattaaattactattggactggttacaattaactaattaagtgtattttaactatagcaatgtgattttcgatgattgtaatatagcatagtatagttatcaaatttttactgttctcaagcc

SEQ ID NO: 180039 - DNA, 708 bp, Cannabis indica
ctctaatctatctaggctaatcatgcttttcaactaacgcgtactcattcaactccttacactctcatatcataataaattccctatttatctctttttaaaatttccaccataatacacaaatatcccataatttactccactatcaccaacaaacataaaccatgacttaaattaataatttatattcaactatcccatatatttaggcaacactataacttaaatgctccctagttgtcactaactagccaaggaagaacctctgaaattctgttacaaatcaacttcgagatacatttatatattgtattacaacaggcaatcggacggtagtctatagctttggaaggattctctactttaggaattagcatcagaagagtttcattcaattattttggcaaggccccctcctgaaagaaactcaaaatggctgtagagaaatcctgtccaagatccttccacttttaaaaaatctcgatccaaaaccattcggactaggactttttatatcaggaattgagaaaagcacattcttaatatcctgtattgagaaaggacgaatacgttttacctgctgatccaaggatagttgcttgccttcttcaatgcattggggaataatggtttctgttgcagaacttgagctgtccatgaagctcttgaaatgagacaaaaagtggtgaacaacttttgagtaaatcc

SEQ ID NO: 180040 - DNA, 698 bp, Cannabis indica
actggtgtattatgaatggtaatacttgggagaaccacttgagaaaaagggtcaacattagaaaatcagtgttaagtttgtgaaagggaaagatattctcatgaaagacaacattacgagaaataaaaactgattagtattgatatcatataatttgtaccctttaaatccttgagggtaacccatgaatatacaagtgcgagcacgtggagaaaacttagtcctatgagcagataatgtcgaggcaaatgcaagacaaccgaaggatctaaggtgattgtaatctggtttttcttgaaaaagacattcgtatggagtttttatttttgagtaatggtgttggaattctgtttatcaagaaaacagcagcaagtatactttcattccagaattttataggaagtttagcttgaaaatacaaggcacgggccacattgagcagatgctgatgctttctttcagcaactgcattctgttctggtgtttccacacatgtgaattcatgtatgatgccatgttgagcaaatagatcttttgaaaacaagttctggggcgttgtctgatctgaaagctttgaaaatacacttgaattgagtctgtacataagctaaaaactgaggaataatagtgttagcatacagattttatgtttgcataagataaaatccgagtaaaacctagagtgatcatccacaaag

SEQ ID NO: 180041 - DNA, 626 bp, Cannabis indica
attttctctcttcatcttattctttttctttcttatttatattatgcataataatttataacattatcaacacgagtctcttagacaaaataatattctttaaagttcttgaattgttcgaggtcacgatgcactgtatatatgtatctgtcagaaataatttcaagaaccattttacttttatacttctttgtatatatgtgtatatttatttttattctacatatctattcttaaattcgtattatgtgttcttactatttataatagattttatacaattcgtacaaatgatctatccattgcaagaaaaaaagcagtgacatgttaacttggaatcaagaacattcttaatagaagtacgatctctgtaccacatgcattaagtaccactactgtactagtgttggttgggctgaactgtacaccgactactactgagtgttgtaccacatacactacatacttaaccgtactagtgttggtaacacaggattgtaccctttgaacatcatatgatgtaccaatgcacttagtaccattaccgtactagtgttggtagcatatgaatcacaatatcagcatgcatagagtatgcatacacatattcacatatatatatatat

SEQ ID NO: 180042 - DNA, 264 bp, Cannabis indica
ctagcataaactagtatcatcacaacaggaaaattttactacacctaattataccttggaagagtaaagctggagtattatccttcatgatatcgatcttatcaaccttcacaaaggttgcaccactgtgtatctaaattatagaaagaaaaaaaaagtagttacagtactatagtatctcctctgatactatttcaaacatttgactagttgcttatatattaatctttcattttccattgtaaaagccctttcttgaatagg

SEQ ID NO: 180043 - DNA, 943 bp, Cannabis indica
cctggaaacatatttaatagaaaaaacaaaatttcaagtaatttgtgattgttctccttatatagtacctccccaaatccaatgttctgataatgcattatggcttttgattataatgtaggtcttcacaactcaccattggatggtccggctatacaaactaaaacctccaaagaacaggattcgaggaaaaactaagaagtctaaagtacgtataattttttcttttcgccaacttgctcgcgcgttttgttttggacatgtattgattcgattttctcttgaacatgacagaaacttacaggtacaactcctaaaagaagcggagctggaaagaaaaatccttggctatgaaaattgagtagtcctcaacgtatttcgaagttcgggttacctgtaatttcttacttataaacgagagagccttttagagagattgtggaggtgtagtggttaattttttacgatgatgctaattatagacaacgattttgcaggctcagtcacctggttttgtatctttttttgactcatcgttgggttaaagaaaaaagaagaaaaaaagagaaccatttttgttttactttcttttaatatattaatttaaaagggtccaactccaataagtttgaaaatggtttgattagcataattttataaaattgtaagccattagaatggaaatatggaaaaatattcaccagtactattaaattcaaaattactcgtgtgacgaaccttcttcactatcaagtacatgaaaggtttttcatctaaaaattaatccatctgtaggagcatgacattctaaaataatttttatctattttatctatttgtaatagacatagtaaatttagtttcattttagaatttttttttacaaaaatcccacatcatttatatattttgaaagtgttgtactcttaagctataaataaag

SEQ ID NO: 180044 - DNA, 745 bp, Cannabis indica
gcatatcacaaaatgtgtagtgaaaatatgaccttatatattagataactaaaggccaatggcaacccttttcatttcttaacaatttctctgtctattttttcaaagtctgaattcaaagtactttctccattaacacaactagaagttatttatattaacactaatatttgaaccttgtaataatttcgatttcagatccaaataaataaaaatagccactgcttaagaactcaaaatagatccttgaatatttcgaaaagcttcattttcattcatattgaaattaaaataattacagtcacaagacaatccaaacattgtcacatacagtaattagaaacctaaccctacaaagattaattcatcagcctccaaaaccgtaaagagttcggccttgtcttttcaaagcatagacgacgtccatggcggtgacggtcttccggcgagcgtgctcggtgtaggtaacggcgtcacggatgacgttctctagaaagatcttgagtacgccacgtgtctcctcgtagatgagaccgctgatacgcttaacaccgccacgcctggccaaacggcggatggccggcttggtgatcccttggatgttgtccctgagaaccttgcgatgcctctttgctcctccctttcccaaaccctttcctcctttcgtcctcttcctgcattttctaatgatctgttgtcttctcttctcttcgtttgagtgagagttggtattgcagagtcgagt

SEQ ID NO: 180045 - DNA, 624 bp, Cannabis indica
atttctcgtgttatgcgatatttgtgttttacttgcatttttggctgagtctttgtgactcacgggtgcttcgtggtacaagtaaagggaagggaaaatttgaccagccatgaatcagaggtctcccggcgatgtacatatcaaccgctgtgtcttggtttcagtgggcatgatccaccttttgatcatgttttgaaaatgtaaccccattttgtaatagacgttttgtgttgtattgtaaaagtttaaaaataaaaggatccccgaatttagcaatattttgaacgaaagttaagttttaatttaaataaattttactaaaaatttactattaaaccacacttttcgtaaacggatagttataaaagtagaaatcccagcgaaataggtcgttacaccaactattctttccatcttttctagattctttactcatccaactctccatttgttctaaactcttcattcactccattcttctaactttactctcatagcaaacaacacaatggagagcaactatccttcccactctctactctccatcctttctaaactctcctttatcttactatccatcctattaatcctattctcctttctaccaaacatatccttagagta

SEQ ID NO: 180046 - DNA, 513 bp, Cannabis indica
acctgtgcacatcatgatagtattagtagatgttttatgaaattttggtactgtaagttcatactattactataaacatcgattaaaaaaatataaagatcaatcatagaaattctttgttctaacaactcatgttgacataaattgaagagaaaaatatgcatataatgagttatatttacttagaatctttgtaaagagaatcaataaaaataaaatgtttaaaatctaaattaagaaataatcaaactattttaatttcaatttggtgtcggcaagtccggaatcactgcattcagttatatagaaatttatgtaaccattgtttcatgatatatgaaattcatcaatactcttacattttgatcatcacatatcaatagatttatctagaaaatgaaatagaattgtacctacaatacactgctatatcagacggactggtaaggatcatttgtagagtatataatcaaaataatataatcgtaattaaaggggtgagaacaagataac

SEQ ID NO: 180047 - DNA, 632 bp, Cannabis indica
cctcacaaaaaagaaaaaacactgttagttctttcttttgcttaaaaatttaagttgggtttttaaaaatcaagccctcaaacaaataatataagaaaagaagaaacataaaaatgttagattactaaagtgagagtgagaccataagataataagagtaaaatagagaagagaaagagaatctgaatagtaaaaatcaagtagttaaatctgaatagttactgctactttaataatattaagaaaagtgccaattatataatatatggtggtaatggaatgttcacaaagatgagaagaagcataatttaatttcaagttaatatgctatcaatcaatccatgcactaacagaacaaagaagtaatgggaatgggaataggaatggaatgtaataaaatttaaaatgcataaaaataattgataaaaaaataattaaatttttttcttgttacatttaaatggtcattccttcctttttaaaacggaatagtcattccaccaaaatggtgaaaagagcattccattggaatgtcattccaatactttaaaatgcaaccaaacaaaggaatggaatgaaaattatttcttttccattctattccttttcattacgtccaaccaaacgctacc

SEQ ID NO: 180048 - DNA, 526 bp, Cannabis indica
aaattaattacaaccgtctagtaataattcaacgactaaaagtaaatagtaattatcatgattatatttataactaaaaaaaaaaaactaatcatgattatatatttaatgtaaccataaaaacctcttccatatatatatatatatatatatatatatgtatattaagatttatacttatatctgtttggttagaaaaaaaatgatagaatctttgaaggcatcgagtgttcattagaggacttatgggaaaaaatcagattcatcctggaagcaacttgggtgtacaagacaatattttgagcatttatcattcttagatttaattagagaatgaaaaacttcgatgcaattttcatatttgtttggtcagacgagtatcttttactcgtgtgctattttgggttatgattgtttgagtgtctttttgctaacacttatgtaaccatggttttcctccaccacaagtgtaggtttttcaatatataaccgggagggaggggtcagtctaaaacaaacggccttt

SEQ ID NO: 180049 - DNA, 1231 bp, Cannabis indica
tgatccagtatcgattttatcaaccaaacagtggaaaatttccaggttcaaattaagccaatcactggaacatgccgatgacgaaattccagcaaccaaacaagccttccgaaacgtagtatcagaatcaccaatcagcccaattgctgcatgtaacaaagccacacccacatcatagacagaaccagaacaaggttgccttttctttaggttccaattccacagtgctacatggaaaaatccttcccacctgtgttgcaagtgtaaataaaaaaatgaacttaggatgtcaaaatttcacattgaggaaccccatatacatgcaacacatctttaatgaaagttaatgaaacacgtatgcagttatgccaaataaagacacgttcatgcaataagcatcttctattcaaaagagacaagaggtccagagagttgtctttctgcctgcatcataagctcccatacttgcagcatctcacatgaattgtaagagtgcatccttaaaaggtatggttaccaattcagccaaaaaataaaaagtatggccaccagaattaaaactttcactaatgttaaaatgcgcaacaggtggggtttaagtaggatatgcctatttcacgattttaacaagtaaaagaatgctcttaccttacctgccttaccgtattattttttgcgactaggtaaacccaatccaaaatttagatattcaatgttaaccaaaatcaatacgcaatgtgaaagccttctaaacttaaaaatcaaagtctaaatccatatcaaaatttataattataatagtcaaaaatccaaatatgatagaaaatcagaagtttaacacaataatattatcaaaagaaaaacagccttagttcataaatcatgattctctgaatttctcaacttttcactgtttcagaaataacctataaaagatctttattttctaattgcaacttatttcaataataaaaacaaactaaatatattcattaaacgacatctaattcaattctgacactattaaaatctctatcatccaaacaacacaataacactttctttatcctttgtattgatgtaataaatgacacaaatcaatcaaccaaaactaataattctattaaattataatgaaagaattataattaactttttagtaaaaattaactatattaaatataataaggaagttaacctactatactatttttttaatttttttttttac

SEQ ID NO: 180050 - DNA, 565 bp, Cannabis indica
ttttcactgggttgatttagattgttattgctaacttaagtgctgtctttgttttctgttcggtgttctttttcgtacctaccaactaatgctcactttatctcatttattgcttttcaatggccattaacccttgtacaggtttgaaaggattctaaatgagatgctgagccatttggaccgccaaccaaggaacatggatcgtcgtgttgcgtggcttcaacatgttgagccacttttcaatagtattggtcttttcttattagcccattttaggcgaatttttcctctattctttcagtggatgggtgctgatgatgatgagactgttatactggtaaggacattttcataaatgagaactgtttatttgatctcatatcttttgctcccttgctgtggatgaagatatgtgttttcatgtgggtgtattggattgaaaatagataatcaacttaacccgatagaatcggatagatcatgtcagtgacaataagactttaagtaccatcctcactatatcctctctctattcagcaaagaaaactatatcctctctctctct

SEQ ID NO: 180051 - DNA, 647 bp, Cannabis indica
atatttactagatgatggtcatttagtctcttgttgtttagtaatcatgatattttactaatggatcacttgttgttagctggcagatgccaatgaagatgcggctttaagcttttataatgattagagtgacttatgtaattaggctaaatgatggaaaccataatagtttcttgcttgcttagtgagcatggagagcaaccttggggaaggaaacgtttaaaagaaaccatgtaaaataattacagtattgtgaaaacacatgtttcgaccaaaagaggcaaatttttgtgctcatatgcatgtaatgcttggagaatccatggtcttcctacaaaccacaaataatcgttgttgtttcttagttcatttattagaaattttactacctgaaatcactgatcagtcttgtactatttagctgtatgtaaaactgtacatttagttttatctttcaattgtgcttcttttctacttgagtttaaattcacttgtaatataagatgcatttctgctaatctttccagtagttttgcatgacacaaattgtccttcattttgtttgctcgacagaaggctggattttattaaccaggatgaatgcattaacctgttcaaggaactgaacaagtacaggtacattgtaa

SEQ ID NO: 180052 - DNA, 689 bp, Cannabis indica
tgaagatgctcgtagtttgtaaatcagattttggagtaatgaaaacactgtctgattcaataaaaaaaaaaccattataatactatataattaccctaactacaactaattaatcatcccctttgttgcccattttttttagcttaattataaatagtttgatgttttaattaagctttggttaagattgtagggttaacgaaataatccccaaccctaccgacatacataataataaaaacgcggtcaatataaatcatcttgcgttatgccttaaaagatttattataatttataattaagtataattctttgtcttgttaatttataaataaaatatggtggttatgtagcgagggctttagaataaaatgtatatattttattttgacacctctataaggtataaaatagtacataaaaaagaaataagatatcaactcaaagtacgtaaaaagagaaacagcaggccacattagcataagcaaagtcccccaacaaccagcgatagagattattgggtatagactttaacagaacatgttcactcaccccatttacatatatatatatatatatatacactatacatgatctctacttttctattctttagaaaccttatacttcaagatatatatatatataatatctatatatatatcatgcatccatgcacgcatgcatat

SEQ ID NO: 180053 - DNA, 760 bp, Cannabis indica
atatattttgtttgagttagatagagccccgattcatctctgtacaccttaataccaaggaaatagtgtagaggccccaaatcctttaaggtaaactgcttgttcagttctgaaataaagcttgtcatttttgtagtgtcacttcctgtaataatgatatcgtcgacgtatattaggacaaagagaatgaagcttgttgactcgaagaagaacagtgaagtgtctgactttgactttttgaatcccaacttcagcaatgtacttttgagcttgtcaaaccatgctcgaggtgcttatttcaagccgtacagagatttgttcaatttgcacacataattctcttttcctttttcttcgaaaccttgaggttgaaccatgtacacatcttcttcaagatcaccattcaagaaggcattattgacatctagttgccttatatcccatcctcttgatacagccaaagtgagtacgattcgaacagtagcagcctttattactggactaaatgtttctccataatccacacctggcctttgatgaaaaccctttgccacaagccttgctttgtacctttgaaaggtattatcagcatttcttttaatccgataaacccacttgtttcccaccaaattcatccagctgcaataaggcaccagcacccatgtgttgttccttataagtgctcgaacttcacaaatccatgctttcgaccatcctggatgttgaaagtgcagcagcaacactataggtttcagtattg

SEQ ID NO: 180054 - DNA, 624 bp, Cannabis indica
agcaatacgtaatataatatgtattttctttatcagaagaatacgtgtgtattttttatcaaccttaataagctaagaaaaaaggctgttctatagctgcgtatatttatttatttattgatcttatcctaatctggtatattttttttagtcgtcattctaatctggtatataaaatataatattatattgattgcaagaaaaatgacaaatgtcagggtctataaacaaattttatgatctgggtatgttatggtttgacacgtcattgtcataaggccacttttgaaaacaaaaataaaaaaaaaataaaaaatcgtcccatataatctaggactacccaacttcgatttatgaaaatttatataataatttaaatttttatattcttcgccacaaaatataggtgtactttgaatatagaggtattattaaaaaaattgaatttttattcttaattttttttaaattcaaaataaatactactatttttacatatagactgtttttgaaagaaataatttttaaaaaaatacttttccatcaaaaataagaaaaaaaaaaaaaacatttactaagttatatatatttttaatataacatataaaaaaaatatttgatatt

SEQ ID NO: 180055 - DNA, 556 bp, Cannabis indica
cgtttaaacgttaaaaagtttttaacttacctacgtagtttagttttcgtacgttacgttacctacggtaggtttaagtttaacgtaaacctaactagtagaattactacgcgactagttacgtttactactactagaatagtattgtcgttcctacgacatagtaagttaagtccagtaccagatgtatggagtatacattggaagggaccgatattgatcttagataagatatcataaacttactgttatatctttctaagtcaatatcaatggttgatcttaggtctatggatcttaatcctgacatggttaggttcgatctcaagagtgttatttgtgttctttgatttgttagttaagcctaccttttggtctgggtgatacgtacattttgggaacatgatagtacaattgagtgggagtgctaatcatagatatggaatctatagcttctatctggacatagaagtgaaacgataatttccttcgagcttggctgaatagagataaatgattgaggcctcatttcagtaattatattagtttaatgaag

SEQ ID NO: 180056 - DNA, 723 bp, Cannabis indica
aataaaactcatttcaatataatcagatttacttattaataaagattagaaataacattttatgttgcatggttaacatgatttatttcatgattatatgtatatattgtatgaattgtttttaagtccagaacatttgaatttgttaaagattatagtgttgtcagcacagtggaatataatcttaattatatgtcgtaacgttaaagtttaccttcctgttagtttcgtacgaacgaaaccaacggaacggttaacgttaacgtacgtacgaactacgttacgttaaattaactacgaaggaagtaaggttaaggtttacttttaccttaacccttaccggttaaaagggtaaaaggtcgtacttagttccgtacctcaccttaccggaacggaacttaggttcgaacgtttaaacgttacgtagttacgacgtacgtatggagtatacatcggaagggaccgatattgaactttgattagatatattaaaacttaccgtaatatctattcaattcaatatcacctgttgatcctagatcaaatgatcttaatcctgatatgattaggttcaatctcaagagtgttattcgtgttctttgatttgttagttaagcctacttttgggtcagggtgatacgtacattttgggaacacggtagtgcaattgagtgggagcgctaacataaatatggaatctatagcttctatctggcgaataga

SEQ ID NO: 180057 - DNA, 971 bp, Cannabis indica
aactcatcaatttattaccattagattaaatatctatgactataaaaatatacttattataagaacaaaattaaggtacttacctaaatatatcctctatatttattaaagtttaaagtaaatatgtagacattaattggagcttttttactttaactaagaagaacactgtaaataactttaataaatagagggttctctaagtataatgagtttattacttttttactaaatatttttaataatattttaatcaaaacacaataattttttcactcttttataaaatatttatatatatatatatgtatatatataaagttaaaatcacctcaaatttctctaccttctccttattcaaatgtcactggtggtggcattcaaatgtgtggggttaaagaataataacttgacatgatctaaaacttcctaatttcatgtttccaatagttttttagaataataacttgacatatgatgatagagtcatttttaacaaatcatatatgattcttttcaaaaaaaaaaaaaaaaaacaaaaaaacaaaataccacaaatccacaaatgcaagtgtgggttaaagaatgatagtcattttaacttgacatataatttttttttttgcaagtatggacatatgcaatcaaacatgttacccacaaatgcatcattaatccactactgattggaaataaaaattgtgccgagtaaatttaattaataatcttcaaagttttcttcacaattttgtttggagtaaatatatatatatatatatatatatttatatatatatataatattattctaacatattaggaaaccccacacacgcacacaatgaagatgagttaattattatggcattaaaattctatcatacttacctactctagattatttgataaacttttacatttaaataagagttgtgcttacaaaaaaatggggtcgaagacaacgtaaaatt

SEQ ID NO: 180058 - DNA, 1253 bp, Cannabis indica
taaattaataaataaaaaataattattttattaaataatttttttgtaaaaaataatatagtgtcacaccacaccaaccaacccaacccggctcggacggacggcgcgcgcgcgcgtgtgtggtgggtcaagtgtgtgtgtcctcacccattcgcacaaaactgggtaccccttggggcccaaacctaaatgccaaagttgcactctttatacccttgtcaatgagggttcatatcccatgtgggactctttccaactcacacacactaagacacttatatattttgttaaaatattcacaatatttccaacataaactgataacaaggaatgtctctttgttgtttgttaaacaataatctattgtggttattcatagttttgttaaaggtttctacattgtatcctaattgtagttttatttggaatttgttatcttatttagtatctgaagtttatagttaataaaatacattttccattaaaaaaaaagtctgacaaatttaatataaaaaaaatataaaaaaaatataaaaaaatattaaaaacaaaaacttattaatattaagaacattaactagaatcaaaaggataaataaaaaataacattagaaatgtaatttttgtgctaaatttagtataattttaaatatatattttgcaacaccttggaaatctatttttttaaaaggatacgttaagttatatataaaaaaacactactttgataacaagaactttttattttaaaaatcacacatacgctatgttttggtgtaatttatatataaaaaaaattgtgtatttgccccacattattcatatgtgtagttacatttgtgtgatttatatatataaaaaaaattcacacttttgctattcataaaaaacataaattaattcatttttaattagtttatttttatttcaagtaaaatttttaatagattgacattttccaacgagaaatatgtgattaaacatgcttccattagtcaaaaataacaatttaaactaatgttaaatcactactggcaatgtaagtctatttttcatatctttctaaattactcctcttttatcaaaatcttcacccactcactctgtcgtgggtcgtgggtggtggtacggtagtgtgattggtgaattttgaggtggttgtggtggtcggttcggttggtgagaaagaaaaatgttagagtgcgagggaaagagactatagaaagagagtttccatttttagacttttttgt

SEQ ID NO: 180059 - DNA, 567 bp, Cannabis indica
aaacactgttaccaaccgaaccccaaaattataacatgctgaaagtgtttggttgctcttgctttcctgtacttagggcttatgaatctcataaagtttcattcaagtcttccaaacgtttgttcataggctatcacagtcctgccaaaggatataaatgtctacatcctagtgggagagtctatgtagctcgaagtgtcaccttcaatgaaactgagtttccctatcctcatctattctctcaaactgaaaaaccgtgtttttgcaaatgtcacttgtatatacgaaaatataaaaactgtaagcgtttgcagcagcagaaagtaattctcctacagcaaaactgaacaggcagaatataaaatatttgcagaaaaataaataacttgacacaagagatttgtacgtggtatcagtgttctcccaaacactcctagtccacggggccaccccagagaacgaaatcaattaataaagtatcaaaattacaaagacaattgacttaaacaagtttagactccctctaaagtattgtcgcaatcctttgtaatccactttatgaatctg

SEQ ID NO: 180060 - DNA, 813 bp, Cannabis indica
aaaacatgctcttcggttagacaatgagctatcctggttcgaggaggtgccgccgccgattgtggattgctgcgttgttaatcatgtgtgatctggatcaccgcgtacaaaaaaaaaaaaaattaatgcaccaaataagtgtgtacgtatcaaattttacatcattaataatgttgaatttttaatctacactaatttagtgtacaacttttttattttttgtatcctaacttttatttaattttattttaaaatataattttacattttagtcctcaagtttaaacttatcacaaaattaataattaatttaaaacatgaacatatatgcaaatacaaaataacaataaaaaatactaatactaataaaataaaaataaaataacaccatgttataaaactaaaaacaataatgttaagtaaaaataataatttaatagttaaacgtggctgttatataactaaagtatttttttaaaaaaagtaaattaatttttctaaaaataatcatatttggtattcttattgatcaaagttaggtaagattcttgaaaactcgaatgaaatatctgtgcaataagattttttattttttatgcatcaaatgtaaggctgtaagcttttgtattgtgtctgaattctgaacgtttgtcttaagctaagtgcttttcccaccccaatataaattataacggcaattatttttttaggttaaatattaaattaatttaagatatttatggcataaatagtgatgtagtttcaatatttaaactcttgtaaaaaaatttggtggcaaaaattcttaaataa

SEQ ID NO: 180061 - DNA, 651 bp, Cannabis indica
cggtgtttggctcagtaaaatcacaacttagtaagttagtattgggacggtttattaaacattgggaatgtcgggattggccgggaatttagaaattcccaaaatacccctttagtgctctttatgtcattttagtgtgaagggacaaaattgtcatttttccccatttatgttttgtcctttagtggacttagtaagtgaaaaataaatgttaattgatgttatgttggctgaatatatgtgttttatgcccattttcttttatttcaaaagttagaaaatatttggaaaagaaaaataaaacctctctttctctctctttcggttttgagtagctgggtttgggggaagttctttgtgtgtttctaagctaaattacttcaaaattagttgtgatctctaagttttaggttaagggttacctttatctttcccttccttgtaatttagtttgaaaattaattgaaaagaatgagtattgtcatgtatggtttttgtatgttgttactgctgttagttgttgttgttatttctatgattaaaatagcttgaattgaataggattagataggttgaaatagcatatttttgtcttgtattcaagcttggtagtttttagtctcaaaactaatggtttttctaaagtagaaa

SEQ ID NO: 180062 - DNA, 1070 bp, Cannabis indica
aaaaaaaagaaaaaatgctacttacaattttgtgtctatactgtaaaagcatttgaatcaatttagaaggatactactgatatgtttttattttgttttaattcatgggcaggtaacaaactgaaccatttttgcatgaattaagaacatcaaggcataagagtttttgtttaagttgactctggcctctgttattttgacattttgagaaaatcaaggaaggtttcagcaaattatccgaactcacaagaagtaaaaatcccacctgagagtatggctactttgcaaaagcatatacatcataagcagttactactatttttctccatggcagcatagaactatagaagatacatattatattgtattgtattgctttgcatagcttattctgaattttgaaaagaaaaccgttgtcgtattttcagttcaaacaaaatggttgtagatattcctatcacattaccttgctaattgctaatgtagtttactttacatgcacaaaaatttaaaaattggtacctttacttagggttgtacaaaaaaatttataaaccgtccaagccgaataatctgcccaaatcgaactgaaaaaatcgataaaaattacaaaccgaaataacttgaaaaaattacaaaccgcccaattaaaccgactaacccgatcgacccgattttgcacctttatttttttgttttttaactttgaataattatcttttttaccccctgtacttatgacactatactattatgccccttaatctattcagcttgttacaaatagtccttgtataattttatatgcatacatttagtccttctgtttattttgtttaaaaatactgtttgtattgatgatgtggtattataacaaaggatagagtagtaatttcatctctttttagagggaaaaattgactatgaggtggcataataactgacaatgaaagaatgattaaaaaataattactataaccttttaaaaaaaaaactttaaaataaaaaataaattttattaaaaataattacctaatcgtttttaagtcagttctaaatagaaaaagtgt

SEQ ID NO: 180063 - DNA, 549 bp, Cannabis indica
cttcctcttagtcccgtaacttgcatttaagtccgtttttaaccacacacttctttcttcttcaaaagctaatctctaccattctttgttcgtgtttcttctctccttggctaggattggatttcacaagtttgttgtcgccaatctatcaagttcaccatctcttgtttccattacaatcttcagcacatgattgcttccgaaaattgctttgctccatgctcttatgttctcctttactatcttcaatttactcataattttggtacttggccaacacaaaactgccgcatttttcaaccacgggtcaaaatgttttgagaaaagattgtcttccagctatatgttatcaaaatagaaaggactcgtaccctattttgggcggttggagtcaatcactactggactatgatccgagacaatcttaccaacatctcttgtctgacataaagaagcgcattgttccatgcattggtgaaaaggaatctatcccatctactacaaataggctttgatctgaagtttgaccgtgtgaatcttccattattc

SEQ ID NO: 180064 - DNA, 532 bp, Cannabis indica
aggggacaaaaatcctctcaaaataatatattgttagaggtatttgtttgtctgttctatgctgcccaacgcttcccaggaagcgagttttccgtcggcgagctagatagaagatcctctttgggtctcctttggatctgtccatcatctggtcttcctctgtcggtcggaggtgataagctttaaaccctcatttactttcttccaaatttccgtcggtatttgtacgtcttcctaattttttcttattattacttcttcggggaatggtccttattttatcttcctcgcttttgtcgtttgtactttttatttatttttgtcctctgggtttccaactaggccatctagtgttgggcctttcttattttcgttaattatttgggttttgaactttcgggcatctactttatttgagcctttgcactttttatgttttattgggccttcattttaatctgttcataatttttcccccctaaaccactactcccctacgttctatttattgcttatgcataacttgaaactg

SEQ ID NO: 180065 - DNA, 767 bp, Cannabis indica
gagaatcatgaacttggatgtgtgctgaataaaaagaccgtggtcagatttggatgaaataaaaccaaaggatagtaagaactgttgtaatttctccttggtgcctatttgaggccataacgagccttattgagtttgcacacaaggtgaggagcatcaggtagctcaaaattaacaggttgtgtcatgtacacttcttcctttaaatacccatataataaagcatttcatacatccaattgttaaatgcaccatccttttactaaggccaaagaaagaacaattctaatggtcactggttcgacagttggactgaaggtttcagtaaagtcttgctttgaacttgttgatagtgccatctggattgagtttgatcttatacacccacttacaaccaattggtgttctaccatcttgtataggaacatatgtccaagtaacttttctttttaagagcacctatttcatttgacatagcatgtctccacttttcttgtggaagagctatcttaacactagttggttcatgaacagccagatagactttaggtttgtatataccaaactttgctcttgttttcattgaatgtttgtttgttatgggactaggaggctgaggttgagaggactcattgtaaacctgaggatgaattttcaaccgcatgtcattcatttcttcctacatgaggataaatttttgtagctagaactcactaagtaaacctgtttctcctttctgggctagtgaaacaaagtactcaggtctt

SEQ ID NO: 180066 - DNA, 804 bp, Cannabis indica
aatcttagtgcataaatcttagcattttatattgattgacaaaactaatccattgaaagataattaaaatcaagtaaatacttcctaagcttggcataaatatatagaagtttaaaccccatttctaacatcaattttaccctcatttgcaaaatatcttggtccataactacagatatatctattctatataaagtgtgcctatataactgaaattcttggtttatgagaaattcgtgggtgaatttttatttttatttaataaaataataaaatattatttatatatcaaatttgtaacatttttgaagattatggttgttctatcgataattataatttgactggttttggtattttaggcttgtttttaactacaataaggggggcattctaggtcgacatgatgcacccgtaattcagtcggactcggagcatctccgttcctcttcgtcaccaacgccaccaacgccaccaacgacggtgatttctaccaaacaaccgtcgcaagagacacacctggcgcttctaccggctatttccaatgccgcttagacataaatgctactgtatgccaagaatgcgtcagaaacgcttctacagaggcacttaagcggtgcccactagaaaagggagccataatctggttcgacgagtgctgggtctcgtgcccgcgttaccgttgtctaatgtgcagaatgtgacggaataggagcgcttcaaccattgtgggggtgttctgaataagtggcagccaagccgttagtccgagtcggctaagagtacgcgacggaggaagagaac

SEQ ID NO: 180067 - DNA, 748 bp, Cannabis indica
aacaaaattctatatgcaataattgtattcggaaaacaatctatgcctttcaaaaaatttaatatgtcaatagctctcattttttctcttggcaagatttgtcttaataatttcaactccacacataattcattcccatcaatatcagattgttcattatgtttcaatgccttttcaaaatgactacaacaagacttcaaatttgcattgtctaacgattgtaacttgtcagaagtaaataagaaaccaaaaatattttcataatcttgatattgttcaaatctcttagtaagagaaacaatggcttggtcaataaggtaaagaaaataattaattctaaaagattcctctccagataactcaacaaatggggtattcaaattttcatcaaattgcttttttcttcgaattatgcgcctttgaggaaaaactggatcgatattcatttcaatagcaatttccttagcactattcaaggcattataaaaacctgtttctctatatcgctcaaaaaaagaaattaactcctttattttatccatagcaacatcaataagcatatcctttgattgtaaaagcttgctaaccaaattaattgaagataagatttcaaaccaaataataattgctattacaaactcaaaatcaccaagttcatttgttgctaaggattttgcttcacttctgattttagaatcaagtccatcattttctgacacttcaagtaaagcttctctaaaatctaaca

SEQ ID NO: 180068 - DNA, 583 bp, Cannabis indica
cactaaaaatactagcaaaaactgctaaatcaaagaaaaccattaaatatagcctaaatttaggaagaaaaaaaaagaggggtaaatcaaagaaattataaagtctaatctgaatcagaatacaaaaatatatggaactaagtattaagctgatagaatagttatgagagaaatgcaaaaacactcgaagcatcaaaacagtaagaccaatataatttggcaagtgagaaaacggaagaaaaagatagaagttaaatactataaattatatacctttataagcagagtagtggaaagtaccgaagtataatatccaaaatggctgggtctttcagaaatgagaagatcgtaagataatggtgagcattggaggattatcgcagagatttggggaagaaatcttcgatagtgtacagtaataaattagaaaataataatttgaaatgttgatatagacagacaagaagatgcctgtattgttgagtttattcccgctcggtttttgtttttgaaatacaaaaaataataggttttttcttttttcctaatcataaaaataaattatttccaacataaaataata

SEQ ID NO: 180069 - DNA, 740 bp, Cannabis indica
cttgtactctcctacccttctttctgttattgatcttgtttttttaaaaaaatcaaaaatatatttccaaagaaagatatataacattaggcagccaaataacgatgagccatgcgatcttttattaaaaaaagttattgaataaattttataaaaaaattagtgtactatagattatttcttcattaaaaaaaatattgatatttgataatagtctgcaagtgttagtggaaagtttgtctttatctcatttcaaaaaaagtaaaacaaacaaaaatatccaacaattttatctaatgtgactcaaactactataatcatcaactacttattaacatgacactatcatattgactggaaaacaaaaatactctatttataaaatataccgtaaaataatacaaaacaacagtaaaatttcaacacaaaacacagtataaaacttaaataatatttttataaaaaatttcactccagagtaaaaaaaaagaaattaaaaggctgtttggttttataattcaaaaactgttctattttttaaaactgaaaacagtttttaaaaactaatagagttgtttggtaaaaatttttaaaacagttttttaaaacagaaaacatcaaaatgttgttttcaatttttaaactttttttgttctaacatattatattttatatttttgtctcacatactcaaatcctaaacctggatacatacccaacccgaacctggatgggttcat

SEQ ID NO: 180070 - DNA, 617 bp, Cannabis indica
aaaaaataaaaacaaaactaaaacaaaaaaacaaaaagtactgaatgtcttcaatattagggtttatcgcaagcatatacgaagacagccaagacaattagacagagacaagagacatacagaaaaaatagacagagaagaaagatatcatacattgttcattaaccacatataatattttaacaatatcctcgagatccaatccaattatatatatatagggataggatttggtccagttatgctaaaatagagaatacaatcctaatacaatctaattatatatatatagggataggatttttcagtttagtgaagattgcattttaatttttttgggttatggtgtgtagtcattatataaagtactcttctattgtactgtgaatatatgcaataatactcaatatattcagttattgaagattggatttcattatctgttttcaccattgtcactgccatgattcttatatcatgaacagaaggattaacaatcctaatacagtgaaacaattttaacaaaagaatgtaatgaaagaaagaaaagctatgtaaacattggtatgtacagtgttgctgaaatataattgtttccgaaaatcaatttgtttggt

SEQ ID NO: 180071 - DNA, 783 bp, Cannabis indica
caaggtcagactgatcatactctttttatcaaacacttaggaaaagggaaaatggcagtactgattgtatatgtggatgacataattgtcaccggaaaccatattgaagagattattctaatcaaggaaatgttggcaaaggagttcgaagtcaaggatcttggtgcactcagatattttttgggaatggaattcgctagaagcaaaaaagggatttctgtgtcccaaaggaaatatactcttgatctcttggaggagacaggaatgcttggtagcaagcccagcaagactccaattgagctcagagacaagaggaaaatgtttgaaggaagcccagttgacaaagagaggtaccaacaactagtagggaaacttatctacctctcccatacaagacccgacattgcctttgcggtaagtctagtcagtcaatatatgcataatccatgtcaaggacatctcaatgctgtatatagaattctgaggtacctcaagcaaacaccgggaaaaggtcttttcttcaagaagacaattgagaggaaggttgaagtcttcacagatgcagactgggctgggtcaattgatgatagaaagtctacatctgggtattgtactcttgtatggggtaatgtagtaacatggcgaagtaaaaagcaaacggtagttgcaagaagtagcgctgaagcagagtatagagccatggcccatggagtgtgtgaagcaatatggatcaaaacgcctactagaggagttgaagattgagtatgaggcccctattcaaac

SEQ ID NO: 180072 - DNA, 530 bp, Cannabis indica
atcatcctcagaacccgaaagtcaccactttctcttcttcaaccaaattttttcataggagaaatgaacacagaagtggggctttggcgggtggccctgagatgttggatttgtgtggacttggggattgggttcaggggtttaggtgttttccatggctggctttgaattttcatttgactcataatctcaacttgcatccctctactctacagcttgttcaaaactctggtaatcttcctatggtggccaaacctctttatgggatcttatctgatgctttttacatcaatggtgctcgtagaataccttatatatctattggaggttggttaaccttaactctcttcccattaagattttagctcactttgtaatcataatgattgcttaatgttctaatttggaaaactctgaatagtttacattgccgaaaataagttaaaacagttacttaccgcgcatgtaagaaaaacaattatgtgtgcagttatgaagattttcctatactttttgaacaatctaataga

SEQ ID NO: 180073 - DNA, 591 bp, Cannabis indica
ttgtgtgaaagagaaattatttgtatcaagatcaaatgaagttttttgtgaagtattgtaatctatcatttttgaaaaattagaattaaatttgatttttttttgttaattagtatttatggttgtggatgagcctaattcttggtataagcaatatttaaggcatgaattaattgttcaaagtacactatatttaagagtattgttataggcattcttatgacatgcgtcttatgattagttagtaaatttttataatctttattaaattaaaagagaaatttgactttatatgaatttattaggtcaaaatttatcccataattattagtgtatcaatattattaaatcaagtcaattttttattaaactcaaaattacctctctcatttctcaactcactctctctccctccattctcctcgctctcttcaagagaatcgaaccccaccgaccaccgcaccaatccaacgaccactcgctgccactccaacgattaccccactcatccaacactatcgccacccatccactgaccaccttcgtacccacctaaaaaaccaaactacggactcggccctcctcgactcc

SEQ ID NO: 180074 - DNA, 574 bp, Cannabis indica
tattattttattttcatctatatataatcctatatatacaatcttattatatattctttcatttcattctaccccttattgattttaaaacactctatttattttcaaaacatagataattataaagaaaaaaatttgacaaatattttttgtatgacaaaacaaatagaaggtatacttaaactttttttttggggtgcattataaaattttctatgtactaaaaaaaaattgatcttattaaagcaagatgccaacaacttttctataatcatgtttaatcattttataagaaaaaaaaaagtaaaaatttatatgagtaacctagctaattaagccatgcccatgtctataaagccgtaattagtgttgcactaaataataaaataataaatatgattattacaaaaaaaaaaaggttttattagtaaacaaataatgaaaggtactcacatgttgttataactattcttttggttgaactcttaatttgttggatatgatcactaaccacatcaataacaacaaaccaaaaactctaataataataatataaaaaaactaactaaataac

SEQ ID NO: 180075 - DNA, 979 bp, Cannabis indica
ctcgtaattatcaatatttcatataatgcatactccacttaacatagtaacaatccaaatctacataaataataagtaaaaaaaaaaacaaaaattaaaattatttttatccaatttagcatgaacagtaaaagattactattgttctgatatcagttgatggaaatcatatttaaccaagatattacttttaatattcaaatatattgattattattaatctaacatcctaaacattgaaccttaatacaattcaaattaaacacaataaaaatttaaaaaaaccttacagtgtggaattaaatatttcctttcgttcagttccgagtggacaagaagctaaatgctcaaatagtatgccgtcattagagaggaatcctgtaatatctaaactaaaatagtattttatttttttttttttttaagatttcaattacatgaggataattattttatttatttatgttgttagtgagttgagattattacttagagtagttgtagcaattttctaaagatagttaaagttttattaaatgcgaaggtaaaatattatgatattttcacaagataggtaatcatttaattaaaacccaatataaaagtccattagggttttataatttatttagtgagtttaattaatgggattattacaaaaaaatacaaaaataacgaaaaaattaataaaaataatgactatatagagttttaaatatctttacggttattaagattttatttacataaaatacattcttttgatgattttttatgttgtactcttgttattttgttgttgattttttttgttatttttactattatttttttattgtttttttccttactatttttatgtgatttttttgttgttttggtgttatttttattgaacactgtaaaaatgttaaaaagaattaaacataaatgtgtaaaaagtttgccaaaagtagtattttatgtaaatttcttttaa

SEQ ID NO: 180076 - DNA, 692 bp, Cannabis indica
ttttttttctgaataccgaaacaagttaaaagtgcaccaatacatcccttttaagggggtgcattgtagatcaccgtaatgtataaatatgattataaaaaagttagggtgattctacaatgtaaccccttaaaagggatgtactgatgcacccttaacttgtttcggcatccagaaaaaaattttagtctaattttttttcatattcatgtacgttatagctatttaagatatcctacaaaattttgaaaaattcggaataatttacaatatagaaaacaatgttcaaacagtctattttacacgcgtataaaataaaatagtcacgcgtgcaacacactgtttgaacataattttcggcgtgttaaacttttccaaatttcttaaaattttgcaggatgtcttaaataactataacgtacatgaccatgagaaaaaatttgactaaaaaattatttcggatgctaaaacagataggggtgcatcaatatatccattttaagggggtgcattgtagaattttccaaaaagttaaaccgaaaaattctttaaaatgtcaaaaatagttagggaagcagcctaaagtttataaatttttataagggctatttggtgtataatgatactttttgtattacgtcagtggcaaacaaaggataggcatttttgcctccagtgatcgagtcatttcc

SEQ ID NO: 180077 - DNA, 526 bp, Cannabis indica
cactcttaaaaaaatcacaaatatagaattaattaaatcatgaaagttcttagtttactgatcaatatatattgagagataccatattataccataaaaataatatactacatgctaccatgctctaacacacacaaagacatactatatatcaatctattgagccaataaaaaactcaaataattgtgctcactggtgagaatggaaacaacatatatatgtttcattaaaattttaacaaaagtaagatataataacttacatgaaagtagggtgatcataatggtattggtgaggaaaaagaaaggacttcaaatatagagaatcattcgtagacgatctataaaagttaaagattgcttatagtgtatgtaattatgagtgatcagtatgtattcatgtatttagatgcatatatttatatatacacactctaaaaacagcacaacaaagaaaaaaaaactatacgaatttacgtaataagaaaatattatagtagagcacaagtaataatcaaagcatgat

SEQ ID NO: 180078 - DNA, 763 bp, Cannabis indica
atatatatattagatatatattagctatatataattaattaattcaatgtttaatttaaagatatgttctgttataaaataattatttaattttgttaatactttttaaatatatctaagtcatatttaataaataatttaaatttatatatttaaaattactttttttccaaaataataataataattaattgattgatttaaaatcaataatttctattagataatcacatttttattataagaaatatatatatatatatatatggaggaggtaccaatggttatatttttattgtaatcatcatggttataattttttttagtcattagatcactattaaatggttatgattaatttggaaattaaataaaaaaaataaaaaatgacttgtaacctgatattaacctgttgatttattttcttttaaaactttaattaagattaactatattttaaaattaaattaagtataattaattaattctaaaaataaaatttttacctattggtaacctgctattacaagtaaaaaaaaaatataaccatatgattacaataaaaatgtaaccattgaatagtcacccatatatatatatgttattcaaataatattattattatatataacttcatgttaattaataaaattccgatgactaacatgcaagcaccacacaaataatattgacaaatatcttagcttaaatatatgatttatgtataaatatatttacgtatatagtacgtacgtacatggaa

SEQ ID NO: 180079 - DNA, 506 bp, Cannabis indica
gtttgttgacatccagacacagatgcattcactcactccatttggagtagacctctgctcggagaatatggtagaagacaacatgacatggaatttcgtcgctggccttactgttgctcgtgagatacttgaaagctatggctgcgttgttcgtgtcatatcacctcggatcaaggatggctgctcttggagcaggtggcactcgggttgaactttggcttccatgcttcgccaccttgtctgatttcgacggtcctactcaaacgctatagcaattaggggagaactctccgcattattattaccacaccagtacacattacagtacagattttagaaggaaaataatggacaatatttgaaaattttcgcctttcttgcttgctatttataaattgcaaggtgttggttttattcggggtcgtcatactgtatagtttatttttccatacatatgaatttacttgtattgtgatttatgtctgtacaaggaagtgtacaatttg

SEQ ID NO: 180080 - DNA, 680 bp, Cannabis indica
aatattatctatgctaaaaaaaatgtaaggatttagacccaaaacaaaagattatatggtaccaatatagacgatacacggtgcctacaagtcccaagtaaccaatggcagaggaatctcttcctatgtacgagcccaccttgtgtcttgtgagttatatctaggcagaggaatacttgtaaaatattactaggttttaatcagttctaagatttatatttaaaaaattaatataactagtagtagatttctggccagataataatatagttagagcatcttcaatgtgctcaatatttatggttgtcaaaaatacacacatcattttaaattttttttattattattattttctttattccaatctatataagatttaacaactttttatatgaaaattactcaaatagttaacaactctaaaaataatctaccatactcttacatgttactatttaaataattaataaaattatattaaaaaataatgactacggtaaaaattacttgatgaacaaaccctattaaagatgctcttaatagttttggatttagagagaacgacaaagagtacgaggattcatcagtgtcaataacgtgaaaattataaaacaaaaacagcttttacgttgttctgtcgaaagaataaattattagacaaatataatactgcaaaaact

SEQ ID NO: 180081 - DNA, 736 bp, Cannabis indica
gttttctcaaagtgtggacttctcatacgggttgccatgatgttgtggatcgttcttggaagcaatactatggtgggacgggagaatcagctctgaccaataaaggagaatcttaaactatggaacagaaatgtttgtggccaatgcgatgaaaaggtgcgtaatcttaagcatcgtctcacatccattcagaatatggctcccacagatcaaaatttggcccaagaagcaagtatccagctggagattttggattaggaacaaaggcttgagagaatttggaagcaaaaatcaagggaagattggcttagggatggggatggtaacacgaaattttttcatgcttcaacagttatttggaggagaaggaacaagattcttagcgtcgagaatgatgatggtagatggctccaaaatcgtactgatattggagagtattttcagaagaaattcagagaggttttcgagtcccagcagcctcggattgatgatgagctggagtctttgttttcgtactggtattatagaggaggaaaatgatctgatttgcagaattccatctgatgaagaagttcgcaaagttgtgtttgcgatgcatttccttaaagcacctggtccggatggattctcgggaatcttctacaggaaatattggaccattgttggtgcacaggtctgtggaatggtaaaagatttctttatgcttggcagtttgaatgatagaattaatcatacc

SEQ ID NO: 180082 - DNA, 787 bp, Cannabis indica
agtaccgtctttctttttaacaaatagaactggtgcgccccacggagagtagctaggtctgataaaccctaacttaagcaattcttccaactgtattttgagttctttcaattcagatggtgccatcctatatggtgcgcgggaaactggtgctgttccgggcactaattctatcacaaattcgatttctctgtgtggtggtaacccgggtaactcctctggaaatacatcaagaaactcagcaactacccgtgtttcctccggctttctttcaattttcttggtgtcatcaaccacattaactagataccctaagcacccacgctgcaatagttgcccagccttcattgccgaaataataggagtgcggggtttctttcctacccccctgaactcgaaagtctctccatcttctggtgtgaaaacaactttcttttgcttgcagtcaattgatgctccatatttggtaagaaaatccatgcccaagattacatcaaaatcaaataaatctaatacaatcaggtctacaaataattctctaccatctatcctgacaggtatacccctaagccaacttctagagattacaacctccccagatggtaacatggtcccaaaccccacagtaaataattcactcggtgcatttatatgatttacaattgtgctagcaataaaggaatgagttgcaccagaatcaaacaaaactttacaagtggtgttggccataggaatctgacctgatacaaccgaaaggaactggcctcagctctgcttgagtgatggc

SEQ ID NO: 180083 - DNA, 590 bp, Cannabis indica
ttggcggttcaacttcacttttgtcggcaaagtggtataatatttcggctattttttttttacttttttcgatgagtaaatgcgtcggcaaaagtcattaaattttttggtagtttaattctcgcctagtaaaaatgtgcacagaaataaggtaaaaatactttgacgccgaagttaggttgcctacaaaaccctttacaaataataaaaatattttttttttcaattttaatttggaaaaaaccctttgccaaggagcctaacttcgctggaaaaagctattaaattttttgacagtgtaattatcgtgcaataaaaacatgtgcggaaaattaggtgaaaaagttttaccgacgaggttaggctcaccaacaaaacattttgcatttagtgaaacattgagtttcatttttattttgaggaaaaaacctttgccggggagcctgacttcgctagcaaaaggtgaaccagaataaacagaaccgaaccccattttcaccatttcttctctcttttctcttcttctttctcttcttctcctctcccaatctaacctctaatcctctccaccaccaccatccatcctctag

SEQ ID NO: 180084 - DNA, 668 bp, Cannabis indica
tattttctccaggaatgttagtatgttcaaaaacataactgctgtcatgatcatcatgtattccctgatcaaagtgactgttgtgtgaaggtgcttcattgctatcaagagttggagtactatcagtttgaagaggatagttgtgtttggtttgaggttgtggagattgtactgggacatttacagaggcagaccaggaaggaaaatgaacttgaataggtttttctttatgaaaattgttaagaaaaccatgcttgaatggaaactcattttcattagaaataacattcctagaaatgtaaactcttcatgtactacttcagcatttgtgtcctttaaagttttcactataccctaggttcacacatttgatggagtggtactgaaatttgtgtgattggtagggtctcaaacaagggaagcaagctatgccaaaggttttgagatggttatagtcaggctttcttgaaaacagagtttctaagggtgagatgttgcctaaaactggtgtaggcaatctgtttataagataaacagcagtgaggaaagcatcacaccaatatttaagtggcatgctagcttgggcaagaagagtgagtcccatttcataatatgtttatgctttcgctcagctcttccattttaagctgaggtgtgaggacatgaat

SEQ ID NO: 180085 - DNA, 683 bp, Cannabis indica
aaaagggtctttattctgatatgaattaacattgtgagacttggaagaacacttgatttgaggcaaatgtgaatttttggcctatacccaaatatccattcttatcatcatacagtttcccactgaaacttcttccaaaatggttctctgcttgaactctccctctaagtacagtaagaacccctgctgggtttcgagcatccgaaagggtaacataggctgaagtatatgtcgccatcttaaagtggcaaaactcggatctaagagagaaaagggaagataataaatgcagcaaatttaaacccaaaagtgtatattctaccacaaatctatcctccaaaacctgttaatcaatgccagacagcaaacgacaattagtaaaaacgacgtattaaggaaaagaaaaagcctaattcaactaccctaaccaagactcaagagcaaacaataacctgagccaagtaaatgtactataaactataactgaaaatcaagccaaaaatttgctagagtatgaatactccatcaaaatcaactaacccctaaaaccccagaaagctacgacccaactaattatcccaaatgcattaaaaaaaacaataaaagtcgcaagaaccataaaccccagtgataaaaataagcaagaaacaacaattaataaaaaaattcctgagaattgcatc

SEQ ID NO: 180086 - DNA, 542 bp, Cannabis indica
aaacatgttgatgtgaaatgtaactgatttatttactcttatatctcttgaacagagtctctcatttctatagcaataatattatttgtaagacttagtttatctgatttcttatggtgtattttccttcagatgcatactgttttgataccatactttttgatcgtacttgcaacacccccaactcacagcctcgagggaacgttactggtgtgatttttgtttctttttttttattattattaccataactacactctcaaacaaaaactggtgatttcaaaacttaaaaatctaaaatctaagtatttttacaggccggtcgagatctaaaatttatcagtatgacaatgagcggctgctttatcgtgggagcaattttactaaaggtagaatcattatttcccactcttctgttctgttatcaatgctatcatttttaacactttgttaaattttatgtttcttcttaaaaaaccagcttgtaagtgtcaaaggatttggtttagcaggcatttggtttgtactagctggttttcaat

SEQ ID NO: 180087 - DNA, 586 bp, Cannabis indica
ggagacttaccgccggcaccggaggtgctagcaccaggagcccccgagtttggctctgggaccgaaggctgtggccggggggtttgcctctccgaagaatcctcaatacgaaggggcctcctggcaggacgatccccaatctcttcttgaagaatcttgtcaaaaaatttagcctcggacttcccggcaatcgcctggctccttcgcaccaccgggctccccacgcgaagtcccctcccagaggcagcctgggcctgagagtatgccttctcctgggccttccggtagagataatcttggtattttttctctgccgtggcaataagctcatcccggaaggccttctccgcgaccggcgcccttacgttgggacagatgacccgtgagaggttagagtcctccacggattgatgcggaaggataagtttggccttcctgcagttctccgtggtgaccaaacccccgacatcgagatcggcgcggtcgtaggaggcaaaggcttgggccctccggaggaaggtctgagtaggggccgtccgctgataaggtgggatcctcacccactcagtaaggagctccgggtggt

SEQ ID NO: 180088 - DNA, 914 bp, Cannabis indica
attaaaacgaaagggcaaacatatgaatggtctccaaacaacaaaacagagataaaggtgaaatcttccaacaatgtatgattagtttcccaatcaaaaatagcaatgaaaaatgtaaagactttcgacaatatgataaacaaaagcaattccttgtacaagcaggaaatttatagatgtgacagattgttgggttctaaacaggttaagggtatcagtataagcgtaataagcaatttcaaactaacttatactttatttggtgattgtcaaataaaccctattaagtgtaagacaactaaataccatattgagcatacacaaagtatactgtccctcagcactcatacctcctttgaagagcctgcgcctttgaaatcggtacaacagtcaaagattccagtccttgctttggatcatacgatcgtgcttttaccaaacctgggtctataacatacttaattccaggaatagttacggacgtctcagcaatattcgtagcaagtatcacctaagacaaatgaataggtataatgtcatctaacatcaaccctacaatttctgggaaaaataggtatagatttattattttagaaaaatagtaagccatatgtgattgggttgcacaaaagtgaatttcagcaaacagcagtagatttaagatgtgactactttgcagtaacggaatcagcaacataatgataatgaagtgcaagggtactgaccaaaaatgccaacataaaaattttgcaaaaaatcaaaattgacatggagatttttcagcctactctgtaaagtataaatttttgggatatcagagtttcagagtgaataaaatccacagtgaggttcatctttgtattaagtacctgtcgatatccggctggagttgatgcgaaaactcgcatctgctg

SEQ ID NO: 180089 - DNA, 788 bp, Cannabis indica
gttataggttaatttatttagtttttattttcaatctaaagttacattttaaaatattgtctgattttaagatgtagaactttattgtagaaactcgtggtagctcgaacatcaatattgataggcgagatggttagggcttttgagtttttacttaggttgagattttaaattcccacgatctttgtgtttgttggcggaattatattttgaaactagaggataatccttttctttttttttttggtaaaattttcatatttatgccttatttttgtgaattattttgtttaaattttgttctcgctctcgatgaacaaaattgataagttagtcacaatatatatatttgtatattagatatattatgtctaatttatatattttgttgagagagagattgatcaattgagtttgtgttaaaagattaaaatttgaatgtaaatgtatgtaattggttatgtcatgattatgatttgtttgattaaatgctaagatcaatttgaattttgatgatctttatgttaatgcatgtacatattgtttgtcatataaaatgagttttttctttccttcattttttttttgtacatactgattaaaattactaaagaatttataatgctgactgttatcgacgcaagaatcattttaaattaggatagttaattatttaactgaaaaatatattttgccaaactaacaagctacaaggacaaattgtactgaaatttagacaataaactataacgtacgtcgtcaaatagcacatcaaaaaaagctaaaac

SEQ ID NO: 180090 - DNA, 671 bp, Cannabis indica
actaaagaatttataatgctgactgttatcgacgcaagaatcattttaaattaggatagttaattatttaactgaaaaatatattttgccaaactaacaagctacaagggacaaaattgttactgaaaatttagacaataaaactataacgtacgtcgtcaaatagcacatcaaaaaagctaaaacttcaacttataacactgaaaaattacctatacaagagaaaacaaattgtattagaagaacaatttataaataaaataatcacttgattcaatcaaataaaacaaaaactaatgaaaaaatttaaaaataattagcagaaagtatttacctttagctagtagcaaccaaagtgaatggatgtacatattgttgtgatgtaaaatgagtttttccttgcttcattttgttgttggtattatatatatttgagtcaaatcaaaacatttgaaaactagtaagaggtatgcatgcaatatctctataaatatcccatctcctcatcaaaatcaaatcatacaatggatatatataatatacaaacttaccaaaacacataaatccaaaaacaaccaaacttttctaaatccatccatctcataaatttacataaacacatatatgtattcacttaaaatataataatcctatgattttttattgtttaa

SEQ ID NO: 180091 - DNA, 606 bp, Cannabis indica
tgaatcaccagaaggcagggactagtttgagtgagaagtagcaacagtaggtatagtaaaccacgagtgaggggcttgcattatgagaacctattcaggttgatggttatttagaaaacccttttaaaatgggaattcatcttcattgaagatgacattccttgtgatatagattcttccatgagggcttagacatttgtaacctttaaacacttcactataacctaaatttacacatttaatggagtggaattggaatttatgttgttgataaggtctaatacatggaaaacaggttgctccaaagactttgagtagtttataatcaggttgcttagaattaacaagttcataaggtgaccgaccctctaacactgctgtaggcaatctatttatcaaatagactgaggtttgaaaagcttcagaccagtacttaagtggcatgtgtgcttgtgcaagtaaggttatacccatttcgacaatatgtcgatgttttctttttgctcttccattttgggaaaatgtgtgtggaaatgagtgttggaattcaattccacactcattgaccaagtcggagaaggcttggtattctccacctgaatcgga

SEQ ID NO: 180092 - DNA, 646 bp, Cannabis indica
caaattatcttttcaactgtaccaagatcactagaatcggatcagtatttcaagttttactgagacaacatttaccgagaatatgcgaaaaatgatttacaacaaaccgtatataaatgctactttttgacatagaaaggttccgaatttgtaagaggtttaagcatgcttaacctggagtaatttaaggatgggtgacctcctgagaagtttttccaggaagcgtgcgagtgaggacaaagcatgctagaaacactcgtgttggtctgtagggtcagtcatcaatcggggaagcagtcagagtgacgtactcgtgtataagagccattcatttcatgggtgtaaggacccaatggacgcttcaagcggggacgttacatctaccctggagcaaataactttagtggctactttatagatcacattgcatcatgcaattggtctaaagtcacttggtgtgtttggacatctcacttttggaatgatagtaagagcagtagaattgatttccttaggaatcttcccagagtaaagaaaggatctcactgcttcacatatgtcacccccaagaagatcctagttgtcttggaaaaaaaattggagtagctagccatcaggacctagtgctttagttctaggaatagca

SEQ ID NO: 180093 - DNA, 637 bp, Cannabis indica
gttacagcgggttatacaatgttagacagtcagtttttatttttttcatgaaacgaatcataactgaccaaatttcactattaccatggacaccgaccccgggcgcccaacacgagaccaccccctccctatcctccactcatgctgcttctagctcggaccttggccctcagctcgtagctcctaagttcctaacccctggtcttgacccagatttagaccctggctctggcatgagaccctagtccccgactcccaattaaaacccaacccctagatccagatccgaatttgactttcagcccgacccgagtccgactttcagcccgaccctcggcctctgagccttacacaagaggcctcatcaaccttctctaacctcactttctcactcctcacttaaataaaaaaaaaaaaacttaacaacagttttatttttatttttaaattaagaaacaacaatagttataaaacaaattattatttactaaaataaaatttagtattttctataaagttagtttaattagtctttacctaatagttaatagtctctactctttacctattgagctttagttttgttgggggagtaaatagtaggattgttcaatttattaaattgctccactagacg

SEQ ID NO: 180094 - DNA, 512 bp, Cannabis indica
tttgaaacagtgcatgtcttacttcttcggtagtaacatcatggagaaacttagcattttgctcctcagagataaccgaaggaatgcactctaccacactactgaaatcaacatcggtcacctgaaagagctgatgaaaatagcttgtcacaaccgaaggaagcttatcatcccaaccaacccaagacccctccgaattttttaacctttgagtcgaattatttcttcttctagaggcagccttagcatgaaaatacttggaattttgattcccttcacgaagccacaactgcttacttctctgcttccaaatatttcccattgaagtaaaacattactaagatttacctccgcttctctatatctttcaattgacaccgggtctcgaccctcttccaccaacgcactttcgctttgcaatcttgattttttttaaaaaaaaaacttaccataatagtcttttccctattcaataacacatcggcacaattctaatcttctcaataatggag

SEQ ID NO: 180095 - DNA, 593 bp, Cannabis indica
tgttcaaacactaattaataaagcttaatagaggaataaaaaaaataaagaaacagaaccaaaaaaaaaaaatatattagaataagaaaattaacaacggagaaacctgagcacgcagtaagagggcatcaagtaatgttgagtatacagaagaaaacatgtcttcggcatgcttccttttctgtggactgtcatcacagatgccaagaatatagcttgcaagactagacctggaggataaattattaagaattatcatcattgaactctaaaataaatagtaataatgactacttaaaatgaaaatttcccaaataaaataagcaggaaatagtaactaatcatgaaaattaaaggtgcttcatctagctacacacttactgagacagtatgccatatagcatcacattatacatatatatgaacatttgaacacagatatcaaaattgctctacaagataaattaaaagtgctcgaatactaacaagtaaacaagcatagccaccttcgaatacctaatagcatccaaggtattgaaagtgaaatatttaagtaccagaaattgcaaagttgaatctgctatctcccagtc

SEQ ID NO: 180096 - DNA, 640 bp, Cannabis indica
aaatctataatggacaggaaccttctctagaatatggccctgaaatgatgggtgctcctttgccttcatcggggtatgatcggtatcgaactgatttcttcaaaggaaatgcttggcctcttatgactagattagacaaaaaaatctttttgcagcagttcttccacgaattgatgacacgacccaaccctcattcatataaacttacagtgacagaatcttccacaccctctactacgaatctgtctcaccaatcatctcatgttacccatgtttcctcatcacaaactactccccatgatccttccattattcctttcccttcctatctccccatctctctccctaccaatattccaaattccactccttcttttgctacttaccctccacacaccaatctgcattactcttcccctcctataattaactccacttccctaaaacagaaaggcattatgactgattccacatctatttctattcccttttcggacattaccaataatatgtctcagagcattgctttcccacacattaatggccctcaatatattgatgataatgcccttggtcacaatcctgcttctaaacgcccaatagagtcggaatctcttcgtaaatttctcaaacgatgccg

SEQ ID NO: 180097 - DNA, 719 bp, Cannabis indica
agttactaatctttagagtattacaaaatcacatattacattgataaaaaagttgcaacatctttttattttttaaaaaaaagatagtttaaatagcttatcttttagtttcatacacttatatgtcaattttttttttttgtacgaattaaatactatatattacgtttttattgcagcttttaattctaatttcaataaattttttaaatctaactaatctaacacccatcaattgattaattgtccactttcaataaattttttatgagtaatttgtggcataaatatttaagtttaactatctgttgcaaataaatacttaagtttaatttttagcagtaataatactcaagttatatttttggaactctgtaggtacctaaccattaaatgttaagtcattatctacgtgtcttttcttattggtatatttaaactaattttttttaaataataaaaaatataatgacttggaccaattagaaattgtcacgtggtaatttacttaacacttaacagccaggtacctacagaagttttagaattataacttagttattattaccgccaaaaattaaacttaggtatttatttgcaactatgagttaaacttaagtatttatgccgcaaattactcatttattattaaacaatttcaaaactaaataataaattatttaattataaaaaaaaaaaattgaacatataagtgtatg

SEQ ID NO: 180098 - DNA, 694 bp, Cannabis indica
attgaattgtattgagctatattgtacgaattggattggatccaaaatatgaaactcgcatttagtgcggatcgaatgcactacatatgagtaaaatagtgcggattagattcaataaatacccatatttgtcttagtatgcacgagaattttttagtctaatttttttatagtcatgtacattatagttatttaagacattttacaacaaatttaagaaattcaaaaaaatttaacacgtcaaaagtagaattcaaagagtcagttacacatgtggaaaataaactgtttgtttctataatgtaaaagagttcgaatttcataaaaattttacaaaatattttaaataactataacatactagatcatgacaataaaattaaactttttttaatgaatgtcgaaatattgctggatgaatcggtgaagggatgctttgtaaatgtactcatacatatatgggatttttacatctggagacgtttttctctatttaatattaattttaacgtgtatgttcaaattattaatattaccgtgggtttttgccgttttcaattttaaaagtatttaattgcttactgttcgctggtactgtcatgattaattttcacattgcatttatcacctatgggatttgtagtcactctacgtgttgatgtcaactaatgatgtcacataccatcatgtctaa

SEQ ID NO: 180099 - DNA, 819 bp, Cannabis indica
ggctatttgcaatcaagtaataataggttttgaaaacttacacacaagctaaaacacatactcctgcaacaaggttagctggatagttggatgtaggatttatttaattttaaattaaataattaatttcgaaataattaattaaataaaaaaaatcgaaaattttaaaaaaaaatttgaaaaattcgaaatttaaaaaaatttaaatttaaaattaaacctacaattttgaaaaattaggtttcaaccaacctaaatatcatttcaaaatttgctaactacttttaaaatttaaatgttattttataaataaaaattaaataaaaaattaaaaaagataaatgaatatctttttcagattttaaatgtaatttaaataaataaaataacaaaatttaaaagttagcaaaatatcttacatctatttaaaattacatgattatagttatcttattttaaatttaaataaggtcaaattatttaaaaaaaaaattaatttaaaatatttaaaatctgaccttaaatttaaaaataagataagatataatcaaatttaaaaataagatagattattaagcaaaaaagatagatactaactatttttaaattcaaattacactaatatcttgaattaaatttaaaaaatattaaattaattcataatgataattagaattgaattaggaatagtaatagtataaatacagaactacacaaaaaatcggaagttaattccatgaaaaagcatgaaaaaacgaagaaaaacgaaaaaattagcgagctgtacggacgggatgctgtgcatacccgtccgcgcgc

SEQ ID NO: 180100 - DNA, 1058 bp, Cannabis indica
caatccctagaattgttcttacacatgtgtctgtaagtatccataaagttgggcatttccgatgaatataccatgggtgatgcatggtcaaatccctaggtgctgtagggttttatggagaatgtccttttgtcttgtgattgacgtgactcttcgcagagtagccgtcgctagacttaaatgatcattactgtagcgctgctgttcggggttgtgccgtcagactttattgcgtgttacagtcccaacacgcttcctcccatgcagcattaaatgcgacttgatttctcgggagagacctgacacatcccggagagccttcatgctatactagcttcctggagtaccttgtactccgggtgtctcctccgggacccatgctaatagcgcttcctggtggcataaaaagacttagcaaatctttccaagttatctgatccacgtgtcccctctcgactggtccacgtattttgggcgaattttggagcaacagtattgattttaattttttttaaatagatttattttgtgttttatatatctattatgttgtttttttttttgtttgcatttaagtttttttttttaaaaaaaatttataatcattagtataaatattttttttgttttattgatttttgtgctatgttttggttcattttttatctgagttatacctgttctgtattttttttaattatttcaatgtttttcattctttttagattcagatatatttttatatatatatatatatatatatatggaacacttcttaatgggtaatacccattgatgggaactaaaaaaaattaataaggtaataatctaataacctttttatggcaagtttctaaaaattattttttttaaaaaaattatatttattttttataaattaaaataataattacaactaataattgaaaaaaaattataaattattttaaaattaattaaaattaatactttatttttatgaaattatgagtttattaataatttattattgtaaaactaaaattatttacatgtatattaatgtgttttttatttag

SEQ ID NO: 180101 - DNA, 637 bp, Cannabis indica
aaataaaagttcaaaaatatttttttcctacccttcactaaatttcaaggtaggttctaatatctacctaatcttatatataattatgtaaaaacaataatatagtcaataatattactaaatcttattacagacaccatatttgaggattaattaattaatgaataatatttttttttaaactcctaataataaaaataatgttgtattatgaaataggtacgaaatgaaggttcaattatttgttcaaaagaaaaaacatgttgaaaatttaataaaccttttaataatattattggagagcctttttgaccataagctatagcagccattaatatttggccagtagtgaaatgaagaagccactttacttgatttttttttattttgtttttgaattttactttgactaattatatatataattttctttgggttataaaaaaaaaatatataaaaaaataaaaaaatttcttaaaatgtgggtgctaaaaaaagtccccatgtgggattttttttttatttactagtaaaaaaatataataatatatattgtaattaattatagtagatattttattatgaatagtttatgaagttgaaaatatactttaaataattaatgtatatttttttt

SEQ ID NO: 180102 - DNA, 1167 bp, Cannabis indica
attaagtgttccttttttgtttaattttttatatgagagcaaaaaggtaaatttttattaaaataaagctatatgagaaaaaatgccattttgttttgtattatagtggtcaccataattgatcatataaacaagaatcttcttttgtacagtgtcataaagactctagagagaaattaagttatagagtggacgtctcaaccacctcagaggacaaatcactactacagtagccattattattactgtgcttcaaactatagctataaataagacaagcattatgcataataggcaagtaaagtcggaagataaacaataacaatatggctgaaccaaagaattataccaatcatgaaatgaggtggaatcttgatggaaaaaccgctctggttaccggtggatctcgaggaatagggtatgtaaataatgttaatttattatgttatgcaaagtacgacaatcataaaaagaaagaaaaaaacttctttaaattaagcttgtttttgcacactttctttttttttttttgttgtaatatgtggtatcaaggatttggattcttcttattcaacttttatactacacgaacgaattatttattacatgtgagaaatgtgaatgctgtctgtttatgtactctgcctttagcttggatatttattaaaatcaaaaaaccttttaaattccttttttaggcatgccatagtggaagaacttgcaaaatttggagccatagttcacacgtgttgtcgcaaggaaagtgagttggagaagtgtttggaaaagtggaaaaagaagggtttcaaggtaactggttcagtgtgcgatgtttcgcaaggagatcaaagagaaaaacttatggaagctgtttcatcaattttccaaggaaagctcaacattcttgtgagtttaatgatttaactgattcataataatatttggaaaggattatatttcttttttattgcaatattaaaattatatatatgtataattgtatactaggtgtacaatgtatatttgtttaaagttttattagagttactataataataataataataataataataataataataataataataacttttagtcacaacataattgtgactaaagtaaaaaagttagtgattaaaagtactgtaactaaaatattag

SEQ ID NO: 180103 - DNA, 685 bp, Cannabis indica
aatacagtctacatgattcagggaataagagattacattaacatcaatacaatcttgccaaaaaagtaaaatccctcccccaagcccctgcctaggcacctctaaaacactatcaaaacgaagcttgtgtttgaggtcagttccacgtccagcgggcaattttgtctccaaaacaaacaacaacacaggctgatgctgcttgaccagcagggagagattacggaatgctcgagggctccccaaacctcgagcattccaactgcagagactcattgctcgcggcggggccgcgtagcagcacccgccgatggatcatcttcagacattgaaggaacaacagcatcctccaaggcagtggctcttgcacgcttgagcatggagcgcatagagcctccaatatgagcgtcctgacgcacgaaagtaggtctgacaacagagggggtagtagcattacaaggggggcaagaaacattgataactaggccagaatcctttcgagtggttcgggtggtgggaacaatcataggagctttacctttgcttttgtcaatatgggttgagactgagatagaatcagagatgatgggggcagagggtcggacagggaccgaaggagtagcatgggtggtagcagtatttggtggtattccaaaggatgaggatgaaacagggcttgaatgaggag

SEQ ID NO: 180104 - DNA, 1005 bp, Cannabis indica
tagttgaattctaatttaactcaatttaattttagtttttagtcttgttgcttggtaattaatttttacaatagaaattttattttcacagtccctgtggagacgatactcttttacttaccattgtattacttgtttgtgactacgtgcacttgcgtatctgattttaacacaacaaccactttgaatcttcaatggtatctctcctggatgtcaagagctttttgaaattaggtggtattttgttgggaggaatgaaaatatagaaataagaatgagaatgggaatagaaatggaataaaatttaaaatgcatataaaaattaataaaaaaatcattaagttttttctcttgttacattagaatgatttttctttcctttttaaaatagaatagttattctaccatgcggaaggagcattccattgaaatgtcattccaatactttaaaatgcaaccaaacaaaagaatggaatgaaaattaattccattccatttcattaccttcaaccaaacgccacctaggtgtaatataaaaacaacacacaattttttctttttttgaataaatcactaaaaatcctattttaaattataaaccaatcaacttctttagcaattctctcggattctacagtggcaggtattggagtctttggacatggtcttattttcctaagtaaatttcattttatttttcgtgaagacagtatgcttgcaggttgtatgcccaaaagtgctagaatttgttctagtcaaagggctagtgtttacaaggggagggaatctttcccatctttcatgaactttgttgtttctaataataaataaataaaataaaaaagaagaaagaatatctcattagtatacaaaagaagattacaaattaatcaaaattatagttacaaaattatggaaaactatttatgtgaagcactccttaaaattagtatatcaatacacttttgtatattttgatattcggatagttttcattttaatttg

SEQ ID NO: 180105 - DNA, 678 bp, Cannabis indica
cttctattttcctggcattgactatgaagctaaggaatttgcctgagcttactccaaagaataattgatagggatgagcttcatgttgtacttttgaatgatcttaaagcattcgtctagatcttccacatgccccttaacctatttggacttaactagcatgccatccaaatacacctcaatattgcggccaatgagatctatgaaaattttgttcacaagcctccagtaagtggccactacatttttcatcccaaagggcatgactttgtagcaatataggcctatgtttatcatgaagcttgtgtgctcttaataaggcgtaggcatcttcatctagttataactagagtgcaagtctatgaaacttagtactccatggccaactacggcatccaccagttagtcgatccttggaagcgggaagaaatcatttggacatgctttgttaggttgatgagtttatgcatactcttcacttttttttgtttgggctaccaaatcaaggttggatacctaagatataatgcctcagtgatgaagtcatgggcacgtatcctttcgacctcatccctgagtgcttgggcacattctttgtcgaacaacttccttttttgttgtacacgttagaagtttggaccggtgttgagggcatgagtcgtcacagaggggtctatt

SEQ ID NO: 180106 - DNA, 802 bp, Cannabis indica
ctaccattttcacttcaaaaacatcaagaacaaaaagaagagttgagaaccacttactagtaactaaggatcacaaaatcaacacaaaaaggacttgaatcaccaaggaaaactcctcctccttgctgctcaaagagggcgaaaagagagaggcttgagagagtttctttttcaagtttttctaatttctacacttagcattttttgtaaaaattggagaataaaataaagccacttatctcatttacttcagccaataaaataaacaaataacatttatttttcaaataaacaagtcactaaaagacaaaaagtcattggggcaaaaagaccattttgcccctccattctaaaatcacataaaaatcactaaaggggtatttttgggaaattctaaattcccggccattcccgacattcccaatgtctaaaacccgtccccaaactactaacatactaagttgtgatttctactgagccaaacgccgagttccaaaataccggacaccggaaatgcaaaatatgcaagctactgaataacataaataacagtataataaattatttaaatagctataaataatttcataattaatcacaatcaactgataatttccaaattaactaagcgggctttacagcactaaagtaaattaaatatttctaattgaaatatattaaccattaaaataagaaatatttaatttatattaattatatgtgtacaaataaagacttaaaatgtatcattttgaacctttatgacatcgagtacgaataattttacctttatacctttcaa

SEQ ID NO: 180107 - DNA, 627 bp, Cannabis indica
ctagtatatatatatatggatcaaaccctcccacatccctctatatataatatatttacaattattataataattcaaatactttagattatttatattatgttttcatatttttatttttgtttgttatgtgttttgggtggctttgattcatggtgcttacatatagatattattttattattatagtatctttttgaaagatttgtgtaatatatattagtttgtacagttttattttttatatagcttataccctttgttagttgtgatttgtcaaattgatccttattgaaaaggaaagaggttttttcaatattatacttaaaattgattttatttataaaaatacttttaaaaaattatttgtacaaatactattataccacgtcagcatacataccgaaatttaaaataattaccgaaaatagaaaaaaattagaaaaatctcgtttccaaagaattgaaaaaggcaaccattagttacttttgatgtgaataagatataaattggttattttttcatttaaaagaaaacttttttgtttcatttttttatattttttaagctatattatattattttattgtttaaaataccttgaggttacttttttttttatttgt

SEQ ID NO: 180108 - DNA, 779 bp, Cannabis indica
atttgtttttttttatttttttattagtaaataataatataaaaattatacgagcttaagtgatatataatttggtgatatcaataataatgtaataaaataaaaatagtaatgagaattaattatgatatttgtcatgatgttggaataaaatttaaataagtcatatataaattcataaaattatctctatattttaatatttaattttatctaaaaaaaatactatttaagtcattttacttttattttatttaatatttttaatataattatcattacatatatagttttttttaatgtaataaaattcgattgcataatgtaattagtattacattgttattgtttttaaaagaaaacaaaattgaatattataatagtaattttaattattatattatattaaatattatattatatatattaatatttttgtattattttatcactacatattggtgagaaaaatctagttaggcatatattaagagttagtctcacattgttaatgtatagaaataaattgtgatatataagatgaatgggctactccacccattgtcacattctaacatggtatcagagccactggtgattcgttgtgagcttaaattgccaccggtctaaaaagctgtttgtgatccgttgtgacctctattttgacttctcgaccaatgtgtgccaatttttcagtattggaatgatgaatggactacttcttctattactaatgcaattgcaatagcatacattaaaataagatatataattaattt

SEQ ID NO: 180109 - DNA, 1263 bp, Cannabis indica
taaattattattcctttatatgtttatgtttgttactattttttatttttattaaataaaaaatcaactcaaaaaattagaactagtatatgtcaactccatgaactaaaaaaaaaactgtaaacagatttttacacttaccaggacggtacgaccattcgtaaaacacaaaaatattggcaacaattttgtacagtcaaataaaaaactttctcgatatttttccacggtagcatatttctatctaatttttccgaaaatcgaataggcgtcgctcttaatgactgacggaatattatacccgactaaaaacccaatttggtaatagtgaactgtagctaagtaccaacaaaatttagatctttgtttctatttggtgaaataaaaattaattttgtaaacaagaaattaataactttaattattttaactaccaattcattaatactaattgttattcatatttttagagaaaggacacgtggtataaaagtgagtagcaccgggttaaaggttcactaattaagttcccttaattagtcaggatcgcttagaagttatacaggttcgggaaaagactaagcctgaaatctacctggagacttgtcctgcagcataccaccatccgggagccagaggtcttactgcttctccataattcggagaagaccaagctcaacatatgttcaagagacatcttgaaggcattcgaagagtctcacgcggacaccaaccgcttagaagaagttgaacgtctaccatgaagagacctcaacctatagtttaatatagtttaattctcaaattctaattctaatgtgatagtagatttactaaagaaatttatattcaagttagaacttataaatctcaacttatatgcaaactttctactctcgtgataaattttaataaataagatgcattaagcataaaaatcatgaatgttacacaaaccatatattaactctcgtcctatatcgaaatttgtgtttatttcactatagcataatcaatacttacttctcagattttgcattaaaatcataaaatatttaattggtgattggcaatgaaaagaaattaagtatgaatgaaatagatacacataaaaaattggaaaaaaaaattacattaaaactaaaataaagtgtcaaacaatttctattaacattttaataataaaatagatttatatatctgagaagactataaattactggagtaaacctactattgcatagaatttggtaataagaattg

SEQ ID NO: 180110 - DNA, 637 bp, Cannabis indica
aaaacaatgagaatgactctagtttaatgggctcataagtattgttgggcttttgtctaggacgatgagcccatgctttggagcaaatttttggttttcgttttttttttttttttttagaaatttacatggtatactaatttttgtcatttttttacaaaaatactgcctatttactttttacggtgtttttttataagtttcatactacagcatactttgttaagtttttactggtgtttttcagttgttctactgttgttttgaattgttctactttgtgttctagtggtgttttataaaaacacagtattattgaaagtattttcgtgtgacaatatttttgtaaatattaactcaaattctagtatttttgtaagtttctcttttttttcttaggaataattttattttttgtagagtggttgacttttttatgaagtcattatgcacttacattttttttttgggtaaatactactgttgaccgagattttcagcaaccaataaaataatataagattagagaactgtaagaaattaagagaaggatttttacgtggttggggcgttaatgagccttagtccacgagtcagtgtatttatgagtgtgttaaatacagagaatgttcttggt

SEQ ID NO: 180111 - DNA, 574 bp, Cannabis indica
catgttcacaatttcaaccaatttgttttgtaggggtatagagtcactctacaatcatcaagaaaaaaaattaaaaaatgttctcattttcagccaattttattttgttaagtagagtctacagtcaataattagatcaaatcattttcaatttttattttgctagtatctgtctacaataatcaaagcaaataagaatcaacattcccatttttcaaaatcaaaatcccatttttcaaccaaatttccttagtcgagtcaagaacctaagaataaaaaacccatttttgaagttatcattctcaatcaattttctcatgttgaacccacaatcatcaagcaaataagaacaaaaattacatatccagaaatgggttctgcttaaaaagcgaattgaagatttaaaatatcagtaattaaattaaaggtgggatttttgatgggagtgaaataaaaacacttactttgatctttcgtatgtattcatcacggaactgggtgacatgaccatggtacctatccacaaacaagaattttcgaaggccatactttcgaaaattgtgagaaatacata

SEQ ID NO: 180112 - DNA, 511 bp, Cannabis indica
atatagattaaaggtgaaagtattgagtcatatataagagatgggctattccactcatcactaattggttttgaaataaaacctcatgattctcaatatgctatcagaggcatatccctagcgatctttcgatctacacctatgaagagggctactccagaacctcatgattctcatagggctactccagaacctcatgattctcaacacattctcatatcttccaccattttttttgtttgtgaaatctataatcatcactcaaagcaaataagaataacaattgaaagtttccatgttcacaatttcaaccaatttgttttgtaggggtatagagtcactctacaatcatcaaaaaaaaaattaaaaaatgttctcattttcagccaattttattttgttaagtagagtctacagtcaataattagatcaaatcattttcaatttttattttgctagtatctgtctacaataatcaaagcaaataagaatcaacattcccatttttcaa

SEQ ID NO: 180113 - DNA, 669 bp, Cannabis indica
aacaatcttaatagttcgatggaaatttttgacgaactgaaaagttcagatggtataatttagtgcatgtcaaagttaagaggcaaaaatctaaattaacttttttaaaatattaattttatgtatcacatcacttataaagctaaaattaatattcatcaaactgcacacaccgcataaaaaatatagtttgaaattatttacagtgcggttgtattttgtatttttgccaaattgcgcattttaatgcggtttgcgattttaaatttaattattacggttgaaaccacaccacactatatatttcaaagttactaattttacaatatgattttttttcatataagaacaaatatatgtaatagatgtatatattacattattttttagagacagttcattaatatgcatgttataatgttaagatttagtaattttttttttgtattgttaaaactttattagattgctttttaaatttttattataaaatttgaatcgtgatgatagtagtgtaaaccgcttaaaccgcaccgcactgcaccacaatatattttatagtatagtttttggcagttttaagatctcacatatacattttgatttgaaaaacaggttacaacctgcaccacgaacaccgccgaataccccatcaattttgtaaaaact

SEQ ID NO: 180114 - DNA, 704 bp, Cannabis indica
gctacataagctttccacctcatcaagcattctccaaaatattaccattgaagatgctcttagctgccttcttctgaataattaactattttttatcactatatcatcttacaattagagagcaatactatttaaaaattattatattaaattatataaaatttaatacttactagtgtcttttaatatttttcttttttataaattaatttaaaaattcagtacttaactatattaataacaataataatactaaatacttatctattattccaccattctattccatcaaacaaattagattatcatccttttttaactttcatttctattctgcatcatcaattctctatcatttcttttctcctccccacctaccaaacatagccttggtggccacttagcatttcctttttctttttattttcttataaaacattatgaaataataattatatttttattaacacatattcaaaaataaatatttttgaacccaatttattagtgccctctaaatttttaaaattcccccaaactattcaaagtgatgaaacacaagacttctattaaatttcatccaacatgattaagagaatattaatataactctttacccacttatatgtattgctcatagggtggacatcaggtaagttttctcaggtttaaagtttttgagttcgggtttgtattttataagt

SEQ ID NO: 180115 - DNA, 593 bp, Cannabis indica
aaagaatttttttaaaaaaaaaaaccaaaaatgacaatggcgaggattgaacctaagaacccaacatcaatatgtacattttaagttttaactaatgacttgtactacaatattgcaatatattaaactaaaatttatatattatattttgtttctatacatatataatataaattttaatttttaaggtctccaaaattgtagggcctgaggcctagtcccaccctatggtcggccatgagcgttagttatagagaccgatgacaataacattacccaacttttttaaatagtcgagaaatccttttttagtattagtgtaaataattacaaagtacataatcataaaaatatttatactaaaaaatctctaaaataccgaaatagattgaaaatatactagaacaaccttttcagcaagtgttttataaaattccactgaaattataattaataataattagtttactttcattcaatttattaattttgataaaaattatattattgaatttcatattatttttattttaaatttacacatttaatattagcttgttaagttttgcctgacaaaatttaacaaaatgatc

SEQ ID NO: 180116 - DNA, 819 bp, Cannabis indica
ttggtgatatttcactctaacactctttgatgagtttttttttttagagttaacgaaaaaaaattaagttgtttgattttatggttagaaagagaaaaaaaaaaatgagtagctttatttttttagctctttgttcttattctaagaattattcttacatttagtgcttgaattttttgtttggtgctggtaagtaaacaggtgattagtaaaatatttaaactagaaaatttttctccaatatttaatatacaaatcctacataaatttttgtactatgtttacttgtttgcttattgagagagaagaagatcgagatgtgtattatttttttgctccattagttcatgctctctaactgtatatggaccaggacaatagaacagtgtgtataaaatatgatcattttaagaaaatagagaaattgacaataactaaggtagcatttggtaacacttttttaatcaattttctgtttttaaaattgaaaaagtgaaaatatttttcaaaaacatgttttataaaactgttttcacttttaaatttttaattagaaatcaaaattttaaaatataaaaaaaatcactttcaatatttttaattagtttttttcttaattcaatatttggacttcgaccagattcgaacccaaatcctgtccccacggctatggtgctgaacccgcctctgaccgacccgaatccgacccggcctacgaccgactaaaaaaatacaaaaataaaaactaaaaaaatgaacttcacagaacacactttgtttctgtttctaaattgaaaacaaagtagtacgtagaacgca

SEQ ID NO: 180117 - DNA, 446 bp, Cannabis indica
atgttcaggagagaaacttccttactttggagtaagatatccaggtggaataccatcggcatcggtggtggtgaacaaagtgatgagtaggttgaagaagcctgtgttctatctagacgtgacaactctgtcacagtaccgtaaagacgggcatccctccgggtatagcggcgaccacagtggccaagattgtagccactggtgccttcccggattgccagacacttggaatgagctcatgtacgctgctcttttcagttgatcgatcaactagctaatattagtattaagttgaaagccattgctattttttcttctttctaattgttattttaacattaattattgggagacaaattcatcatcaattaatgttgtttccttcaattaggaatatcttcatcttgtatctttgcatttttcgtgtgtattgatttggggattga

SEQ ID NO: 180118 - DNA, 512 bp, Cannabis indica
atgctatagtagaatagaactgaatttcgatataggacgagagtacctatatggtttagatagcttatagggtttctgtgtttaatgcctgttgcatgttaaatttatcacgagagtagaaagtttgcatgtaattgagatttatatatctgagaagactataaattaccttagtaaacctgctattgcatagaaattaatattaggaaaataatcatattaggccatattcaatagaaacaattgaaatcgaagccctagtttttattaactttcaattttcttgtataattgtttcttactagtttcttattcttaattctttctttattttttatttaaccaaatagaagtaaaagtttaattttaacgtacttaactacactccctgtgggatcgacctcactcctagtgagtctactactttaaacgatacgtacacttgcgtgtgcaaaatatcgcaacaagtttttggcgccgttgccggggaattgtttaaagattaatattac

SEQ ID NO: 180119 - DNA, 763 bp, Cannabis indica
agaaccttatttcttagttggatgcatattggagaaaatagaataccaagtttgagcggggttgtggtttttgaccattttactcttagacttgaattggctttaaattaagcaccacaggtatttttgtaattggtcaagagggttaggtggctgcttggatgaatggaagctgtccatttgatttattttcagcctatagtttattaattttgaggaaattaggaaaaacaaaaggaaaagcaaaatttgggggaaaaaccctttccttattctctttctttattcgaccacttactctttatttttcaagctttggttttggttggatgtgtgattttgagtattaatggctgttagggttagagctatttgtaattcagtttctatgtatgattttagtttgttagaagttctagcagctggtttagggttgtggggtgatggatgtacaagtttgagtttgaaaactcaagcttggttcatccatggcataatttgagtttgtgtgtttttttgggttttgttgattggaagtgattgtgtaagctcattataggtgttttggaaagtttggtggcaattggacatgttttcagcaggttatgaattgtttggggaaacctggtgcaaatcggttaaccggtttgccaggacctataaaatcagtgaaacggtttgtcaagacatataaaaccggttaaccagttttgacaaattccccgaacaactcattttctcgattcgtgtccatttcagtgcc

SEQ ID NO: 180120 - DNA, 576 bp, Cannabis indica
aattgtgaactgatttatggagttttagtcccatcactttagaagtcttttccactaaatctctcgttagtggcttcgtaaacggattctccaagttttcacttgatctcacataggatattgagatgactcctctttgaatcaacttacttacatatccatgtcttagactaatatgtttagacttcccgttgtatactccactatatgctctagcaatagttgcttggctatcacaatgtatcgatattttagatacatcctatttgataattggaatctcaattaagggatcttttaaccattcgacctctttcccaatgacagctagagttataaactctgcttccattgtggaatgagaaatgcaagtttgtttcttggacccccaaaatacccaacccgttgtggataaattatccccaaggttggctatatatccaacttgcgttagtatgtccttcaaaaattagaaggaaatttaggagtagtgaagacacagattttggttttcgtttagataacccaaaacctactccctacttgccttccaactgatccacacttggattacta

SEQ ID NO: 180121 - DNA, 774 bp, Cannabis indica
gtcaagatccttgtataacaggtacatgctctatctgaacaagacccgtttaataatcgtgtcaaaaaaataaaacccgaacacgactcgtttataaatggattgacacgacacgactcgtacgtaacctgtttataagtatattttgtttaaacatatcaatcaataacacgtttatgaagtattcaacatgtttgtaacccatttatgacacgttaaagtactaaaataactttaaatatgtcattaatgggtcaatttcatgttagccgtgtcaacctgaacacggcccgtttattaaacgggttagacgagtcaacccgaatacgacccgaacccatttaaggcaaacccaaacccgctaactctcgtgcgggtttcgagtcgtgtcatcgtgtctgacccgttttgccggccctcctacatttaactgtagctatagtattgaagaaaaatagttgatcaactatagtagcttgagaggagcaatggtgatatccgacttttctctctctctctctcttctttttaatttcaaataaaagttatttgtttaaacaaaagaaagtaataaaataaaatattataattaaaatgaatgataatagtgtatgagacataatttttagagttacttagcattggagtattttttagtaggaaatgaccaaaaatgatatagaagaaagaaaaaataatatattatattttagagtgatgtagagttcgaaccagatccaattaatgtcactctctctattctctatctctttc

SEQ ID NO: 180122 - DNA, 1306 bp, Cannabis indica
atcaaggaagcactaagttgggtcaagaggaaaggtattcaaaatgttgtcattgaatcggatagcctactttcgatccaagcgttggaaagttctattcgaatgccttcggtgtttggtttaatggttgttgagtgtcaaactcttttactttctcttgtcaatgttaaaatttgtttcgttaagcgatctgctaacagagttgcacattgtattgcccgcaactcttgtttttggtcaggttgtaattttgtagaagggacagcgcctgctgctcttcaaactcttattcttgccgattcggcagtttaatggattgaagcttttcaaaaaatctaaatataattttacataaaatagaataccatactgaagataaatatgtatgctgaaaacaattaatacgtgttatataaaaatcctattattcccctgtagttttcgtttgggaaagtgcagagcttcctaaaattgggaagcccggccgtgaagtgtactgacatcacgaaagcgatgaagttcacagactcgccggtgatagagctcccggtgcacaacgccattctctctatacagcaagacaacggctccttccacgtcggcacctccgtctggccctgctcccttgtcctcgtcaagttcgctgagcgttgggccccacttccgggcccaaacctaaggcccacaaccacacccaacccttatgcccaactcctcgacttcggctccaagcggggcgtcgagctcggcgccggctgtggagccgctggcatgggcttttacctactcggtctgacagacgtcatcctcaccgatatctctccagtcatgcccgcactgaagcgaaacctcaagaacaataaatccgtgctcgccaaaaccctaaagcattccgttctttactggaacaacgccgatcagatcaagtccctcaaacctccgtacgacttcgttttggccaccgatgtcgtctacatcgaggagtcggtgggtccgcttatttcagccatggaggctttggtgtcggacgacggcgtcattttgctaggataccagctcaggtcccctgaagcccataagctgttctgggaaatgtctgagaaagtgtttgaaattgagaaggttccccatgaagatttgcacccagaatcgcgtacgagaggctgatgtatacatattttagggaagaagaagaaggaggaagagaaaaatggaagatatcccatgagtctgattttcggtaaaattatatatgaaaaattgtgtatgcttgtatggatttgttgaaaaaatgtggttttttgcc

SEQ ID NO: 180123 - DNA, 723 bp, Cannabis indica
ttcttaacacgcgagaataatctccgccaagtccccgtaaactcaacgcggtgaaatgtatccattagtaacttaagatcattcacaacaaaccttgatccctcataagtaaccagcagctcaacctgcatagaaaaaaatatatatctaaattttatcggacaagctacattacatatgaaatatgtgacaagcatatgaaaccaacctggctaatcttaatattatgaaactccatcatttttcgtggtctagatcttttctcctcgtgtgattttgctacttttttctcttcatgggatgacctaccagttttgagattcttgggatctttcagtttattctttgacgattcatcttgttgctcgacagaatcaagtggagcatttttggaagaagaaatactctgcaagaccagctcagtagcaacagactctgccacagtctcttcccatgatctatcaaaagatgaagttctccgtaacactggggttggcctgctaacaatattatctgtctggtttgcaagctcaaagcctgcaagtgtgtttagaaagtaataggaaaagtcaagtacaaatacatgagtggagggacttgaataactcacttgacaagagtcagatacaatagaggttgaccgacggatgacaaggagacacttggtttgatgggtctcattctcttttggagtgtcatgagttgaagcgctttcttaacacg

SEQ ID NO: 180124 - DNA, 653 bp, Cannabis indica
ataaataccagaaattttaaatattctcatcaaccaaaaatataatgtttttcctcaaaaaaaaaccaaaaatataataattaattaaataaataaatagatagataagattactattattgttattttgtcatgggtggtgtacatgtttattggagacattaattgaatatctaatttttctgtcttaaaagattttgacagatcaaaaaataggttctaaatttagccagcattaattgaagatctaatatttgaagactagaaaagaaaaaaaaaattatatatgggaactttgttgatttggctgtctttattttttatttttttttaaataaaaataaggactttgttgatttggtgaagagatggagccaagtttcaacctctaaatacgctcttcaccactgagaaaaaaaaaaggaagaagattcttggaggctctcaagtcccaacgacttttttttcttcatattaatctcataacctttttcttttcttttttcatattatcacataatcataaccttttttcttttcactcaactttggacattatttatcacatttagcttatggttttatttataaaaactttacaaaataaaatagtggattctaaataagggtctctatgtatagacatatgaatg

SEQ ID NO: 180125 - DNA, 642 bp, Cannabis indica
ttttgcaacacaaatttttgatcttgtccacatggatatttggggaccttatcccctagaatcaattgaaggatatcgatatttcctcacaattgtagatgatcattctcgatatacttggattcatttacttaaagccaaatctgaggcacccacactcattcataatttctttacttatgtcaatgttcattataaatatcatatcaaagctgtgagaactgataatgcaaaagaactgactttaacacatttttatgctagtcaaggagttctacatcataaatcttgtgttaacaggccccaacaaaatgccatcgttgaaaggaaacatcagcacatattgaatgtagctagagctctagcttttcaatccaatttacctcttgtttattggagctatatggtaagaacttctgtttatttgatcaatagaactccatctatgttattaaaagaaaagacatcttatgaactattgaataccaagattccatcttatgatcatttgagaaattatggctgtctatgttatgcctctcctcacaccagcaaccacaaactattccctagggccaaagcttgcatatttatttggctatcctgataatatgaaagtttacaccctattagatattgaat

SEQ ID NO: 180126 - DNA, 908 bp, Cannabis indica
aagtagcatgtgagactttagtaagtaatttttgaaattattaatcattagattaatttttgtatgaaaaattattaaatacgtaaataagaaggaaaataaaaaaaaaaatatattttaaaataatgtgtgtgcttttactaattataagtattgtcttattaaaaataatgacacttatactgacagcacgattaaaaaaataagtgtattattattagtacattttttaatatagactcttacacattttaaattaaaaaaacattaaaaattactaggtaaattatgtagtgacatattattattattttttttttattctaaattggtgtcatgttgatatggtaagttacttttcttatttttaaaatgagttatttttattaataaaggtatgatgtggtccaataacaaggtgacaagtgttactataacaaagtggtgacattagaaataatgtcataagtactatttagactgttgaaacaaaataaataatacgattaatgtataaagataaaatattaaatatttatacttcaaatacttctaaaataaattaatcatctccaattttttttccttgacagaagttatctcatagttttgttattatcttactttatatataactaaaaattatatagagttttgccaaattagaagcatttgcgcttaaattacacgtgatgcttgctttttgaacttgttgttatgagtttgttggtcaaaattggtgttgtgtgaaatattttacaattaaaaaatggttttttatatatttttaatttaattatttggcgaagacatcaaaataggagaatagtattttattggtcatcagataataaatgtgtaattaataagaatagtcaataattcacatcatatatttttggcattgc

SEQ ID NO: 180127 - DNA, 726 bp, Cannabis indica
caaagtgcaaaaattgggataaccctactgatctacaaaaatggcataatgggaaattggttaatcgtaaaagagatatcacttctaatcaaaacagggtcaaatctcttcattctactgctactacaatacaggatcattcccgtaatgtgctgggaatatttatcaggatctagatttactaacaagtatgttaaattaacatcctaaatatgaatatatctaaaaccaaaaaaaagtaaacacataagagtttagaaaaccttacacattgattgcagcagaatattatgactccttccgctcagatctctaacccttgttcctttctatcgcagagtattatcaagatctgagccatcatctctttctctcctccgggtttggttaccagtgtcttactcactatgattgagtacttcacttgttatgtgtgggcatggcactttcactaagggttcaaatatggtgaagaacaatgaaggaggtgaaatcactatggaaagaactctctgatatactagttgtttgacagagaaaactaggtttgatttggttgaaggcatcaagtggatgagtgagagcatcatgttccttttatagtgcttcaactagggctgaattatatggattaaaaaagaataaaatattgggcaaaaacctcttttctttacaattaagcccttgcttagtaaaaattcatcaataagacatagtccagttttt

SEQ ID NO: 180128 - DNA, 588 bp, Cannabis indica
tggaccctgagtttagatgaaccaaaaatacagatctaattcgtcttaacccaggactgtcctgaaaggaaaatcataaaacacaaatacaaatacaaagatgtaataaacacattatagtaaatataagaaacaaaagtgaagtattatttaatttgtttaattttacgaccatttagaaacatgtaaacgaaagaaaagaactaagggtgcgtttggaaagccacattgtaattggatttgtgtgtaattggaggtaattacacaatttgacatgtttttctgaccatgtaattacactttaactgtgtaattggaagtaattgaggggttccaattacactctcaaattctcatggcccccatgagaattgaatgtaattacactgtgtaattactaaaaactttccatattaaacattagctactaaaaaataattattttcccatgtaattactaactattttgtccaaacaagatattaggaattcatatgtaattaccacttcatatccaaacacactttgcattttaaaatataatgtaattaccacaatgtataattactactctagtaactaccctaa

SEQ ID NO: 180129 - DNA, 692 bp, Cannabis indica
agatctgtcttcacggaagcttgctctttcaccagtttctctaaaataaaaatatctgacgaaacagtgtaaggaaacatccaaattttctgagaaaataagccaaacaaccaacaattctcagataaaaatagaacctatagtgctcttcaaattcgtaaagcttccaatatatagtaggaacaaataaagatagttcctaaatagaaaatggtcaaataaaaatcatgatgtgagaaatgtatagtaggtaacatagattgtaaagcctttgattactttataagagtggaaattctctgtttttctccttttttctgcaataaacatgaaattttggtgtctgcaatggttataaattgggctatgaaattcatatttaaacaaaaacaaaaaaacagaaaaatctatctaattaaatcacaaaaattatattatttttgcaaagaaatattatcactaaaattatgagtagttaacaacttttttttttgattaaagagtagttaacaactttagctactaattaagttttttcgtttttttagtttataaaatatatatacgaatatatattctcttttagccaaatttaatggcgtcgaaatataaaattgccagcttttataaaattgcccggggattgttatgccagtatgcaaatagaaaattataattgcattgaaatacaa

SEQ ID NO: 180130 - DNA, 834 bp, Cannabis indica
ctagaagaagaaatattcatgaagcaaccagaaggctttgaagaagtgggaaaggaagaccatgtctgtttgttaaagaaatccctttatggtctaaaacaatcacctaggcaatggtacaaacgatttgatgagtttgtcaccaaaatcggtttcaaaagaagtgcctatgattgttgtgtttatgtgagaaacacaaaaggacttgtgttcttgttgctgtatgtcgatgacatgctaatagcaagcaagagcatctctgaaattgacaaaattaagaaactattgagcaaggaatttgctatgaaggatctaggtgcagcaagaaagatccttgggattgagatcactagggacagaatcaagagaaagatcaaactaactcaacaagggtacacttcaaagattctgtccaaatttggctttactgactcgaaaccagttagtactccaatcagtcaacagttcaggttgacaagtgatcaaactccctgcacagaggaagaagagaactacatggaaaaggtcccatacactagtgtagtgggaagcatcatgtatttgatggtgtgtacaaggccagacctctgttatgcagtgagtattgttagtaggtttatgggaaaacctggtattgaacattggaaagctgtcaaatgggtcatgagatacctaagaggtacctcaaatgtgggacttatctatggaccaagcactgaagaacctggtgttatagggtttgtagattcagactttgctggagatctggattcaagaaaatcacaaactggttatgtgttcaaattgaacaacaacacagtaagctggaaagca

SEQ ID NO: 180131 - DNA, 649 bp, Cannabis indica
atgtgacatgtgtcattcaattctattgccaagtccggatgtaggaccttcctggtcgtaggtggactttactcagtctggactcttgtccggatgggtgacgcgtgtccttgatgtcgaatgatgaaccgatgtgaccttgactaggtgtctcttcaatttctgcccatttaatgctaattgatagtttttccttaaatcacaattcgatgcttgtgcgtgtttggcagttacactctctgtaatgagtacataacatacacttttgggggaattcgagacatttgaatttttgaaatgattaattccctttttggattgctcataaataggactaggaacctttagtgatctttttagccattcaaactcttgaaaattcagagcaaaaattttcaaacgagtgttctctcaaattcttcaaaggatacacaggaaaactgttgatgacatcatccgagcaaaacaagaagcttcaaaccagtgagtaagttcttcaattcttttcttttacatatttgcaatgaaatgcatgcttaatttttgaatttcttgctatgaatctttcctgttcttgaatcgttctaggttaaccgtagaattcctaggtttaaggcttagaaatcttaaatgtattcaaccacaacat

SEQ ID NO: 180132 - DNA, 571 bp, Cannabis indica
gctgacaggtaatacctacttaataggttccttctataatccttgattttaacagttcattgtttacaaaacatgttttatttgtaaactttagtgatcgctcacatgtcttacaagcttttggttctatttattcctaataaaatcagtttattagctaattatttaaatacttatttgtggtttttcttggataaattattggagtgaaaaatagccaattttgtgaatcacacatgagatgcttgctaatcttaacgtggaatacctgtgcagattagatagtctagtcggtctatttgctgctggctgtcagcctagctctagcaatgacccatttggcctgcgaagaatctcatatggccttgtaagtagttatgatattcatatttgagtgggggccagtccaagacaagcggaccctttctctttttttaaaaaaaacgtagttatgatattcatgatattttgagtgtaaactaattaaacactttacaaatcctttgccttttgctccaggtccaagtgttggttgaaaaagataaagatctgaacttgaaagaagctttgc

SEQ ID NO: 180133 - DNA, 572 bp, Cannabis indica
aataatttaaaagtttagaaaaaaaaaatataaaaatatatctaacacctaatttttttttattttattgcttttgtaactattttatttataaaaataattcctcagtgaaaaataataaacttattttttcggttattttatagtttatttatagttatattataattatcatgatgttaatttcaagtttatttttagtttattttttttattttttgctgaccaaagtgtatttttgtaattttaaaactttacaaacgtatttttataaataaaaaatagaagaatatttttaaaaattctccaataaacaatgctccacaaatagttgctcaattaaattattatataagagttgcagttgctactacttccattttaagagaaaaaggaaaaaaaaaaaaaaaaagaagttgcaaaagatatgaggaattaccggtaagttatatttttttttgttgaacttaaattgttgtgtgggttacgatgtgaattgagtcagttgcgattggattacaacttagttacaatctggattgtaatttttttttttgaaagagtgataagaa

SEQ ID NO: 180134 - DNA, 770 bp, Cannabis indica
tgatctcctcacaaatactggtgcttgggacacttctaaactaacaagattgttcgatatagatactgtctctgctattttgaagggaggcaatcagggaatggatagatggagttggaccttagagtccagcgggaggtttacaagtaaatctgcttaccttgctcaagctctggaaagagccagccattgcgaggtggctacaacgctctggaacaaactatggaatagtaaaattctggagcggcataagattctttggtggtgcatcctctcaacggcgctccctgtcagagctgttattgggaggagattccaaattgaagataccagatgccccttatgtgaaaaggaggaagaatctattgaacacctctttctaacttgtgatgtggcgttacacttttggcaatcctccccttggggcatatatccggtcagtggcaatgggatttgtgtttgggactgggtgaaatttctctggagtcttaaaaatggggtattcgcgaagaggaggtttttctctatgcatcgatagtaattgataccatttggagggcgcgaaatgaaaaagttcacaataacctttcccggatgtatcaaaatgtattgaccttatttacacttcttttgcagatttacatgcttctctagtgccgtcaccgactccgctttgacagaaaaatggaatccaccccctgaggaattggatcaaacttaattgtgatgttcgagtggaattggcgagcatgtgcacaggtgttgttcct

SEQ ID NO: 180135 - DNA, 607 bp, Cannabis indica
aaaagagagacgaaatggattcaccatcataaaacaaccaatcaaaactattttttgataagaaaaataagttggcattggtgctaactttttgcacctttgccattaatagagataaatttctaatgtcactaacttcaaaatgggcacacactaacacttgaagttgagaccactttcactgactcatccaaatttagattttggcttcaactccaattatcagaataagctattatcagagtatgttgattctgatatactgagaattcttgaagaagaagatgctgaggagcctaaaaattctaattttggaccaaatatgaaagatattgatagatattgtgaatggttaaggaagtctatatacagataaaaaggaaaaaagaaaaaaaaaaaagttaaatcccaattatactggtgtatattttgattaaatataataaaaagaattaggaacaattagtggtactttacacttttgtataatttcatattataagtatgtgaacttcgatgtagtgcaaaatataattattaattatgttttgaattttttaataaacttatagagagtgtacaaggttaccaagaaatttaaaataca

SEQ ID NO: 180136 - DNA, 1175 bp, Cannabis indica
tgtaaaattaacacgtgtaataaaaaagtctaacatttgttgagaactttaaagtgagctgtggtaacgggtggtggtggaggagagacagaacaagtcagagatataaaccttagcttaggttagcttacgtggatgacgcactcaacgtcgattcatcagtgacaagacagacatgtgacgttagaaaagactctcccttttaacaaataaaataaacaaacatataaacgacaatcaatcagtgtcgttttggtgagtcagcagacacaatcggacggttgacagtgacgcttttctatcttttgggggtgttagcccgcgcgcgatgcgcgggggttcttcgaatctgtgaaagcagtgtcaacctagattaactcaccctaacccacttcaactcaattctctcttcttgggacccactccccaccaggggaatcaacgcccaacagttattttttttttttacttttcttttttttctttatttttaccattttattttgtttttttatacggaattgtcaaaaaccaagtatatattattggatttttgtctgcacccatgatctacccttgacatacaattaattttagaaaaatgctaaaagttaatttaagaaaatatatttaagaaataatataattgctagtgtctaataacaatgtttaaaatttttttatggtcgacgttgtagctatttaaagtattctataaaattttaagaagtttaaaaaaatttagcatgctaaaaaatatggatcaaagagtgtgttggacacataacttttttattttatatgtgtgtaaaatagacggtttgaatattaaattttatgttgtaaagtattttgaatttcttaaaattttaaagaatgtattaaataactataacgtacacgattataaaaaattagactaagaaattcttttaaatgtcgaaatagttaggtgttgcactagtgcactcattttagtggggtctattgtagaaatacccttaatttttttaagcattgctattagtggtgtgtctagcacgttttaccttgccattggttagcaatacttcttaaaagttattacatttaattatatggaatatgatatttaattataccaatagtaatagggaaatttgattttctatacttagaaaataaaaaaaaaactt

SEQ ID NO: 180137 - DNA, 532 bp, Cannabis indica
tatatatatatatatatatatatatatatctatatatttagtctgtagttgatgttatgttatatagcttctgaaaccagttatcttccattccaaggttggatcaaccaagaaattttccccttttaagggtttgattatgacgttgatcattatgttgttgatgatgataattcttgagtttatcaggagcactatctgtgattaattttttttgttcgttattatcttcataattcatttttgaagtagaactttttttgttattgttgattatgtgagtgatggtaagaaaattgttttggaaaaactgaagaactaactttggtgtagtttttactttattttatgtctttttttttatacttggaaagccctgaaaatatctggtgttactaaaatgttacattttaaaatgggataattacaaaaattattattattaatttttttttttacaatttttacatttttaggtataaactttaaaggtcttttttttttttaatataatatatttttcaaagagttt

SEQ ID NO: 180138 - DNA, 671 bp, Cannabis indica
agacaatttggtgtttttcattaataggccctgagttgaaatgggctataggtaaaagaattttttaggtttttactataaagataaatgatatttttaaaaattattaaaaaatatgtatattttttaaaagtatttttttatttgggcccctaaaatgagtgaaccttaggcgcgagcctagcttgcctatgctcagagccgaccctgtctatagtttatgggttcattgagttggatcaagatctaattacaaattttacccttataaatataaaatttcaatgtgtaagatctatatgattcatttttataaagaaaaatgtaataaaggactaatatgaaattatctttgattaaacaaaattgttttattaagaacaaaaaaatcacgaaccttaagtcaataaaaactgagaaaaaatttcatttaagagctcaatttaggatccaattcgaaattttctttgataggtatcaagaaggaattaaaataaaataatatagatttatatagatatgtttatacggatagagaagaaaattttctctattgatatacctacaaaatgcatagagataagttaaagaataccttttctttgtatccattaataaaaaaaaaataactctcatattatgtttcattaaaatctacctatttttatgag

SEQ ID NO: 180139 - DNA, 548 bp, Cannabis indica
ctttagtttattgtaactaatctctaatttttaaaaatttttagtggtaaaaatccccaaaaactcgtatttatgtttagcagttttacattttccatttcattttttggatgtttaagtgctatgtttagaatatctacgtgttacacagtgtacacgtggcacaatttaactgactcacgtaaataaatatttaaaataaaaaaaatatatttttaaaaattaaaagtaaaataatttaattttgtcattccaacaatttttttttcttcattattttttatttttcttattcttcatcttcttcatatgatcgacatccaccaccaccaatctactgaaactactattacctaccaaccaccgtaccatccacaaccaccaccaaccaccactaccgtacccttttttttacacctaaaccacacatacacacaaaaagaaacaaaacacaaaagaaaaaaaagatttgagaaccccaaatttgaacacgttcatccaaccccaaatctgaagccttctcgtgcaacgcctccaccgctccttct

SEQ ID NO: 180140 - DNA, 1074 bp, Cannabis indica
gaaatgaagttgaaatcatgctcatcttcctcttttttcctcttaatccgctactctttttatacttcgctatgtttatatatgtttttgagcacaagcctatgcttttatggagtcaaaaagaagaaaatgagtcatcattttaatgatttttttctttggcatttctgcacaaaccctttgaaaacatgcattagaaagtttctgagtttggttctttccctgcttaaccagcaacatcccattctttagtaacactgaagaagattcttgagtaatattttgagtggctagttgctgtgacggttgggatgaggattgctagctactttttcattctaagatttgttttttttcagcttctcgcaatacattcctaacttgattttaaaacaagcaatttgtatttgttttgttatataagtctgtgttaagtttcgtaatcctgttttataaccctgctaacatggtgtgacaataacaatgacaaagtacatatttgttaatgcaaacatgattctataactaataaataaatggttgtatttctatattctttaacagttttgaattgtctatatacagtttaatgttttacgaatttgtaatatgcacaaaaatgtttcaaatatgttttttcttctacattatatatgtgctgatattggttgaaacagactatttcttctttctttttccttgcaaggattggttggatgtgcaaatgcctattgaaggcttcattgaataagaatcgagtttggaaggctgatataattggaagccaagccaaaatagctagaggtgtaaataggacaacacccattccataatcatatgctttagcaatgaccctggcaaagtcccactattccagtgtcatctatctttggccttacagcttgagcaatctgaaccaacaaaaacttttcaatttcgaaaacaatctagtaagatttgaagtctgatataagtatgaactgcatatagcaaaaaagggaaaatgtgtaatgggtgtaagcttaccgtgatcaaaccccgaaccagttggcagaaatgctaggcagcatacta

SEQ ID NO: 180141 - DNA, 688 bp, Cannabis indica
ccataatcatgcctcttgcctgcccctatatgccatgatttttttttttaagaaaaaaatttaaatagtatttaaattaaaataaagtcaaatagttttcaaaatattttagtaacatttatgaagagagtacaatagaaaagaaaaacaaattactcttctttctcagtttttacgagtttgttctctttttctttttaatttttttttaaaaaatcattttaatatagataatgttcttaaaaaaaagtcagcaggaacaaattaatgaaaattaaatatttatatatccgccatattttgatttttttttttcaaaatggaaggcacattaatgaaaaaaaaattcaaaatgaaatgaagccatgatattaattttgcaggtgaagaactcactctgattaatttattagtttttacattattactattgtctcttttttatgtttaactgtgtaaattattgggaaaaataaaaataaaattcacattcatgttagaaaagcattttatcattagacaatacatatatgaaaataaattgtaaataataaaggaattaattacctcagttaaagttccaggcaaagttcctaactcagtaaatgaatcaacttcatcgaatccctcaagaagtttaacctgcctcttgtaatattcagcaatttttctttgcctccctacaagt

SEQ ID NO: 180142 - DNA, 878 bp, Cannabis indica
  modified_base (815)..(815): a, c, t, g, unknown or other
aaagagaacaagtacccttcttctggtaattaattttaatttcaaaacatacattttctcactgttattaaataataatcattaatttttaaatttttatatataggacagtactgcttgtactacagagtataaattatataacactataattaccattatattattagacagtgttttttggtgaataaaaagtcagcaatgatcaacagctagcaccaacttgtagtactcatgaaaaaaatacaaaattatcaaaaaaaaaaaaaaaaatacacacttaaaataatttttaattatttttgtttgaaaatatataaacagttaattttacaagactacagttatatatttcactagttaaagttaggagtcttcacttgcttatgaatactatacataatatattttgaaatagtaggtacagtattttttaatttaaaaattgttgaaagggcatcaaaatttaattttaattttacggtataatttagtagttttacatttatttttcaggtttgaaaaagaggtttcaaagttcgaatccacttctaatatatagaaaaatatatatgaaataatactaaattacattaataataatatatatgtcatacaattaattttttaaaatgttgtaactataataaatactgttatattataataaaaaaaataatataacatgaatttttggaaacaagagaagaaaaaaagttaaaataaaataattgtactgattaaaactcatttttattaaaaaatcaataattttcattcaacatataatctgattatcatgattccataatagntaaatattaataaacatagtgcagatagtagtagtggtggtgaagatgaagagagaaagaaaa

SEQ ID NO: 180143 - DNA, 824 bp, Cannabis indica
gaccccgttggtgagctaggggcattttagtaattttgactcgagaagggtaaaattatgaaattaatatatttacgtgcttatggaactatattattatatagtatgcctgtgttatcttttcaggtgtgttctgacaagttggcgcggtatagtcacaactgggtatttcgggccgaactgggttcggggccgaaatacaattttgagataagttattggcattttatttatgtgtgatgaatctgaaattacttaaatatgtgttatatatgaaatgacttcaatgtccttaattgtttgagtatgtgagaaatggccctaggggcaaaatagtaaatatgtatttttggaattattttctaactaaaggcattctttgtaaaaaaaaaaatagaaattcattttctgcattaccttaaccgcaaaacagccccttccctctctctctctatccctctttgtattttgttgaaaaattagtgatttgcttggggttcaagcttgaaattgaagtattgctcgagaattgtgttgggctatgcttgtattttgaggtagttgtggtcttgatcattgcattgaatctttaggtatttttctattgctgaaatttaatgaatttggtgctgtgattttatggttgaaaagcatgaaataggttgggatggtcttgagatgcatgttggtgttttcttgttgatatgagcatgtaggggtgagcatcggtcggtttggtcggtttttttctatataaaaatccacaattcggttttcggtttggattggtgcaatccgaaaactgaccgaccaatccagaacct

SEQ ID NO: 180144 - DNA, 258 bp, Cannabis indica
atagtactatgtactacatttggatgaattagactgggttgttggtcaaagcattttgggggtcttgtgtagaagtttaaaatttggtgtttcagaatcatgtacattaagatcacaatttcattatttagttttttttttttttttaaagatttgttgctaaacttttaattgtaaatttttatttatacgtataataggaaaaaaaaatagggcttatctttttttttaaaaaaaaaaaatggaccctgaaaaaat

SEQ ID NO: 180145 - DNA, 778 bp, Cannabis indica
catagaattcagagctttcatttgggtttttttgattgaaaatgttggaaattgcttaccatgttcgtttaattaatgccccttcattgtgttttacgaagttgttgtcttttactattcttgtttttatgatatgggtaatgtttggccaatgaattctgttctacccatcttttcagatctgaaatatcgtttgttgttgtctccttttttatcgttttctttatatgatgttctttcatctttagatcgaattagttcaatttgatcaattgttattgttgttgttggtactaattaagataaaatcttgctatgcaaaagtgaaattgtgtttgaacaaaagctatgatgattcattttgtttattgcaaattataacttgtttttctttttctcttcagaattctgtgtctccctcttcactcccaacggctcttgtggaaccatggactatgagagcaacaattggatattggatggggtttacgtaacttcccaccatctctttggttggtcgtaatgctcacagctgctttgtttgggagttatcaacaagctatttcggtcggaattggggttccgtcatttgccatacttgtggtttgatatgggagttttctataagaagaaacgtgaaaagaagcgcatcgggtttatatggatggttgttttgtatctcatgcattatggtcgatgccaactgctttaaggtcaagccaaagctttgggtgatgagttagttgtcggtgttgtcagtgatgaggagattattgcc

SEQ ID NO: 180146 - DNA, 1191 bp, Cannabis indica
aatgtcaggaagaggaaaaggaggaaagggtttgggaaagggaggagccaagaggcatcgcaaggttctcagggacaacatccagggaatcaccaagccggcgattcgccgtttggccagacgtggcggagttaagcgtatcagcggtctcatctacgaggagactcgcggtgtactcaagatctttctcgagaacgttatccgtgacgccgtcacttacactgagcacgctcgccggaagactgttaccgccatggacgtcgtctatgctttgaaaagacaaggacgaactctgtacggattcggaggttgatggatccaatctttgtgtaatcttatgtggttagggttttgaatttggggatttgggctgggttaggtgatttgatatgtttctttaatgtgattagatttagattattgtggttttagtgtaattgcaatataatgaatgaagctaattagaaatattatcaaattcaatcttgagttcttcaaaatctttctcctctctttactgttgttctataattcaacaaagcttctgtctttaattaaatattaaatttcaattgtttaaaaattttatattttattattaattttctgtttgaaaaagatgtaatttgtattaataatttagattagtattaagatttctctataaatttcgtattaaatccaatcctaaggattcataattgttatgatacatatatactaataagaattaactaatcaaatttgtggttgaattggtttaattggagaaaaataaggattcataattgttatgtttaggattctaagctaatattgctagtaattgatgatgaatattggaaaccttgttctttgattgcactatctcttttatcattatactaagttagaactcaaaaataaaacaaaattgttacttttttatcaatgaaattttgtataacataaaaaaacatcgggattaatactcaataaattagtaacaagtttatgtgaatttttatattcttgtaaattatgtaaattaatactcaagagtgtgtgaatagattagtgtttgttttgttcaagaaaaaaaaaataaggaaaaagaaaagaaataatatacaatcaaaaaatatatatatatatataggcagccgtatttgtgcccatatatgacaaaacacggattggaatccgttgtac

SEQ ID NO: 180147 - DNA, 759 bp, Cannabis indica
gcctaagaaagcaggagtagtgtttcacagctgtagcaaattcaggcctttgttattttcgatctgatgcaggctgccattgctaggatttttagccaggttctcttgagccaaaatgactcggctttgctttgtcataacgctgcacaacatcacccaatctcctccccgatttaaaatctctttaacacatgtttcaatctcaaaaaatttgctaatcaacccagccacagtattagcatctgagtatctgttccagcagctgataacaacctctcgaaatttctcatgtaacgcccaatggttgcagtacctgaacggtcttatgcccacattaccaactctattgcttttaacaatgcagtagctatgatccgagatacagtcccatttaaagcaagcctctgtgtgagggtattgatccatccagtcttcattaatgaggaccctaccaagcttagaataaactctagtacccatatcatgcttgttagaccaagtgaaataggccccggagcttttcaactcttccacttggcctagagaaagccagttttgagcatcttcaatatctttaggcatgatctgcttacctccattcctatcttgaaaactaaacatcgcgttaaagtctccaagaattacccaaggcttgttaactaccccaataccagctaacttctcaaaaagcactttcctttcagacaacatattactgccatatactgcagtaaaacagaactcctccatcaagcctat

SEQ ID NO: 180148 - DNA, 759 bp, Cannabis indica
gactattcaaaagaagttcatgatttacaattattgcaaagacactaagagatttcctcaaggaatccctaaagaatgcagcatggcctaaaacaaggactagttactgcatatcattctatgtcttattcaatatcttttattgtaattcattcattataatctgtatttgatttattttgaataaataaaaatattcttttgttttgtctaataattaatctctcatgatttatattacaattaaatttaattaatggttacaagtcaaccaaaccaattgataacattattagttgcatgtgttatatagccacatttggcgtacccataaatattaactcaagtgctcatagcacaattggattgtgaattaattaatcaattacattgacggttaagttagttattggttacatattatataattattataacacaggtaattaactctttcatttgttttgaataaagaaataatcttttataacatttaataaatctccaataatttattttactataaatttacatcattattattattatttgaaagtggaatctccacaaagggaaacaacttacataagctcctacccaagtagaatttgccacattgggaaggtcccttttccaaatagttctaactctaattacaagagtatgtttggctagaaaatgagcaacaaattagcttccctaaaaataaaagtaaaaccaccaaagccttgactcggaatgagatcaagaatgctccat

SEQ ID NO: 180149 - DNA, 758 bp, Cannabis indica
caaaggagaattgagtttcaatacttgttattactctgcgatagaaaggaacaagagttagagtattgaacggaaggagtcatattgtttctgttgcaatcaatgtaaagtttctcgaactcttatgtgtttaattatctttcaacagttttcatatttaggatgttaaattataatatttataatcaacatacatgattagtaaattaagattctggtaaaataatttccaacaatttactccatccacagatagaccaagatgaagatgccttcgttcaaatttgaattctgaatttatgtaatttagtttttttttgttgcttgtgaatttgcaagatgtctgagttttctatccttcactctcttagtctcgtgctaaatcaagtttttagaatattctgcactacaatataatcgtattaagtcgaggaatcaaatgcatatgccaccacactttttgggggataagtttcatattatccttacccttgtttattttatggtgggataaactataagttgggtgttgtccatgtctgcatattacttacgatataaagtaaaatcattcagacatgcgtagatcttttcatacttcaatcctatgaaatttgaagttttctttacttcatatgtagactccgggaaacaactgtcaaatggcaaaatatctttaaaaatagctaaaaattgagtaaacatttatcgcttactcttttttgcctttgattttttaaaactttaatcattgtttg

SEQ ID NO: 180150 - DNA, 548 bp, Cannabis indica
tagctctggaactcttaaattcacagttttctcattagtgaggaaaatagtttttggcgtttctgtcagttttgtgaagtgttgggttttatgccctaaataaaactctatttcaatgtaatctctatcatttaaatatcaataaagaaacagaagtattttcatcacttattttgtgtcatttggttcatgttatcatttatttgtttatttgatttataaattcatccaaatccttatcacatttatattcttgtttattgtgtcgtcagcacagtggaaagtaatcaagattatgtgattaaatatatattcctagatttatcagtacacagggtttaactgatatgataatctacaacatagtttacttgcaccttggataagtgttatgtcctttccagggcattggttaaagtaaagcttgggttggatgcatggagtatgcatcggaagggaccgatattgaactttgaatcagatatgataaatttaccgtaatatctattcaattcaatatcacctagttgatcctagatcaaatgatc

SEQ ID NO: 180151 - DNA, 711 bp, Cannabis indica
ttgagagaaaaaccattttctctgttcctcttggtcgaaccctaaaggaccagcagctatgggggtgttttctgtctgcaatcagagttgtagagcaagtgttagtgatataatccaaggtagaattcttagacttaatctcctttattttcttaagcttttagtgaagagatttttgcatgaattgggtgtttgagttctgtgattgctgttggtgtatgaattttttttctagagttagattatgtttatttatgctgatttggaaggttttgatggctgtttgtgaggtttgttcaaggtttgagctttagagctcaaactttgctctcgcatggtgaaacttgattttaagtttgggtactcgttttattgcttggaaaatattctttagggtgtttagaacaggtctggaaagtttggcttggattggtgttgaattggttgagaaatgaaattttgaaaaattcctgcactgaaccggaattctggttcagggaggcctgtaggaatcggaattccggttggcttctaggaatttttcccagaaccggaattccagttcgggaaccggtctaccggttggggcaattttgggaaccctagtttttcccatttttgagatatttagggtatggccaggttatttatcgatagggaaacttttagtttcaagtttaagtccccgggaagtgatttagcatatcgctt

SEQ ID NO: 180152 - DNA, 517 bp, Cannabis indica
gtgtcgcctggaacaccgtcggtagcaaattttaccaaaatcgacgctgaaagtccttaaaaatcgccatcaaagcctaattttgtagtagtatgatattatatattatatttttgctcacatactttgatcttagaaccggaaccatacccggacccgaacgggttcatgtcatagtatagtgttaaaatattaatttatttaataagaaaaaatctaaaaatagttttaaaaaatttatgcctaaacaccataaaatttttaaaataacaaaaaactgttttctattctcaattttaaaacctaaaaactgaaaacacaggtaaaaactgttttctattctgttattgatttttttgttgttggatttctcgctcgtctaatgaggttactcactgtttaggcaaatgggaacttaatcataattgtaattgttttgctttgtttttgggaggttcagtctccatgtactaaccaatattctagtttcggtttaatgaattgtgcaattaattaa

SEQ ID NO: 180153 - DNA, 764 bp, Cannabis indica
ttaagaagaatgtcaaagaaaaccaagatcgtttgggggatttacagagttttgacaaaaatgtagtggcatttatcacaattttcaaacatcttagatgtggtagtgaccattttaaacatgtattgctgcaataaacaatgtagaaaacactcattatagagcccaaattcatttttattgaattttccgggactaagagagtaagttgaatgagtattgccaacaaatggttgaaatctgtagcttacattgaattaagaaaaatatttggtgctctttcttctctttatgttcaagaaaaagctatagcccccttttctttagatcttatcttgtttcctggggtgtgtggcagtgtgggtgaaaccttaatactagaccacttctatccagatagccttatttatttgattattgatttctgacctttttctgaagctaagttagtcactttaattagttatttaactcatcaagtcgagatatcatccaatgctgggatgtgcaaatcttgtcaattgaattaataaaaatctttcctccaaataatgagagacagtgcaatcttgtctttcaaatcatacaaactacttcctttgcctatttgttccgtaaatattttgcatctatatactcttggtactcctttactagcattacattatacaagttgtaagctttagcagaatgacatatagttggtctatatgcatctgatgtgatacgcttgaaatttttgcatggactgtgactctgtagga

SEQ ID NO: 180154 - DNA, 815 bp, Cannabis indica
attgcacgttgtttgttttttttggggtttctctggagtttacagagtttgatttctgtaactacagaaaaactgtttttcagtaccagttttcattattccgcaatttattaaatcacttaatttaaaataatcaaaactggggaaatattaaaagtacagaaattttaacactacttgatccctgccccataaaatatatgacttgttaaaaattcacactaaaatataacagttacataatcatgcaccttagagcatctccaatggagatgctataggatgcttgatgacatgaatatatttttagcattttctaattgatgcttaccattagaatacaaaagaatgccacaaaaattaccataccataacatcctttacatcttctctttcttatttgtttattattattttatcataaagtaagaaaattagttcatttaatatctattaaataataatctaatattattttaataatttttagagatacttaccattggagcattttagaacaaaaagtactaaaaataatgtggaagagagatcaaataaaataatatatttttaagtgatgtggaagtttttgacactcttaaaaagtgctaccattggagatgctcttattagattttatctctttcactgttacaaattagcatttttaccctctcaactttagtcaatacaaatttttgtttccttttattaataaaaagttaatttcaaacttatatttctttagtaattttgaaaaaaaaaaagttaaaatctgataaaaatatgaaattaataaaaaaatatgtttacct

SEQ ID NO: 180155 - DNA, 529 bp, Cannabis indica
ggcagcactatacacatttcgctcttcaatagatttaatcctgaatatttgcgccttcttcaagttctgtaccatgaaaagtggcatattacccttctcatcaaataaggaaagtcaagtcagtttatttctgaaatagattagtcacatgttggtattctgttttggcagatgggtaatgtttatgttcaatttagagaggaagagcacgctgcaaatgcacttaggaacctcactgaaagattttatgcatgtagaatttgattagcaccttcttaatgtacagggcgtcccattattgtggatttctcgcttgtgacggacttccttgaagccacttgcaggcaatataatgtaactgtggtggatattgcaactttacttataatgaggacaaaaatatgtatacaatactatataatcttagctagatttattgaaaagaaaaattaattttttttttccaactagaatcaattacggcagttgttaaaaaactatcgtttttaacctatctcgtgggttctta

SEQ ID NO: 180156 - DNA, 539 bp, Cannabis indica
aaaagatagtgcagcaagtttatttcttggaaaagaagcatttagagtgactgtgttccctaatgtggattatgcctttgttgttgcattgattgtgattctccgtgagattaatgccgatcgaactggaactgactgatcactcatcactctcttctatttattatatataattaagattagtatgaatgatgatgatgataataataatgatgtttatttgtataatatttctagttaatctccatgtaatagtatcaataacattgaagctccttcctatcctatgtatggggtttcataataataataattaagaagttgattctactagttatatatatatatatatataaatatatccctatatatagttagttttggttaaattaattaaatttgaagtaaaaaattaatgtgtagaaataagaagtagtttctttgtaaaggttaaattaatatgatcacctaatcaatagtataaacatgtggagtttgggtctcattagaccaagtatctgaaagaagaattgttggag

SEQ ID NO: 180157 - DNA, 1281 bp, Cannabis indica
tactataattattcattgtttaggatggatttacagcaagaattatttcacaaatacacaaaatacaaaaaatacagttgtacgaaattttaaatatttttacgattattatgattttatttatagaaaatacagtttttttttatgtatttttatgttgtactcttattaatttttttgttatttaatgttattatttttatattatttttaaataattttcttattgtttagatgttattttataaaatactataaaaaatataaaaaaaaaattatttaaacgtaaaaatataattatatatataattaatccctttataattctaaagtaagaaccagcactccttaattacttactactaattttataaaattaacctttataataactcttaatatagccttttacttttcgtatcatataaatatattagtaagcagggttggtcttgagttaatttggaccctaaaaaaaataatttgtttggccttttttataacaataaatagtatttttaaaaattattaagaaaatgtgtatatttattaaaaagttttttttttcattttgggcccctaataagagtgagccctatgcgggtctagctcgtctaagccctaggaccggccatgttagtgtgggggccaacataactatgaatttttattatttattagtagtaataaaattattgaattttcaatatacatattctaatttatattattgaaagattactaatcattaaaaaaaattaattaggatttttacactctcaaactatgacctatgtattattgtactccctgaattttttagtccgttaaaaaaggtccttgaactattcataatgttgtaaattggttattctatcaagttttgtcacacgtggcaagtaaaataatggcataatcattagccaattgacatgtcagtatcatgtcaacgccacatatataattattttgaaaaaaataatttatttttttatacatataattttacgtaattttcttaatgattaattgagttttagtttaatgatttaaaaatacataatttttattttttaatgttaaattatacatatggtatgtgcgcagttgactaagcagccatgtcattattttgtttgccacgtgtgacaaaatttgacagaataaccaatttacactactgtgaataattcaagaacaatttgtaatggactaaaaagttcagaatgcacaataatatatatgtcataattatgttatatttaaaaaaaaaatagcaac

SEQ ID NO: 180158 - DNA, 529 bp, Cannabis indica
acacgtaatttggtactcactatactttcagcaacttctgaaaaacaagcacaaacatagaattcatatatgaatacaatagaaaaattaatatataagttgtaaacgttgaggaaatgaagtaacataaaaaacacactaaaataaggaaaccttcttcttttctttgctactagatcaaagtcttcccatagagaaggcatgttacctgcaaattactggataagtctttcacataatcttcatttctcctgcaaaaatgtgtgacgtcaagactatggagaatccttgtcaaactagttaaaggtaaaaagaaagaatgtagacaaagcaataactagatattggaaggttttgaaccttagacctttaaaacatcacttcacatattctgcaatgcgagctacaacagacacgtgtcactttagaaattattatatttcaagtagcatgttaaagttttggcacacacatgagaaccgtgaggcaccgaaaactaaggttttaaaattttaattaaaaaaaaaaa

SEQ ID NO: 180159 - DNA, 677 bp, Cannabis indica
  modified_base (635)..(635): a, c, t, g, unknown or other
cttatatggtaacgtggtgtgcatattcattaaatatatgatttgttcttatctgaaattatactaatttcattgttttttattattattattttgtacggttggggaatatttttgaccagagaaataaatgcctgatttctacaaaggcttttcaaagtgttttaggacgagatccgtttatttagaaagcattagtagtgttttaaggtttcttattttatatttttattttaatttaattaaggcgagtttaagttaattatgaatcatatcgaagaagattctaaaatgattatgctagaaataaaataaactaaaaagccaacagacatataatataaccggagctacataattctttttttgtttattttattttgttttattaatttatttaagtaaaggttataaattattattattatttatcgaaattttcaaaactaactaaccaagatcttaagaaataaaagcgaataataaagaagataaattctttttatgtggtttaatcgttaatgagcgccctagttcacgagtgatgaatatattgaccttgaaagacttgtatgatattttatagtaatagttacaagaataccctaactctacctagaagaagaaagcttagnggaaattcaacagagctttggctatctatctttcgctctccc

SEQ ID NO: 180160 - DNA, 659 bp, Cannabis indica
gtcgggtttgaatacccaaaaagaatgttaagaaaattgcattgaaacattaaagtataagaataacaatgagcatgactaatgttatttaaatacatgaggcagtatttattgttcatcattccctgcagagaatgatacgaattgaagtcaatcacttttaaagattcctcgtattagtcatgttattatacattgttattacttgcaatgttggaaattattgaatctgacatatgttaaagattaaattttgcatacatcttggagactatgcaaaaattgcattcatatattctttgaaatatcgtaaaagaaattgttgaataatttcttatattttttatggatgaacaagtaataaataaaagatttggacatccacataattaataatatttataacaatgtgatatttaagtgtataaaatcgaaaacatatagtatttatgtcgcaaattttcttaaaatgtaaaattaatatttttttttaacgaaagtgtacaactaatatctttttttctattaaaaaaatatatttattttttttaaaatggtatcatacattaattttttatttatttttttaaataaaaacttttttttttgagtaaaaaaattaaaacttctttatttattcttttacatcattaaaatat

SEQ ID NO: 180161 - DNA, 773 bp, Cannabis indica
gcttcaaatagcgagtgtttgatatggaagagcataaatcatttatgaagaaaaccattaactcaatcgtccactttattaaggtattttcctcttcctcttaagacttgtatttaataagaaaatttaagtgtaactgtaattttagattattcatttcataatccaagtagtgttattttttccaatcaagaatgcatgtgccatggcatatcccattattattatcatgatttcattctatttcttcatataattttattgtcaccatttaaaatcatcttttgggtgtttgttttgaattttttgaggaacaaaatggtttaaccacaatcatttttaagttggtaccagaacaaattttgggtaatatctcattatttcgttttattttttaatttttaagttacttatcaatctaaaattataatggtcggaatacccaccataattattttcagtatttattttattttaaaaataaaattcgaaactaaataataatagctctgaaacaaatttattttacaattatttttacatttgtgttatgtcctctattatttactataaataatttatgagatttatattattttactaaaaaacaatcattttattttttaaataagacatctgaatcccaaatctaatagaaaaaatcaaaacaaatgtttttagatctgaaattttagaatgaagattttgttttgtacttgacctcatttaaaatattaatataagaaaataaaaaaggaatctttaacttaact

SEQ ID NO: 180162 - DNA, 970 bp, Cannabis indica
tggggaatttcaggcacaagtgccgaatggatgtgattgtgccaaaatcaaccaaggttggtcggccaaggattgcgttgtatgcagttgggcaatctaccaccacaaaggtgcagtacttaaaagtactctgaggagtatccgggcatagggtgactgccagtctcacttttcccattgggataagcgtggttccattgaatcctatgagttgggagccgttgggcgacaaatccctgtccgtgaggcctatggttgtgaaggcttctttgaacaataaattcacagaactcccattattcaccaatattcttgccacaattttattggcaatgggagtctctatgaccagggggtcatgatacgcaccagtttcgcatcttctttcgtgaaagtaatgggctgatccatgagtcggggcctttgtgctggaagctgggtgacttcccacacttcatcatgctttatggccccgcatagcgcttcaattcttttctggtggttccccctaatatggggcccaccaaagatcatggctactctcccattaggtctcggtgggagcccagggacctattgagggattgctcctccagaaggtacaacgggtccaccccctagtgccgcttgaggcaacgggcctcctaccggaaccaggttgagatggggtagtcagttattaatccactcatacaaatggcccaaccggatcaagttttcgatctcgtccttcaaatttttgcattcaatggtactgtgaccaatatcattgtgatattcgcatctcttgttgggatcccttcgcaaactgtccctgtacaggggcggagacttccggtagtgtgtgttttgccttgtggtgaaatacactcgctcctgcgtgtccgtgagctccgtgtattgtgtatattgaggggtgtacccccttcattgtcgcttgtcctccgcctggttgctaccctttgatgac

SEQ ID NO: 180163 - DNA, 686 bp, Cannabis indica
catttgcaaactcccatctatctggatcaactttcttaaatccctacacacatatatatacattcatttgatttcattcattgataatctcttcatattccattaaaatatatatatacacatatatagtagcccaaagtgggtgggactgggaggtgctgattgttctttagaaataaacacacatttcaaatcaatgcatgagcgcgcgcgcacacacaaatatatttacatatatattttcaataatttggaatgcctagggtgattctacaatttaaaagggatgttctcaacaatttttttaatttaatttttttttatatttcacgaacttatagctatttaagatattttataaaattttgtgaaatttgaaataatttacaatatagaaaataatattcaaacaatcaattttacacgcgtctaaaataaatgaataattacataagccactatcttttataaaaaaattatatttttacatttgaaggattttttttttacagttttacggttttccacagaaataacacgaaaacaacaagaaaactacataaaaataacatgaaaatgacatctaaataacatcaaaaaacacacgaaaaataacatacagataacaaaaaatcaacaacaaatcaacaagagtaaaacataaaaataccgtattttctgtaaat

SEQ ID NO: 180164 - DNA, 824 bp, Cannabis indica
gttttttaaaaataaatgcttgacttatgccgctgagttatgaggatattttttttttaaaaaaataaatcagatatataaattttaattaattaatagttcattatatttatttacaatatttgaataaaaatattagaaaaataaaattatacgactgaagttaaacataaaaaggtaaatatatatgattttttattaattaataattattaatttaaaatattagataaaatagtatattagaaaatataaaaatatacgtatatgaatatttttattaaaaaaaatataaaaaatgaaaaaatatggagataatacatagacctatttgaactaatattagactcctacatcatttcttttcctttatatatatactagtaggcggatatataaaatattttaaattatatatgaaaaaaaaattgcatatttcaattaataataattacttaaaaggattatataaaaattttaactttactattaaaataattgtgacataaatacttaaaatattaaagttgttgctaataaataccggaattcgaaaaatagcatcataaatctttatttatggatttattttttattctgatatgtgttaagttttgggttcgaattttattgtgtgtgtttttaatgtttgagttttaagtgttttaccggggttcgtttatatttgtagtttatgtttgtgtgattcttattttttttttttagtttatttttttatagtattttgtagaactttgaaattttgattgttcttttttgttgtattatttaggatttgtagagttttgcctttttcgtttgca

SEQ ID NO: 180165 - DNA, 574 bp, Cannabis indica
gaatacaaacaaaaaaaaaaaaaagaaaaatggaatcaacaatataccttatgtcattctctttaaactcaaaactcaaatttcaatttcaaactaaatccaaacaaaattcaaaactcaaatcaatatacattcattaataaaaaaaataaatcgaatttaccacatatccatatatccaaactcaaaagcatgtatgatgtccctataaaaaaaattcatttacaatgaaccagtgcatatcaaaagtttctttgaactaccacataaattcaagaagttagttttatttttctgtctaattttctcatcaaccagagaataactaaaagacaattttcataatagtattataataaaataaaataatattttgttagtagtaaataaagaaataaatttggggtgggctacaaaagtctgattatggtatctgatctggaacctcttatcataagtttatacaaagatatcaaaagagagaagagagaataccttgaataattgtcttttggtgaaaaaacattgagttgagtttttattattgctaagagagagagagagagagagagag

SEQ ID NO: 180166 - DNA, 605 bp, Cannabis indica
caatgctatttttaggatttatcaaagctagcttatactctcaacctcaacttggtgctcttagctgaaatgagaatgtaaagtagtcatgtcactcaaatgcatgtatggctgctattcataaggtttactcacttcttctgaagatatatttatttatatatatataaggttcgtttggtacgttgtattgtaatgtattgtattgtattgtgttggattgtgttgtattatattatattgtattagtattatttaatacaatacaatgtttagtattggcttgtattaattgattatgtaaagttataatatatttttattacactcgatcccaacaccaactacgggttcgggtaccgggtctgggtcgaggtccagtctcgagtccgggtccgaggtccgaggttcgaggtccggggtctagggtctgggttcgggtcctgagtccaagtttgggtacgagtcccgggtccggggtctggggtccgggtccagggtcaggttcgtgtccggggttggggtccaggttcgatctggggttcgggttcgagtccgagtccagggtcccgggtccgggtttggtcccgagtccgaggtccggt

SEQ ID NO: 180167 - DNA, 576 bp, Cannabis indica
aaagcagcctctctctctctctcaaaaacatatataaaaaacaaattaatatactgtggtgtgttgattttgtctcttaactttattttgaaaaataataaataaaaaacaaattaaaaatacgtacgtcaaattcataataatttctctaaattactttgttttcaattattattatttatttatttaatatagtaacacaattacaatacccattaaaaagtattctatatatgtatgtacagggccggccctaggcataagcgggctaggcccgtgcctagggcccacatttttcgggggcccaaaataaaaaaataaaaaaattattaggcttttatttaagtaaaattaagtgtattataaacaataaatattcgtagcttagttggttgaggtggaagttataatgttcaaggtcatgggttcaaatcccataacactgtttttttttatatttttttttaatatatttttgagggcccaaaatttatttcgtcttgggcccatatatttttagggccggccctgtttatgtgtaccttcacatattttatataattaatatatatattt

SEQ ID NO: 180168 - DNA, 825 bp, Cannabis indica
catgacactggacaaaacaagtaaatggaaaatctagtaacaaatgaagagatactttaggagcatttgcaaacaagtatgaaatctctctaaaacattgcaaaaataattagaaaatgaatcataggatagcaattaataaagagcttacctgaaagagataggatcaatcgttgcaaaaaaagaggatctgattccttatcgactttgaaaacgttgttggaatagagcaaacacctcagaagtacttttcatcaacaagcaatgacaataaaggaagtagacattgcattgcacaagacaaagaaacacagaagataccactaattatgattcaatctcagcttttgaatccagtgtagtctaaacatgacttgttacaatggaaagaacatgttatgagggaggtcgtggctaaaattggagaaggaaaagtcgtgaagctagatgatttaaaaagaggaagcatgaggaatgtagctagatctccattcgacaaatggatcattgaagagtcaaagccttaggacttcacgatgctaaccttcacattgttcgatggagaagagaatccattagagcatgtgcttcaattcgagcaaaggatagtattggaataaaattttaaccctatgattagatgaaaagccttctccaccaccctatcaggattgactctatatggttcaagtagttgaaggaagagtcaattaactccattgatgagctcatacaagatttcaccatgcaatatgggggaaatgcaaaaagtagtcaagaacgtaaagaccattatcatactgagaaggaagagagagagagaga

SEQ ID NO: 180169 - DNA, 932 bp, Cannabis indica
aactctccaatattttataaatataaaactaaacatatgatcaaatgtccataaacatagtttttttaaaacaaacaaataaatataaattcagctacaatatatattgtagcaaaatatataaatcatcttcaattttatttacatcataagttatcaatcctacacaattttttataaagtatactttgttagaccttattaagtcgggttgggggtaggggttgggatccaagagttaggacatatgcagggctggccctaggcataggcgggctaggcccgtgcctagggtccacactttccgggggcccaaaataaaaaataaaaaaattattaggcttttatttaagtaaaatttaagtgtattataagcaacaaatatttatagtttagttggttgaggtagagggcataatgttcaaggtcatgggttcaaatctcataatactcttcttttatatttttttttatatattttgtagggccccgaaaactttaattcatctttgggccatataattttctagggccgaccctcggacgatatgggttcgaggtcgggccagggttgggagtctgagagttgggacccaagtctggggtcggggccggggccgagggtaaaggagctagggcgttgagtctgtggtcggggcgtgggtcgaagccagggttaggggtccgggcgtccgaagtccgggattagggcgttaggcagtggtttgtgttcggggtcggaggcaggggtccgagtatcagggtcgtggtcagaggtctgatgttggaatcgtggccgaggtgactggggtctagcactagggttggggtcggaggcccaaggtctttggtagggaccagggatctgggtgtcgagatccaatgctgggggctggggttcgacacaggggtctgaggttgggggccttcat

SEQ ID NO: 180170 - DNA, 514 bp, Cannabis indica
aaatgagtcgttggataagattattaacttcctaattaaacgcaagtaataatgctgtcattttgggtagaggaataattggatccaacggtggagatcatttcatggctgctgctggtgggagtttgtttcggtacggtcgtgcctatggaaagctttctgaaccaacctattatggcttctgcagatgtttttgatcagtactaaacttaataatttaattaatccatgatgggtttaattttctgggatttccatggttaagaacttaaggataaaaaaaaaatattgggtttaatatatatatatatatatgaggaaatttttttactagaatccttatctgttttggtatttaaaaaattttgtagtataacttttattcatgatcacgtacattacgttatttaaaatcgctaaatatatagtttacagtgccaaaaataaatagttgtgcatacaacaaaatatgtaaatcttatttcagcattgtaaactcaaattttttaaaaaa

SEQ ID NO: 180171 - DNA, 660 bp, Cannabis indica
gctacaaatcatgtaactgataagcatttacgtttggagacacttggtgctgtatccttttttctccccctctttctattttatttattttatattagagagggtattggatcacttatatttctttccttagctccttaactccctgaagatatcttctctggctgaaaacaccagcactaaagttgtttttaatgatgtattggctatggctggaagggatatagtgacaaaggacatatcccgactgcggggtgggtggccaatgcaggatgcgtttcatgtgagttttttagtacattttgtggactacaatatgtcattaattctcaattccttaagtgaatcataattttactaattctgttgaagctccttttggttggaccagtttggaagataaatctttatttatatatttgtctatttaaaattaaaaaaaaaaaatccatcactgaactctgcaaagtactgtgttggaggaaaacattgcattattcataattgcatcaaaagggttgacacacttattttcctggtggattatagaaatgaaaatcgaaagcatcattttgttttctttcgtttgtgtcccttaggcattttcccagcatacaacactttcttttctgtttctcgagcacgtcactcggcgtcctt

SEQ ID NO: 180172 - DNA, 745 bp, Cannabis indica
agaaagcctattgccatgtacgactacatcagaatataaagtgccaaagggcacctaaacatggacgaagttagataacttgacaaaataataccatcaacagatgtgcatttctatacactattataccaaaacgacagattcagaatgcagcttacgactctgcttgaggaggttccggagcaagttctgaatcattttgagcaggtgctgagtcattttgagcaggttccggggcaagttctgcatcaatttcagcaggctccgcgtccattggagcaagctctgagtccttttgagcaagtttcgtgttctctagagctagttctatgtccatttcaacagcttcttgggcaggctctaagtccctttccacagattcaggagcaagttccaagtccttttcagcagattctcgagcaagctctgagtccttttgagcagattctgctgcaagttctgagtccttttgagcatattctggagcagcttctgagtccttttgagcagattctggagcaagtcctgagacttcttgaggaggttccgagactttttgagcaagttccaagtcattggaagcaggttctatgtttctgacacctgcggcttgcaaaagctccttcaggagttttgttcattctccaaattcacacttgtggccaatgcatcacactctccaaattacctgtgaactcgcaagccaccaatctccaaagttataaccctcatctcaatttcgagc

SEQ ID NO: 180173 - DNA, 802 bp, Cannabis indica
cgagacggattcatcttcctccattgacagattctcaaaggatttttctagagatcgaagtcgagccctttttaacagcatcagttccctcattcttgattttcagcttttcccaagcatctttggcaacttcgcaattttgagattacttttagctgatttgtagagacagcattgaagagggcatgtaacgctttggaattgaaattagctcgttccatttcgtcagttgtccattcactggatttcttgatcttatctccttcatcgtcaataataataggaggtgaccagccttcggcaacagccatccagactctttcatccacagccttcaagaaagctctcatcttcgtcttccagtagggataattagacccttccagcatgggaggtctggaagttgatcctccttctctgaaaatttccatttctagtagatctgcacacacttaacaaggaaactctgttgcacaacgagatgagactcgtagtgggtcagttttccagaaaatcacagaaagaacagattagcagaggaactttatagaagatcagaaattaggacaaattcaagatcacaatttctttacatgaaaaagttagctctgataccaattgaaagtcctaattactacaagatctaattgataattctcaactgattaattctatgctatgaacataatttaaaatcacagaacacagaatttacaagcttcctttgcattggaaacgcactccaaccaagtagtgcttgggttcccttgaaccgggtacagtaacttccactataaaatca

SEQ ID NO: 180174 - DNA, 1081 bp, Cannabis indica
gtatttctctccattgatatcaattctttggttttgtattttggattttgtcgtttagactacggttttaaaagaaaaaaattaataaatctattttgtattttttttattaaaaattaaaattagattatattatttacatattttaattaattaatatataaagtcatttaattaaaaataaaaaaattaaatattttcatattaaatattaagagtcacaaatattaccatattattaaattaagactacttactaaaagagtaaagcgagtgttcataaaacatcaataaatataaaatcgatagtttataaaactaaaataaaaaaaaaaaattaaaaagaaaatttgtagtagtgtcgtcatcatcactctctaggaacatctggcatctgtagatagtctggcggcatctgtgaactcgtcatcatctaagatgtctacttcccatgtggtgttggcatcatataagatgtatgttgtccatgttgtgtcaacatcatttgagatgtatgttgtccatgttgtgtctgtaatatctgtgatgtctgctgcccatattgctacccttgtggtgtcgatatcatctaaatagtttgcggcatctgtgacattttttgtgtcgacatcatttgtggcatttgagattctaagacctgagacgtctaaggcgactacgtcatcatctgcatcattacttgcgaatcaagatgcacgtagtagattaagaatacactagcttctagacggataaaggagtgtactgttacattgtcatgccattagggctaaagaactgtggagcaacatatcaaagattggtcaacaaagtgttcaaacatgtcctaggaaagacatgaaagtatatgtggatgatatgatggtaaattccaaaaccttaggagagtatagcggtgattaggaagaagccttcactgtcatttggaagtatggcatgaagcttaatcctaagaagtgcatctttagattttgaagttcttaggcttcatcatcagctctcgaggataaaagttaatccataaaaaattcaagccctcctaggtattccatctcccaag

SEQ ID NO: 180175 - DNA, 745 bp, Cannabis indica
attccaaaatttctttagtttcataggaataattttttatacaaacaaactatatcgagtcagttacaattcgtgataaaagagacgacaactagtagaggcaagaggtggaaaacggcgttgagaaacatatcatgccttgagagtataaacttcttcaataataaaatatatgcctacatggttggccaaaaatatttgttgatgctcaaataatatagtaataggtagtatatataacatagatagtgattacgtattaaatatgagaatataaagagaatgtgataataataatcataataacaataatacatatttaatttgatataggagttataaaatgaaaagacatattatcattttatttcaattaatataaaaataaatgttaaataaaaaaaacaaaaaattaagacattagactaaatagaacattagaagaagagaatgccacatcatctctatcaaaaccctcctttatataaatatatatatatatatatatatatatattgattaagattttttgagatatcacaaacttggtaggattcaaacaccatctgtggttccaaagtcaacctggagtagggctagggacccgtcacaggtcgactgtatgacccgagactactcaactccgtaaatattttttttctttgtccacgttgttaaacattgatgtccatattatcagggctaattttcatctaatcatcaacataatcccatacaaaaataa

SEQ ID NO: 180176 - DNA, 627 bp, Cannabis indica
tcatcgggtcaaatttttgggtaaacgaactcaaattaattttcttttcttataggtttaaaattgcacctataaatattaaaaatattaaaaataatatatttttcattaatttttttcaatttttgatttttttgctttattaatttatattttatattaaatttatgtatttgaatttatttttattttataattttttaaaagataatgaatatctttatattttttccttaacatgaaaatttattttagaataatatattttctttttttaaaaaaaaactaaaaaagtaagtgtaagtcttaggaaaatataatttttaataaaaatagggtgtcttaattaaataatcatagtaaaaaatcactatgtccataaagataggaggtaaactaatacttactttgctaaatagaggacagaataatactatgttaaaagtgagtggatagattaccagatggaaaaaatcaagaggcaaatccactaattattcaaagaattattattttctgtttgaatagtttttagttatttatttttcttttaataaatttttagggcttttttatttttactactttaaaaaagttagttttttttttttgtaatttttacggtaa

SEQ ID NO: 180177 - DNA, 590 bp, Cannabis indica
aaaaattaccaaattatcaaacacataaacttaaaatttaatctcatctcaaaaaaaaaaaaacttaaaatttaatcctatgttaataaaaaatccaacaaaagaggattagttttgttaaacacaaaaacttaaaattaaattaaatacaaaattaaattcaaaatctaaaatatcttagaacataaaatccctaacccctaaaatcaccttctcttccccttcacttctgcgagcctctcttctcgacaacctgcaaaccaaggcctgccaagacccgtttaactagatgaatatacatataagagagatatatgaagatatatattataaatgcagagcattaatttagaactcatatcatattttgctatttattattatctgcttatgaaaacttatagtagtaatatatatgtagttgaaactaaaatatcaattatagctagactgacaacagttccaaaacaccatatactcccagaaaaaaaaatacaaaaacccaaaaaaaaaaaagaatacagaaacccagaaaagaaattcaaaaaacccaagtgaaaaatacaaaaaaaaaaaaaaacaaaaactac

SEQ ID NO: 180178 - DNA, 640 bp, Cannabis indica
acacttagctacctgtaaatgatgtttagtgatctaagaattagtcacttaaacaagagctcatacattcgaaactagtatactttactaatgtcctagaaagaacataacacttactccaagtgtaagtacacatcatcgctgattatcacattagtgtaaatccaaaacactgatgaaacagggacttagtcttttgattcatatgatcacaatcacattccactgtgttgacgatactgtaattgtgaataaacatatgatctggatttaactgattttgtgtgtaaatgtaataaacatattaaaccattagcatgtaaaattcatgcaaacataaatcacttcaaatttcttatattgataactaatcagattgtaaagagttttatttagggcataaaacccaacacttactatttgtgtttgtattgtgagttgatggatttggattttagaatatcgagcttgtttttcctttagatttagaatataaaattatggacctggttgtgctactgctacctactcttatgtgtatttttttttttttgtcatttaatattttgtatgaatattaataattttaactataaaaataagtggctgatttttttagtttccttaactttttttagtt

SEQ ID NO: 180179 - DNA, 606 bp, Cannabis indica
tggtgcttgaggtggttcattgatccctccatcatctcggccttggccttggcctcgacctcgacctcgacctcgacccactctaactgaccttctaggaggcatttctaaactcctgaaccacacaaaccaatacacatcaagatcattttgatcatcaattttacatgaaaataatgttaccctctcgcatgcagaaatttaaggcaacttaattataagtaataaccacttacagtacagtgagtcgagctcgtctcatggcggtgaactttacatgttagggctaaccacattctttaggaccgtattgctctgataccatattgtaacaccccgatttcccgagatgtcacataggatagtccgtataaaacaatttaataagataaagacaatcaaatacttctttattgaaaaatatccaagcatgagatctcattgtttaaaacaaaatacttttagtactgtaaacttaaataagaactagttaagtcaaaataatagttccaaaatgtttagcagttaaaaacattaaaagcaaaatactgtgccagccccctaacatgcggtccacgcctcgagctcttcattctcactgcttag

SEQ ID NO: 180180 - DNA, 611 bp, Cannabis indica
ctagctgttgatcattgctgactttttattcaccaaaaaacactgtctaataatataatggtaattatagtgttatataatttatactctgtagtacaagcagtactgtcctatatataaaaatttaaaaattaatgattattatttaataacagtgagaaaatgtatgttttgaaattaaaattaattaccagaagaagggtacttgttctctttgtcagagatggagttgttgctgttattattagctgaatctaataatttagtataagaataataagatgaagatgaatcaagtgatgatttttctcttctgatatggatgatactgttttcatctcctctctgtttaaaattatcccacctgagattattaccaaaattaaaaatataattaatatgttattatacaaaattaaacacatataataataagagtttttttcatttttatatttaaagtaattttttttttttagtattttataaaaatccacgtagcaatgaacaacttaaattgcaaacaccaaactctatagagcaactaaattttttaaaaaatagtaataatacacattatataaatactgaccattatgagtcatgaaatt

SEQ ID NO: 180181 - DNA, 733 bp, Cannabis indica
agatttccggtggtcttgacacaccaggctgggtgggaacattgttatacatctctgaaattaaacaaatgcacgcataaaaagaaagaagcatatttgaatcaggagaagctaacattattttctttcaaaatcaattgcaacacatctaagaatcaagatactaacaccaacagacggtatgaacaagagaaaagtagtcaggcatcttcattttttcagtcaacatctatattttgatatgaaaaaaataaaactcacaaggatttgctttggcaagtttggcaacacattttttttgggtgaaacgtaaaggttgagaagtattcaaaatgttgttcgagagaaatccatcatccacttcacttttaaaagcaaaacagaaatcatacatttgcgagcaggttctaaattctacaattatacctagtttcatatatacagccgaccatggtaaaaataccaccagattatttatcctctaattccattgagccattcaattcaatactttaccttttaaaaaataaaaatgtacattccctacgagccaagaaagaaaaaacaaaagcaatccaacccataacttgcatcgattttcttcaaagagggaaaccaaaaaaattcagaaagcctggaatatataaaaaccaatcaaagagactcaaacctaagccatcaaaaaaaaatcatttcttttgattggcctatcgcctgtactgaaaagataacg

SEQ ID NO: 180182 - DNA, 688 bp, Cannabis indica
ttgcaagaaatttggactttaaaacgattgtttgtatgttctttggatggtatcatgttgtattgagtgttatttgatgattgattgatgtttgtgaaattttcgtgaaaaataattgtgatttcgtttctggaattatttttattggatagtatggaaaaaattaagcaagttagccttttacagaactcaatttggattttatttgaattagttatgattttttgaagatttgacaaaatcggggctgtgctgatattttttccccgtgacgtcgtccgacgaaacgtaacgttccggttacccgtaacgtttacggtttaacgttttttaacttttttttttttccctttttttttaccttaactttttaactttttactaactcgttttacctttttactaggtaaggttaaaacttttaacccttaaccttttttaagtttttttggttaggtttacgtttcgttagttttaattttaactaactttaacttttaactttacctttaacctttaacttaacttaactttaactttaaatttactactaaatttaaaaatttttaaaatttttaaatttaaatttttttaaaagttttttttaaaaagttttaacttactagtagtaatttaagtttaggttaagttttaagtttaagtttaaaaaaaattttaaaaaagttaa

SEQ ID NO: 180183 - DNA, 832 bp, Cannabis indica
agtatgaccagcagccggagtatgaccggttcgaccgatcaggaggatacttgtcaatagtaccgtcccctgaacgttcaaaactcagtaccatgttggacatggcagtagtggctcagtaccatgttggacatggcagtagcgggactcagtatcgtgttggacacggcagttagttttatgtatgatattattatgcttttcttactgagtctgtcgactcacagtttatgttcatgtgtaggtaaaggcaaggctgtagctgatggaccgtgagcgagcttatgagattgtacatgtcggggcggttaggcctggagcgtacgatcctcgggacagcaaggctgagattttgtaactggtcgttagacgacttttattttgatgtaaaagttaaacagttaaaacgtttgtaaatgattttataaatcgggatcccgagtcttttgtaatatggtttataagtttaattaaaaagcaaaattttaattaatcacgtttttccataaacctcgttgattagcaacgagctgcacagtacgtttaaaaatcacgtaatacgcctaagatagttagggtgttacaatactgatatagtagtcatcaattcgtactttactgtattgccaaatatatatattgctggtatctaggtgtaattctatgtaaactaataccgcccttactgatatattatctaattgacaatatttactatctgatacgctatcggtatctaatgtaactttatgtatatacatacatactcctatctctaagtatactagataagtggtaatataaaatatatatgtatatcgtaaaaactatg

SEQ ID NO: 180184 - DNA, 746 bp, Cannabis indica
ttaaactaataatagtaaattaatatatgaaaaaaaaatctaaaacggaggacgtcgttgagccgaaccgaaccactctcagacgactgctcttgaatccctcacagaacaagacattgatgtgggaatgagaaaaactttggcatcaatcaagacgatcaatacaatagtcttctccttctgtaatatcttgtcctcaagtttattgtctataccattgcttcaggcttatcgaaaaactctctaatttagactgtgtgtgcatgaattctttgagcgtacagtagagagaaagattgaacagagtttttcagcaatagaagacttttaaacgatttgaaagagatagcagcgagtgagagaagtttacaaagaagtatttttttttttttagatattggggatcaactaatttaggcaatttgataaatctatgttttactacaaaaaaaaaaaaaaaaaaaaaacgataaaattaaacatattaaaaatatcagacaaaataaatgttaaaatttaaattatgaataaagataaaaattgcaatattttttaaaaagaaaaataagaatcgaaaaaggcaaaatactttaaattaaatataagtaaataaaacaaaaaaaaattaaaataaatctatacatgacacaaaaaaacaaaacgagttgttatatatccaatcttctatattacttatagatataaaaaattaattatgaattcatcatgttttaaaaaaggaaata

SEQ ID NO: 180185 - DNA, 748 bp, Cannabis indica
cttttcaaatatgatgaattgcaattatgtgctttaaatgtgggagattgagcatggtttaaagatagcaacaaaaaaccaatcaagattactatggatgagaatgaagaggtagctgcgtatggagtttggttgaaggcggataatgggtgtagatatggatttcaagaaaaaagacttggcacggagcaatatgatcttcaaggagaacctgtgaatcagaaaatcaatggattggagaatgtcactaaagtctccaacccatttggaccattggagaaaacgatgggggttgaacaaatgataaccgagctagaaatccaacaagaattaaggattcagaatgataaggggggacaaagagcaatgctacagaaccaagaacatagctcaggtcatagagagccgaggggataaggaaacagtgcaagaggatggaggcaaagccaaacgaagactggtggaggacttggaaggggtaggatatggaaagctgaaaaaaaaaccaacacttctctgtacaacgagatgcaggaaaaaggcctttacgacatcccaatctcttatgcagaagaagcttaattcttgagcgaagcaaaggcttttgtggtaggcagtggctcaaaggacgtagctaataaagaaaatagaaggaaggtttcagtgaagaaggattcaaaggcaaaaaaggggaagatagagggtaaggtggctggagcttttcaggaaggagattcggtagcaacac

SEQ ID NO: 180186 - DNA, 729 bp, Cannabis indica
aacataattagttaggtaaataatttactcttgcaagctaacaaagagcaagaatagtcgaaaaaaaaaaaaaagaggggggggccgggaggggttaaatcaactatccttattcctaatagagtttaagctaaaagattgacaaaacacaataaaggcttcgaatttgtacttctttgaattcaaactaaatttatttgtgtatttatattaaaagtaataatacatatgtaattttaatttatatactaattccacctataaatatttttaagtaggaacgatatgtaatataattttaagagtaaaattaattatatattataatgtctaattttttcgtgtacaaaagtggatcaatcattactattacttttatattagaaagtaaaattaggattaaccataaagaattaagatcaaagtacaagttttaaagcttgaaaaaaaaggagtttttgtaactatattttgctttttatgaaaggaagtttgattaccaatattagagagcaaagactcatgattggagcgcgtagaatactatccaacaaatcaactcatgaatagaaagagaggggaaaaaagtaaaaaggtataggaagtctaccaaagtagaatgattacacagatgacccatgagatcatgaacaatctgacattttttaataaagtcaaataagttgcctcttctttttaattttttcctacatctctcagaaaaaaccg

SEQ ID NO: 180187 - DNA, 1097 bp, Cannabis indica
agcaaaaaaataaaaagaggaacgatgttactgaatgaaagttctgggttgagtcgcggactaggtcactttctctaagatgttcgcggcacatcggaaccccactacactgtagcaccgtcgaatacacctaaaaattaatgatatcaagtgtgtgagtcctcacccataagcacaaaactggataccccttggggcccaaactcaaatgccaaagttgcattctatatacccttgtaaataagggtttatatcccatgttggactctttccacttcacacactaaaatacttctatattttgttaaaatattcattgagcaagtttagttatcgcttcatttgtcgtgtaccatacgctcccttccaagtctccaacgatgactccagcacaccaggtgctaaaattgttacaaacatggctaatcataaactttccacaattgtcagtgttgttgagcttttaggcatatgttgggaggcacgacgtagccgcattggtggggaaaattgaaggattaacgaagtttgaaaaaacaccaaaatattgacattatttttcgtcaattataatttgatcaaaattgttagaggcaagacacgaggattatagtggttcggcccatacataagtgatctacgtctactcttgagttttgtttaatatcaaattgaattttgatagcatttctgcgcgcctaaaaaaatgtcactttcactttatcacaaccctcttctttaaaaagtggttggagctctttgtttcaaatcaagagtattgttacctaaatagtgaattgtactgccaatattcaaattcagataactgcattaaatatcattaaccagacttcttattttaattctttttgactcgatagaagagtaattagaacataagttaaaacaactctataacatctcatggaaatgcagaccaatgatttagagcactttaatgaagaataataaccgcaaaaagtaccatagaaaacaatgaacatgattttaattaatttttggaactgttgttagctgcggaggcttttgctgtagggcccaaagaagttgaaattgcgaagaagcatattgtctct

SEQ ID NO: 180188 - DNA, 565 bp, Cannabis indica
aataaattaaataaatgataattaattatattgtgtcctactattgttagtactttggacttgccgggacaggtttttgtcattcaagaaatcgttctaataaattcctagaaatgccgttggattggaggcatgatgataccaaaaaaaaaaaaaaaaaaaaaaaaacaaacaaaaaacaaatggttgtttctatttgtctaaataatttgatacataagtggtatgaaatttttttaacatgtcttagatttagattatgttatcccaaaatacattaataatttattttgttgtataattggtaaagagaatataatatcaataatatttcacacagattggtatcctcattcatttttccacatataatatttcattggaacattttgtatttctaaaagattggcattggcactagtttgcttgacttgtataaaaagattatgaaatgtaagaaagaagcattattagctgaatatccacataatgtcaaacttgaaaataaattttgaaagcaagttcaaagaaggtttccaatggttttgttattcagttagagacc

SEQ ID NO: 180189 - DNA, 704 bp, Cannabis indica
atagcatacgaaaaaatatatattacttccataaaaaaaaatgacacaacttttaaataaaagtaaattcaataaatagatgtacaatatttaaatatgcttctaaaactaaaatatattatatgtattatataattttgtttgtcaagtaaaaaaaaaactataaattagtcaataaaaatatgagaaatatgaaaatggtgtgtagcaaaagataatttaggtaatcaataatatcaaaggttcatttccccattaattttaagatgaggatatttagctccattataccatgtttatggcaccttgtattttccttagatacctcactggtatgaaggcatacaagctccttgatctaaacacaaacaataatttcatttcaatagatgtttatttttattagcagatttttctttttgttaagacaagaggagtacctgctgcatatgagaattttttttctcaaaatattcataatcatactgatgctcagccattacataatgaacaacctgtttcttctaatgaatctctacctgtgtctacccctaatcctatacatatgcctttccctactcaatgtaaatcaggtagacacatcaacaagccctcatatttgaatgcttacattgttattttggtaattaaccctactgctttgtcttctcatggttctttgataactccttatcctttgtctc

SEQ ID NO: 180190 - DNA, 546 bp, Cannabis indica
taggtgacgtatataatttgctaagaacaccagcacagagttcatcttcacttcgaattcgttttcagctggcctcgcactcgatcttagacactgtactcttaagtactgggtaatgaattgattgcagaagttgaaataagcatatttgatatcaaactgcatatcataccctgccaatgccataagattcatacctcagcattgtataattggagttaacagtcaaagttaaaatattgaaaagagagtttgaactatacaataatttacggcaataactcgcccattatcatctggactttgtctaacatgatgaaaccacatgcttggcctgcataaatcccagaagtaccaagcctttcaaaacccatcatacaataagctggaaaatgatattgaatgtaatagacagttcaaacaaatcattccaagttagaacataagccttaaagagccaataaaaccaaagggttcagttttccacactgtagaaaaacctgagtcacttggattctttagaagataggcaacaatgttccatct

SEQ ID NO: 180191 - DNA, 541 bp, Cannabis indica
aggtttagtagagagccagtattatgtttggaaagagaaaaaattttacatgagaaaataaaaacagaagaagagaaaaccttcatttgagacatgatgtcatagagctggtttttggtcattccagtaagattggatggtaagccatcgcctgagatttgtcttcctgccattgtcgcaactcaccgggtcgagggaaaaaatgagagaggaaaaggaggagcaaactgcgaatcagaggtggtggccggaagtggccgggctagcagtagacagcggaggaggagggctttgatttcagtcaacggtaaagggagagcagaatcggccattggagagtgtcagtagactcaaccatcgaagagagaaagtatctggttggtttgtttggaaagagagagtaaatcctaatgcattttattttaaagggaaatttgcggcaaaagttctcaaaatgttcactttgttacagattagtcctcaagatcgagaaatagcggcaatagtcctcaaggtcgcactctttgtaagtccgttagtc

SEQ ID NO: 180192 - DNA, 1188 bp, Cannabis indica
atagtactttaactgcaagaaaatctcttttatctcaaaaatactcttcatgttctagccataataaagaatttaataagtatttctaaatttactcgtgacaataatgtcactgttgaattcactcgtgatttgtcttttgtcaaggataatgactcgaggatccctctttcccaaattctatagtcactagatccatcaaacctaccaatattgacttttatgttactcgtgttaacaaattcaaaattaattaaaaattcattttgagaagacttagttgattgtccaatgggacaacctcaaactcctttagatcaagaactccttcttaagggtatacttccttctgtattgatcaccttcttttctttcttgcgagttattcttgttgatctgctcaactctaataccactataagaattttacagatttaaccctacacaactcatacacacgaatcaacacattatttttgaaatgtggatgaagaggagaaacatgttttctttctataaatttccttttattttttttaagtttttgagtttaacaataccaattttcttttgcagtgatgaacaaacttcaaaatcaaagcaaacacaatggagttaaaattgaaacacaatcaagtaaggtcaagaacttaagttgtgcagagtaaagaacaaggaacaaagaaaatttcaaaagaggtgagagaagagaatacaaattaacatagtaattttacatggttcaccacttgattttggggctacgtccttggtgagctacctcagagaagctcacatagaatttactataatcaagatgaagattacacggtgttgagaagattcaaagtcacacagattgactaataatcttctacttcacactcaagtacgaaattctcctttctgtacaatttttttctttctagatctcttcaatccttttctttctctctctaactctcttctactactactctttgcacacgagagtttctctcactaggttctcactctagctttcttctagatctagagagaagaatattttcaagtggtaagtctcttcttctgatcttctttctattatgatgtagagttagttgagttgaaatggtagttagtaaataacttagttaatgttgattgcagtaagttgttatggctgttgagtctagtagattagaa

SEQ ID NO: 180193 - DNA, 1106 bp, Cannabis indica
aatatcgacttttatgttactcatgttaacaaattcagaattaattaaaaattcattttgagaagacttagtttgattgtccaatgggacatcctcaaactcctttagatcaagaactccttcttaagggtatacttccttctgtattgatcaccttctcttctttcttgcgagttattcttgttgatctgctcaactctaataccactataagaattttacagatttaaccctacacaactcatacacacgaatcaacacattatttttgaaatgtggatgaagaggagaaacatgttttcttctataagtttcctttttatttttttagtttctgtagtttaacaactaacctaatttttcttttgcagtgatggacaaacttacgaaatacaaagacaaacacaatggaagttaaattagaaacataatcaaagtaaatacaagaacttaagttgtgcagagtaaagaacaaggaacaaagtaaaatttaaagaggtgagagaagagaatacaaattaacatagtaatttacatggttcaccacttgagttttgggctgcgtccttggtgagctacctcagaaaagctcacatagaatttactataatcaagatcaagattacacggtgtcgagaagattcaaagtcacacagattgactaataatcttctacttcacactcaagtacgaattctcctttctgtactattttttcttctagatctcttcaatccttttcttctctctctaactctcttctactactactctttgcacacgagagtttctctcactaggttctcactctagctttcttctagatctagagagaagaatattttcaagtggtaagtctcttcttctgatcttctttctatttatagatgtagagttagttgagttgaaatggtagttagtaaaataacttagttaatgttgattgcagaagttgttatggctgttgagtctagtagattagaatctaactgattttttgttgtatgttgaaacatattggcttatatgaggaattatttcaacactttatattttgccataaccttatacataataacaatctacaaatttttataattttgggg

SEQ ID NO: 180194 - DNA, 698 bp, Cannabis indica
tgaacaccacattttgtgctatataaaccctgccttgactgtttatttattgtatgaggaatactccaaaaatagcactgttgggatctcatatccattttgtgagagttataaggcctcagtgaaggaagcaagcacaaccaaagggtgttaagattgtatagttaggttgctgcccgaaaagacactcaaaaggattgatgttagatagaacaagtgtcggttacttgtttattgtaaaagtggcacatgagaaggcatgccaccaatatgtttgatctaaaccatcctgagcaagtaaggtaaagcctatttcagttacatgtctatgttttctctctgcatgaccattttgctcatgagtgtgaaggcaaagatgactaaacataatgccttgatcaaccaaaatttttgcaaaaggcttgtactcaccccatccatctgcttgaacacttttaattgggagaccaaactgctttttcaccatacttttgaacctgatgaacatgtcaaaagcttgagatttaagtattagagggtatatttatgaaaacttgttgaagtcatccataaagagtatgtattacttgaatccatctatagaggctatatgagatggtccccataaatcaatgtgaatcaattcaaggggttggctaccatggctggcgtgactgtatgataatggaaaaaagtaa

SEQ ID NO: 180195 - DNA, 678 bp, Cannabis indica
aggatgttgtgtggagggtagttcttttgtggtggtgtctggtgtgatgtctagagaggtttgtggggctagtggtgttgtaggtctttgtgtatcatgaggtaatgactgatgtataggtggttcaacaataggttgggtaatatttaatgatgcagatcctgttggagtgggtggtggagatgatgaggttgtctcaatagccccagatgttgtagaagtagtcacaacatgaacaaaactagaattaatagtgttggtattgaaactagcagtaggcaaagtaaatgtgttgtggtgagagtgtacctaaccattagaggaggcttgagtagtgtgagttccagggtaaaatgattcattgaacaccacattttgtgctatacaaatcctgccttgactgctttcacacaggtaacctttatggtatgaggaatacccccaaaataggcattgttgggatctcatatccattttgtgaaagttataagacctcaagtgaaggaagcaagcacaaccaaagggtgttaagattgtatagtaaggttgctgcccaaaaaagaattaaaaggattgatgttagatagaatgggtgtaggttacttgtttattgtaaaaagtggcacatgagaaggcatgccaccaatatgtttgatctaaaccatcctgagcaagtaa

SEQ ID NO: 180196 - DNA, 529 bp, Cannabis indica
atatgccctttctttattatatttttaactttttctttatatagctcggaaagaaaaaaaaaataacacttggtacagatcattttccttatgattttggttgttttgtatagttctagagactacgtggtaactataagagtcttatacttcacgctattttaatttgggttagtcaataattgcacctctgagaattcccatccaattaaagatggtaccgctaaaatgaggagctgacgggatttgaacccttaactcaaataaagaaaggatgccaataaaaatttaccttactactacaccacacaactcgtggtgttttcttatatagctttgttttggttcagaatgcatataccaataataataaataataacacaaaagaacagaatcttccttaactaaaaatctaatccacaaaaaaaataaatcatgtgtgtcacaatctctctttatgttttggccaactcaactattactcaaccacttactaatcatcatcatcatcatcatagagatttaaag

SEQ ID NO: 180197 - DNA, 894 bp, Cannabis indica
gattaagcggttccactttttaaatttattttaagataatctcgaactcctataatacttgtgtttgagattcttaacttcaactcgatcctctcaactaaacttcaccgtaaaactcttacacactaaacttattattagtttataagtattgttataaagtaccagtagtgcctaacattatctaaagatgacgtcttataattaattagcgatattttatatagttagtaaattaaattagataggacccgatatttaattataccaataattatatgacaactaatataaaatatcttttaacatttttaatagtttattttataacacttaattttctaagcaaatatttgatgagaaaagtcttttattaatattattaagaatttgttgcaattcattccttatatacaaaagtcaagtgtcaagtttaactatgtcaaaagtcgtgttaaatttaattaactataaaatgtcgaatgtcacatgttacattatatattagtccaaatatttatatatatatatagatatataaatatatatatatattttgaatgatccaaaaataatttttaaaataattattatgaaaaaccatttaagttatatttaaatattaaacaatttaaaaatgaactaaagaatataaagtttaaatatttgaatattttgtttttatcttgaaaaaaaataacaaaaataaataaataaactaaatgttcaaatattagttcaatattatttttccttgatttaagaataaaattatattctttcaaggacttttttcattgtatatactaaaataataaaaatattatacatatacatttggtcggccctataaacatttatacagtcaaccctgaattatgattaaaatcgaag

SEQ ID NO: 180198 - DNA, 625 bp, Cannabis indica
ttgaacactcactaatctttattattatttaaatgagtattaaaaattgaacactcactaatcttcatttgacccgaagaattaataggggagttgtacaattgatctttgggaaatttacacccactactgttttttcccaatttattacttttatactgttgtacggcaaatacaacctttttactgtttttttttttttttggtcagtttactgcctttaaaactttagcttatttatttattttttttattttaagtgataaaaaaatgatgtgactgggaattgtcacatcattggcagctttttttttttttttctttttcttttaattcaatttaatcatcatatcaatacaattactctctttcacaccacgtttttatacctactatcccatttaattattcatcttcttcttcttatgttcttcttcttcttcttcttcttctttttttttttaaaaaaaaaacacatccagttttgtcttagggtcaaattttttgtggttattctctcttcttatgtgtttaccaatctctcttctccattattctctcttactattcatcatcttcttcatttttttcactctctacttcctcaagttctctctatttctct

SEQ ID NO: 180199 - DNA, 895 bp, Cannabis indica
aattatcaaggtattaactctgcaatcagtcttcacaagcttctgtagctttgattaacttaatttatcatgattcatgactacaggcttgggatcacgctgttggcatgatatgtgttcatgaagctggtggaaaggtatctcccctaaccaccatttttatcttaaacttgaatttgtgtatttttgtcatttacagttatgactttcatttctatgtgagttttgtagtgagtaacctattacaaagtcaagttgaattgattaaatttagagacttagacttatgtattcctcctagttctatacagttcccaatgtttgccaaaatatttttaaggaagctaggctgttaggtttggactttacctgagaccggtggctattggaggcatataagaaaatacatgccttttttgtttctttttttttttaaaggttaaagcatatgtctgcaataaattctaaataactatggttataagactatcactaataggctaggcatgtacgtacaagtgacatcttattcaagtagataatattgtgagggataataagttgaatgtggacatatatgtcatgaaatatgtcatcacaaggaatctagccccttcttaagtaacacctccatttaaaaaagataatgaaaataactcagcagaagtaatagacaattaggacagtggtgatgaatgagagagaaagtaggagtgttggcattgtcacttgattaactgatggggatgttttggctttattttgaagcagtgctcatcaatcactgctctaacctctaaatccccttcccctctaataagaggatgtcatatggggataaaaactactgctcaaacaaaaagtttccacatattgctgttaatctgtgggcgaa

SEQ ID NO: 180200 - DNA, 801 bp, Cannabis indica
gtcgaactgactcagctccatcgcccacttgaggagtcttccggatgcttcaggcttctggagaacttgccggagtggatgattggtcaagattctgatcggatgggcttggaagtatggtctcaacttccttgatgccatcaggaggcagaatactaatttttcaataaccgggtaccttgtctcggcccctaccatgcgcttactaacatagtacacggggtgctgaattttttcttcctcccggaccagtgcagcactgaccgcatgctcggagacggccaagtaaaggaacaagtcttctccaaggacgggttttgataggataggaggtttggccatgtggtcttttaaccttttgaatgcctcctcgcattcatctgtccattcgaacttttggcatttcttcagtatgttgaagaagggtatgcacttgtccgtggatcgtgagataaagcggctcagtgcggctacctttccggtcaaactctgcacgtccttatgtttcttgggggatggcatgtccaggagagcttggattttctccgggttcgcctcgatccccctttggctgactatgaagcccaggaattttcccgacttgaccccgaaggtgcattttttcggattgagcttcatgccgtatctccggacgacttcgaaacattcctctaagtcgcttgcatggctgttgcatgctttggatttgacgagcatgtcgtctacatatacctccatgtttcgtcccaggaggcttttttaaaacatccgggtttaaaccattctttgataggttgctcc

SEQ ID NO: 180201 - DNA, 611 bp, Cannabis indica
agggattcaacaacctcaaattcatccccagaaattggaacgttattcaatccaatcacctacagcacacagacaataatagttaggctaatgtaaagagtagatgctttttgtgggtgggtggtgggtgtgggtgttaataatgtgatcatagaaagcattggtatctttaaaattttgttaagcagatgaatcaactccaacaaaaattgaactaaacttatgaaatttgtaactaattttattctttaatggtaattcattaataattttaaatgatgataaacaatacgaagttacaatgtttagcacaaactacttaaattctagatcatcatcaatttgtttcagagtagtaacaacagaaaactatctagcataatcaatcaaaacaaaccttgcgtgcatacatactatattttcatgcaagcgcaaagaataacatggacaagagctattggtttagaaggaaatttgataggataaaacagaaagatcagcactttaaaactagagaggtctactctctctctaccacaaaaaacccgcaatgggaaaaaaccttgtgtattaattttcatcaacttctataaagctactttcatgccaaa

SEQ ID NO: 180202 - DNA, 778 bp, Cannabis indica
aaataggaaaactcaaaaaaccaaaaactcaagtcaaggcaatatcttatgcaaataaaaacaaaaagattagtacaaaggagtccgattcactgaaagtagttcattatgaactctattccagatagccaactaaagcaaaggatatttagggaagtcgggcaaaatgtatttctgtagtcatgcagatgtagtcgaacagtttcatttcaagtaaacatattaaaatgtacataatttgtttccatgcagatgcaccatcaaacgaatagcctcagacatcagagaaaaagtaatcaatgaatcataaaagagacagtatggtggagaaagatacttccctacagcatgtgatgaagagcaggccacagacaactacatagatcattttatttgtttcaatggcaacatattagctttattgtaagatagcgtggttcgattattattgtaagggtaccctttgaaaggaagcagtgttgtagctggacttaagttcagatttaactaataatacaaatttgagaaatgattggtctaaaatcattctgagtcgttctttttccctttctcaatcccctaatttcttaagcagcatcaatataatcttcgagacaagtgcaagtaaattaaccggtaaaactataaatgaattccaaattcatgaacatgtcatcaaagcacttgctattcataatattcctgttcttacatcagtcatgttcttcaacaaacaaaccaaaacaaaaataaggtaacgaaataatactaatataca

SEQ ID NO: 180203 - DNA, 503 bp, Cannabis indica
tttgtcatccttgagtactgcatgattttcctttttattgttctttatggtgagaaaaattaaaatatgaaaaatatgaaaaaacagtttaaggtaaaataattgttttttaaaaaaaactaatatgtttgcaaaaaattatattaaaatttataaaatatgtaattttcaattgggaaatttgcagcaaaagttcccaaaaagttcacgttgatgcagattagtccccaagctccaaaaatagcggcaatagtcatcaaggtcacacttgttatttgtccgttagtcctaattttaactgagacgtttatttttttaaaattgccacgtgtcgaaatattattggtcctaattattattttaatttttaaaaataaaaataaaataaataaataaataatttaaaaatgatttttttttcttttctttttttttcccttttctttcctttcttcttcgtcttcttcttcttcttctcactgctagaagccaccggcccccaa

SEQ ID NO: 180204 - DNA, 771 bp, Cannabis indica
aataaataaatctaaaggaaataaggaatggaaagcatcaaaatgtcagataagaaaagttctcagctccaaaattttgaaagaaattactttcacctgcaaaaaaaatcctcacattttcagaaaaactaaaacaaagcgtggaaccttttcgaagcgcaaaaagaaaaaaagagcttcggagcttaaaaatgcagtcttactagaatgaaagaaaggggaaatgaaaaaagttgtaataagaacagtgaaattcccaaatgggtttaacctgaaacgatacagaaacgaaacacatgagagcacaaagatcaagaaaatacagtacagaaattggcatacccatgaagcaaaaaggctccgaagtaagaacccagatcctaaaacaaagatttgtcgggcttttcataattttagacgacagaaaagactaaatagtgaagcttgactataagggttgttgagtgatgctctgcttagtcccattgtatgcatgtgatgtggattcggaacaagtccgtacaccgcttgccaagaaacgttaaacttttgtcatttagtagattgtcgaaaacggaagaaaaaactgaaaccttctgtttcgaatgatcatccacgtgaatcgaatcgaatctcacaaatactccatttcttccacatcacactgtacacattattattatgtataaaatcagagtgccacttaaacaaagtagaaacaaaaatataatactaacttcattcatttttttttttttttttttttttatt

SEQ ID NO: 180205 - DNA, 718 bp, Cannabis indica
ccacaggcaaagtacaacacaattcatcactttcatctcagaagtgttaacgcagaatttttgttaactaataaataagcaattttgtaaataagtaataaaaaaaaataaatagaaacaataaaaacactaataatagtaataaatagcaagaggatttttgacgtggttttgaagttaatttttcatagtccacaagtccatcttatttagagatttgtaaattggatacaaaatacaataaataaattatacagaatgaaagattggtataattctctctcttcctcaaattggttgtcctatgttccctgggttttgtccctatttataggagtttagggtgactgttattcccttagaatcttatcacttgtaaccgttcgtgaaatgtagatgatccccaaaatcatatttacatcacatgggataatggcaaataacttctcataactgcttttttaacttttatctataagcagttatgctgactatgcttcatccttctcgcaatgtgaccattctccttaagatgctttatcataaatcaacatctaagtatacgtcaaatagtgcttcttgcattctttcattaatgttaagtgaggcatatgtgagacgcttatcacaatatgacaattacgaggtgaaccatgctaaagatgttctcttatctcttcaacatactcacgagtatgtgggtcaatgagctggaagc

SEQ ID NO: 180206 - DNA, 523 bp, Cannabis indica
ctgatagtgtattcagttgattgactaaaattaatttaataaaaacaaaacttagtttttacccttcctatttggttattgttgttcatccatttcttcttattgtcacttgcattcttgtttgtcaagagtttcaattggtttcaaatcaattaatttaggggtgttcggtaatagttttgtttttaattttttaattataaaattgaaagtaaaatttatatttgtataattttattttaaaaaataaaaatgtattttataaccacttttgtttttaaattttaaaaacagaaaatatagcgtgttctataatttttatttttgtattttatttaagttaggtttaagtttagaatcgggtcgaagtcgtggttcatgttcgtgattggagctgaggttggagtctgagtcccaagattcaggttagggggcgagttcaaaaatatttatttttttatttttatttttaaaaatttttaaaatttaaatttttaattaaaaagttaaaaagtgaaaatag

SEQ ID NO: 180207 - DNA, 1151 bp, Cannabis indica
acccgcttcttttatataattctaccataatgattataggttttggaaggcttggtatatctacatgaacagggtgtaattcatcgggacatcaagggtgctaatatattaacaactaaagaggtaaatttttactgtgtttgtatatgttttcaatgctgggtccacaattatatataagatgtagtcttagaaattacattcttgttttgtgcattcttgtacaatttccaatgatgtattctatcctcccagggtcttgtgaaacttgccgattttggtgtagcaacaaaattaactgaggctgatgttaacacacattctgttgttggtacaccatattggatggccccagaggtacttttctatatacttaagtgacaagatatatatatttgtaatatatatatatttcaactttatttttgtatttgttttgtgtttgttcctatatgaataccgttgttgtttatcagatcaaaactggatcaatatgacctatattatgaaaattaggtcactttagctaatattactgcaaaatttataaccaactagatgttttagtgaaatcctagtccaggtatgcagtacttaagtaaaggaacatgattttaatggtttggtatagcagttgcaagtttttttttttaagaccaacttatgatatatatatatatatatatatagacgcccattctctggttataagtagaatagttcttggttcgttctgccactcctacccaatgaatcattaggattctattttcaatagaatcttatgcactctacgggttttgtccgtccccatcatttcacaattaatgattaggtttgacctgtggatccatttgttgatgttgaaaagttacgaccctcaaatccttttgactcccaagttgcaaaacaaaattgtttagtgaggataatgactataactaactcctactaacacatttaatgtagaattataggagaaacttttgaggaatttcgtaactaaagctttctattttctaacacctatcaaaccttgtggatctcatgtgtatggattagatcaacaaggttcatgacttcacggtcattcatgtatctaaaatgtgaaaaaacttctagctacaggcatgatcttctacacaattttt

SEQ ID NO: 180208 - DNA, 733 bp, Cannabis indica
cataagccagtggctgcaattgttctcccctcaatgaaaaaagtacgtgatacagatgattctcttgcaacataagctcaagttttatggtctgttgtcataatgatgtatctgaaatgaattacacatgcaatctagccacaacttcctctttatcatttgtgtaaacgactcagtttgtgtttatatattatttggttgtgcacatgattattatatattattttaaaaaattcaaataaaataataataataataataataaattattatatttaatgttagttttacataaaatcaaaataattattcgtgtaaaaaaatatatgtattaattagtaaatataaaaaattcactctatttttgattaattaaaatgaacattcgtacatattttattattttatttattttttaaaaggaacatatatattttatcactatgttatttatttttattatgttaattatgtacacaattcgcataaaatttttgtataacgcatatacatattatcgttaataacataaaaataactcaactaaagaaaaatcgcagactaaataatatctcatttttcttttcttacaataaattgtaatattaatgctatttaaatttatttattaatttaaaaaaattattaaaatgatataattgaagagaataattcaagtctacttagtaatattttttctttgccaatatttacactagcaccaattcatttt

SEQ ID NO: 180209 - DNA, 687 bp, Cannabis indica
ttgatacatatattatcaatagagaatattataaaacagaaaataaaataatttatattatgaatattatattacatttattttttttaacaaattataatattgcactatataattaatcatatatttagtgaataattttttgatagttttacgcactgctacatatttatcaatttataataaatatttagtgaataaatataatatcattttaattagcggtttctataataacatgaatcatcatatatatatatatatataagttttaaaaaccgcgcgaagcgcggttccgttctctagttaataataaatgtgagctctcttagggactaaaaaaactgagaaattaacccaaaaaaaaaaaatactcaaccaaaagaaaagactgagttaaagtcacactaataacaaaagtgactggaaaatcactaattgttcttttaaaagttaaaaacgacaagacagagggagtggggtatcaaactagttttgtttaaaaacaaacaccactgattttgaaaaaacacaaagcgcaccaaaacttccaaacttccccgccaccgccatggccatcgatcccaaccccaccctatcatctgcctcccccgctactactccggcaattacctccgccgcttctaccaccgctccggctgcaactacgacctctacagcaaccac

SEQ ID NO: 180210 - DNA, 737 bp, Cannabis indica
aagagacatggttaattgtctagcttgcccaaaacctttagatctcttactagataggtcaaggggttcatcattaacaatatacatcaatgccttgccctttcccaagttcaagatgtcagtatggaagatgtataccagacgagaggacccactagcatacatcaagtacatcgagatgcaacttgatcttcaaaagattactggtgatgtgcggtgttggatcttcccataaaccctgtcataaacaactcagttatggtacttcaagctggctctaggaagattatattctttgaatgaattttcttgggaattctacactaaattctcatcctcgacaatgataccatcgcagctggaagaactttcgaggttaaacaatgacaaggggaacctttaaaggattatatccaaaggttcatggtcgaggccaccatgggcaaaggcctaataaaagaaggtcggcctacaaccctactgaggagtatcctccctttgagtgacttctagaaagatatttgaagagtctcaaccaaaaacgtcaaaaagttccttgacagagaagatgctttatcaagttggaagaagctgtctgacaggcccagaaagggcaagtcaatatatgcattctcagggcactggatccccaagacttgacaggtgcacaggtaggcactaacaatgccacaaaaaactctagtggcaagacactgggggaaagcgcagcacaagtg

SEQ ID NO: 180211 - DNA, 909 bp, Cannabis indica
cgaggcataaaaagagatcaaaccagatactgcaagtaccacaaagacatcgggcacacaacagacgagtgtcgtcagttgaaagatgagatagagagactcatcgcgcaaggccacttcaaacaatatatgaaaagatagggaaatggacataaccagaccaatctgcccaacaacccaggaaaccaaggattacaacctccttttgttgaaggagaggatatcatgattatctcgggagggccagatattgcaggagagggcaataacgcccaaaagaggtacgtgaaggaagtgaagaacgagcagtcagcctttgctccagaaccttccaagaaagtaaaaactcaggaaccttcgattatattttcggaggaagatgaaaaagatgtgaggtaccctcacgtcgacccattagtaatcaccatactgctcgctaacaagaggataaaaagggtgttggtggacaatggaagttcagtgaacatcctttacagggaaacactaaagaagatggggcttgaaaaagctaaattaagaccttgcatggtaaatctttgtggatttactcgcgacaatgtcgccagtcaaggaataatcgagctcgcattaaccttgggcgaaacacctttatccaccacaataatacaagactttttggttgtcgacctgccatcggcttacaatatactactgggtcgtccagtattaatcgaactaggggcagttagttcgattaagcacttatccctgaagtttcagacacaagtggctgtgggagtagtgtgagatgatcaaatgctggctcgcgaatgctatcgcatgacctatagcacaaaaaagctggtaaccagctatggcagtctgactgaaaaagcgagagacgatgaagatctgatcctcagtttc

SEQ ID NO: 180212 - DNA, 819 bp, Cannabis indica
ctaaatactatgttttagtcacaagtaatattttagtgtgactaaaagtcacatttagtcaaaaaaaaattatattgtaactaaaaatttatcactaaaaataaaattttttttatcattatgtttgttttcttgcctgcactacgctcggtttttccatttagaattacaaaatttcaacacaagtaatattgaaagagagggaagtaagattcaaagatagtaataaaatgcatgcatttcttttacaaaaatattggaatttgagataatttttacaaaaatactgtcacacggaaaaaatttcaaaaatactgtatttttataaaacacgagtagaacacaaaacaaaacaactcaaaacaacagtagaacaactaaaaaacaccagtagaacaccagtgaaaacttaatacagtatattgcagtatgaaacttataaaaaaaacactgtaaagaaaaataaaaaataccacctgatagtatttttgtaaaaaaataataaaagttaatatactatgtaaatttctccttttttattatgaaatatactctcaattacttggcacaactcatcaacatcaaggatgaagtattagtctaactaattacaaattcttacaagaaacgaaagaagaatcatgcacaaaaactttacatataataatattttgtgaattttagtgggccttacgaaaaaaaaaattaggtccttattaaaaaaatagtggttttttctaaaattaatataaagaaaaggtgtaattttaaaaagagtagcattttttggacccctaagttagatgagcactaggcgcg

SEQ ID NO: 180213 - DNA, 884 bp, Cannabis indica
aaatagacataattttttatacactttgattttttttaacaagagtactaaaatacataacactttaatagatatgcatgctcttagtaattaaatattactttatagagttagtttacgtggtgagaaaatttttgttatatggtgataaaaaaaagttaaaattgatattgtgtcaaaatttaaataatatttattttaaatttttatgaaagaaaggcctcattttaaatttcgccctaggcctctcaataccttgagacggccctgctttgttggattgagcgtagctcttattacttactttgtaagtgaatagttgggttgagcgtagctcctattacttactttgttgggttgagcgtagctcctattacttactttgtaagtgaatagttgggttgagcgtagctcctattacttactttgtaagtgaatagttgggttgagcgtaactcatatcacttactttataagcgaatattttgggttgagcgccactactacaaaaattgcaattaccaacacttattcaacaacactcaattaaaaaatgttgttaatttatttatttttatattttgacacacttgataaataattgttgctaataactctcagatttttaaatttatttttttttaagtaaataaaaaataagcaatagcatcacttctaaataagtgttgttaatacctatatgtaaataaaaaaaaaacaccttttaaataagtgttgctagatataattacaattaataaaaaaaataaaaaagtatgtaattcatcgaaaagaggatgatacaacatattttgtatttttaatattttagacaattaatttataattttttttactatgattatatgtatatgtgtagttgc

SEQ ID NO: 180214 - DNA, 623 bp, Cannabis indica
tgaatttttgtaactctgttttagagcttaggtcggctattgggaaagacttgtaatattttgtaaaatatttttgggatcccaaaacttgtaaattaggttgtaaggttaaagttattagaagttttattttcattctgatttcgtttaaagtttagtttcccgcgcttattttgattagtaatctcgtttagggaattagggttctttaatcactattgggtagcatgcctaattgttagggtgttacaattatcacgagtgcatggacaaactacaggggttccagaaaaaactttgtttgggaggaatatatcatggagtactgcacaggtgttcatcaggcattgttttagcaagtttttaaagttttaactataattacaagtttattatagtttgttaactgcttcgctgttctccataattacaggaccaattctatcctagatgggggtaatgagttcattacttcattatgcatcttcccacacagaggcacagggtggtgttaaagtcaacattgagttgtgggaaattaacgtgtacgaatgtgattctagcatttgtaattggaaggacatagaagccatcctgaagccctgggaagatctgttgccttt

SEQ ID NO: 180215 - DNA, 661 bp, Cannabis indica
gcagaaaatacttcatcaaaaattactctgctaattcttgccaggttgtaactgatgtagagggcaaggagttcaaccaagctcgggcttgatctcttaaagaatagggaaacaacttcaacctcaaggcatcctccataactctgggcaatttgaaagaatcactcacctccataaatagacgaagatgaaggtgaggatctacggtgggtgcgccactaaactgtctcacagtttgaagcatttggaacataactggcttcaattcaaactatggtgcctgaatttttggcctcacgatgcccggattgagctcattgaaaagaggggctacatattgttgaatgctttgatctctatcatctgccatgatcgatgtattttgaccattgttaggggcccaccttctttgaactcgctgtctatctccttagttatccatactttttatttccccttgtgctcattgttgtgctcttcttatttctcagaatgtgcgctctatttcaggatcaataggaaataaatcaagattaatgaattcttggtactcgttcatgtactacagtgaatcctgaaaaaaaaaaatcaacccactcaagtaagattagaaccccaaactagaaataaattgcaatatagttgataatacacaattttt

SEQ ID NO: 180216 - DNA, 778 bp, Cannabis indica
gctgtcatcctatgtcgtgtgtgattatctgagatgaatcgcattttgtacatatccccttagtcttataacttactaccctgagtatgtaagtcaatcagttgcaagctcttaaagaacttgttacctaccctttccagctaactgttgttctgttagatactctgcgtatcacgagatagactttctgtgcattgattttcacctcgataggtctttacaaaatagtagtttttatttacggctcacctttatcttttaaaaaagagaagcttaattatatttatcgactgtatttctcgaggcgagtaacatcgtgcgtatttatttctatacaatccaagctggtattttcccgtttctctcacacgtgtcgtaaccatattacttgcccaaaatgtgagtataactgttacgaaaattatgaacgatacacaagtgcaggaaatcaagtagtaaactcacgcaggtgaggtcgatccacagggaactgaactaaataccactaaattggacttatgattctatttggtagataaataattttgatagattttgaaataaagaaaaaaaaaataagaaaattaaagaaagcaataaaggtgtttaatcaaggaagagaaattgggggaaaagaatcctgttgatctaattacccaagtgttaatgctaattactattcctctttctttatgtgaatgacagatcataaaattaacctagctcttttccgatcttttaggtcctatatcacatgttatctaatcatctctaagat

SEQ ID NO: 180217 - DNA, 710 bp, Cannabis indica
ccaaaatgtggctaagtaggcgtttacccacaagaggtccggttttatcccaatttcctctatcccaaaacatttattttgtaatgaccgtgaggtctgactgcttctgaatctaatatatctacgcttttcttcataaaaaaaaacactcatttttttatgaaactgttgtttccatcaaaaagaaaaaaagaaaatacactcatttctactttttctccactttactctcataactttcctttccttctattttccacaataccaaacataggttagattataaaaagttgtaacttgtaagtagtggtagttaatacggctaggcttctctgcttgtattgtatagtatttcctttttcagctgaacaactttacttgtatatttagttatgcttatgctagtatgagttaaatgtctgtctgttactgctcatgtgagttgatgtgtttcagttgtgacttttctttttctctacagataatacaaagcttgttaagatctcaattcattgatcttgagctatttcactcaaacacttgttataatttacatggtatggtaatggtataaggtattcaaagacctttctccttctctttgcttctttctctatgactgctgccactcaagattctgccagtgctaatgcccttcccacgaaattccactttgtccatccttcccaacgctttcaatcaaagccatg

SEQ ID NO: 180218 - DNA, 607 bp, Cannabis indica
cttcctatgggtcactaattctcgggctaataaacaggtctcagcttctccaatgagagaattagagaagttgagtatgttgctagccacccacaaaactgactcctaatgatatcttgccaaggccaccacacacattgagttgctaccaaccttaacatcacagttaattttgatctaatcgtctggcagggagaccaaacagaagacatagaaatcactggcataggaaacaaacaagagacaaaatttgcgtaacaaatagaaatataatcaatataatgcttaaggttacatatataattattagtatgaaccttatcgtttcgagttttccatatcgtgtccactacaatttgaagcatacaaaaacaactcttgaacctccactcgtttttctttcaagctccatagaaaattagcccaatcccatatttgggccccaaactctggtactaggcatcaccccctggggggaccgtccagaggtgaaaataaagttacagtagaggaaaataatgttccatcgtttacttctccctcaccgtaaaaacgggcaagacacatcttcaatctggattcttttagctagagctgacctgatggt

SEQ ID NO: 180219 - DNA, 633 bp, Cannabis indica
gaatataatcaatctctagagcaacactagctggactaacaattctccaagcctggatgactagacatcacaaaaggacaatatctagcccaactgacccctgcagataatatctagccttataataaatttggccaactagttgatattcatgtagcagcaacctccaaccaaggccaaagccaccgacatgcttttgtatacacattcgatcggtctcaccccatccaactaataccatgagaatttcgattagaagaagaccaacaatgcacatacaccattatttccaagcttatacaagtctttaaaaggaagagaaaaacagacattgcataacttttggatgagctagagccactgctttagacaaaaaacgacatttcatactatgaattatttctacattttatgccaccccatgataaggcatccccaaatacaaacttctttcatcagcttctatgattcccatcaagttaagatgcatacctgttctaatttttgaccagaagccaactcaagcaccccttaacatcttcattacattttaagctgaatcttattgtcgtctgcaaatagtatatgagaaataatatgagctccatgagccactttacaacctctcaaatt

SEQ ID NO: 180220 - DNA, 720 bp, Cannabis indica
caaaataattttttaatcaatttcttttttataatcatacataaatattataattattaaagacatattgtaaaatttaaaaaaaaaataaaaaaaaattttaacagtgttacatgtgtgattattttattttatacgtaagtgaaatatactatttgaacactacttttatattgtaaattattctgaatttcttaaaatttagtagaatgttcttaaataattataacgtacacaaatataaaagaaaaaaataaattatactaaaaactttttctgaataccgaaacaggtagaaagtgcatcagtgcattccttttaagtaagtgcattgtagaagcacctaataatttatggtttctgtacaaaatatgtactaaaataattttacaatacactctctaaagtgcatcgatacactttggttacggcatcctagatgatttttcagtccaatttttctttcatagtcatctatattgtagctatttatgaaatcttgtaaaattttgagaaatataaaaaaatttaacacgccgaaaataagattgaaatagtctattttacatgcgtataacagattatttgaaccatatttcggtatactatattttctaaaatttgtgaaaatttaaaagaatgttttaaataattataaaaaaaaattaagattaataaaaatctcgtatgcagatagtgcatggtgcgaccccttaaaaa

SEQ ID NO: 180221 - DNA, 833 bp, Cannabis indica
aatcatttttactagatttatttaattttgtgggggcttttttactattttagtctataattatcaaattaaaaaaaaattaattttttaaaaggtaatatttttgctagtgggggctatagcccccacattaaaacaattgggtccgtccctgcttcctggaattaaaatcttcatgtgatgtaatgaggtcatcaacgacgaaaaaactccagcaggcgagaaagcaccattaatttcgacgatgtcacctaagaagaagaacaaactcacgcacacaaccttcgattgaccaacccgataacccaacacaaccaaaacgaaatccaactaaaaagagaaccaccattaatttcttcacttgagaagacggcttaaatcaatcaaaataggagctgtttcgaattcatgaaaaaaagtacagaaaactgatttatgacccatttttgaagccttttttttttgcaatggagatggagaagcaaaactacaagtaatagctattatatttatgaaacgaaagatatataaaaaaactgataacggaggtagttggaagaaaagatggtaaaggttatggttgagagatagtttcgtgggttttgaatgtgggtttttgaaatggtaatggatggaaggtggtttaggctgacatgaatggatatgagtaagaggtatttggtaaataaatctcattaaagacaaattattacccacaccttatggtaggtatttttagtaataaaggggtcgagaatgagagttggattcccattctttagctaaaagtctaaactccaaacttacaattgcgagccattgtctatgactat

SEQ ID NO: 180222 - DNA, 555 bp, Cannabis indica
ttttcgggtccgaacgtatttttcagagaaattttcagatttcattgatttttttttaaaaatcattttcattcacaaaatcactctataattttatatgaatgtgatatggaattaaagaatcaaaatatataccgaaagttagaaaacaaaatacggaccgaaacttaaaacttttatgtatattatattcgtatataatgcatataccgcataaaatcatcataaatgtatggaagagagtattacatataattttatgcaataaaaatatatattcaaggcactaaataaaaataataatgcttttaagaaaataaaaaataattagcaatccaagaagatcaaaatattctctctctctcgaaggcgattctcatctgagataggaaactcccatgctctcttcggaagagccaaatcagaggatgtgctcggcaagcatggatcaaatggaggagttgctctcgcgcaccagcaaactgacggttaccgacgaagaaggatgggaaattaacgaggaaggagttgcagacataggcaagtcttgcctca

SEQ ID NO: 180223 - DNA, 824 bp, Cannabis indica
ataaacgttccaaaataatgtgtttagcagtggataatattaattacctttgttgcctgtttgaattgcagcatgcagtacagttcctcctccattaggaacaccagtgtccagtgtcgaccaattattcagtagttcatcaaccaattcctcgcagtagtagcttctttggatggctaagtaaagcggagtctcacccgcttcattagccgaatacgagaaatgagggtcttctctggtcaatattcttacaacctcaagatgtccgtacctcacagcctcatgcaacgcagtatcctgttcaatattcttcatcctcatcatctcttgtttcttctcttggtcgtttccacatcgttcaataagaaactcaaccatagaggcacgaccacaccttgctgccataagtaagggagtctcttttcttgcatcagtttgcatcaacagtgctggacacatatccaagatctctcttgcgaagctaatttcgtcatctgtgatttctccataaatgatattgagatgcaaaactgtgttctctgctcgggtgactatttgggtaagatcgagttcattgcgcttttccttaaagaggtcaatttcgccattagaggctgccttgtacagcactggatccatatcctcaaaataaaattaatatcgagctgctgtggagaaaaggaaattaagtacgattggaaaaaaaaatgtgtacgttgactttgttttttgatctgtttctctactaaagaaaacatacaaagaaatgagaaatagaattcgacttttttcctttcccttatataactaccttatagagttta

SEQ ID NO: 180224 - DNA, 720 bp, Cannabis indica
tttcaccaattccatttcagataattccctcttcttctccaatcacaagggtcatctactactcatttttggtgtatgtcgatgacattttaatcacaggtcatgacaaagctgctattcaacaaattatctctgcgcttgacaatactttcggccttaaaactctgggttctgttcattactttctggggtttccaagcatacagatatgactccaaaatttcatctcactcaaactaagtatgcccaagacatcctaaggaaggccaatatggaagaatccaagccctgtagcacccctatgtgccctggtaacaagctgtacacagacaacaaggaaccatttcatgatcccaaactttatagaagcatcattggctccttacaatacctcactttaacaagacccaatctttcctttgctgtcagtagactaagtcaatacatgcaaaatcctacaatcacacattggcatgcttgcaaaagagttcttagatatatccaaggcacaccaactctaggtcttttcttcacacctgctccaaatatgaccattgatgcatattcagatgcggattgggcatgcaatctagatgatagaaaatcaactcaggcttttgtgtcatgattggagacaacttaatcacttggggttcaagaaacaactgccgtggctagatcaagcacgaaaatctgaatatcgcgcctatcgaccactgc

SEQ ID NO: 180225 - DNA, 577 bp, Cannabis indica
taaatatatagttgtgtagctattattagatatgaaatgagataatagaacttttttcaattagaagattaatgtacattttactattaataacatacattattataacagaactatgttttacttactaaatatactgacacattattttatttttataaaacaaattgttcaaataattatactattttaattattaattaaaataaaaaactaaaatattaaataaaactaacactacgtggcttggcacgtaacaatcacctagtatatatatatataccttacaattatgttcttttcctttttgatttcttgttagttgttgtcatttctctctgtttttactccaaaaaaaaaatgaatatataaataaaataaaataaatcagtttctcttgtttatagtgttttggattatgggctatagctgccatgagggatgaggctttgtttatatattttttgagaaatctcaaaagaaaccagtggtgtctagtatttttttttggtgtcatactgtaattgatgaaattaagtatcgagtctcgatttatgaaaattaatttttttaaaaa

SEQ ID NO: 180226 - DNA, 813 bp, Cannabis indica
tacatatcaagcataagcttcacatgccttgagcagtgagtcctgcataatgggtccaataaaaatcaatatgtggcaaggtacaagcttgttcatccacctcttatgtcatgacttaccaaaacctatccttagtctcttccattattttaacattataaccagcctaaaaagtgaaaccttagtctatacgagctactccccatggcagagaataacattacccttaaataacatacataacttttatctacctatttatcctaataactttcctcattcctccaccagtacgcatagggctactccaagctaataaccaacatttatctgtgaatcctaaggatccatcccaatctaaaagatacaaaaccactaattaagagaccacaattaggattaatatcatcaacttgtagtgggttcccatgaagagtttctcaaaaacacaagaaagagatgaaacttaattaaaagcattcaccaagctcaacttctcaactaactgcatctttgaaatttttccctcctaatttttgtgacacttgttttaagaaatgtctccattgcttgaaattaacatcatttacttggatagagataataacattataaaaaagaaggaaattgtagcaacacccttagccaatatcccctaaatttctaccttagctattaccccttgcattcctaaccaaacaatcgtagatgtgattctagttccaaaacccttaatgtacttagtttatcaatttaatacaatatgtgatgatcttatcaagatagactcattggaattatcaatgtgggccg

SEQ ID NO: 180227 - DNA, 918 bp, Cannabis indica
actatacctcaaatctatgatattgatcaacagctgtgtttgcattactgaagtccaaaatttttcctgtaacaaacaattaacaaatcatcaaacactatatcttcatttaatgcttaaaaagacaattatgcattacttaaagctagctaacattattattatttttatttttttaaagttctcacctggttgttttgtaaatgtatcccatatactaactcctttatttccctcattagcagctccctcaaactaccatattgaaacagacatcaaattcttgaactacaatactcttatataatcttattccagttccaatatgcttcctgaataaaaaatagaaaaaaataagaaaagggtactacctggtaagctgaagaagcagttccaaaaatgaactcatctgggaaattagctctgctgagagattctatacttgtgaacaagaaacaatgctatgatcagaacagggtcaagcacaataggttacatggtgaattctacataaccatacaagatggtgagttgttaaggcaaaacaaatacagcaaatgtttcagttatcttagttgtaaagttaacgaattttgtagaagaagaaatggagcttgtattatattgaaaggtgttgaagttgagagggtgagttagtgaagaaaaggcaaaagggtctttgtttgcacgttatgaagactcaatttataggtgtttgctaagaaacatgacacaaagggaggaataaaaatagattgacacgtttaagaactaaaggcgtacaattccttttctttcaatctgactttgattattttttctaagtttcaacgcttgcggaagtatatttggcaagctaacatagagtaattaagttcagattttgatggtgacaaaataaaatcaaaattaaaatac

SEQ ID NO: 180228 - DNA, 679 bp, Cannabis indica
agaaagaaacagatagcgggacagctcgtctcgtgtagattagatagagttaaaagagatgtattgtacactacacaatacacatcgcttatagctacctattgggttgggacctcttcctactttaccactgtctattgttccctgttgctattgttaacgtatggtcggagaccctaaaaataggggaaattacactttatacattttttatattgtcctcttttatttttaccttcttttttaaaatttatcatttttacctcttttttttaaacattataccaattttatccctgttacttcaagatactctccatgtgattctcttatgtaagggtattttaagtacaatacatataaaaagaggtatgtttcaaataaatataaaattagaggtaaatttgattaattaatgaataaaagaggtatttttcaacttaccccctaaaaatactggaatttaggttaatatttacaaaaatactatcacacggaaatctttttaaaaatattgtggttttaaaaaacaccagtaaaacacaaagcagaataactcaaaacaacagtagaataactaaaaaacaccttaacacagtatactgtagtatgaaacttacaaaaaaatacaataaaaaaataaaaaataccgcatagtaatatttttacaaaaaaataa

SEQ ID NO: 180229 - DNA, 598 bp, Cannabis indica
gattcacttgttaaagtttctacagacaagatgattcttacaacttctattttgggaatctaatattgtggatggctgggatgatctacaattatggaatcatgattttctaactcagtgaatgttagtttcctttaagtgttaattcttgaactaaagagttgtgcacaaatttaaattggatctaaattttactttcagtagtgaattaattgtactaaataataaaaaagtaattagataggtaaaatgataatttgaccaaaactaattatgaattgacacaaagagggctaatcaatggaattgattatatcaatagacactgcagtaaactcagtaaatataattctataattacttagagttcaattgtatatttatagtggagtaataacaaaattaataaatacgattatttggttgatgagattcaatgaataatctagttaattagagcatagaattataggttggtccccggataatcaccttgaaacactgtcaaggataggaatagaatctgtatgtggaagttcgaaaaaaatcaattttaatttgtcaaaatattaatgatttattttataataaataattt

SEQ ID NO: 180230 - DNA, 813 bp, Cannabis indica
taattctattttttatatataaaagtgtaaatcaaagatatttaggagattttatgaaattttaaaaaaaatcagaatggtgttcaaacaatatgctgttataagtgttatatatatataattatttggagtttttttaaaatctataactcattatattattatataaaaaattaaaacaatatatcaatgcacttttttattggctaattagtatattaattctcgaaactttcacatataaattatgtttttaaatttttccgatggttaaaaattcactttaaattatggagattgttgaatttatgaacttttatttaattttagtaaggaaagtctaacatgagtctaagttcaagaggcatcatgatttgatatgatttgatacatgttaaagtttgagggacataatttaaaaaatatcaaaatttaaagagtataatttaatacatggacaatcactgaattagtaaaattgaatgcaatggaacaaaaatttttaaattctacaatcttaatagttcaaaagatataatagccaaaaaatttcaaagtgatataatttaatacatgtcaaaatttataggaaaaaaattttaattaaactttttattttcaaatctaataaatctagatgggtccttattaatacttaataatttgcctcatttaccctttaaatatttatatattattattattatttgcataccaaaaagctcaataggaccaaattttcttttttctattttgttttaaaaatcaaaaagttaaaaatatcttctttatttattcctcttcacctataag

SEQ ID NO: 180231 - DNA, 609 bp, Cannabis indica
tcaaccaatagctaagctttttgattctacgcattagagtccccaactcttacaccctttaatttcttgattacttacatttttatttatgaaaactatctgggttctcgaaatggtgggagtgttccattaacacaatgttcatgcaatcatcgcatgccccttgggacactgggatacgcccaaccatttccttagacatgcgattagttttcattttgctctcattttattcattgtatgaattggctagattctcgaaatggtgggtgtttctccgtgacttaatgttcatgtatcgacatgacccttatgacactgagaaaccctcagccatttctagagatacatggccaattctatgaacttttatgtttaacttttgcgcgggtgagagcactttgttaaaattgcactttcaccacactgaaaagatcttctacctttcagatgagcgacctgtcagatagccagagatatgattatggagaaggggcattcgcaaatgaataaaaaataaagcaacaacttcatacccacctcgatgtctgaggacaaagttcctgcagccagaacccgtgaggactcgctgtctactaatgagataga

SEQ ID NO: 180232 - DNA, 622 bp, Cannabis indica
caatttaaataattcaagaagaatttttgcaatagaaaaaaatttaagaaacaaaattctactaatgtaatagttgaagaagtaaaaattctattattctacttattatattggtcacaagtttacgtgtgcctttttttcgctttatatatatttgggcatgcttaaaggtgactatattttagcggataactattttagttcttgtattttacaaaaattatcaattggaccttctgttttgttaaatgataaaatagacactatattttctaaaatagtaaaaataggatcctgagctcaatttttaacaattttatttttaatacaaccaactttaagacaatttctaacacgaacagatacagaaaatataatcaattttgtcataacatctctagatcagattattattaagttttattttgacgaaaaatcaattcaaagttctatttgtattattttaaaaaatataaggtctattttgtcatttaacaaacaaaatgtccaattaataacttttataaaacgcaaggtccaaaataatatttatccaaactcaccctaaaaccatgttagagtcatgtacactttccatgtaattcttcttcttctttttttt

SEQ ID NO: 180233 - DNA, 661 bp, Cannabis indica
atatttaaaaaactatatatggatgtatattattggtaatccaatcctcagtgtttcttcaactatgaaaaaatttcaaatatacaagcattactacaaaatagcctagtatttgaattgtttaaaaaagttggatttacttattattattattcaactacaaaagcttcaaacattttccggctcatgctcatcatccacacacttgataagtgatattttttcctcactgtgtttagaagggatcatttgaaattcaactgattttttttccttactgctagaagaagggatcgctaccctccgcgcccgataaagaagaaaatgttgacacatgaaaataagatcaaagaatacagatatctggctcaattccaacactgttgaattgagttagaaaatgagtaactgttttctatttggtcacttatttgtaaataatattaaacaaaaccaacctgtcaatgcgattcttgagtttggtcaagaaagtttgattatattcctcaggcaccttaaccaatgtctcaactaaactctgcttttgttgaatactaagatggtgtacatcaattgtacaagtgtttagtattcctttccttagtcgtttataagttggtagcctctcaagtgctgcccacttgagagtttcttcatcatc

SEQ ID NO: 180234 - DNA, 1321 bp, Cannabis indica
gcgcaccaggtcccaatccaaccaagaagatgtagtaagcacggcatgcacaactggtaaaacacgcgacagtgcatcaacagctctattggctaccccgagatgacattggatctcaaaatcatagcccaacaacttcaccagccatttataatgctccatagagactaaacactgctccaaaagaattttcaaactttgttggtcggttcgaaccaagaactttcgacccaacatgcatggtcgccatttaagaatagcgagcactatggccatgagctccttttcataaatggactattaattgggcgtgaagtttcagcacttgactgaaataggggagggctttgccctcttgcattagaacagccccaagaccataaccaaaggcatccacctctattacgaactacttagaaaagtcaggtagagccaacactgaaacaatgaccatggcatgtttaagagcttcaaaggcaacggtggcttctctattccaacgaagtaggtctttctttaattgctccataagaggttgtgcaatggagtcataccctctcacaaacttatggtagcacctcgtaagacccaagaagcctcaaagagcctttaaactttgggtagtggccaatccaacattgcttggatcttattagaggtcaaccgacaccccttcagcagaaatatatgacccaagtattccaatttttgttgagcaaaacaacactgctttctattggcataaaactaaagtttatccaaggcttccaaaaccacttgcaagtgagtgagatgtgcttccatggtcgggctgtaaacctagatgtcatcgaagaagacgaacacaaatctatgtaaataaggcttaaagatctcattcatattggcttgaaacattgttggcatgttagtgagaccaaaggtagtgaccctcatgagttcgaaagttagtctttggaatgtcatcaaaccacactcaaatctgatgatagctcaatttcaaatccaacttagaaaatatttgtgcctcgtgtaactcatcaattagctcgtcgataatgggtatggaaaacttgtcggcgatagacactttgttgagggctcgatagtccacacaaaagcgccagctcccatcttttttcttcaccataacacgaaacttgaaaacgggctcacacttggctggcaaattcccacctttagcatttccaactctaaccttcaatttcatctttctaaacatgcgagtatcgataagggcagatgtaatcagtgctactcccaaacacgaggcaaaatagcatgatctcaaggccgcggc

SEQ ID NO: 180235 - DNA, 558 bp, Cannabis indica
gtgaaagattcctgcgataaggtttcattaactcctaattcatgtcgagtagaccttgttattgcgagaattcttaattcatgagttgtagggagggacttatgtcaccacaaacagagactaaagcaagtgttggattcaaagctggtgttaaagattataaattgacttattacactccggaatatcaaaccaaagatactgatatcttggcagcatttcgagtaactcctcaacctggagttcccctccgtagaaagacgcggagggtcgggtacggtacgtcgtcgtcgtaagtaactttcctttaccttacggttacggtaactaggtacggaaacctaacgttagttaggtacggtacgtagtagggtcgggttacccttaaccgaccgttccgttagtacgtccgtacctaaaacggtaaacgggtacgtagtcgtaccctaacccaactacgtacggacccggttcccggttcgtcggtagggaaaggaaaaagtaaaactaactttaaatttttagttcgttactttagttaggtacgttactttaccc

SEQ ID NO: 180236 - DNA, 504 bp, Cannabis indica
tttttggcactttaattttatgtttattttgaccgtattataaatttattacacttgctagtcattgggcggacagtgaggagggcagttgttttcccttaaaaaaaaaatgtatatatattttagttagttttaaatttataatatatatagttattataaaatatgaaatttatagatataatattagttttggtgtaattgttaagatagattgcatatatatatataatagaggtttaaatttaagccaagaccaatacaagcttcttctataggatcatagagtcgtcaataagaactgcaaatacaatcacttccccatcaatagctagagaagtaaagtgatcacttccccatcactactctagtaagatgaaagaaatgaatgaatttaagaagcctttgcctagtttgttcttctaaagagtatttttttttaagttttcttcttctcactttaaatcttgaattcatccttggtcattagctctctctctctct

SEQ ID NO: 180237 - DNA, 1133 bp, Cannabis indica
caccttccatgagaagcgaatggttcaactcgcttgcccaagagccatctgacagttggataaatgggaagccgagagggcatatttcctcccaacagtcagtttccatcattgcatgcatcgagaaaagtgttcagcaaatggaaagtctgcacaaatccaatcaccaccatttttgggcatctcacagaacacgtgctcaacacgcgcacaaaacccaaaagttagcatttaaaaccctgacaagagagcaaaagaaattattccttctgaataatgacacttcaattggtggctaatgacgtagtgtgataaggagctcgtcataaatcccacatgctcaaaactatctacgagaggatgttgcaagctcccagaccatgttacatcttgagagcttgggaggtaaatgacatccgcatttttcataatcatgacacgtttatttttaaatcaagaaaggttaagaagtcatcagctgcccaacttcctcaatcgatgctcctagaagacaaaggcaccaactttgcgggaagagtctccatgaagggggagttccctgacttctagctacacagagggtatccgtgagccaaggtctcctccgttctaggaactaaagtcatttactatcgcaaagagtatgggttttcctaagagggccaagaaattttgagacacaccaaactgggctacagctttagctcacagaagccttgcctatgcgtgtcagtaagtaggctttttatgtacgacgtcagaggctcccccatgacacgctatcatatagagcatgcaagtccttgtgtacttgaccgaatgatccaacttatagggataagggaaattaaaaagaaaaagccctgaggtgacacgcatttgtggcctatattgtaatctgacgcccttaaatgccatatgggaaatatgccacctaccgatccaatggttagatttcatcccaacgctgatctatccaaggcagcacatgcaaagaagttggcctataaatacccccaaaaaagcacaagaaggggagaccttttttcggatggaagactcattcttcatcatcccaagcatgcatattttgcaaccttattatcaactcccgaatattcctactaagattt

SEQ ID NO: 180238 - DNA, 1349 bp, Cannabis indica
gtgttctcttaaaagattgaactggatctcggaccatgtgaattgtgaaagttgggattaattccttgagctttaggtcgtcgttacgtaggaagcttgactatctccttaataaaattttggtccacatcccattgagaacagtgctacaggtgatcttatgccatgtaaattttcaatcttgaaaaagaaaaagaacaaaaatctagggattttaatgatatacgtaaactacctacaataataatgttttcatcaaatttttttttacaataataatgttgcccaacttaacttcaataggaaatttgggttaccaatgcttaaatatatgtgatgcattgacttaaattaatctatccattaaacatataacataagaaaaatttcatttaccatacttaaaaaccttattacaaaaataaatctcttaattttttttataccatttaattctactaagagcaagttaggcacaactatgttgtgggaaaaagctgtaataaaaaatagttgtagtagaattgtggaaaaaagttcaatttttttgtttttttctcacagtacatgcctaactcgttctgagtaggattaaatggtgtaaaaaaattaggagatttatttttgtaatagagaggttttttaaatatggtaaattaggatatttatttttgtaatagggaggttttttgtaatgagttgagcttctgggtgtttgataattataaattttacagtacaatgagttgtgaagaatctattataataatgataatattataattttgttcattataatcataaatatatatatataaaaaaaggtaaatgacgacataagtacttaaaattttatgtttgtaagcagcataaattcaatgtttatttttagcggtataagtactcaatgtttgtaaaactgtaattttcttccagtttcgtcagtacaaactctgttttgaatttattaaaagaacatttagaagtaactgatactacatatttctatctagactcaatgatcaagaatttaggccttatatatgccatgtttaagacaataacagatctgtactaacaaaattagagaaaaattacagttttacaaacattgggcacttatactgttaaaaataaacattgagtttatgcggcttacaaacataaaactttaggtacttacgctgctatttaccctataaaaaacttaatgttaaataaaattttattttactatatatttttaattattttttctctatactcaaatttatatacatttgatataaataatttataatattttttgaaatttatattttttaattcactttttttttttcttaagt

SEQ ID NO: 180239 - DNA, 637 bp, Cannabis indica
ggagcttggaggagatagcaatggccaaaggagagattttggtggaggctaagccaggagatgtgtgtgttcttaatgctgatgatcccttagttatgagcctcccactaccatgtggggttaaaaaggtgaccttgatttttataatccaagtttttattttttgtttagaattatttgatgttatttgttttgttcttttatcagaattttgcaattgggttggcttttgcgtggaatctgtattgttgtctaccgcaatttggttataattatatataagatttggcatgttctgatattgtttatgagaaaaaaaaaaccattcatttattactactgaaaattctattgcaaaaatttaatagaaaaatgattcaagaagggataaagctgaaagaatctttttcttattgaatgaattgtatctgtacaagccgtagctatatatagctttgtgttacaaacaagaaacattaaccacttgcagctgactcactaagctaaccaaccacttaacagatttctaactagctcaactaattatcaaaaaaaagaaatagctcaattaactaatctaataatgttgaagagttattctaaataaaatttaactgtttacttttcgtaactgctc

SEQ ID NO: 180240 - DNA, 1254 bp, Cannabis indica
ctttgtacaacaatttattttgtgtacatatacatatatacaaatttctcattactactaaaaaacctaaaaaatcctacagttttacaccgtcaggtaaagaattctagacggtctataaaaccgtcacctatacgagcgtcgtgaatacttgatagaataggcgatcgtggaaaagcgtcggtataaaagaattcccgagatttgaaattgtcggctatagtcgatactataggccacggtttaaaactgtttaaactgtggcctatagtatagacggcaattttaaactgtcgctatagtggattgccccaaaaaaattatctcatcctcctcgaaaccacttctcgcatatgttgcagccgctccaaaacctttacaagcttcatcctcctccaccgtcgttgcgctcgtcttcttcctcctctaaattttcttttacaagtttcgaattgcttttcacttgacgatcctcaaaactttcttcgatctgcaagcttcagatttattttgaacacacacaaatcaagatcaacaaaccaaatcatggctaataaaaatttaaacaacaaataagataatattgtttacctttgtgttgccacgagagagcggaggagagcgacatagcgagagagagtggaggagagggacagtgtggctcgtggtcgtagaggagagaaaattaggaaataaaataaatttacaaatgactttgaaaaaatgagatatgattttttggggggactttatatcttaagaggagggaaatgaaatttaagatggggaaataaaattaaaaatttaagatgcgggaaatgaaatttcagatctaaaatgcatgaaattgaagcatgggaattaccgacagtttaaaactgtcaggtatattatagacaatagtttaaaaccgttgcctatagtatagccaatggttttaaacagtgggcaattctcttttacaaatttaaaggattttttaaggcacatttaaaaatcgttgcctatacctccggacagtaaaattgaatgaaattagataaaaaatacttaaatctaacaatctcaatagttcagggggaagttttaacgaccaaaaaagttcaagagtcatgatttggtacatgtcaaagttcgggaaaaaaaaaatcttaattagccttaaattaaataagttgtcatatatctataaataaaatgcaatcaaggtctttcggtgtaattaatccttattttaatagggtgaatccctat

SEQ ID NO: 180241 - DNA, 532 bp, Cannabis indica
aactcaaacttaaactttttcttttcttatttttcttgacttaaaaaacttttttttaatttttttttttaccgatggaacaatctcagcccatatgatataaaaatgagagatttttttaattagatagaaaaattaagcataaaaactcaaaattttctaattttacccattcatgggtaatacccattaagagtgcacccatatatatatatatatatatatatataaaatgatcttatttcacattagaataataataaatttgaaaaataatttagatattttttaaaattcaaaaccataagtatcaactttcaaaatttagttattttaatatattttactaattttaattatacaattaaaaaaagctaatcacttaccatttatcttattaaatatttattttattaatatatatatatttttttaaataacataaattttgatatttagttaaaaaaattttgaatagatacttaggtttgtaacagctctaatttttgggtttatttattttattttttta

SEQ ID NO: 180242 - DNA, 897 bp, Cannabis indica
cttaaatgtaagaatttccctcccattaggaaaatcagagctacaacaactgcattcgtcaatattaaacactccataactaccaaaaaccacaaaaacaactaaatcttaaccctatttggtaactaaaacattagagagagagaaaaaactgaaccagatagaatctgaattggtgcagtagctactgaaacgatcgattgaaattacaggagaccgtcctttgcaaagatcttcaactatagctcgagtaaattctggagatgaaaaaaaaaaaaaaaaaacatatatatatacaaattgatcgaagggaatgaattgaatgaatgaaattagaggtgattggaattcaatggtcaaagcttgaagaggaattacctttgatatttgttcttcaccgaatcgcctggttctggttttggttgtaagcttcttcttccccgatattttccctccatttttgggtttatgaattttccaaccaaagctttgtttggaaatggttggtgtttcagagatacgacatcgttttgagactcttcccgcccctttttaagcgtttttgacacgtggcctgaccatttacttaaaaatattaaatagaaaaaaatcatacgcaaaattaaagttcaattttatcaaacttgtagaaggagaaagaaaaaacatatttcatatcatttccactataatatttgttgcgaaaatttgttcaaactataaaattgtgaaatatttactgcataaatattttatatagttcactttattacattaaaaatctttatatagttactttatttgcatttaaattcttaatatagattttttggttgcaatatcctttttagtttatcttcttgaaattatttgtttatgtggtcatgtgtcacaagt

SEQ ID NO: 180243 - DNA, 851 bp, Cannabis indica
cacgtgcagtttttatgagcatatgacaactggaacgagaaaacaggtatggttgtgaaaatatataagagtagttttatgtttgtaaaaaaactaactgtcattggaactatcaactagtttgcagtattttaatttttatttgtaaatctagtctttttttttaccaatagatgtttaattggttaaagtgtaggttggcattttgagtttttcttcttaagctagtttggtaagtgctttaacttatgtaaaagattaacttcagttgtattgtgagaaaaatttattgatgcttgcgtgtttgcttaattgtaattgaaaatgttgtgagctggaaatagtgtgataagctctataaccaaaatgttgtgtaaaaataagtttgtttagttaacattttaaaatacttatttaaaaaaaacattttaaaatatccatcaatataagctacaacaataactttttggaaggaaattgaaatatttattttaaaatatacttataatttaaaacaatttttaggttcatagttctttatttaaaataatggacattttaaatattctaagtaaatcaattaaatatataaataattataaattctcttctaaaataaaatttgaagttgggttgtgccagatgtatatgtttcactttagcttaataattatttttttctccaagtgaagtttaataagctgttatttacctgtttaataaacagtttaatccagaattcctacttaaacagcttttactttttttttctctttctagaaagtaacttcaccaattcggttgcttgcgtaagagattttaggctgtacaatctaagtatgctagtgttg

SEQ ID NO: 180244 - DNA, 624 bp, Cannabis indica
tcaacttctcgcaagggtcgcaatgatgccaatgacctcttatccacttcaaacttttgaaatttcgcaagcacatatctgattcaattgtaatcaatgtaactgttattaaaaatttctacaagtatatgataatgagaaatacgaaaataacatttacttaccccggatctaatgtgttgctaaaaacaaacttgtaaaacccatattggttacgggggatcgcttccttcgtcttgaaaggcccgacaacagttctgcccgactcaataaattgctcgtaggccttatcgttgaagtcatcctcaattaaaggcacattctccgactgtgtcttctttgatttgacgagggctttgcctttattccagaaagacgccacttcgactatatcaaagtcctcatcgtcgaaggtcttatgtgcagcaccttcatcttcaacagattttgtagcagatagtgaaggcgtacttacagattccaccacattttcctcagatagaccaacaacattagtcttcgaacggacaggggacttcacggggactcctccacggcctggctgcactcctgccttcttcccccacttcccgtcagcaaccatcctcctccaaactctcggtc

SEQ ID NO: 180245 - DNA, 574 bp, Cannabis indica
acagtctatattggtagttaactgtgaaaaatgaatgacaccttacttttgctactagttcagtagtttggagggttttagtcaaaatttgagcttagaaggttaagtgcaagtggaataatagttgaaaaggtttagccgtaaaaaactctactttataagtttgattgatgtgaatgttatgctcctttaacacttaggtagcgtttgggtgtgagaaatgaatatttaagaataggaataggaatgtaatgaaataaaatttaaagggtgattatatttacacccgtaaaaattataactacaccccattactaagtttaccccattaaatattattttttataactacaccccaccttatttacaaaagggtattatttgtacacctcaaaattttcttttaggttaataaaaaaaaaaacgaaaaaaagaaagattttgacgtctgcgttcacggtgtcactctcttttttttcttcttttttttcttttctttttcctgtttttattattttttttttaactaaagtctctttttcttttttaattcttaggagttattgaaacttat

SEQ ID NO: 180246 - DNA, 962 bp, Cannabis indica
tctggttggagaataaatagtttgcccattggagagtacaacagtttctgcattaagcaaaatggaacaataaacatgatgacattagaagagttataaggctacttataagatatagatcatgatggtgcttacattttgaattagacaaggatgagacttaaaagagccatttagacgtttgaggacattggcaacatgattggggtagttgcatgagaaagctcttgggacaatatctctatgcatcatgacacaatggatttggctttcatccaaccccaattcatcaagtatcttttggccaccacaaaacaccgatggcgagccaaatgtaacgactggtcgcagagcagagggcttgacaaccttcctgcttaaaagcatcaagtgaactaagagacataggcttcccccaagagaatgtccagtgaactgcagctttgccctctccccatacttattcaagtgttcagttatttcaggcatgaattgcatataaattccctttgcagcttcataaatccctctatgaacaagactatccgattcctaccataaacaattaaaaagatattagattatgagaagtgggcagggaagtagttgacattagaatattttattatggaaattatttctaattaaggaaatgattttctatttaaggaaataaataaataattgattttctgataaatgaatattttatattcattgaatctggacaaaatcaattatgtaatattctatatatggtcagatttctatattcattacctgatttgatttcctgaattaattgtcaaaatattctgacaattaatgtggcgcagatactgatggagtatctcacctataaatatagggtctcggtccccgagctcctcactcattctgttcataacagcaaattccatctaaagagagttgagagagcgaggaagcccgattacccacat

SEQ ID NO: 180247 - DNA, 693 bp, Cannabis indica
ttctttttctcttttttttttttggaattttacacaatggcatgtagattggtaatgtgactgtaggctgtagcttagcaaatcaattgtcagttatcacgtagaaaattcaatgaaagggtaacacaattcaggaaaatattggaggcaggttctgctgtattatttaatgatagcaacaatacaaaaggtttccaagcgattatacaaacttgcaaggagtactaagctcactcttttcctacacttcatatataggagtgaatatttttttaatggagttttgtttgttccttaaaatgtataaatttatttttgttttactagtttaattttgcataatatatgtatatgtataatatttttattttgtttcttccttcttacattgtaaaagaatacatatatgaaataatatatattttttcatttaaatattaagtccaaattaatttaagttgatttattcataattgaagtgtaaaatttttgggtgtaccttaaaaattaaaataaaacggggaagcatatatgtatttatatatgattaatttggcaaaaaatatttaagttttacgttaaatatttaagtttttttttttggttgtgaaaaaatatctttttatgacactttcttggccgttatatcataggatacgccacaattcttaattattttatgtcgatttttac

SEQ ID NO: 180248 - DNA, 584 bp, Cannabis indica
aacattattatttttcttctttgtagtgcattattaccacaatgcatggcgtaattaatcggagatgtgaaaacaaagtaattaaatatcaaaagattcttgaaatgaaaatggtcaaactaattataaatatatacacagtaacacagatacatttattgcaatttgtaaaaatgtaatatatgatatccacctttgaatcttgttaatatatattcaaataagacggcccgacgaccctagctgctattgctaatatataggcattattcaacatttggtagtagtattattatttgatctataaaacagttgataatcaatcaattataactttttcccaaaagcaaaacctagaaatgggtggggatcgctctgtgagagctgctttggtgaccctcttcatcttcgctattgtttcgattccattaacgacgtctgaggctgcacgtgtcgtttatctaggtatatacgtgattacactactcctcaacaatatttacttataaaatcattcatgatatgttgcaatttgattttgtgccaatacatttacgcaaaaacctaatttaattataagctta

SEQ ID NO: 180249 - DNA, 963 bp, Cannabis indica
gaaaataaaactgacaaaagaaattgtagccacaaaaagaaaaatgccttggttaggcagcccagtccaaagtgacgcatgccatgggcaataggtcagggataagagatcgacatttgcaactgaatttttcaattattatgatttttttattatattttttcaaatgtttaattttatattttttcagatatataatctatttttttttttcaccatacaaattatataatggaaaatttatataaaaaatacaaaaatttaaaaatattatccatattcacataccctcttatatttttaccaaaaaattattattttatttatactaatacctcttacacatgaatgatgtcattatactatattcacacattatctattttccctcattttctataatttttttttaattattagtagtattattttccatttcatttcatttttaattgtagttttctgtttcaaaacttctactcacgatcaaaactagtttagaatccaaaaaaaaaaaacagatttcgtccatcttcctcaacttccttccttcatcatctcaccaagttcttttgcattttttttttttgttctataaatggctattacttggtcttcatttttctcatcagtcattaccattgctgaaaaaaacctttaaaaataggtgttaaatctcttaccaacaaatctaaaggcaaatagcctattgtttgaagatgatgatttaaactttgctttgcctaccaaaaaaattgatcgtcaccttgttaagaagaaatcgaaggttaatgttgctgaaaacattttcttttctgaagtttagaaagggaagaaccaagctgatgagaatctgaaggtgtctttctagtttctttatcattttgccataacttttctgattactagtttctttaggaggcgaaaatcatatttattatatttttaaatatctctaaggat

SEQ ID NO: 180250 - DNA, 697 bp, Cannabis indica
aaaagaatttttagggtttttgagattcgatagagaccaatgcgcgagagaggggcacaagagatggagagtaagaaatagggtctgggcagaggcgtctaagcaaaggcggttctactgagctactgtcagcattagcagaagaaagatagagattggtttagtgaacggagaagaatttggacggctagagatggacaacttcgattggatggttagggttgggctagttctcatagaagagggaagaaccctcaagcagaacttagaaaaaaagaaagaaaaaaaaatgattttttttttgtcttttgtcttttaattatttattagaaaaagaaaaatgatttttaagtttttattttattttatttttatagtatttaaataattaaaataatatgtaaccaatgaaaatatactatagtacataagtgtacacatattaggaatacacgttggcatttcacttataaacactaatagaataattggtttgtggtttgtggagttaaatgtgacaacttaaaattaagatagtattgcccccaataaattattacaaaaaatatttacttttaatgtcaattttttagtcacaatataaattttagggactaaatataatttttagtcacaacgaaaaattacttgtgattaaaatataatatttagatacaaattgtcactaatttactta

SEQ ID NO: 180251 - DNA, 499 bp, Cannabis indica
ctcataattggttttgagatccataatatttgtcaaataattgttcgtttattaatttggttttgtggatttaacttgcaatctatatatctatataattctattgttagggatggtgatgtggcatcttctatgagttttctttctaattttctattttttccaattttctcatttatttagttttatctctcattttttagatttaattagagttttattctaaccgttcatctcttttggtctcaattgttaaggccttaaagctattaagtgatacactttaataattattattaacacacaataaagatgataattattattaattatatatcatcttattaattattattgtaaaaactattcatggactctaattaattcttagtaaaaaccgtttattaatagtaattcttaatgagccaaaagtataactgaatctatttaatataattatattgtgtctattagtttctttaccgttaagagttttatt

SEQ ID NO: 180252 - DNA, 760 bp, Cannabis indica
cttgctagtttcccaataggaatggagatactagtagtttttcatcagttgttgcccataggacaaatgcctttaccattactcacccttgacaatccttcaggtggcttttttgtcggagaaaagcggtgctccacctctctaaactagtccaactgatttcgagggttgaaacaactaaatcatgacgtctctgctctaatccacggcccatatgctggaatagcttttccttcaggtggaaaagcataaggtgttgatctctaacacttttgtttgtcgtggccgaggtacccacaattaaaacacaccttagggagtttataatacctaaactagatacattctttctgtcctctctttatatccaagtaaaaacccgaagtaagttgatgatacgtagccagcttgacttgaaatttaagaaaaccatgcctaataatggttttttaatctgccatgtcaaaacctttgtagacccctgctttggcagcaatagcaggagtattgacccaattaagatatggtgtgggaagtccagaagcttgcacccaaaaaaatagctttacccatgtttacacaattccatgcaccatcatcaagcgaaatcaagagtgttccatttatgagccacggtctatgttctagaactgtaacacactcttcttccaaatcaaaaaaagatacccacaaaccaatcttgaatctccagttgcctttgactgattttttccaaaatctaggataaaatttccttatg

SEQ ID NO: 180253 - DNA, 807 bp, Cannabis indica
atgtagggttaattataaatattgggggagtggaataataaatattatataggaatatggtcatgcagtattaattaatattgggttgagtgtgtgatgatcaaattgatatttaaaggtataggccggtatggagtatttattcatgtataaatagggtaggaaagtaaagatgttaacagttattttgttgtaattggttgggtttgttagttagaaaggttgttgagagttgctggtttgttgttattgttactactggtttgaactggttttatgtattttcagcttcagtaatatgtaaactcagtcgagctaacttgtatcaattgagattcattcaataaagatttcattcattttctctcctaaactaaaatggtattagagccaagaaattcttgagctcattctctatttcttctctattcttctcttcttctattcccatctctgcatctattgtgtcccagctgccatggcaagaggaggatgagctcaaactcgtaatacttccaatcgtgataacgatcctagaaacaacaatcaattttccacattagatcaaactactcgatatgatgatccacgaagtccatactacctgtcgcatagagaccatcccagtgccatgcttattgcaaaagttctactggaagtgagaactatggatcttgaaagagatcgatgatggtggccttagctgcgagaaacaaaatgaagtttgtggtgagattcatgaccagatgaagaagatgaagatcacgaatctggtgcagatgtacaacttgatcatttcttggatta

SEQ ID NO: 180254 - DNA, 836 bp, Cannabis indica
gttaatgattttcatctttcttttttaattgttgtgtatgtgtatttatatgttattcatattgttgtatggaaattatgaatagtagttgctgcaatacatcaactaaagaaggaggagcaactaaaaatgagtggataggcctcaacaaaggtacaatttctcttctcacattatttttcttttgataatacctttaatcaagcaaaattgacactgaatgatctattttccatgcttgcttgtacataattcttagttttctcatccaatctaaactcacccttctgttatttaagcaaatggcatacgattcaaaaaatttgagggtcccagagataaaatggactggagtttttccatcagattctgacaagtaccgtattccaaaccagtgttttcttcctttcacactagaaggtgagaaatggactggtctttaataaatcctaactgtccagttgtgatcttaaccgatgagttatgactttttcagacaaaaggaaaactgaaatcatgttactcagatgctaatttaaaaagagaggtgccagaatggaggtaaacctccatgtgctttttcgatgctaaccttttttggctgcctatgattggtataatgtacaatagtttcttttaacttaaaagagtggagctagaagtgatgctgcaaagaggagtattatttgtatcagttttttccataatcagtaatttatatgaatactaaaatactttttttaaattacaattatatatattattttctaactcaatatatatctaagtagtgattttatctgtgtaaaattattcattttattttgtacattttt

SEQ ID NO: 180255 - DNA, 669 bp, Cannabis indica
gtgagattttctgaggagttaaactctaacaatccacaagctctctctcggtcattcattgtataaattaaacaaccaataaagataagtttttctctcatattggtacattgaattctgtccagaattgttcttatagtttcttatttgcattgttcagtttttaattggcttttattcttgcataatggtgattgtgatcacaacagtatcagagttatttgtggggtcaaaggtaagctagcttaatagtgttcttttctaagccaagagggtcaattacatataaatccaaaagcaacgaaatcagattccatacagtgggtgcaacaagaaaaaaaatcaaacagtatgaatatcaaccactgaaaattctaatccaccaataaactccagtttttatttcaaatggccaaagaaagttctttaacacaagtatatacgataaaataaaccccttaaaatttactcaacagatttgagtaactcagcttctttacgaggaagagcttttagcgatagcaccagcttcagtcagcaaagggaccagtttcccctgcttgttcaaggcttttgtgtctacaacaaaacaataaaatacagcaaaatcaaattcaagaacagcccaaaatatgcgtgtgtgtataaatatatatatatagatagata

SEQ ID NO: 180256 - DNA, 615 bp, Cannabis indica
gagcctaaatctatcaagtaacgaacatgtttgtattatctttcggtgacttcataaatttgattttagacatacttttaggctccatatctaatagctggaaactttgtattgatcactatgtttaactattcatttctcatacctctttctcatttactgtaggccgatttttttgtccatcaaccgttttgagaaaaaaaagaacatagacttggcaatttctgcttttgctatgctaaacgcccttaaagacggtgatcttcaaggttgcaatgtggccgaagtttcgctaactattgcaggcaagtccttacctagtatttctctctgcctttggatccttgaaatgaatttatcaaccattatatgctttcttatttttatgcttaatgaggattgaactgttaattatcacatcattagatatcattatcaggtgtagtacaccactgcaatgaacagtctactttttcatgttttattcaatgtttaaccgaaaattgggattggaatggtttcaattgctgcttgtagtaatttgacttaatccacttttcatgcatcactgattaggaaagctcataatcattctctcccgagttatctattttt

SEQ ID NO: 180257 - DNA, 955 bp, Cannabis indica
ccatggtccgaccatcggacctggggtgtgggattattgggaccggctagatagagagagaaagagagatagttttagtttgggggtatttttggggttttgaaaaaaaaggtatagtttttttagggttttaattattggtttagaaatcaaattttttgattttctaagcatagaaaatcaaatttccctagtcaaaataggttgtatgaggaagaaatgaggaaaatgtgggcattaggttggttggaaagtaaaatattggtagttacataatgtttatgtatgagtgatgtgattattggtaaggttatgttttgtagtcatatatttgtgagtacaacattaaatagacattgacaatgaaaaaaatgtttatatcaattatcaatcaatatcattatcatcatacataccaactcacattatatttacagagattaaaaaatattatagcaagaacaaaataaaacatatagtaatatgttgctgcccaggatcgaactggagacctttagtgtgtaagactaacgtgataaccactacaccacagcaacattgtgtaatacatatcttacactaaatatttaatttaaaaatttgttttcgaaattatgacaaaatatataattaaatgtaaattttataaaaataccccatcttaatgtacatgtttttttgtaattagaaaatttcattcaactatagaccaacttgatcttaacattaacatgacgaaacaacatctgtaggaataagagctcaaaaaaatacaatcaacattaaaccgagaagctcgtgtaacatgatgagtaactcggttagcaaatctcttaacaaaacttaaagaaatatcacgagaaatcaaaaggtgtttacactactcctctacaatacctccaaacatggagctagattttttggtacttctaacaacttgaatgtacgtaagcgt

SEQ ID NO: 180258 - DNA, 764 bp, Cannabis indica
ctctgtttgatgagtcattcccatcatacctccctttaaccattctttatagttcagagttgggcatgtgaaggaagctggttcaattagatatactagaaaattgtttggaaagttggggcagaggatgaccttcttccctctgaatgatttgggtatgaatatgagggctaaaactgctacagctctttttgctaccatgaggtaagttaacctgaggattaagccaatacatatgaaggaggagaataataaaatatctaaggaaactgaaacactggttgaaacactgatgatgtcttaacctctgaatcaaatagcattgaagttttacctaataatactttcagttatatgagctaggaagtactccttgttaagaaaatttaacttgtgaaagtatccaatagtttcaactaattaaaacaggttttaggaaggactcatcctaagtagtgagaaaaaaatgttgtatttattaaatagtaagttttgtcattaaatttgtctagcatatatctgttgtgtttttcccctgatattttacataatgtatattgttttgtatgacctaattattgtacattaataattaaaacagaacaaagtagctaatggatttacagccataagacaaacagcagtaatccagataaactcattttaagtacaaccttcgcttagaagataaataatgaatatgcaaaccttggtaatttatttactatctggagtgtttgtttgctggtgacattgttacattt

SEQ ID NO: 180259 - DNA, 842 bp, Cannabis indica
aattgaaatgaattatttgaaacattaaacttgttaatgtgttttaccttcattttttgtacaatttggtctttaaagtgttgagggatttcactaaaattcaagtagtgtcctggcaacgtaattgtgacctcaacacccatttgacgtacaaaagctgaactctccttaccaaccactttgcctgtcacggcatcaagttttagtggtaatggtttccctgcatcacgccttctttgctcaacatccaagttggtagcaaggccacgcccctttcttcttggcggtggagcagtctgacaagttggcggtaccctactagggtccggtggatcggtaccacccccgtctccaccatgataagtggatacatcagctgacattactttttttaaaaaaaaaaatatttcatttataagtaatagtaacaataatttaaaattaataaagttaacttgaaataagaaatattaacttgcaattaataattgtatgatttacaaaataaagtgattgaaaattaatcatccatatcactatcattattaactaaatgatcattcacatcatcttcacaaaggtcaactaaaatttcttcgtcagattcttcagtagcatcttcgtcgtccacgttgcggtcatcttcgttgacaggcgaacttggttcagtgccaatgtctataggaggttgattaggtagcaaaattaactccccaagatcaactgttaacacaaaattggatgagttggtgtcgtgtaccaaatcagtttcgacgttagcatcatcatccacgatatccccaaaattttgtcggtgattttacattctcaactattttcca

SEQ ID NO: 180260 - DNA, 518 bp, Cannabis indica
tactatttttaccccatgactttcgactaatacaaaattttgccttcttttataaaaaaaaattaaaaaaattaataatattttattaattctgaaaaaaaaaaaattaaataaaaattattaaaagcctcataaaaatattaaattaattaaaactattaagtttacttaaaaatctatattattcctaaaaaaatattttcaaactttcttttatttataaacacatatcttaaaaaatcaaactaaaattataaacaaattaaaaaaaattgaaagaaaaaatcaagcttatttgtatttataaactcatatcttaaaaaataaagaaaaataattaaaaaatcaattaaaatgtaaaattattttttttaaaaaaaagttaaaaattaaactaaaaaatgttatgtgttaacccaaaaacacttcctagtaacgtggacatcaatgtttgacatgtggcaagaaggatgatgtcacgaagttgagtagacctgagtcatagcagtcgacctagg

SEQ ID NO: 180261 - DNA, 491 bp, Cannabis indica
gtttcggacagggatccgaagttcacctccaaattttggcaaagtttgcaacgagcaatgggtacaaagctgaaattcagtacagcattccatcctcagacagatggtcagtccgaaaggacaattcagatattggaggacatgttgagagcctgtgttatggactttgaaggctcatggaataagtatctaccgttgatagaattttcttacaacaacagttatcagagtacgatagggatggctccctatgaactgttatacggtaggaaatgtagatctcccatccactgggatgagacaggggagaaggaaatacctaggtcctgagtcagtacgtacgtacgtaacgacgggacccggaacctaagtagggacggtacttaaaagtaaaaaggaaagtaaaaagtaaaacgtacgtaaagtaagtcgttcgttccgtccctaccaacgaaggacgacgaacgaacgaaaggaaaggttaacggtta

SEQ ID NO: 180262 - DNA, 795 bp, Cannabis indica
ggatatgatgaatatttaattcttcttcttcttcttctacgtgcatggagatcacttgccagtctgacagacaaaggtttagcctaattataattaataataattaatatctctataataacattagtttttgcctaagttctttataattatatattatcgtgaattaataattaagatgttcatatatatatatgagctcatgatgatattgcatattttgggtaataatggggatttttctgtttttgggtagaaaatctggggaggcctgcagtttgaattaataaacaataattaagctagtatagtagtagtatatataagtagtagtactactcaagaagtatatttgctgaattaataattaatatttgtacttttcaataacttgtgtggacacttttgttttttaatttaattttaatcgttggtttccagaattgtgattctgtgtatatcgatcatgatgatgatgatgatgatgatgaataaaactacaggacaattttctcttattataatataatactattaatttctacttatatatatgtatcagtgtgtgtgagcatatatgcttaattaagctgatcatttatacagctctcctaatatatatgatcaatatgcatttacaattctttattatgtattaaatattatacatcattgatactccatacattaaaattgtaaagagaactggcaaaattaatgtgctaaataatataactttttggtgtaaatttccagtttgtgtggagccctttttatattccttctacctaagat

SEQ ID NO: 180263 - DNA, 541 bp, Cannabis indica
agaaaatacacttcaaggctcttgcctcgagtttatttttctaaacgtgtgcattacaaacacatctgaataccttcaagtgttcataacttgttggcttccctgatcaaacctcatcaggtgtcttgaaattcagttctgttgaaggatatttgttaatcaaataagctacagtagacacagcttctgcccagaacactttaggcaatccagcactcaatagcatgcacataactccttcaacaatggttatgttaaaaatttctgcaagcccattgcgctgaggagtcttcttcacagtcttgtaccttaatattccttcattcttacataacacatcaaactcatccgaacaataccccagaccactgtcagttctaagtctcttctttctccttctggtttgatcctcaatcattgtctttcagtgttcaaatttttcgtagaacgtccgtcttattcatcaaagaaacacccataattttcttgaaaataattaactatgaagaaaataacctgcttctagagtgtgatgttattc

SEQ ID NO: 180264 - DNA, 612 bp, Cannabis indica
gtttcatcacacaacaacctggccgacatctttaccaaggctctgctaccaacgcccttcaacaacattgtctccaagctgaacatttcgaatatctacactacagcttgaggggggctattactaagactacccttagtctatcaactgattctgttaaaaccaattcttggtctgttttgttttgcttcagctgagttagttattcccaactaactcagctcaatataaatagagtccccttcatgtaattgtattcatactgctttggataataataacagattcaacagagcaatttactctgttttctccttcttcttttctctgcattttctctcataactagctagtaacatctatatataaatagatgttataataaaataaaagaaaacgttttgtctttgtgggttacttctttttatatatatatgggaaaatttttaggtgagagcattacttttactttcacgtaagagcattttttttaagcttttaattagttaaataaatttggtgcataatattactatgtgctgtgaaacattatagcattctatattattattacagttatttttggtcttctttttttttttttaaaaaaac

SEQ ID NO: 180265 - DNA, 531 bp, Cannabis indica
agtgaaggactgacgtagtaatcgcattgaaaaagggatataaaatattagaataataagtgtacgtctcataatttgttttttttttttttttttttttttatttgatgagaatgttagataaattaacaattaacccaagatctatttgtatataacatagaacacaataataagatataataattaggtatgtgtacctgattgatccataacaattatctctgattgatccacagcagttactccaatttgatagtgcaatactatcaactaagtcttcctccctaaatctctaaatcagaagcagtttattttatctgattatcaaaagtatacaattgtgatgagacaatatgtatttatagagttagggaggggacttagctacaaaccctagttgggctgggcctgctcatcaaaggcttcagtcaactagaaaagcccacacttctgcttcacctagactttactcacagatgctaagcccattaacaattgatcaccaacacatgggctaacacagcaaag

SEQ ID NO: 180266 - DNA, 897 bp, Cannabis indica
caacgatccacaaatttggagaagtttggctcttgaccttgtgttgaacaattgattgagagtgttctgaatttgagcagaggtttgacagtgaatcacgtatccaagcatcacctcattcattgaattcattaaccaatgcattaagaattaattgaatctcaactattggacaaaaatagggttaagaacatcacctgctaaaaaatgttgcggaggaggattgttagcgaggatgtagccgtcgagattgtaggctcgagtggctggaagaactaacgatctccagaaattgtagttggatcgatccagtcttagattcaatggaagcaagttgttgtttggtaaggtagcttagggaatttcttcattttgagcttgagcaattggatgaactggttcattgcgtggatttggatcttgttggtcgttggacgccatagctttgataccatatcaaggatcaagacagtgatcttggaaagaaggaagaagaaagaaaatgatgattgaaaaatattgctcaactaaaatgcatgagcgagctaaacttgatttataacattgtttttacaactgaataataaataatttgtgagttgtcaaagtcttgtttgttccaatcattataggcagtttgttcagtgcctaactgattttccaacaaacttcctaactgtcttgagtcattttgttcagtatttctaatatttttctttttctttcttttcttttcttctggaaccgttcgaccactcctcctcttcttttatcttcgtctgcatgtgctccaccgcagaaatgctagttgaagattgctccgctaaaagcccaaatgctctgcccaaaaagcctcaattgctaagaaacagacccaaatcgacatcgtaccttcgt

SEQ ID NO: 180267 - DNA, 633 bp, Cannabis indica
aagaagtttatcaaagagctccccctgaatggcgacagaaaatgcaacatagactcctcattgcaaagaaattccaaagtatctattacaacattaaagaagaaagacaaaccatctcacaacatgacctaaaacatatggatattagatataaaaaaaatgagagattgactaagcaaaacaatcagatcaccacaatattacgaatgatgctacaaatgagatttatttttatttcaatcaaaaacatgccaaatgatatatctcaagaattaacatgttcaacttgtaaagaggaaacacaatgagtggcctaatcaattaacaagtgagcaatgatcatttgagcaaagaacaaattcattcaacttcacaatgagccatacttaataaaaagatgagacaacttctaccaatccacatattcacacacacttgagaaagacaataaacaaggaattttttacaggattttgaaccaagatttttcttcagtgtgtgcaagtgacctcatgtgagaacattggctcactctctcaaaatttttattaagctgcccattttttttttttttatctttagacactccggctctttcttttgcaaccagctacggctttcactctccctcag

SEQ ID NO: 180268 - DNA, 655 bp, Cannabis indica
atcaactccaaagtccaaagtaaatatttctgtgtttttagcacgaatgcagaacagaatcgatagcagaagtttaacattctatcagaggatacttgcataaataaatttatgaattgaacagaatcaaccttcaatgggaaagaagcaaaaccagttccctcaagtacgaaaaaagaacatatttataaaacttcacaaagctaaacatgataagggctatcttttacaagcatatctcttttcatcttttgacaagcatatatcattagaagaatagaataaaggaagtaataatctttcgcattcctattgaagatacatttcttctacatagatgtcctttaaatctatagttccacacaaatcatgaacgattagtaactgatcaaaatactcacggtgtgtttcccatcaagatagtctagatcatcccgcaatgtaaagtaaaactgaaagcaaaagcaactcagtgagcacatgcgcaccaatgggatgccaataaaaaaagttgaattgagtattaaacaggattcttttttaaaaccgccagaatcctctatactcggtctgattcttattttacctgtagaacgcattccagtattctccccctacccacctgggccctaatcgggcaaacctaaggtacccc

SEQ ID NO: 180269 - DNA, 1093 bp, Cannabis indica
gattaattttgttttaaattatatttttcctatatataataatagaatgcaaatttaatctattaagttttaaaatatatttatattatatgtagtagattcataaattattatatttttctattaaaatattaattgtatttataaattttttaaacatgcataaatatgtgtggatttgaatcatttacttttacatatcaatcaatattcaattcacacaagtatagattttaaattttctaattcaattaaatttgtacacatttaataaattggattggattgaatttaagtaggtatttgatgaacaccctagaaattcttctaaggcttagtttatttagtgacccaaaaaatccataatattagtttggactttttacaccacatactgaaatttcttatttttttatttttataatgtgggacagaatttttttaaaaaatacggtgtaagttttgtactatgtattgtattaagtttttatggttgttttactcttatttttttagttgttccactgttaatttaattgttctgttttgctgttttacagttattttataagaaaatagtattttgtaaaaaattcggtgtgatagtaaaattgtaaattgtttccaaaaatccaatatttttataaaaacccctattttctgtgtcaatgggaggatcaatttgaatttaatgggctgaggaaggcccaatcattatggctttgtgaaaaccctaaccttctttcatctgcagtgcttttatataaactcccacaacctaacgagactgtcagaatcctaatcttcatctctgctctttcgttgttgtgtataagcttttcttcatacgctatttcatttttgttttctttatttatcaaagcaggaattgtgtgtatcggcgttgtgctaaattcagtgcacactttccgaaagagtttcctgcaaaattaatttggggaaagtgggcagttgtgtttcaagttctttggttgaaattcaacaatcattttccccatatcccatttttcaaatgatttatctttttttcgctatatatgaatggattgtatattttttctcatttttttta

SEQ ID NO: 180270 - DNA, 686 bp, Cannabis indica
aatcttcgtgaaaagatctcacttacctaagtattaattgttaaagcgatatgtatacaactagctctaatgcttatatccaagactacgcctcaatatgagtagcactatagtagtataataacttaattttaattaatattaatagctacttttcagtgtggataagttacaatttttttttttcacattatagtgtataatatagttgtaggagttttacaaaatttttttaaaaaaattcaaatattttagaatgttgaaataagaattcaaacagtttcttgcacccgatataaatatcaaaacaagaatacttttaacaagctgtttcaatcttgattttgagattctaaattatacaaaatttcttaaaaatttatacgatacattaaaataaaatttctatgtataaaagatatttataaatagtgattaaaaataccaacaattttttaatatataaattttgttaaggtatagagaatctaattttgagtggtgaagattgagatatgatctcatgaccagttgcccactttgtgatataaaaaagtgaaagagagctttcttcatgatccaccaacaatagaaacatctttttaatttaattaagtagcaagtataccccaaatccaagaatatatattatacataaatttatatatatatatatatataatatg

SEQ ID NO: 180271 - DNA, 831 bp, Cannabis indica
gttgattttgagtgttcctcccctgcgctgccctggtcgaggctacctctcgctctaactcagagtttcgatgctgcgcctcttccagacggcgtcttaggcggcgactttccgtttcataagttctttctcccacagattaggcacccctacggttgagctcctcatcccccgcctcgggattctgaccattcccacactgagttctcctcgagcgtgttgtcctcgtactcaaaccaacgccgggttgagttctctggggatgtgttgtccgagcactgggaccatcctcagattgagccctcctggaatgggtagtccttctggacggcgaattagttgatcttttagagcccataggctcttttcgtaaacgatggttagtttcctcatgtggggtgttaatattctctgggttttcagccataaaggagaaggttttttctttgaaagaggggaagactttttctgattttttttagaggctctcaatgagagcaccaaactattaacacagatttttgttaaccaaatttgagcctcacgaatatgattcaatgcagaaattaaaaaaaaggagaaaattgtagaaaaataaaataagaacactgggttttttacgtggttttgcagttaaaattctgcatagtccacgagtcaatcttattcacatttctgagtatgttctttttttttttcagggcctctcgtgtaagagtttttttttctgtccccttttcttgagattgtctgccactatttataattgcatagtgagagttaattacaaggctgaccaaaatgtaattacagttatcatcccttaaagca

SEQ ID NO: 180272 - DNA, 663 bp, Cannabis indica
gtatgactcttgataaaagtccagatctcatggtatgagtgctacgttttatgagcaacattgggatgtggttggtcctttaattttcaaagcagttttggattgtctttctggggctgcggataaaacacttatcaaatctttgttgcaaattattttaccaggatctagaattactaacatgtatgtttgatcattaactataatctaacaccctaaatatgaatatcctaatacgatgaaataaatacatataaagtttagaaaaactttaaattgatggcagcgaaataatatgactcattccgttcagatctctagcccttgttgttccttactaccacagagcattatcaagatttgaacctggatcttctctcattcagtttggttaaccacagtcttccacattatgattgagtacttgacttgctatgagtgggcatggtactctatcactaatggctcgaattgatgaagaacaataaaaggggttcgaaatcactatagaaggagcactcatttactagttgtttgacaaagaataaaaactggtttagatgagaaagaggacatcttattatttttataacatttattctacggtttattatttaattataaaagatttaaaaaaaaaagataaaaaaaatagtacaaaat

SEQ ID NO: 180273 - DNA, 781 bp, Cannabis indica
ctgtttcaaataagttttaaactttgctttcaaaattttaaaatacttgtcaataaaaatgttgtaatgcaaacattagtatttagctgcaattttaccaacgttttcttttttaaggcaatttgtatgaagtttgaaaacaatgacatttttatttatgagttgtaactttactttatttatataaacgccttttttaagggaaaaaaaaaagagaaattattacattttttcctaatattatcctattaattaggatatgatattctgtcaaaaagatacatgcagtttcttttttaattagaattttcgtgtactaattctagcaattgtgaataatgtgtgcaggaagaagtagcaatgttagtaagagcactagtagaatcaagaagcaaagtaaatttagggaaattgctaaatttgtgtacagtgaacgccttagggcgagtgatgctagggtatcgagttttcggtgatggaagcgggaagagcgatgcaagagctgatgaatttaaggccatggtgatggaactgatggtacttgctggaatatttaaatataggagaatttgtgccagcattggagtggcttgacttgcaaggtgtggctgctaagatgaagaagctccataagagatttgacactttcttggggggtccagttattgagggaacataaagaccaaaaattgctcaaaaactaacaacaaactcatgactgttgactactttgattttcctcaaatgaaaaatggtgaagatgaaaagtgaaaaagcttac

SEQ ID NO: 180274 - DNA, 620 bp, Cannabis indica
caatacaatactatacaatactatacggtgtaatacaaacgaaccctataattttaagggataattacaccacatactgaaattttttaatttttttcctttaatactttggggtggaatttttttcaaaaatactgtgtactgtattaaattttcactgatattctactattatgttttagttgttccactactcttatttttagttgttctgttttgtattctactgttattttataaaaacacagtacttttgaaaaaatttccgtgtgatagtatttttgtaaaagttatcccaaaatattcatattcccatattacatcttacctatagcgaagtgagctgatgtctttgggccggactagattattgggtggctatgtcccatcctagaggcccactcaaaagagacccaacatttaaaaagataagcccaaaataatcattcaatatgaaactcaaatattataaatattaaaaatttgatgttacccagaatcgaccctcattgctgctaataattgtttttataatcatattacttgctgtacaatgacaattgacgactcatgactttagttattacaatcacacattttttataataagaatttttatt

SEQ ID NO: 180275 - DNA, 587 bp, Cannabis indica
agttatctgatccacgtgttccctctcgactggtccacgtatattgggcgaatttaggagcaacaactatatataattatatttcatacgtttttatatgttaatttttttataagatttatttttaaagaatttaccgtgtatatttttttaatgcgtataaataagtggagaaagatttttttagcataaatgaataattaaatattttttgatcaaagaaaaaatcaagaaaatgagaaaattaaggagagattaaatagaaatatttggagtgatttgagggtgtcatgtcaccgtctcatacttctcctttatatatatactagggaacgataccgcgcctcgcgcggttgtttaatatctttttattatgttgtaaaaagtaaaatttatatttaatatatttaaagtaaaaatattagttaattaatatattaatattctataaaaaaataataaaaattatgattttaatctgttaaaatatcatgttataaaaaaatattaaaatattaaaatcacattatctaattgaattattactatattattgtaagtttgttatctttatatatatatatatt

SEQ ID NO: 180276 - DNA, 782 bp, Cannabis indica
acatacatatatagtctctcttatttctttttattttttgtaattatatagatactctctatatatttaaagaattctaacgttattttttagagaaaaaaggaaagagagagagagaaatattttaacacattaatctctaaattggatcaattgatcatcacggccctgctatatatgtatatatatataacgttgattgtcatcaaagctatacaattagatgaatgaattagttaatgtataatacagagttaatttattgttttctaaaattgttatagcaatgtccaactaattatctatatgtgtatagaaactaaataattggcaactcattattatggttcctttaaatggtacacaagctagaccaataatatgaggaaaagcatgtccttttattatgaaaggaaaatcaatttggtgatacattattttttttgggtaaatgatgttgagatttactataataattttaacttatattacctttatagctatatgaggttttcatttctctcgttttttagaaggaaatgtaatatgctactaaaccaggaaaagtcacttcattatacaaacctacacatccattatgcatcatcatcatactataaatatatacatataacgttcatatattagttataaaggtttaaactattgcattcatatatatatatataatgacaaaaagtgaacgatcgaggtgatgtgtgttatttttttagtagtaatcatcatcattatataattataatttaattaatgttagttta

SEQ ID NO: 180277 - DNA, 679 bp, Cannabis indica
atgttttatgaaggccctttgccttagaatgttttatacagtcaaacattcgcaaatagttctgtgtattaagaatggaacatgccatggtcatcttttctttcctaaacaggcctaaggcaatgaatggctctaatcaggataagcaccagctgcatgtagaccccgctgacaaaaattatgatcggtcttgttttacttctttgtcaaagtttcatgtactacttgtaattactatgagaaattgaatctttttttaacatttttcactgtttgtttgttgaaacatatcaaatagcttacaatgctgctcatctctgtcttccagataatgcaagctttgcaaagttcaggctcgattggcttacgggaagattcaaagagggtccggcatatgcaaatggccagtacaccaagtgaaactcaccatacttatatggttggtaatgctggacaagaaactatagttggtggtcatttctccgaagaggatacttcatctgacgacttcacaccagcaagagagatcaatcgtcgaacatttgggagtatcgatattagctttgatgaagatgagatttctgcaagagaggggttcgccttcagccaccattgaaagtttcaaatgtggcagaccctggaaacaaggtaaggaattctatagctacatgtataaaaa

SEQ ID NO: 180278 - DNA, 506 bp, Cannabis indica
aggttgttgatttgattctgttgttgtgggaattgttgttgatgatctatagaaaagcttccatgtacgtcttggtattattacctacttagttccacactcttctctttcttcttttctcttcttgatttgcttcggttttcttctgtgtcatgaataatcaacctcaccaaaccttcttgaaactccattgttgattctccttctttgaaacaaactcaaagcaccctttaatctggaatagtgaaatacaataatggtggcttaaagttcataactttttcaccagattcttggtgatgcttgaaaaagaaaatatgaaacgtttgaatgtaagtgaattgagattcggtttggagtatgaaaaaataaaaaaaaaatatttttttaatttttgtaaattaaaaaaagtaaaatagtaaaaaaaaataattttttttatttttaatttttgtaaatatttataattattttttaacactaatactacgtggactattaaaaat

SEQ ID NO: 180279 - DNA, 708 bp, Cannabis indica
  modified_base (664)..(664): a, c, t, g, unknown or other
taaaatattaaattataagtttaatattggctccatgtggcatcttctagagatggttagtgtcaacttctgtttgaaaattaaaattcatccatctctatgagctttcacaattactccccttaaaaggtacactatcaaactgtcaaaagcttaaccattgttattacttattagtattacaagctattttttcaactcaagaaattgttatgtaaatggtggaatagggacaaacttacattatccaagatataataaggtgtataaatagaacttctgattgtatactttattttgcttatgacatcgaattaaattacgttaaagtacaatcaaattttaatacaataaattattattttcttttttaaaattatacaataaattaatttaaattaaaaaatttagtagaatgaaaaatatacaaaatcaataaaaataaataaacataactcagtatatactagcaatatacacaaacatataatacatatttatataataaattatttttaataagtgacaagtgagacatattttaaataaaaatatttaaaaattatctattatataaatatgtattaaatttgtgtgtaaattatatgtactatatcattacattacattacaaaagtaaagagtattttgtacaaaattaatntaattataaaaatatagatttagatttttttgttttaaacagaa

SEQ ID NO: 180280 - DNA, 724 bp, Cannabis indica
ataccgttttttaatgtgcagtagttagttttttttttttctttttttttttacaatttcttatttatgtgtttttttataacatctattatttttttttctgtgtgtttggatctaaagtgttttgaatatagattcaatcaataaaaaaaatgatgtatggagcattagaaaatatattcaatttatttaatatttattgtatttacttatctatttgttaatcacttcttcttcttctttattttcttacactaattgaaagaaaggttttctaaaataaaaaaactgctcaatttgattttttagttcaattgaaaaaataaatttaagacttataagagaagatgtagttgcttattagcaaaatctaaaaatatctaggtttaatattgcatatttataaatatgaatgaataatagagatttcaaaaattgaaaataagtctcatacttttcctagttaagcaaaaaagaaaaaaaaaaagtcatatttttcaaaagtataaaaaaaaaaaacaacatattttaaaataataaagaaacaaaagagtttgaggtgatgaaggtaaaatcacaatataatttttcttttttttttttaaaaaaaaaagttataccaaacactatcctacacaataacatatgttaatatcatacaaccaccctattcaaccaatgataagtctaaaataatgctcttacatgtgagaacaaaagtgat

SEQ ID NO: 180281 - DNA, 1160 bp, Cannabis indica
gggtgccctttagcattccaagggggtttgaggcaccatggatactctttaattagtagatttttttttattacgtaacaattatcaataaataaaaaaagtgattaataatgtagttaaaagtaattaataattaataaagtagggttcaaattagggatgcactattttttccatggggatgggcctcgcagggatcccgtttaaatgggaaacaggacggggacgaggatcattttttgtccccgaatattaaactgggtgggaacggggacgacactccccgcctcgatggactccgtttaatatttttgttatctttctaataatttttttatattttatgtttgtatattatttagtatattagtatctttacttttttctatatatttttaagttgtaattagtatactaaataataaataatgtgtaatattttaatttttatataatttaatattttaatacatttaaatttttaataaactttatttttatattaagggattcttcacttcgtccccatcccatttaggggatttttccaccccatctacgatgagaaatatgcggggatggggattaaaaatctttagcagaaaatagaatgagggagcactcctctctaattttacgctccgtatacatccatagttcaaatacatattattatattaagaaaaagaaaaatttagaattagaggttggtataccaattaccaatctttttgttttaagaggtgcaataaaaaatgaggcttttataccatgaaattttttactttttttcttttttactatgggacgtaattttttttcaaaaatactgcgtataaatttttattattattctactgttgttatttagttgttccactcttatttttaattgttctcttttgttgttttacatttgttttataaaaaaatagtatttttgtaaaaatttcatgtgatagtaaaatcataaattttatctcaaatccaatatttttgtagaacccatgaaaatttataagggttaatttcacaaatgcacaaaaacaacaaaaaaacaacaaaaataacggtttcacggaattttaaacattttttacagttttttttagatttttatttactataaaatacggtttttttaattgtttgaaattttg

SEQ ID NO: 180282 - DNA, 631 bp, Cannabis indica
agataagtcattttgaaaaatgtttttttaaaaaaatatcaaaatatatgtatattaatattttattaatattgttaattattttactaatttatttgttaacattattaattttgtaggtattttatttttagaaaatatgtagaagtttagtaggtttatgtaaattttcgagagtaggttattatttgaataagcatgtcctttagttaaacaaatggtgattctttgtcattggttaatatttacattgaaaattcttaaaataattcatatcacttatacaataaataaataaataaataataaaatatctaaatactcaaaaaaaaatggctttttaaaggttaaaaaaaaaaaaaaaaaaaaaaacaaacaacaactctcagagcactcttattagctctactgtatcaattcaaaatacattattaaataaggataaataccattttggatcatgtgtttcgcaaaagttactaattggaccctgtgtttgttaaatgacaaatggaccctgtatttctaaaataatacaataggaccctgaattgattttaaagttaattataattcgatgtaaaagtgctatgacaaaactgtttacattttttgtatctgttcgtattag

SEQ ID NO: 180283 - DNA, 600 bp, Cannabis indica
cagttaataaataattactaataattattgtccttctactttttttaaaaaaatacagcgtaactaacataactattatttagaccaatatttgaagcaaaacattagaaaaaataataataataataataataataataatatacaatatcccacacaaaatttatagttaactgaaaaagaaatgtttgaacaaaatatgaaattatttttttaaatgtagttaacaaatatatttccaaaaaaaagaaatgtagttaacaaatagaacttgctttgtatatagtcttattagggttaaattttatatttttattatgataagagaaaattacatagaaaaattaaagcttctctattgtgggcaacacttcaccaaacaaaagtgatggagatctgaaattaacagccaccagcgatgtaaaagctttttgtgatcttcatgaatgccgattaggaacttaggactgatctccattaacataggagataagtttttcttcgatatactgccatgacagcaagattaccgtggggagattttcatgaagatgacgacaaaggatcaacaatcgaggaggagatctagttgaatcattg

SEQ ID NO: 180284 - DNA, 591 bp, Cannabis indica
cttcgatggtgcctaagcccgagggagcccatagatgtctctgttgatgagcaatattgctcaactctaacatctaaattcctccatgagatgcactttaaatgccttcaattgagcatcaaagaatcgataattacgacgatccaactccatcaacatcttcgcaatctctattttcttcatggctgagagttcttaaagtgaatctttcactgtaattgctctcaatgaaagcaccaattgttagataatagttctcttcgagacaggacaaatctccgaaatgcactcttcgagacagtaccaatctccaattgaaccaaagttctatttactcattccatatcccataatagctatacaattacatatttatagtgattcaccccctatgcaaattactaataaacccccacacttaaataataatcctttattggatccatccattttactgtgtaagataatgttagcaagtgtgaaatgctatgtatatgcccagtgtacaatgtatggagttcgttttctccatttttttggtgaatcgttttctccattttacttcaacaatgttattttctcattttatgg

SEQ ID NO: 180285 - DNA, 546 bp, Cannabis indica
  modified_base (57)..(57): a, c, t, g, unknown or other
ggctcagcaaaatacatatcaaatttgcatcagcaacagtttagctcccaaagtaangggttacagcagcaactgcatggaactcagaccagtaactctaactcaagcatgcagactaatcaacactccgtacacatgttacaacaacaatccaaagctccaatgcagcaacaatcgcagccgagtggatctaatttgctaccaactcaggcacaacaatcacaaccacaacagcaaatgttgtcacaaattcagtcacagccgcagatgcagcaacagttaggtttgcaacaacagccaaatccactgcagcgtgaaatgccacaaaggcttcatgtgtcgggtcaaacttcaggatcattgcctccaacacaaaatgtaattgatcagcaaaagcagttataccaatcacagagaccccttccagagacatcatcaagtatgttgttgccttaattatatagttttagcatatgtttccatgctgaaaagatttgttcatcaggaatttaagcatggttttttgtactatgtaagtcaggagac

SEQ ID NO: 180286 - DNA, 699 bp, Cannabis indica
ttttttaattagaaatgctactcttagaagctgaatctcatttctcatgattttatgtgcatacttttatgtcctttatctagcatctgttgattcaactgctcaaactggacatgccaacggaggtgattggcaagaggaggtttatcagaaggtgacatgacttgttcattagggttatttattttttatttttttgaaaatattgatggaaatttaaaaaattatatagtatatataatacatatttgttgtttaaatatttctatatatgtatatatatattgataaaatttgtagaaaatcaatataactaaataaatacaacaataaaaattagaaacatatcacatgaagagtaatcaagctaaatagtttttaataaaattaatatgaaacatagcataataatagagtaaataattttatcatcattttaatttttttattttaaattttaaaagagctcaaataaataaacaaatcatttgaaaatgtctcattttaatataaaattgaataaaacgacttcaaacatataaatctgaaatttctcaagtaaccaaacatataattttgatcaaattttaactccttaattttaaacttctaaataatagtgaaatttcataattagttgaatctgtaacttatgatcagtttttgacttgtaaatattgaaactagataaatatattt

SEQ ID NO: 180287 - DNA, 818 bp, Cannabis indica
acatcattcatcttatcctcaaaatctaacagggggtataatttgatatttttttttttgaggaacaagaggctgcaacaaagaaacaagacaagagaacaacaacagccaaaggaggaaactaaaacgattcctccaagtcttcatctcgcaacctgagggctgccttagcaagtgaatgagcatttttattaaattgacgtggtaagtgcagcaaagaagcctcaggaaaattggagagggagagcctaatcttcgcaattatactggataaggtcgagtgatcatgccaagttccattcactttagtgacaagattaagacaaacggtaaagatgaaagctgggttcaactgggggtataatttgatatatgttaagtttattggacataattttgtaaatattaaaatttggagacacaacttagtatatggacaatcgccacattagcaaaattaaatgaaattcgataaaaattcttaaatccaacaatctcaatagttcaaattaagagaatttttaacgacttaaaaagttcaaaaggtataatttcgtacatgtcatagttcatgggtaaaaattctaattagttttatttataaatataaagtaatttcaatcattttagtaattttaattaattatttttatttaatatgaatttatttatttagtactgacttatcatgtagatgtgtgtttattgtgtgtgattttatattattagcatatagtgttgtaaattcatgtatgtgtcgtgtggtttgacttatatattttcgtgtgtgtttttaaaatatggatcgtattgtgtcg

SEQ ID NO: 180288 - DNA, 595 bp, Cannabis indica
acctaatgtacatagttattttttaattaaaaaaaattaaaaattaaagaaagagttgctcatatatatagggatatgattttatcttgtgatgtactttcacggaatgtattctgtggtacattagatgggtctcagggtacattaaatgagtgtcagggtacgtttatactttttaaccctaattacccctagatcaatcttagccgtcagatcaaattactccctcatctgatggctgccgtacattatgaattacaatccgtaaaagtacgataacggtacaaaatcatattctatatatatagctggtttggcaattataacaaagagaaaacatatacgtatatgtgtgaaccaatgaatcaacaaaggtggatttgtgatgttaaggctagctaggttatagggtatatgataggaatgataattgtacttacacctaataaatattacaaagtgatgttatagtacttttaactaattgtatgtcactataaggaaaaaaatgtattagtgaatcgtaacttaaggatttttttgccactaaagtttaaggatgataagttgtcactaaatagttattattgacact

SEQ ID NO: 180289 - DNA, 1154 bp, Cannabis indica
cgagcccatatacttttggcttacttaaaaatttttagcattagtgtcccttgacttaaaatcaaatttcccttagtatttggcatgagaatttcaatttttacttttgcaatcaattctttgagttttgaaaacattagcgataaagttgttttagtcaatctttttacaaaatgttaataattttttatggacaattttaaaattttctaaattataaatactagataagagttttcatgaattccttttaaccctatacaatccaatttcaatattcattggatgttgaatttttacaataaacacaatctaattaatttgacttaactgatccaattcagtccattagaatttcaaagctttaattaactgggttgaaaaatttgttactagcgatgaacaatatccaatcaaattcaattaaattgaaccggtcaaatttaatctaattataaaaaaaaaaaaaatatcgaattacaattgaattggattagatgttaaaggttggattcaaattagattgaatcagttattagatgtcaatctcaaaatttatttaaaaatcgatacaatctaattacatttatataagttaaaaaaataaaaataaatattaattatatttttagtggttgattttatttgtgtattaaatttattgtgttgtgtattcatttttataatattttgattcatttattacttgtttttttttttttgaattgttattcatttattaattgttagtgttattattttaattatattaaatttttaattacattaaatttgtaaggatgaaatttatttaaattaatattaaaaattaaatatgtaattagatatctaattaaaaatttaaattttaaactactggataggattaagagaaaaaaagttaagaattggatggatgcgagtaaaattttctttttttgggtctgtgaaaaatgcgagtaaagttgaaagaaggaaaaagcagaaaaaaagaagactaaacgacgtcgttgatagtatttccgacccgtataatataaagtaaataaaagaatattatatatagagactagagagagagggtgagactgaaagagggagagaaagaatttgaaattcaaaagggcggtcaagtcaactcgttttaggcagta

SEQ ID NO: 180290 - DNA, 733 bp, Cannabis indica
atttttaataaaatattatatgttctaatataaacatgtaagagtacacataattcattaacatcttaaatttcttaggagttcaaataattttgaaaatttttaccgttaatttaactcaaaaaattaaaatgtaaataaaataatattagaaaaaattagctgcgaaaacttgttaaaaaaagccttatttgaataaatgatttacctttgtgctatgtgaacatgaaattattattattattattattattattattattattattattattattattattattattatcacatcactcataatcaattaaaatataagccaatcacgaaaattataacacgtctaactacataattattagctgatcagagtttacagttgctagtaaaatatatatatctatatatattacatattataaaaggaaaaatatatctatttgttaacttttacaccaagatctagagccacaaatacaatttcattttccctcatttataaaagaaaaaaaatatataaagtgatttactaagataaattgctaatattttgttaataaggataaaacaaaaattagatataacaagtggctattttgtaaacaaaaaatcaatggctggagttgccaaagccagagtacaataattattttatatcgagtatgtggtgtacatatggtacgtatatacatatacatatacatatatatatatatatggtgggtccaaa

SEQ ID NO: 180291 - DNA, 651 bp, Cannabis indica
atcattgacaattgcaaaatatacatgtgaaagaaatatacaattttgcaagcttactgagtagttctttctttttttttttctttttttttttttgtagttaacagcagatggagaatattccttcttagtttgtagagcggtgtactttatatttagtctcatcactgttcccgttcagcaattaattttattacttattcaggtaccaaataccagataattggccatatcaagaggctaggcagcttttaaagagccgaacgtctatagtaatgaagaagaacctgagattaagtggactgctccagatgaagaagtaatttgtacattttttttaattttcttttgggtgtgtatcgtatatgttaataaatattaacgtgtttctgctgggagtgtatgtatgtatggtttcatgtctacatgtgctgtacataaatgttatgtatcaacttttttaattgtaattaaatgattttaagttgtcatctgtttttacaggggttgattgcctttttggtaaatgaaaatggattcaacagtgacagggtgacaaaggtgtgcattctacttattcatattatattattacttttatttagaaaagttaatttttatttattctgtttctcttctaattattttagg

SEQ ID NO: 180292 - DNA, 658 bp, Cannabis indica
gatggtcaaacctctagctaagaaactccaattcactcaaacatgtagtctctgccatgtaactctactcctgacgattacccccttaaacaaaaactcaaatcccctatttatatgaatttgactgtaccctcaatttctcagacggaatcctcttcattttttttggcctctcgagacttggagaggccatccgtggcctccatttcggtcttcaattattggagtcagcagcatcgtacacaattgagaaagagagagggagaaagacagacaatgagggggctcgagggtggaaggtcgagatttgagttttgagttttcggggttcatttcgaccttggtgatcgagaatggtcgtcgttggtcgggcttggccatggctgtttgacagagaaaagagaaagacatgaaagagggggtgagcccgagtggtcaagtaaaggagggaggaccgagttttgggttttgggacctgaggattccaaatatatgctttgcttggaccactgtcgtcggagatgtctggcccccaaactaagtcagcaccagacgagagaagacagagagagtgtggtagagagagagagagtgtgtgtgggtggataaaattagagttttttccatgttttagttttttttaatattattttaattt

SEQ ID NO: 180293 - DNA, 528 bp, Cannabis indica
tccttttgagaatagaggaacacctatttatagttgttagtggggtcccctttaagttggtattaaagccaacagttataaataacaccagttttctccagattcatctgatgagcaaatagataggtatactggcttgacaggttaagtgaatttaatcccaacagttcacaccaaaaatagagtacaaatggttatggaaattgaaaaaaaaaaagcagaaaattgggtagggaaaaatagattttaatcgtgtgtaaggaagaagatcagttatagagaattatttttaacaaaaaaaaaaaaaaaacaagaaacaaaactgaaatgaaaatgaaaaagaaaagaaaaaaagagaggaaaaacttagatcaataagggtcaatcacctgacgtgtgaagacacttaggctgcatgtaaagagtaatattgtgtgtgtaagtggtaatattgtaaataataaaacttaaaagtgtaaaaaagtaaactacacgcgtgtgtgagtatatatgtaataaaaaaattaa

SEQ ID NO: 180294 - DNA, 780 bp, Cannabis indica
aaagaccaattaatgaataattgtaatatttatattctgtgtattttgtctatgaaacgcttgctcacagattaacttttcaaagttattttcttaattaaacatgcgtactatgataccctcgcaagacaatacccatgcaaagtctatgaaacttggtgaatagcaagtgaccgagagacttgtctgcatggtcacttgggagcacccatactatacaacacatcgaactaacacaaagaacttatgaagagaaattttaacgcttagtataagctactaaacctacctctaattcgtgcaggcatacttcagcttggcaaagtaaatccaatccaaatactagtagtgttcaaaaacaaaaggcttatggccaaagacacgaacatgaagatcctggggctgataataaagtaattttctaaaaaggctccaggccacataggacatgaaagtaatgttctaaaaaggcctcaggtcacataggacataatatttcaaaaaggccataggccacatggaacacaaaagtgagtaatgttctaaagctaaaatgccacaggctatgcggaacatgaaaacattgtctatatgatacacacatgatgcttaatactaacaaaaagtccatatacatgtgtacaagagctgaatttggaggcgccaatgttaagatccacagagtcaaacattacaattctggctggccactcccctccacttggacgtgctttggctagccagacccctactataagatgtccaaggccaactcagcca

SEQ ID NO: 180295 - DNA, 751 bp, Cannabis indica
gattagatttgattcaaaaatataaaatccgcacttagtgcggatcggatgtactatgaacaaaatagtgaggattagatacagatgaacacccttagctaaaaacatatctatattattttttaatttttttttacaataaatacataataaaactcatgtaataattttattatttttttaaaacttacaataaaaattcttttttatgattttgttattgtttctattattatattattgcgtttattatgtatattaatctttaacattcttaattatttctgttatttttttaatattggggtgtatgttcacgtttattatttttaaaattttataattattttctttaaatttttaaaactttaaacatttttttttaaaaaaaataaaaaatttatgagtggtttccttcagtttataaaattttaatattattaaaaaaattaaaagtttatgaatggtttcaatttataaaattttaatatattacttttatatatcttgctaacattttggaactaatttaaattagcttaaaattttatataatattttcatttttttaaaaaaatactattatgttttattatttttttttgttttataaataacattttaattaaataatttttaatacaaaatgatattgtttattgtacaacatccaaaaaattatacaactacaattacacatataaaaataataactttaaatatagggccaagatacaaaatgaccataaat

SEQ ID NO: 180296 - DNA, 1560 bp, Cannabis indica
atcacaattgttcctttcttatcaaaactccatccatcgaaacaacatttaaatttttctcaaatcaaatccaacatcaaatcaaaattatttatgaaatgaaaaattaggttttaccgaagattcaagtgtttaattctcctttacagaagaagattgggatgatgacgatgatgataatagttgctgtgattgagtgtaagcagatccaatcccaatcccagcaccaaaagctacagatgcccaacgagtaactggactcctgaagagaagaagaccagccaaggctccaccgaatgaaccgtacacgaaacgacgaagactgagatccaaacacgtgtcccatttggcattgacgacgtcgtattgggttggagaagtcatggttttgttgtccgccattttcaaaaaccagaaagaaacacaatgaagatttgtatgaagaagaagaagaaagagaggtttgatattttaattaggataatatatatattttcactttctaattttcttttttaaaatataatttaaggtaatttataaataaaactaaaaaattatattaatgtttttttggggatatttgttggtttttttttatggttgatgagtgatttttcggatgttagtattatcgaatttatttttctggtattggtaaagctgttagaaatttgaattttttgtcatttactttgggggtgtggttgaaaattgtaaacaacttaaaaatattttcttacgttttgtcaaacggtctattactcaggttgttcatctagtgattagagcatcatgttgattataattttttggtagtataatctctcttttgtatgttgttaatattgttgaggtcgagttgatttagttgaatgaaatttatagttacaaaaaaaaatatttatgcaaataccacgtgttgtgtagtgtagtgttagggatgcctttagtgacatattttcttacttgggtcaagggttgtgggcggtaaggtaacaaaaatgatctttttttcaaaaaaaaaaaaaaagactaccaataacctaattaaggtagactgaggtataaggtttctatagatgacatgaagtcctcaaaattgtcaaaatgacagaaaaactggaaaaagagtttgtaccacattattctttaggggttcgatgggttgcagcaaaagttcgtccctaacctttagacagtacttttatcaagtatgtatcaaaccattatcgaaccttatcgagtattcacgaaaaaatcacagaaaaatgcagatttcaccaaaacttgttttataccaaaaaatgagtgaaaatcacacagaaaagaaaagatcgatcaactaaacaccaacctatatcaaaattagtgattcgcagtttggagtttttaaggagttttgggtttgatgttttgttcgtcgatcaaatgggtaggccaaccggtggtttgtcggagtgggtttgggtgggcgagacgatggtggtggtgacgcttcgttgttcaggggagagggtggtggtttgaattgtatgaaagaatgagagagggaaatgt

SEQ ID NO: 180297 - DNA, 657 bp, Cannabis indica
atgacaatggtaaagctaataggctgctcaaatgattcatgctagataagttctcaagtaccatgtcattctcgccttttgttgtatgagaaaaatagcgaatcttgctcgaaagcgtatgcaagtcttgacaattattatcatagtgaaaactacactcccctgatacatgcattgctagatcatgtatgagatcatgcatagaaagatcaaagttattatcttgcccggatctttgaaaaaatgatcttgatattaaagcattcaaatagtcttctccaacatcttcaatttctttttcctttttgaggttgcaaaagaccttcggccatccatattaagtattagtttttcttctatcatcattgcgaaattcataatcttttggtaaatatggagagataagaaaaacaatggcttcaaatatgaaggtaaaaatacggtagcttaaccacaaggctggaacaattccaatgttgcaacagttggccaactcccacgacacaactttgcagtacatgtctccactcctcgctacttgacatagatcgtaatagaccagccatcgatttacagctaaaggaaggcccttgcacttttacgtatttgctttccaatttcttcctaagtctagacgtacatcattcgagcctctat

SEQ ID NO: 180298 - DNA, 679 bp, Cannabis indica
catctctatttataaatatatggcctcgtttgatattttaatattgtagattcaaatatactacatataagtatctctattgtaattgctcttgaagaaattatttttgggttgatgcttaaattacatgattacgtactaagggtgttcatcaatatactcacactgtataaatcactcgcatcgcaccacaccgcataaaaaaaatatgatttaaaatcttttacggtgccgttgcggtttgtaattttgccaaatcatgcagtgcagtacggtttgcagttcaaatcgtaccgctatattataaagttaccaatctttacaatatgaattttatgttttttttccataaaataaatatataatatatgtgtatattattttatttttttaaagaaaatttcaataaaataatttgatgattattatacatgttatgatggtaaaattttaataaggtttttttgttttgtattgttaaagcaatattagtttgatttttaaattttataataatatttgataatgatgatagtgtaaaccgcacaacactatactgcattttcgtggtgtgatttttgcggtttgaaaaattataaaaactgtatatgcggtttgatttaaaaaaaagactacaacccgcaccacttatactgcaaacactcttattacgcacctt

SEQ ID NO: 180299 - DNA, 689 bp, Cannabis indica
aattgtgaagaagaacagtgatgtgttggcatggagccattctgatgtgaatgaaatcagtcatcatgtaatttgtcatgttttaaacaaagaccctaaggcagatccaatccgtcagaattcactgttgtttagcttttgtcttgcctttacttacacatgtaaataatatatgtgagtcgacagactcagtaaaaaagaaataacataaacatataaccagatcgtaaccaggcgcccatacgtctaatcacgatcctatcccgcatccaacgcatactaagtctggaactttcttacgacaatatgattgaccataatatttgcctatactagtattttaattacgtcgatgtgatagagtcaatccatacttaactatgttgccaaacttatattcgtcgatattcaatgtagctccatgtacactaatacctctcttattgatatgttaatgttaggtttttattagtattatttttaggttaattttagggtgtttttaagtaagtttactcttgttttgtgtaattttatgcttttagtaaatgctattttgcaggtttaatgtagaagaaaattgagaaatgttaaaaagaatataagaaaatgtcaaataaatcaactatcaagggcaagagcaccaggaaattcattgaagaaaaaaattcaaaaatttcagtgcaatt

SEQ ID NO: 180300 - DNA, 508 bp, Cannabis indica
agctccggttttctcttcaagaaatctgatctaagaaaatgggaaattcacacaagatcagaataaacagctagttatataagaataaatgtgtaatcaaaacttaccatttttacctcaatttccataaataggaaagctagacaactttcctttcaagtttagatacagagaatatggtaaccaaatttaaacaatccaaccgaaatatacaataaataataaaatatttttgtcaattaaatatgtcaaaaatagaattaacatactttaattttttaaaaatggaaatggaacctgtaacatcaaatgaacaacggaagtacaaaataaaaacagacaaatctaaaaaacaaaaaacaatcaaaaaacatataattaaataaaaaaataacaaaattatatgaaaactatcacaatatatgtaaaaataaatttccagcaaaaattgaacaaaaacacattgaaaaaacttaaatataaaaaaaaataactctacgtttaaact

SEQ ID NO: 180301 - DNA, 751 bp, Cannabis indica
tcttcgtggtactgtgattgtagattttatttttgtcaaactgtgagatatggtgtgatatgtggtttagaattaaagaattaataaatgttcaaaacgcaccgcacacacttttagaaaaatacaaaaattcaaatgtaattttctataattatttcaatctatagatattaatatatatatatatatattagaaaaaagttatctgcaaggcacgcatgcttagttttaattatattaggtgctatataatttaattatatataatataataaataattatatataatttaatttattattatggtctaattgattttttttaatataaagtgattaagataataaaaagtaatataattattttgtgaaattatttttgtgtatattcaatacatgtaaataattaattcttggatgaagaatattctatcattgtttataaaaatgtatcttctaatgcatataatatgttgtttgccaagtaataaaatgtttactctagtgtagtaatgtcttaaatgttctgcctaaaaagaaacacacagtatttcttagtttgtgcatatacatatacatatacaaatatatatttctatccaaaaaaaaaactataatctacttttaatgaaacgtattgtaaaagatgcttagattgatgttacgtgtaatcacgtataattaatttttttaattaggtttcaattaggtgatgttacgtacaatacatatatgtttaatttttttaatt

SEQ ID NO: 180302 - DNA, 761 bp, Cannabis indica
ttggctcaaatgatgttacttcataaaccttcaaacgtgttgttacaacaaagataataaaagaaactatgaaaattgattttctgattttaatatgtgaagagaaaaacaaataagaccaacataagatttaaaaattgaagagaaataaaatgagaaataataataaatcggttgttgagaaaatagtaatcaacggcggtgattatgagtgggtcagtcatggggcccaatgaatataatatgatggcctgtccaattgtaaagtatctgacattatggccctccattacatatattattgtagtttctcaaatagccctattattattactgaatttgaaaattagacctataccatcaatatgcttttagaattttggccctatttatacagcatttgatgaattttacgacatcgttcttaattttacacgtttactttattacaaatttcactattctgattaatagatttaacaattcatgaatcaaagtttcaattttaggaattgtataataccagatcatgcttgtgagatccatgttacttaattataaatatatacgagttagttttgttcatgtgtctaaattaagggattacatatattccttcttgtctcttgttatttatttacttttttcttaaattttcattgacattttcctatcaaactaatgatatcttctgccttaagtaaaatcttagttattgttagcattgatcttgaccaataaacatatgatgtaatttttgt

SEQ ID NO: 180303 - DNA, 636 bp, Cannabis indica
aatctaatcaaaattatgccacatcacttattctttcgactggatcttacggagcctgttcatacatgacatgatcgagtctgatcatagaaaaaaacaattctcttccaacgaaccaccttatcctctatatcgagctttcgcggtggttggaacaaagacacatttttattttgaattgaaatgtggcagataaggacatatattctgcacaaaccaatcaatagttcaagtcacacactcccataatccattttatctttagagaattcacttcaactatgagtgtcaaataaataattactttatttatatatttggagttgaagagaaatatccaaatacatgtcttattcttttcaataatccatatttatagcaatgaaatactgttgggcctaccccatgtgataaccaattgattacaaatagtataatatagcccctttataaaggaccggaaataaccttgcttacgtatcattaggaagtgcattaacataaataacggcagtaagaaagaggtaaatacaaaaagtagtgtaaaactataaaaaacgaaagtaaaagtggaattggccacactagctagcacttccgcgcaataaactcttaccaaggcgaatcctattacag

SEQ ID NO: 180304 - DNA, 513 bp, Cannabis indica
tcagtagatgttggagagtgataccgccgctgtgtcgccgagaacaatggagattgaggccggagctggagtcaacggtgataattttgagaaagaataaagtgatgtagacagtcgtagggtttcgtagaaaagtaaataatgcaattagaaaatcttaaggagattatattcacaccctaaaattataaatacacttcattactaattatctataaaattattttatattacacccattttattaccaaagagtattatttaatacactccaatattttatttttttttacaaattaattaaaataagaaaatccctctacaaagaacggaaagattccgtcctcttaattccccaaataattattaaaagttatcccattacaaaaaaaaaattattgaaagttattttgctactggggtgagcttgactgtagaaagaaattgtactagacaacaagaattttctgcattttgattaggtttgcatcccttaaaaacaatttttttttt

SEQ ID NO: 180305 - DNA, 814 bp, Cannabis indica
aatatgtatcgtatcgtattatgccataaaaaatatgaatcctatcgtatttgtgttaatatttttaaagaataaacccaccataacctataaagtataaactcaatattttcataccgtactttagctgtaccaatctatttttgtattcggtcttgaatttattcattatttttcacatttatttataatgaatgagccaaatattgctacaaaaaattaaaaatatatatttttacatataatttcaaacataaaaaggaactaaaaatactcatatttataaaaattgaaaaagactaattaattacttctactacacttgtacattttctactattatttattattttatttatgttctcaaacacacacacacacttttacatggattctctcccattaaatatacctttttgcccatctactcagacacactagagagagataagagaagagagagtcactctgaagtgagactagagactctgcaaaccacaaaaatgtccactaaagaagaaactcaagcttcacttcccacccaaaggtaacaacttcctatcttctcttttccttaacttagattacttttgtttgtttgtttgactataatttgtttcaaacatcaatcccacccttagataatatatagcatatgatttgtttattgttttgagatccacttggattgttctgatcccaattctgggttttccaaagttttgtcttatatgtattccaaaaacaaaattaccaattgggtttgattagctgagtatcaaaaggtctacttctgacccaaaatatatttatt

SEQ ID NO: 180306 - DNA, 593 bp, Cannabis indica
tggaggaggttggtgtggctgttaaactagctgtggatcttacgaagggaatagttacgagggaagagattaaaagggctgtgagtttggtgattaatgatggaggggatgatgatgatgatgatgatgatgatgatgaggaaaggaacttagggaaggtgttgagacttaaagctagaaagcttaaagtgagtgcagagaaagctttgagaaaggatggtggatcttcttatgattcgctaactcagttaactaatgatttgatggtttcgcgaatatcttcttaattaatcttaattaatcaaccacatcaatatcaataatgtatattttcaataaacgttcgcataagtcatgataactatgataaagtgtgtttttttagtcataactacgtccacgtataaatcataactatgttaaagtatgtttgtttagttgaaaataaatatatatcaagtgatttacattgctattgttttttgtttttttattttcaaataattattttttgaaatgagaaaaaaaaaaataggttttgaagttttcaaaagacaaatcggtttctagtgttttctaaaaatatataatat

SEQ ID NO: 180307 - DNA, 709 bp, Cannabis indica
taattattttctgaaaaaaaaaaataaaagaagaagatggcctgaaattattacccttggaaaaacgttacgttacaaacaaaagaaataaagaaaagaataatattgagatttttattgggttcttcctatatatatttaatcaagaccaaaagtttcatagatattattaaaaagatcgaacctttttttcaaagaaaaaacagagagtgataactaagaatgaagaatctgtcatatataaatatatattatctatttcattgtcttaaaatatcttttaaaagatcaaaaccttttacatacgaactcaaaactaatcaataaaattaaaaatacctctaatacattaaaaaagttcaaatctttacgacgtaaaaatttatttttttaacacaattaagtagaattaatccctttttattaacagatgtgtaaactacaaaaatacccttccaagaactttggggggaaatttttaagaaatttaattggtgaaaaaagctcagacccatatacagtccattaaccagtgaacgttttcccacccaaaaaataaaattgaaactttatacataaacaagttagccgccgatgacctgaaacttagtcattttttttccatgtacaaaattattgtcaaccatcttcaaaattgagaaaaaaaaaagataagccaaccaaattcgaatgctagagtttgcaattc

SEQ ID NO: 180308 - DNA, 845 bp, Cannabis indica
aacaacaaaagaaaaacgatttattatttatactgaattgtagataaaaatgttcaaagagtaaaaataaaaataaaaaattatattgactacatatttttgtaatttttatcaaatttttcgtgtaaattttactatagttacgcattgaggatgtcccgacaaatgtttttataaaattttagataatttaagatagcaaaatcagaattcaaacaacacgttgttatttttctgcttattttgatatattatacaaaactatttgaattaatatcttgatacttgatatattctaaattattcgaaattttttgaaaaaatttatgggaaatctcatataactacattataatccgaaagagttataactttttatataccaaaaatactaaagtatagatgtagataacgatatcgtgaattcatatgtaattcatataataatgatgttttttgttacaaatattaaatcggttttgtagatgggatgtgaaagcaatggatgatttaccagaatatatgaggatgcctttctttcttttacacaataccataaacgaaatggctttcgatgtgttaggacaccaaaatttcctcaacgttaaattccttaagaggacggtatgtttgtatgaattttttcttttccttctctacaaagatttttgtcatatagaaatttttacaataattgtcctgacaaattattatagtgatgttcttttgtttttttagtattcgataaattataacttaattttttatagaatgtgtaaatttttaaaaatttataaataatattttatatcgaaatcatgttagcatgcattattacacttgtg

SEQ ID NO: 180309 - DNA, 816 bp, Cannabis indica
tttagattcttgacactttgagtcacaagaacggtcttcaagtttttaaaaaaatgaattttgatcttaagaaactcttggtcgacacacatggtttgtttatgaccctagcaagcacatagtcttagtctaggcacctcggcggttctcgacttccagcctgagaacttggcggaatcatgctctggtcatgagaccctggccggcacatggcttcagcccatcaactttgccagttttggcccttttttgaccttagcaaagactccacatggctttttgagcctgtctcgcctatatccattacttggttctcttaagaactttgtatggcatatcttaggttgattctatattggccaattagcagcctaaactcattgttgtttaactttgcgcacttggattttgtactttactgaataacagttttgtagaataggatgcctggctagtacccttaggtttagttgactcatactttatttaatccttttattttcgtctggttgctcacctccgtctacccctttattttacacaaattaactcgcgtgactttctaggaggtgacaactggatcgacaaagacttgctcagtcttatctttgaacaccatcgtccagctccttcagcaagttcttcttctaagggttctttgggtgggccctccagtgcttttgaggttagcagtggttccccagaacttgaagtccaacatcaccactatttgaaacgaatagataattcattttagggtaagttcatttaggaacaaaactagaggtggaggcagttccttcctagtttatggac

SEQ ID NO: 180310 - DNA, 737 bp, Cannabis indica
agatttatatgagagggtgggctaacttattagattaaagtaccaaacaaaaaaaaaaaagataagagtcaaaattaaatgagaggggacatcaacatgcatttaacattaagtactaaacaatatatttcaaagattactttcactgataatttgttaaaatcccaaagcttcttttttgcacataatttattaataatgattaatatcttatcttgttgggtatagtttatagataattattacaatgtaaagaatatcaaagcttacattattgaaagatgaaacagagtacttatacaagcaactcacgagcagttatttacaactaaaactagcgtaacagtcataacaactaagagtaacaaccatataactaacataacgaactaaaataacagacatcttaataacctctaatactccccctcaagatgaggtgtagagattgacaacactcatcttagacaataaatacttgaactgggttagaaagagagcctttgtcatgatgtctgctatgttgtgtcgtgagggaacatgagatagtttgatgtgatgtttggtgatctattcccggactatgtggcaatcgatgtcgatgtgttttgtacgctcatggaagatggcattctcggaaatgtgtatggtagcttggttttcacagtaaagggttgcaggttgtgagtgtttgattccaaagtcagataggatgttgatgagccaacttgcaaaag

SEQ ID NO: 180311 - DNA, 709 bp, Cannabis indica
  modified_base (595)..(595): a, c, t, g, unknown or other
aatcagtagcctttgaccgccttgcgtaatagttaattaatacggtattagaagttgccacgtcaccacccaagccgagttttacaaaacgcaccgtcgtttgtagtcttcttcaacctctcctccatatccctagggtattataagtctcgtttatggcatgccctctttccttaaacctttaccgtcatcccaagtaagagaaaaatggctttctggggtaagttgtgtcatcttttttgggtcttattttctcttgattttggtcgcgtattggttgctgattatagactttcaatatgcatttctcaaaaaaattccgatcattttttttcttcttggtaaccaagaagcgcttgcatgttgttttgaatattttcaggaactgaagtaaaacccggaaagcctttcactcataatgttgatgatacgagaagtcggctccatgtttcgatggtaactctcttctcttaaagttcttttctttttcccctctctgtacaatgtttttcttagatacatagggctcatggtttggaactgttgatgatactgaaatacaatttgaggttgtttatttcctttttttagttcngttctggtttcttgatgtatttctaggcgtcgcttgggattggggaaaggcgcgaaacgaaaacgtgttcttcagtgtaatgtaggaaacgaagagccctgtttttctgtgctc

SEQ ID NO: 180312 - DNA, 808 bp, Cannabis indica
tatatatatgcattatttgttgtactcaatgttaatggtaatgagaattcataacaccattctctctctctgaatcaactctattatagttatgtccgcatgtagtaacattagaaaacaattacagacttcagattagaatcgatcgaaggctagagggctacatcatgcaatgcatgccacatatatgtaatttaatctaagtggaaggttcctaaagctcacttttcatatatgtatatatatcgtacagtctcgtgtttaacttttaaattacatgattttagatatgagaataatcgagatccaaacccaaaaccaactaataaaaatatagaataaaaacaaaaagggaaaaatagaaaaaaagaaaaaagaaaaaagaaaaaagaacaaggacgggtcgacttattccatcattctcggtaaatatgtctatcactcttatcaattattaattcaattcaataaaagtaatgataataaataaagaatcatataaaaaaaagtgctttaatttttcaaagaagattctttaattgtcctgtacattattttaactcatatgtaaattattaataacatgcacgtatatccgtactattgattcctccacatagtagtgtgatgtattactagctagctagtacactgttagaaccttttcttgtgatgatttgatgttgacacagttaaattaaaacttattatattatgcatgcatgcatgattagtcacataaatctacaaaattaattatgtaatatatgtacgtatatgcatatattaattctatataatcatgtac

SEQ ID NO: 180313 - DNA, 558 bp, Cannabis indica
gagcagtggaggatatagctcacatcaggtttcaattaattacgatacaaatcactactataaaatgggtttgagcgacatacattaaggactctaaactactttagtgacttattagtgtacgccattaatttgagtgacgggaaagaaaatatttagtgatcctcaaagtgggttactaaacctttttatagtttcttttggcgcgtcaccattggttgttaaaagtccggacattattatactgtagaagtaatagttacccacaatcgtcattgtatctattattttaataatacattaagaatattataattcttttttaaaaaaaacgtctggagcatatgttaattgtgggtcaaactattaataatatgtattataattgtaagaattatgtgcatcaaaacaatattgaaatgatattttaatataaattatattaattaaattaatttttttttttaattgaatcaatgagttttattacacaaactcgttttttacaatctaagcactccttttttcaaggaattacgtaacaatatttacacgtgt

SEQ ID NO: 180314 - DNA, 1015 bp, Cannabis indica
gtccccaagaaacactagggttctgtattctctccttccccatcagagaaaatactctagaaaatagtgtattcttggaagatcaaaaccttctctgtaatctccaacaatggcttcaggttagtgcttccgctcatattttatcatcttctttaatttagcaaaggctttatagatttatgatttagggttttctatattaaagcacttttaggaatatgtttggatctgtgatttatatatttcataagtgttttataaaccctaacactctcaaattattctcttacttttttattttgagattctcaactaatcacatattcaattttttaaaactcaaaaacattaaatcacactacaaccaatcacatatttagaaataatttttcacttacaaaatttaaatttttatttccaaaatacatttttaaaaaacacaatttttgaatcacaaaccaatcaaaccaacaaacatcaaacctaattttgacactataaacaatttacaatttttcaaaaatttataaaaatgttgtaatacactgtcataaaaaaaatgaaaatgaaaattagtttagtatttgtttttgtataaaataactaaaagaagcataataaaaattgaatgatatcactcgttctaattataactcctggtgcacaaagctttccaatatttcaaatgtcttgtcatgacaaggctgatttgtctatcttattttcataattaacaactaagcacgaaataagacctacttacatatagtagaagcattgtctctatcgatctatatgtaacatctacacatctaattgagcttaatacccattcaactagtccagagcacactgcacaccacaccaccattagtgccttaaattatggtttttttttttttgtattcttttgtagaataaggctagagctttcaaagtcaatggtcccactaagtagaaaaattaatacaattttatcttcgtgaattatgctactttggtaatttgcaccaca

SEQ ID NO: 180315 - DNA, 834 bp, Cannabis indica
aatcttctactccacccaacaataacaagtaagtatcaaccattccaacctttttctttcttaattattattcttttgattacaaatgcatttcttgaatccattcattcatcaataacggtaatgtacaaaaacaatttttcttcatttcttcaattcttcaataattactaattctgttttgtcttaattttatagattttgtttcctgtaatcgtattcaaatgatttcacaagaaatttgcacattctttgccttctttcactcttcattgcatattttatgagtgattctttctcttcaaagaaacttaactcacaatttctctcttctttttctttgctgttagttgttatggctgaaaaaagagctaagacggcattgatgatgatgggtgaggaggaagatagaatttcggaactacctgattcactcatccaacatattctctcctttctttcaactaaggatgccgtttcgacttgcctagtttcaaatcgttggaagctcatgtggtattctgtctccgaactctctttttctgattttgattgggcaaattcgaaaaagttttacaattatgttaataattatttggaacgccgcaaaagaggcaactattttatcctagattcagccataactagttttaagcttcacatgaccaattcttatcaaagaagaatggctcgtgacctagataaatggttagctttcatagttgagaagaaagtgaaggaaataaatcttcgcgtgaacaagcagaggagttacaggggtgatattcactactactcattgcctaaaactctagctgtcaacgcaagatatgt

SEQ ID NO: 180316 - DNA, 723 bp, Cannabis indica
ataaatcgaaagctctgttgatagaaacttgatatcatagaaaaataactttattttccacaattatttgatcgttccttttctttaggcaattaatcacttcaaattaggtagacactcttaaatttttaaacagaaataataaaatgccaaaacgcaatctctttttgggacctttaattatttgatatgaaatgatcaaataacacattatgtttctctacacgtttgtttggttgtaaggtctaatatattagtccaaattttatggtacacctcttaaaaatatatgtttccatgtatatttttcgtgttttcgatatctagatagttttaatcttatttttttttttcgataatgtgtattgtaactatataagacatcgatcgtacaaattttttaaaatttaaaataatttaacatgttgaaaaaaatatttaaatagtttaatatttaaacattactttttgtattataaattattagagtttatcaaaactttacaaagtattttaaataaatataatacatacactcgtatgaaagaaattctttaggaatgcattataaaattactttataataatttaaaaatacataatgtacacaaaatttgtaccaaaataacatcatataataaatgattactttttcctaactgcgaatctcattattagatatgattcactcaaaaaaataattaattattttttaagtagaaa

SEQ ID NO: 180317 - DNA, 597 bp, Cannabis indica
cttgccacgtgtacaaacattgatgtccacatcatcaatgctactttgatgtaaacagtaattttagtaaattaaaaattttaaatacgtaaaatgaataaataaaacataaaatagagtatttaaaaaattcttacaaaatttatttatttattattatatatttaaattaacatactaaattttaaataaattgataaacaatatcataaatgtatattataatctaagacattaatatattataataaattaaaatcaagacattgttgattaattgtaaaatgtaaataatccaattattattattattattattattattattattattattattattattattattattattattattattattattattattattatttaacattatttctcattaaaattataattaatcaaatgaacattttcataattgaccaaatatatagctatttaattataagtaatttcggatcacctaaataatttgaatataaaaaaatattatttcacacaaaattttcaataattgttaaattaagaatatgtgccacctctcgaaaaaagaaataaaaaagaatatgtgtcatctag

SEQ ID NO: 180318 - DNA, 515 bp, Cannabis indica
aaactataagcttgataattccaaaaagctatttcactttctttcctccctaagtgcttgtggtaggagaataagcttttggacaaaggtgtaaaccttgttcatgtttgtgattccctacttgatacttggtgttagtggtgttgagatttttctcacatctatatatatactactatttatattgtgttttgtaatcttctcttcatcttcttttctatacttatgtgtatattttttctagagttgtaacattattttatcaatattattgttcttgtattttcattttcagttgtattttgacattggtctttctattaaagcacctataaattttcaacaaatacttatatttttgtcctcttcacttcaactaaccaagaatcctccacaaattttggccacctccgcgtgccctccaattttgtaccttgcaaagtctcttccccctttggccttcacatatgtaaatcgccacagtcttgattaattatgttgaacttttctatcat

SEQ ID NO: 180319 - DNA, 930 bp, Cannabis indica
aacagtaaggatttcagtatcccttgatgagtaatgcatatagtaaaggatgtttcataaatgtttttatgaactagtttccagaagtttgggtggattcaaatatactacacttgatctgaagatcaagacaacagattgattaatttgcacagtttgttttatgttagtgcaagtgggagtttgttgggttttgtgccctaaataaaaccctttacaatctgattagttatcaatataagaaatttgaagtgatttatgtttgcatgaattttacatgcttatggtttaatatgtttattatatttatacacaaaatctgttaagtccagatcatatgtttattcacaattacagtattgtcaacacagtggaatgtgattgtgattatatgaatcaaaagactaagtccctgtttcatcagtgttttggatttacactgatgtgataatcagcgatgatgtgtacttacacttggagtaagtgttatgttctttccaggacattggtaaagtatactagtttcgaatgtatggagtatacattggactggaccaaaaaaaaaaaaaaaaaacttaaacatgttattcatacgtatttctttctctctaattaaatttgttcttgttctatgtactaagaaaaattcaagaatatattttgtatatcctatcaacacacactgatccttgtgtcttgtggttgatctaaaagatcgtgatgtgagacattactgttcctggatacaatttacgaaaaatgctcgaatatacttgatagttcatcaagaggtatttatatttttttttttgttcttttcgtttttataatttaatatttatgtcatgtggaggatcctagagtgtggtacgatgataatcttattaaatacttctgttgtacaccaaatttagtactacaaaaactgat

SEQ ID NO: 180320 - DNA, 523 bp, Cannabis indica
atcttataacttgatgagcacaactcgaatcttgaatctaaacccctctcggatctcggcctcggctcggaccctggaccctggacctggacttggactcgaccccgaccttaaacccgagcgtggacacagactctggaccctgaaacttaacctgaaccccaaatcccaaacctctgtcctagccacgaacttggacccgtactcggactccaaacctcgaatcttgaactcaaactttactctgagtcccgaatcagaccctcacccttggccttgatctagtccgtgaagcacattttgttatcgaaaacataaattctacttttatttttgtgattaaaaacgaaagtgttactaaacacactttattattcatttttagcaattgtgcataaattttgttaaaaaaaaacagttgtgtataaattaaattgtgtatttcttagatgttgtcgtttggagaaatgtgttgttaaaaaaattgtcgtgtctcagttatcatccgccgtttcattgggat

SEQ ID NO: 180321 - DNA, 1031 bp, Cannabis indica
gtagtctcagggggataagttgaaaaatacatcttttttgtatccattaatcaaaaatacctagggatgtaaacgagacagggcgggtgcggggattgctcccccacccccatacccacttcttaaattcaccccatacccgcctcaatatccccgtttaaattaaagcgggggcgaggcggagattacctgacgggggaaggattcccattacatatattttttttttcaaaaaatgatgtctcgaagagaattaaaaaaaaataatacataaaaactcaagtaaaacaataaacttaagtggaatagtgtgtacaataaaaaaatgagtataatcaataaaaagcttaaagtatgaaattatttaattatagtagttataattttaaaacttaaatatatacatatatcatatcagggcaggtatctattcccccgctcccgcttcgtttccgactcgagtatgaatctttaaacccatagccgctccgtcccccgaaaagtcctatactaccccttgtaccctacccccattaaaaatataaaaaatataactaaaaaatatagttattcaattatagatattatcgtatttgaattttgaattttaaattaaaaataataaatatttatttaattaaattaatttattagcccatatatattttatgtatataatatatacataatataaatatacgatacaatagattagagataagaaaaattgtatgatacaattttcgtaaaccctaagcttggccctctctctctttctctcctattgttcacgccactttctctctctaaagattgatgagttttctctcatctcagttcacaatgtgtcatgagttgagtacacactgtgatagaaaaattgttcatcaatttaatcctataagtccacttttattctaaagtgttgaggattgatatggaagaccctcatgtgaagccttcattaagttcataacaactcggattagatgatcgataatatatacgaaaaaattgaggatacactaata

SEQ ID NO: 180322 - DNA, 836 bp, Cannabis indica
aggaaaaaagtcagacaagtaaatgccttgtatagccaattaaaactaatgccaagggtgtatgagagcttactcactaggaataatgattgtagctaaaactgttggttcccatgaagcaaccactctttgcttcggatttgagggcaatgcggcaggattttgaaccgaaattttgctacaaaaagagacaaaagaaagttggtacatattgtgagtaagaaaatattctaagatagagatgtgaaagtggaaaatacacaagaaagaatatattattagttacatacctcccatcagcatactcaaaaatgtaaggaacagttggaattgtagaaataacatgagctccgtattcctaaaatttaaataaacatatttaaattcgaaatatttctaaatccaaaaaagtgtaattgaagaaacaattttatgcgaataaccatcaccaaaaagaaattatgatcacaatgccacatagcaggaaaaaggggacatggatataataacaatgatctactatttttccaggcaaataggttttgtttatcattgccgatgtgtgcagttatcatcaccatccttttgaatttttttttttgtttaaaaggctatggctaaacaggatactagatgatagaaatcaaaagcaaaagcacaattgaaaaaaaaaaaggtggaatggcattttctccatcaatacttaatattctatacctgctcaagtctctgatgaaaaacatccatgtgaagcaagcctaggaaaccacacctgtggataaacataagaatgataaaaaaatcccatatgaagtaaatgtaacaagaatttaaac

SEQ ID NO: 180323 - DNA, 1206 bp, Cannabis indica
tttagtaatatatatagagatagaaaaaataaccatattattatttttttttttgtatattgatgcatgaatatcagtgaccgcgaagccgggactttgcatgtgctcctaacatcggtaggcccattactaaacacctccaaactactttcaatgacatatccaaatccccaaaaagctttcaacttattaaattaaataaaatcatgtaccaacaaaatttgaattagaaataaataagattctttagtataaaaaattatatatccacgtactctaatcacttaccaatcatggaaaacactaagccacacgcacaccttcttcttcttcttacttaattatttctagttgacaatcactgcattgatttttatatactaattattatttaatttcttttttctaaacctttgtttaatagtaaccgacatttgattctgcatatctacctgattaatctaatatgactcatcattttaattattatataattaattgtcgttggatgtgaattattttatatatggacaagacttgttatacaaacaaaaatatgatcacggtacttatttctatagggtttttaatgaatgaataaagaagataaagtactgactctgctttatactattttagatggcaaacatagaatactattgtatattggttcagtttatagagttaaaagactattatatatacatgagagtttttttttttactactaataatatgtactagttaattcatatggaaaaatgtacctatacctataataagtcttcgctgagtataattgtgttgcataggttaggtacaaatcttcgacaggacaccaaattagacctatatacactctttgaaaagtaaaataaaaaacaaaggaccaccctcccttaattaaaggcattaaattgtaatctaatatgcgaaactttgggctaattaagaagaaaaaacgacattttttccatacgtctaactaataagccgcatttcagtatcaacttaaatattgttttttattcatttccttattgtaaagtataataatataaggtattagagaaagagcacgaagaaaacggttgatggtgcatgtgcaagtagggtcattgggcttagcagttggtagacgttttggaacatttgcatgtgcaacattgatacttgcaaatgacctgaaaatacgaaatccttttt

SEQ ID NO: 180324 - DNA, 640 bp, Cannabis indica
tattttttcaattggttatttattattattattattagagctaattttatattgctgtgtagttatacatatatactatacagtacaaaaaaaaataaataatattataatatttagtaaatattattattatagaattaattttgtaaactacataatctaatttagctgagtaaaataaattattatttatatttaccgaatataaattaattcctaagaacatataatattcatattatagaatttgaaaatttattacagaatttggaggtaacactaactcaaaattttggtttaatccaatgctttcataaatttctgtattaattaagaatagaacagagtataaaagcagagatttcacaaaattcttcttctctttctttcataattatatatacaaatataaaagttacatatacttaaattcgcagatcaaatcttccaaaattattcaaaaaaaaaagatatattcagtatatcattaatcaaaactaggagaagaagaagaagagtcaggttgatcgggaaacagatatggaattagccgaacctttctggttccggttaataggaataataatactactcttgttgatcctcttcagttgctgcaaactgaggcggttgtggccat

SEQ ID NO: 180325 - DNA, 1521 bp, Cannabis indica
tctttggacacttcatttgatagacttatacattttctaatatgtatttttttttctttttctattaatacgtatatgaacaaccaaaaaagcaaaatgattagagggaaaaataaaaaattgagaaattaaagttaagaagcttaaaaaaaatagggttactactataaccattaaaaataatttgacacaactcctagatttattgagagattgtttgataaaggataatacgtaatgattagagtagagattagtgatgagattagcgacatgtggggatctataagcaattagttagtttaattgaatattctattctattctaaaatttgtggcgttggtcaaacgtgtggaataaactatggtcaaccaatacaaaagaggtgaccaactgaccatagtcataaattttaataataataaggctaataataatgttgggggagctgaactgtgatagacccaactccctttttttacttgttaaaaatataaatgaacaaaacttgcggtttctgtcatattaatatgcgcagccacacacgaaatgtgcatgtgacacgcactgaacgtgcaccaccctcattttcatgtgcgtgtaaaccaacaccatcacattattcatcaccatcggcgaagccacatgaacactaagtggggaagtcgttctaagttatttggagcttaaagttaaataatcttttttgactacaagtattaattgaatcaaatattatctgtaatgttttgtttattaaaataattttaaaatacaagttgaatcatgtcaatcgaattaatattgaatgagtaatgcttgttttattaaaagttgttctgatactaatgcccaaattgacatatgacgtcaacgtagacgctcggtgaatggaaaaacgtgttggcaatgtattttttgatgtctaaatgatatttttacataacttagttaatttctttgttctggtgaagcccttcaccaattttcaaagatgttgctgtttcgcagaatcgggtgattcgaaactacccgatttgcgactaagtcactttgctgaaaaagtaaaattatgaagttgtgaatttgacttgtctgagtttatagctctcgtttgttatggaatactagacgaacgctcaagacggaatcagaatcatataaatagaaacaatcgcaccaggtcatcatacttttcaacttaggcgatgggtgcccttttcgaagcttttgggtcctccaagatgtcattttgatgattccaaagtcttcaaaattgaggaagaggtctcttatcctattttataccatgctgagagaatgcccagagtagaatttgcatttgagtgacagattccaacgcactaagttgattatcagcctggcgttgggtcagttcttggcccgtcaagattcttgttttctccccgagtttacttgtatcctcattatttatgatgacgaaaaaaaaatgaccgggagactttttgaaaaaaaaaaaaaaactaaacctcggtaat

SEQ ID NO: 180326 - DNA, 656 bp, Cannabis indica
gaaaataagattaagctcatgaatgtacaaaatttaggtagatgcactatttttttttttttatgttacgtggcattaaatgcctctacttggggttgccgaatacactaggccgaaacaaaaagctctttgggttttttgaaggatcgaatgagaaagaaaattcaaagttgggaggggagattcttatccaaggctggaaaagaattgctcatcaaaactgttgcccaatctcttccaagttatgcaatgaatgtctttttgcttcctgtagagacttgtcaggaaatggaacaactaatgtgcaaattttggtggcaatcctctactaagaataataaaggcatacattggaagagctgggataagttgacaactcataaatccaaaggcggtatggggtttagaaacttacgagattttaatctgagtttattgagtaaacaaggatggcgtctcttaagtaatccgaattcattggtaggcaagatttttaaagcccgttactacaaggatggcaactttctttcggcagaattaggtggtaatccgagctttgtttggcgaagcatcttcgaaactcaagaagtggttcgtgaaggagtaagaagtagaattggaaatggtactttggtgagtatcctccgggatccgtg

SEQ ID NO: 180327 - DNA, 501 bp, Cannabis indica
tcaagtggctcgattttaaatatgaacggcttcctgatttttgcttgtattgtggttgacttgatgacactaagaggtatttgttggaaattattttaccaggatcttagatctactcacaagtatgttgattaacaccctaaatatgaactttctaaaacgatgaaataaacacatataaagtttagtaaaccttacattgggtgcagcggaataatatgactccttccgttcagatctctaacccttgtatcctttctgtcgcagagtattatcaagatctgaacctggatctctttctctgattctttagtgctgaaactccttcttgctgaaagtctttcttcacgatcttcctcactatgattgaggtatcacttgctgtgtgtgggcactactctaatcactaagtgtttcgaaatcttaaggaagaagagagagagagagtggtcggccaaggtagagagagaaggctcaggtttttctgaatgaaaagtgtga

SEQ ID NO: 180328 - DNA, 1112 bp, Cannabis indica
gttataaattttattgtgactaaaactagggggtggatgtatgttaatgactatagaggccatggccccccctaagattatagtaacctactttttatatgtaatttttattttaattaatgtgtatcttaatatgtaatatatggtagcccaattaaagttaaataatttttttaaaaaaaatatagaaatagttgaatataataaataatctgtcagatacgtacctactttatttactatatatattctctaaaagaataatttgttttcatttttttctaagtctatttttttctattaatagtaacttagcaagacacacactattttttttttattttttttaactaaattaaaaaaaaagtaagaaactaaaaaattttaaagaaccttcaaaatagataataagtattattattctttcttccctctcatagatattaggtattacgaatctcttcttcttctctcattcatatctattacataaagcgcaatgaccaactaaaagctgctcaagctaacaaatattgctcatttacttgagattgataaactagaaagtgggaaaggactcaatcaaattggttctttacaaagagcaggtgatactcgttggagttctcatttgaaattaatttatttctagtttgataaagatatttagtgcagcatgtgaagttttattgaatattattgaagatggtactacttttgctcaacaaggagatgcggatgcagcttatgagtcattaacttcttttgaatttgttttcattttgcatcttatgaaaaaaattctggagatttttaatatactttgtcaagttttgcaacttcagtctcaagatattttaaatgcaatgcatcttgtttcatctactaagactcattcagaaattgagagaagatggatgagatgaattagtttatgaggtgaaatctttttgtgaacctgttaatacacctgctctagattttaatgctcgctatattacaaaaaggaagaagtcgtggtcagcaagatgcaattacagtggagcattattacagagttgatcttttcaattcagtgacagactttcaactacaagaattaaacaacaaat

SEQ ID NO: 180329 - DNA, 637 bp, Cannabis indica
ttttttcatttacacaacacaaacaaatgagtagatgagataagatgggagcaaaaagtggtattagcttctccccatttttcaacactctaggatatataaacccaacaatggaccacaaaataaagtaaacaaatgaacaatctcttctctaatctagatagattctctggccaacataagagacaaaatgaacaagtaccacttcacttccattttcaatagaatggcttatcaaaatataaaacattattagtgcaatttaattctatttattttagttatcaatgggtcacactttattaattaatattcagtcatttttgctataaatatacaaaatgaaaaggaaaaaaaaaaagacttaccattttgccaatgtcgttgttttgatatggagaatcaattcttgctagcaaaagagtaactaaatattcattcacaattcacaatagacttcaatcaaatcaaaaagtaacagggttggtaatggtggtagtgatactaattaatacacgagcaaggtaaaatggaacctcaactaaatctaactcaatattcttattatcctaaatctctcattccttaacatgggcactaaatcttcatagcacaaatgataacaagtgagctagag

SEQ ID NO: 180330 - DNA, 622 bp, Cannabis indica
gctcgtcacagtcttttctactagtttttctattttttattttactcctgtttgttactatggtttcctccgccttaagtgaggcttgcaatatatatcaaggggagccaaacgagtggtctcttgtccatttttacaaaagaaaaaacaagaattcctaacccccttttcatttgcttgattaagtaagtatttttttcttttagtgaaaaaagttgcgaaggaaactcatactattcgtttttttttctttcttgcttgctatcattattattgttatttcttactctctttctctattgtatttatttggttatagttttatagtatggttagtttttctttttgtcatccaattgtaacaaactcggtgaaatttttgtatgatctgctaatatgaaaaactatgttttgctgtttatgaacatgaagaagataatcaaaaattccctttcaactttcatgtgtatatgctaccatgcaatgtagtcatgtacaaatcaagcatatccaataaatagaagaaaaaaaaaaaacacactttactaatttcatgaacaaagctaccgacttctctgcttgcgattctggacaatggataaactagacttaattgtactgg

SEQ ID NO: 180331 - DNA, 611 bp, Cannabis indica
gtaatgtactgaaacgaattgaattaactgtaaaaggcaggaactcagattcaaatcacgcctccaagattcccagtattcagtgtacaatggccacatccaatgaataacgtcttcccaacaaacctacatatgaaattttgaatacaaaactaagacaagaatgttgtatgcatctcgaaaatttaattcacgtttatttaaataaaatttaaaaaataaatggaaaactcaattcacttttcattgcattaagttctgttaaatcaactaataaagtcacatcacaagtagcaaacaatttaaaggaatatctccactagaactcatgacataccttgtgcctgggagcttccagtagatatttatacagcagtgggtgttcttttctgaagtggcgctcatatgatgatggtgcactgcatagaaatccaagaaacaaattaactactacttaactcaaacgtcgttattctttgttcaataaatgtcttgttttttatgttactttcagttccataaagataattctcctaaataaatacataagatttcttttcctttttaagaaaatacataagatttctagtttaagtacattgaggtgaata

SEQ ID NO: 180332 - DNA, 627 bp, Cannabis indica
gaatattctgttaaatttaacagcgttagtcaggttaattttatagatatatataaaatataaatattctgacatgtgtcttgcagtggaatatgaaccacctgatataataaaattatatcatttaaagcaagataaaataactcgttaacaaaggtttaatagaaaatattcacaattcactgacggtataatcttaagcgaaataagaataaaaggctattaaaacttatattgacgagacacacacctgcctcggagtacatagtcaaagaagatattcatttattcgaagtagaataaatacaatcacacatggtaacctcgggttacgtatagcgagacagtcacctcgtgattttaactaaagagacttaacgaggcgaaccatctgctaacacttaatattttttccacatcaagatggacaatgagaataacttgggttaagcgagatacaattgcccaaatcagcattaaccatcgaaaaggataaagacaaaaagcagttaagtaattatcaaatattatcctacatgcaattaaatgaaacatgagaattgttcacgtttcatgaacgattatattttaaactgatcccaaacctatagtcctataaataagggt

SEQ ID NO: 180333 - DNA, 763 bp, Cannabis indica
aaataaattttgggaaacaatcccatgaaaaaattggatttttggggaaaaaacctcaaaaattcgcaatttgtggggaactgccaggataggctgcatgcagcaaccatgatttccaatcttccaaaattcatatctttctcaatttttatcggaatcgagttccgtaaaaaacaaaattgcttaatttttcacaaggaatccaaataaaatattttcaaaaattgaaaaaatatatttcatggaaaaatttcgtacaacatcaacattcatcacataagcacataaaccaacatgaaaccatccaaatcaacacagaaacatgcaatcatcgttttaattcatattacatgaaagtaaatcattaccatggctctggtgccagttgttggaaattattttaccaggatctagatttactaacaagtatgttggattaacaacctaatatgaattctaaaacaatgaaaataaacacatataaagttagaaaaccttacagtgggtgcagcggaataatatgactccttccgttcagatctctagcccttgattcctttctgtagcagagcatcaccaagatctgaacctggatcttcttttctccttctttgatgcagaaattccatagtcttccatactatgattgagataccacttgatgtgtgtgggcactactcatctcacaaggatttcgaaattttctctctttttctctctgaatttcgtggcttattcatacataagacatgcaagagaagag

SEQ ID NO: 180334 - DNA, 664 bp, Cannabis indica
atctcatttttgtattttttttctacttaacaaaaaatatactaacaataaatatctataataaaataatattaataataaaaataaaaataataaacattaatttattaattgaatctatacatctatcaatcaatatatatatatcatcaataaatagatttatctatttcttccttatttctctcttattttaatttttattagattgataaatattaatcgattaaataatctactaatactaaaatatctactaatctttttttaaatttaacattattaattaataaaaatactaaaatatcatccattcctagtccttaaacacatatatataaatatatatctcctaaacactatatatcctaaaacaaaaaagcaaaataaataccaaaagacatgatgaaaatgctaaaatgacctaccaagacaaagtgacaaactttgaattcttctccaaattatataaatatatatatatactaggttgatattacgtgcaatgcacgtataattaatttttttaattaagtttgttgaccgaggttttcggcaactattaaaatataattataataatgagctgtaagaaagtgagatgaagactttttacgtggttggggcgttaatgagccttagtccacgagccactgctattaat

SEQ ID NO: 180335 - DNA, 1021 bp, Cannabis indica
tccatgttagagtttttagaggatggatattatgtgtgtttaaaaattataaagagaaaaataatataaaagatagaagtgaactagcattcattttttgccatgaaaataaaaatagtacgtatactctcaaattttgaaattttgatatttttttacttgaaaatattcttggttttatttttttgaataaaaaaaatgtatttacatagttagaaaagaagaaagaagacccaataaagtttgacaattttttttagtggaagtttgacaaaattaacccaagcgacatattattcttatttgaccatttcattcaaaaagaagaaccttagtaaattttgacaaatttcttaagttttttttttttccttttgaaatcaaattttgacacctatgaaaaaaaaaagacacattcagcttacatgtatggaaatttacgagatttcttatccacaaaaaaaaaaaaaaaactatatataataattatatattgtggtaggcaatgaaaggaaaagaagcagaggagagaagaaaatagccaaaacttaaggcagcagtccttgttggatatgagtcagcacacacatgacgtggcaagccaatccaaaaccaaaacgaaaactactacatccaatcattaaacctctgaaccataattacatattatatacgaggagaggaagaaggtcttactcttacggcttaaagagtcatccacttcaccctagtcaactctctttctactcattttcacctaggtttcaagagagaaatgttaaaagttaccggtagtgccaagtattctcctacgtgttaatatcgttattagtttaattaaatattaagtcccatatagtttaatataataacttttagagaatatcgctagccaaacgcaagacgacacgtcttaaggtactcaatagcaatgctcgttgcaaaaattacaactatattgttattaggtactattagtcttaaatatctctacacatgttatcttatgattgttaaacga

SEQ ID NO: 180336 - DNA, 609 bp, Cannabis indica
tgtaacaccctaactagcataggcgtgttagcgtgaatttttaacgtactatgcagctcgttgctaatcaacgagtcattggaaaacgtgaatataaaattttgcttattattaaaagataacatataacagttacaaaagtttactacatatttacaaaatacttgtcgcctagcgacaaaacaacaaaagccctgatgtcccgaggatcgtacgctccaggcctaaccgccccgacatgtacaatcttcatctgctcgctctcacggctcctcaactttagctttgcccttacctacacatagcaatagcactgtgagtcgacagactcagtaagaaaagcataacataataaacatactaatatcccgggttataacaggcgcccatacacctaaccataaccctaactgaatcaggatcgatcttgacaaggtatgactaaccgcgaatccagcctatactcagtactctaatcgtactgatgtggtagcgattaattcatactatctgatagcctagcatatatctgctggcatctcgatgcatctctatgtacacctcaccgatgccataatatgcgaatctgagggctatagatttgcctat

SEQ ID NO: 180337 - DNA, 1028 bp, Cannabis indica
gcatgcatgtatagtaccattttttttatgtgcatgaaaaaaattagagactctgactggtgtgtgtgtgtgtagtgactggtgaagtgagagaaaaccaacaatctggtctgagagaagggacatagacatagtaacatatatgtgtatatatataacaccacctctcatcaacattgccccattttaacctttatctctcttaatggtttttctctcttcaaagagaaaataataaagaagcaaggcatctctttttctcataagctaccacttcttctggtatatacccttttctttgcttggacttggggttaatctgctttcttttttattagttttgaaacatttattgagacataataaaaatgtttatttattttagtatacatatataattattttttttttgttctgtctgtgtgtgaaaatagaccctctaaagtttggaatccatgcttggcttcttcaatggaatgaaataagtcatgttgggttttgttgttttcagcttttcattcagatccatatcttttctgaaactcttttatatcaactttgaaagatatgaaaaaccccattactcattagaccttccttttcaacctcctcttaaataatgttggcttgtttttacatcataagtagatttggtggcactctgttcagattgtattaactgggttttgaaaaaatttatgaatatcagattatagttttggttgttggtttaagcatttagagctttacttttgcaaacaagttaatctttacaactttattcttataatttctgctctgttgggtcattttcatgttcatggacttttaaagctgtactatttttttatttattttcaaaatctattctgccttaattttcccttctttttggttaatctagatttttttaaaaggattttaattttcatattgaaaaggtcttcattataattatttcatgtttctgggttttctaattgtcatttatttcttatactgataatataaactaatcatcttttctc

SEQ ID NO: 180338 - DNA, 838 bp, Cannabis indica
gttactcagtgatcgggataaaccctaccaacactcgtacagtgaggtacgatgtgtatgtggtatagtggttgtaccctggtattgaacgttcatactcatctgttaagctctgtaaataggtgtatgggcgcctatttacaggtcggaaattatatggtatgttatatgcatttcttactgagtctgttgactcacagtttctgcttccatgtgtaggtaaaggaaaggcgaaggctgaacaggaatgaacctgagctcgggtgagattgtacatgtcaagcggcgcgacctggagtgttcggtctcgggacatctgggagttgtattttgaaagtcgctgtgcgacctgaaaattatgtattttgaaatgtaaagtttaaacagtaaattttacaaagtttgaaatcgggatcccggaatttgtaaatattatattatattacaaagtttaatatttaaagcaaaagttttaatttgacacgtttttcgagaaatttctttgattagcaaagattgcacaataattgaaaaagcactgtagcgtgccttagcattagggcgttacagtataaatctatatgcatttgattaaaataatttataatatttttaaattatgtttttatcacttgtagaaaaattgtagtttgtaagaaacttgggttgatgttgtttgttaataatataaatataaaatatttttaaaataaaataaaaaaatttaaatattatttatgttaaattttttttccttcaaaaaataatatttttttgtaatatagaataaataattaaatatatttttagtaaaaaataatttattatagaatttttt

SEQ ID NO: 180339 - DNA, 631 bp, Cannabis indica
aaaatagtatttacccatataaatataaatgatgtgaaagaaaaagaaaaaaataataaaaaatatatttagttaagaggtaaaccttagctacatgtggagatgtactatttatttatgagctaaaattttaagatattataactcatttattggaagggtcattttaagagtattgaggtataatttagttttgtagctattatactctatttattgagattactcttagagcagtcacaataactaatgaaaaatagctagaaaggttaaaaatagctaaaagtttttaaaaaaatgtcaaaaatgtgcatctaataaatgagctaaaataacttaaaaatttaccttatgaatagtgcttagctaaatgtaactaaaaattattttggttttagtacttaagttataatttttttattattataatgtatttttttaattataattgtaaaaataaataaatattatataatatacaatactttattatttgtgtgtattataaatatagtatttaaataatttagaaaaaaattataatagaagttctataatataaaatgtgtgaagtaaaataaaaaaaaaattaaaataaataagagtaaaaaaactagttaggaacaaaaag

SEQ ID NO: 180340 - DNA, 1056 bp, Cannabis indica
ggattctactttcaagcatgcgtgcgcctactaattagagctatgccatagctattatttgatcaaaaaccactgtagatatgatattgatatcacaaccattaatatagataagtgtatcatatattatattggacgaaattagtaaatatatattgacacgtgtgtgaaatgaattgaatctcacatacataaatttgtaagatatattttatcaaaatcagatgacccatatgatatagttatcatgtccaccaactaatatatttattttggtctgattttgtgttttatattataaaaatttttacttttagtcataataaaatttgtaattaaaatttaaaaaaattgtgactaatttgtaaattgtcatttttacgttgtgactaaaagtattagtcacaatatttgttgtggctaaaattaaattggtaacacttggtaattactaaatattatgtttagtcataactaacttttttgttatgactaaaaaattatcactaaaatttaaaaatgattattttttgtagtgataagtgaactttctacattcaaagtagaagttttggctttgttgcattgcttatttttttctattttttttttttattgcctggttaagactttgtataatttaaatattatttaataatgaggtagtagtcatttttattgttcttaaatttttggagctattcgtttttttttttttttttttctattgttagtcgtaatttcaatattacagttcattgattggctataagcatatatataatatagttgctacagaaaataaaaggaacgaagttactgaattaaaatctaagttgagtctcggactaggtcgctctcttaaagacgttcgcgacactgctcagaattgtgcaagcacactatcagcctcgccgttccaagtataaaacaatcgagtcgaaccactgtatctgagctctattacacgatagagaaccgtcaaaatactacacctaataatcgtactactgcttggaacacatttgtaatataatcgtatataactgtatatat

SEQ ID NO: 180341 - DNA, 535 bp, Cannabis indica
gattattttagaatctttttatttaacagggtatttataagttgatatttagaacatcgggtttaggcggggttatggtgttggaccatttgacccctaagccattttacaatttaagcactcaaatgagagtattttagtcattttggttttgaagtttaggtggttttctctcttgttagcagctggccactaaaagaaataagattatttagaattatctttagtttggaaattaggacttaaccaaagaaaagataaaaaaatagaaaatccaattattgcctctctctctctctagcttcggttcagaccaaaaaccaaggaacgaaacccaactgtattttcatcaatcttgtaagtttctagcaagtatttcatctagtagaaaacctaaggtaaggactccaataccttcttcttttattttctttagttttgaagggttcgagcatgaattgtagaatttgttgctgttagaattaggtatttgttcttgtatttctttctgctatttagtctaagttgttttacg

SEQ ID NO: 180342 - DNA, 762 bp, Cannabis indica
atctcatccaatcaaaaagtgtttttttttttgatgggttgatttcttgattttgatgaagcgtgggataaacaagaccttttttgtcgattttctcaattagttgataattgttagaccaagttttagtatatttattactcttggggtgagtatcgatatcgacccaggcccctatatagattttatttcgaagacaataattgagaattgttaaatcaaaaaattttctatcaggatttgtctttatatctataatattctcttctactcgataattgttgataggaatatctatcaacatattataaattttttgtttattttttttgtaattataaaggacctcttgattatgattttcttgtaatggaaattcataaaaagatggggtcttcttatcttcataattaataaaattatatgataaaagatcatatttattttgttttttaacatttttttttgtttttcggagttaattaatagatttttttcgtttgaatcaaatttcttgaaatgtttattttgaactatagagtttttctttactatatttcgcgattttgggggtattaatttagactgagataaatcatattgataataaccctttaaccaatttttccattgatttattccataattgctggggtttctatgtcttaattcggaattaaaaatttcctgcgttccaacaaaataatcctttattccattcttaagaaaaaaagatgttcccttatattgatattgaaagac

SEQ ID NO: 180343 - DNA, 531 bp, Cannabis indica
agataatcacatagagctcggaatgagctttccaacgatataaagaactcccaaatcggagttcggaattaaaagatatggaggttcaaagttcgaactcaaaactacccaaaaacacaagggcgggcggcggcatgcccaagccatgccgcggcacctgagaaaaatcctaggttccaccaacaaggggcgggccgcggcatgcccagagcatgccgcgacacctgggttaaaaacttagaaacagccaccaagaacacgaattttcagcctcaaaaccatacaaattccatccaaagctcaaccaaacactcaattcaattccacaacctaacaagcttaagatagggcataaaaatcatgcaacatgcattaaaactcacactttaccctgaaaatctagattgtaaaacatctcaaaatcatcttaaactcacaatctcaagctctttaatcttgagcttaattccaacttctccaaatattttccaacaacaatcatcatcaacaattgaattcaagttaaggaag

SEQ ID NO: 180344 - DNA, 1379 bp, Cannabis indica
taattacaattggtatgataacatagagaagcattttaataatttgaaatgagaatataaagaaaagaatgaagagaaaattagatgagattaatatgaatggtagttagttactttgagaccgtgaacagagagaagaccactgaggatgcattctttgagaccagttcccagaacgatgatgtcgtattgttcatccatggccaaatcacagacagaaatcagagagagattagaagagagattagtataaattagtgatatattgattgatttaatatatatatatatatagaagagtataggaagaagaagaggtctttattggggagttaattgacgaaactcacgcacagatcactacaaattattacaccttctttttttattatttatatataattaattagattaattttaaccttgaaaaaattacattaattaagaaaataaaaatattaaaatttaacttcaaatattaagaaattaaaataacttcagaaaaaaaataagtaaattttccattaaaaaattaaaaatctcctacaaaaataactaaaatattaataaaaatctcctacaaaaataactaaaatattaattaaaaaaaaaagcagtttcatatgaaaacatgaaaaatgtgtgtattgacatgattttttgtcagattaattgtaaaaaattagacgattccaataaaatattttggcaaaataaaaccgcgaaaaataaaggtgacactaggatttatatagtagttcatctaggtttacatcatcttttattaatttaatctgatatactaaagttattttctcaagagtgtgtatacaataatacaattagagatttctagacaaaatctgtatccaagtttatgaacaaaaggctcatgggagaacaaatactcataaacttgatcgcaatagtagtggtgatcaatgttcttatgaacagtgaaccaaaagagccaagaataaagagtgacccttcttcttggtagataatatttgaagagtcaatggtgaatgtatgatgaagatgatgtcgttaaagtatgaagaactcaaagtctaagaaagagatgaagaagagagagatctcaagaggagatcaaaaggtagtcagaaagcgatcccccaaatcctatcctaccattatgtctacaagaggcgatcaaaaaggtggtcggggtatctcactcaaaatctcgtatcatattacaaaatatgaatataaaagtgtaaaataaataaaaaaaaatctaaggaaaaagatcccacacttataggaaaatactcatatattgggatttgtcgtttgaacgttgggtaacttctatttttttcctttaaagttttgtcttatggggctatgtg

SEQ ID NO: 180345 - DNA, 646 bp, Cannabis indica
aatgcttcccctggtctttcccaccttaacttaggaaattccaaaagaataacaccatgaagtttatccacgaagtgaattgattaagtcttctccgtaggcaaaccttaaacctagaacttcccaactcaaatacgactttgtttccaaggcaaatccattggacagatccttgcttttggaatggattgaatcggttcactggatggaatcggaactttcacttccttactatcgtcttctcttcattttcttagaagaccttgtagaggtgggaataagaatttagataagctatgactccagcataaaaaacaagcacattatggccatgaccagctaaagatcactgccatctcacgaattggattcgaaccaatcaagctacttgccctttagtagatcgtgagtgggtctgtcgtcctcctcattatagtcctcctaaaatcaatagcatttccctccaaatggtggcccacgccgataaaaacggagtactttaggtaaagcaattgtagctgctcctgcacccattaatttataaacgtccttacctaacggtaaaaatttctactggttgtatatagaagtaaaatttagttagaaattcttgtactttggtagacctaattcggtaagattaccg

SEQ ID NO: 180346 - DNA, 692 bp, Cannabis indica
ggcacgttaagcttcacaagggtcatgacccctttcactttcctataatacatatatttaatatctttatttttctaaaatttatatcaaataattaatatttctttgatgcaagaagaagatttaatatgatacataaatcatacttaaatattaaatatgatacatacttatttggcaagttatttttgatatgtaagacttatcttaaataaagatagttagttgacataactacttgtctacttaagtgtgttaaatttgtgtgtaaattgtatgtgcacatattatcactcataatatatatatatagggatatgattttgtcctgtcattgtactttcacggattgtaatccgtgatgtacgacagccgtcagatgagggagttatttgatctgacggctgagattgatctaggggtaattagggttaaaaagtagaaacgtaccctgacactcatttaatgtaccctgagacccatctaatgtaccacggaagtacattttgtgaaagtacatcacgggcaaactttgaatggaagcacaggtggatttaggaagtctaaaacaagacattgcaaaagaggaattgcctggatgacagatttgataagagtttctttgtcggccctagagaagagtttgtcattccagacatttagtttagagaaactttctgaatgaggtaatg

SEQ ID NO: 180347 - DNA, 704 bp, Cannabis indica
ccttgtcagttacagaatcacaaacagttagttgttgcaatagctctatgaaacctttttcttttgtccaagagttctagccttcgaacttgaaacctttgatctatgcctgatgaatcacagtcttgtcattttttgttttttcgtctgtgacacttcaactttcaaccctgcttcttcaaactggaaacatttttcagttaagtcagcaagagataaataaataatatttctgtttttccatttacttagaaaaaaaaaaattagaaaaaagatgtctaaaatcaaaacatttcaagatgatatcaaacaattgttactgttacatgagtgaagatccctcaactcctaaatcctaaagtccaaattcagtgtaatatttcatacaaatgaaaccttgcaaagttttatttttcttccttccttcttatatttaaaaatatggagtaatactgaatagaaaggatcatatgatactaattttcatcttaattgtaaatctgaatactatcaattctgactcaatacatatacattagtaaattccattacatgaaggatctacattataaatttgtcttctttattaaaaaaaaaaaagttcaaatcttgattgaggctacagccagagagcaacacaattgcctatttaattacctttgagtataataaatttttttcataacaataaaaaaagaaattac

SEQ ID NO: 180348 - DNA, 706 bp, Cannabis indica
atatttttaccatttaactttgactaatacaaaatattgccctcttttgttaaaaaaaataatttttaaaaattataatattcgattaattttaaaaaattattaaaaaaataataaaaaaaaaatattaagtttacttaaaaatctaaattattcttaaaaaaattaaaattttattttatttataaacacgtatcataaaaaatagcgtcaaaattattgaaaatctaataaataatttacacaaattaaaatttttttgaataaaaaattaattttatttatatttatgaactcgtatcctaaaaattaaaagaaaacattattcaaaaaaataaaggaaaataattaaaattcaataataaaaatataaactattttgaaaaagaattaaaaataaaactaaaaaagtattatgtttacttaaacaaatttagatttttagagaaaaaataatctcaaacttgttgccgtaaaatttagtttttaccaaaattaaaattttaatatatgtatttttaatatctaaatgaatttttttaataaaaataaataatattttaaaatcgcatagttttaaaattttaatttatttttaatttttttaatcattcaaaataattttaagttctaaattaattatttaaaatttactgcaaaatggtatatttttttcattttaatttgagggggtacaatttaatag

SEQ ID NO: 180349 - DNA, 662 bp, Cannabis indica
gtctgaatctaacatatttgaagaaccttgaactgagaaacttggagagtttgacccagtcaacgtcattaaagtctcactcacactggccttgcattactagatttttccgtgcagaaagcaactcgcttatagattcttcatcacagtggctcaaagcaaaaccaagtaattgttttggagaattaacatccatattttcaagttgctattgcagcacataagtcccaagcttgaccatgtcctttcttggccaaaacaaggcagagatcaagtgccagttgctggtgatcagcaactgcatgcagcttctctagcaatagctttctgcacagcacatatgtatgcaatcctacttctttgagaaagaaagaacatgaacttgactaaacaaatgaggaaacatacatacaaacatcatatttattgcctaatgtagcaaaccacgttaatacgaggctattaccaagatagtctaaaggaataacaatgaaatagaaaagccaagttgactatgaaacatgcttattaaataacatgcagatgcaattaactttaaggatattgacacatcatcataaaaaggaaagaaaaacaagtaaacttgaagcagagagaactattactccaatttgatactacttcagggcaagcaagagtcg

SEQ ID NO: 180350 - DNA, 719 bp, Cannabis indica
gttagttttatagtagttattaataaaataataaaaaaaaagcaattaatcatcacatattttgtatatgattaacctcaacataataaattgaaggtgagaagtgaggactttctagtaatttaatatgtggaaacaacttttatctcgttgcaaaaatattatcaatttttagatttataaaacgtaaatctcttataaataaatctggaattcccaatcaatccaaatcaggtatgatccgaaaaaaatgcaaaaatactgaaataaatgtttatctcgttgcattgacgtcgttttacaaatttacaatgtgatgattttgatcatatcaaatcacgattagtatagaaaattcacaaacatctacagacacatacatcaaaaaattgttctggtttgttgagtttctgaagaactgcattaaagtttcattacggttttgctaaccctctgaaacttgacatattgttgattacaaactgataacattgcaatcaagacaaatctctttaaagaaagttatataacatggttagttatatgaatatatattgaattggtttatacagatgcttagtagttatttttccaaatattaatattaatgaacaattgattgttgttaaatggtaaaaaaaatagacaaaaagtttcttaaagtatgcctatttacaaaaactcggtgcatttcagttgaataatagttgagctacaat

SEQ ID NO: 180351 - DNA, 612 bp, Cannabis indica
acataattgaatgctattacgacaaatagaagaaatagaactcggaaaattcaattgaaaatgttgtgtttgtaaatatgaaacactaatcaagtttctactaaaatttagaatatataaaacattgtttaaaatcaaaaatttattctgaaacttgaggggagcttctcctctagcttggaccgatactaatttgtcattaccaactttgagcttcaaactcacttggatttaagcaatcccaagttttaagcaactgcaatgaagagcaaacatggttagtagatccagaatcaataatctaaatggatttgtcattctctaaaatacatgattcaaaaactaaagcattaccttcgttcttagggtttagaagtttgagatatttagatttaaaatctcctttctgtccacagtgagaacattgaatagtatgtctgcttagctgttctttgattttctctatagttggttcaatttgaagtctagcctttatcattgagccagcaattgcagtattgtcgaaggaatcattctcattatattttgcttttcttttacccttttctgcagtactggagagggaccgtccttgcaagtgacaatgtcctt

SEQ ID NO: 180352 - DNA, 836 bp, Cannabis indica
aaaaacaatcatccgtcaccattttcgccaataataacaaaaaaaatatcgacaactattattatttattaggaatgattacataaggtaccattttttataaaaaaaattacatttttacgtttaaaggatttttttttaacattagaaacaacacgaaaacatcaagaaaactatataaaagtaaaatgaaaataacattaaaacaacaacataaaataacatacatataacaaaatatcaacaacaaattaacaaaagtacaacataaaaagaccgtattttcagtaaataaaattaaaaaaatcgtaaaaatatttaaaattctgtgaaaacgtatttttataatttttttattatttttgtatatttgtgaataatccctattatttattatttttgtaataggcaatatgagccgaatgtggcttcttactttggtgcattacctactactattaatattattttggtgaatttgaatactaaaattaattactgaggtaatttagtgagttttgacttatagttggcagagccatgcctgagaacttggaggaacaaagctaagtaaaattataggatcccttatttttattttatatttttttgaagaaaaaaaaaaacaaaagaaaattgacatttaagagaaaagtaatctgaaaaaaaaaaaaaaaaaaaaaaaaaaagaaaaaaaaaaagaaaggtaatactaattttagtaaagtttaatttaataatagtttgtaattagtacaaaataataataatatattactatactacaagaattaggttgtttagtggtagatgtaatagtgtattgtagttattgg

SEQ ID NO: 180353 - DNA, 742 bp, Cannabis indica
ataaaaaaaaaatgtatcaactcaatatcttactaaataagattttagcaggttaagaaattagaagtttgtgtcttttttttttaatattattagaaaattaatatatattatacattatattttttaaaaatatataattaagtaaatatttgattggttcggttactttttgaggtcaaacaacattcaatctgtacaagtgcatattttagatttttcaatccaatccaatctacgtacgtgcgaatatccgcattttatgaattggattagatttcatcgtgcggattaaattagatcaaattcattctgaacaaccctaaatgcaatgtcttttctctactcaattaaaattatataaaatggcccgtttaattttttcttagaaaatttatagaggaaattacactcgatatctactttttatttcttattttaatttttacctttattttattattatttaatttatacacagtttttataggttatatccccttatgttcattaaaaactttacttttaataagttatgtaagattatatttagtactttgattataaaagagagtttatcaattaatatattctagagttatatttagttaatttgtaataaaaaagatagtttttaatcatttatatatataataaattactttaaacaattttttattactttatttctttgtaaatggtgctgcagaattctccaaaagattaagagagagagagagag

SEQ ID NO: 180354 - DNA, 955 bp, Cannabis indica
accgccaactttaagaaatagagaaatgttaaagagtactagtggtgcttagcatgtgtgtcaatatcgctattagtctaactaaatatcgagtcaccatataatttaatataatagattttaaggagtatcgctagccaatcgcaaggcgacatgtcgagaaggtgctaggcaccactgatacctaataacaaagcttttagaaataagttgggttaatttgacttgtctgcattatttttcccttattaagcgacgaaaagctacttagttgagagagggcaccttagttcccaattttttttatttctattatctagaaaaaattatataaaaacctttgttcttcaaaaattatttcatttagccttcctaattttttccccttactttttggcccctcttggactcaattgctgcctccattgcttgttaattaagttggggaaaaaattcaacaaaaattcaaaaataataataattctccaattatagatgataattaattaattggtataatacaaactaatcaagattaatttcacctttgttgatgcagttttatcagctgttggaggtattaaggaagctgaccctagtatgacacaaggtaattaatatatacaatataattatctcaataaatcatatatagtacgataaataattaattcaatcatttcttcttaacagataaaattgtttgggcatcagtagcaatcttgattatgctatttatggttcaaagatttggaactgacaaagtgggctacacattttctccattactcttactatggttttgctacttattagtagcattggactctataatttcatcaagtttgattggacagtcatcagagccattaatccagctttacatagtgacttatttttatcagaacaaaaaagaatgcttggctatctctttgtggtcacagtactatccatt

SEQ ID NO: 180355 - DNA, 503 bp, Cannabis indica
atggattttgatcgttgtagctctcttgatctctttttactattttttcacccagagagctcttctcatcttttttattctttttcccctaaaaactagtagctcttaaaaattaggcctaatgtatctttttccattacttggttttctgtttagattgagtgttttctgtgtaattttttcatgaagaactgatatattgatggcttaatttcctgtcattctagttcttgaactgttcggtggcatgtggtttggatttgtggaataatatgtccatttaattactgacaaaaatggaattatgacttccactgtaaaaaaactaatatgtggtcaaatacgattttcttcctaatactttcacagtttgattagaaaatgatttctcataataggtaccagtagtctataggcgtgtttgttagtgttcaattgcgtatgctatttatttttacctttcggttgatatgatgggaaattagaagaaggtggccattgac

SEQ ID NO: 180356 - DNA, 468 bp, Cannabis indica
atagtggcgcaggttgtcaggagttggagaagaaggtttgataatatctttagaggttacttcaaccttcatttttattaattcttttctttctctctttacaaggtttaagctgctaaaaccctcgctgaaaatgtgaatatatatactaaaacatatgtatatattatgtgtatgtatgtatgtatgtggtatatatgctctgcttattattgcctattagtgtggtacgaaatatagatacatgaacaatatataatgcatgtcgtggccatcatcaagagaaagaagaaaaaaatgtgtagtccactttggaatatgatagctacggtggtgatgctcggacgcgttgaaattaaagataagccaaccaaaccgcattaaccctcttttttatgttttttatattttttgtgtgaggaacaatttttaccccttacctaactccaagattcctttttttctttc

SEQ ID NO: 180357 - DNA, 584 bp, Cannabis indica
tgtgattagttctgactttgttttcttaactttttggtgtctaattaatttatgttttatttgttttgtggtttttttttttccttctagtagttatagacttatagatgatatatagtagttttatatagattgtctataaatttgaataatcttctgttttgaattgtaggcaatgaagttgaggacaaggaattaccaaaagagaagacatgatattctttattgatgacgattagatgttaatttattaaagtttgtagtcactatgacactatctagttgatttagtaggtaatttattagggtaaattttatagttttaagacttgaatttcggatgactgaaataagtcttgaatgactttgccttatgtttgaactttctattttttttttaatttaattatgaacttgtgttcatatggagatttaaattttctaatttttataattgtgaaaattagtaagggttgtaacccaacccaaccaatgatgacttgggttggattgggttggattatacataaaacttaaaaatgaatgggtaaaaatataacaggtcgatctcattgggttggccc

SEQ ID NO: 180358 - DNA, 528 bp, Cannabis indica
ttccttatagcataggtacaatacatcaaggcttacggtagaaatatcctcttagagatttttgggcttgggcttaaaaaaataataataaaaaaaaaagatgaaatgggctgtaattagtatttaccttatatgtttgtgcttatttttagttttatttttaattttaccaccaagaggagaaggttgaaaaatattagaatatgaaaatattattggtgcttattagtaatttgcaaagaatgtgaaagtctataaatatatagttgtgtagctattattagatatgaaatgagataatagaactttttttcaattagaagattaatgtacattttactattaataacatacattattataacacaactatgttttacttactaaatatactgacacatattttatttttataaaacaaaatcgttcaaataattatactattttaattattaattaaaataaaaaactaaaataattaataaaactaacactacgtggcttggcacgtaacaatcacctagtata

SEQ ID NO: 180359 - DNA, 765 bp, Cannabis indica
ggtagagacctccaaattgtacatgatcggttgtgtaaacattgaaagccattcacttgtcaccagtgttttgtccagcctttcttcaatccaatcgatgctatttctccctttttcccaagtaaaaggataaccaacaagaggcaactcggtcaaattgcaatctcccaaagctttgttaaacccctcaatcaatcggtcagggtactttctatccgtttgtgagcccaagttattcatatctcccatgagacaccaagggagactactatcgtttttgatggagcggaagagattccatgttaaatgcctcagctcacgttttggctccccgtaaacccttgtaaaccgccaaggagaagaccccaaaagctgaaccgtagcatcaatatgattgaaagagaatccttgaatctccacctcttgaacatctttccaaagtaaagccaatcctccactgtgaccacgaacatccactacaaaacaaccttcaaaccccaagtggcctctaatgctttccatactagttttgttacataaagtttcacaaagaaataacaaattgggcttctttggaacacaaggtccgataagaattgtttggcccgcaggttcccaagcccacgccaattccaacttaacaactcatacctctggcgggcctggaaaccagaacccgccaaaggcccattttttgagaggcccaccatatcttgctccatttcatctacttttcttgaatcttccttattctgtgggcccaca

SEQ ID NO: 180360 - DNA, 703 bp, Cannabis indica
attataattcatcacataatgacaagttcatactaaggtcttcggatagtaactaataagtgaaacctatagggtgcaagcttctccaaaggctcgtggcacttaaaacattttaaacccactcatgtattgaagcacatgtatgcaggggaatcttaagaaaatgacaattgaacaccaaatacatggtgatacgttggctcacagcatattaagaaatgaagaaaagaatatggaacaaaccatatatagtacaagccatccaattcctgtgtctgtatcctacccagtagctcaatttgcaaatatccaccaatgcaaagtactggttttggaagcttgaacatctgtaagctatttttctgtaaatgtgtggataggataaaaaaaaacaattaaacaggctaaacttatgatccaaaaaaaaatcacagctgcataaaaatgacaaggcaaaaaaaaaatctgtattgtctaattcgcagctacatttagacaggtgttcattatcttctaaaattgtagaactgtattgacaaggccaaaaaaagaaatagcagctacataaaaatgatccagcagctagtttcatgttcaaaaggacaaaggacacaaaaataatgacctacttgtacaccaaaataaaaaaaaaaatcaactgttcatcagagaaaatttccaaacaatgcacgttgtcattctc

SEQ ID NO: 180361 - DNA, 581 bp, Cannabis indica
tttttttttctatttgaattattttgtaatttaagacttacgaaatatatatgtagggtcatataaaatttaaagataaagtttgtggttataaaatcatgcaaatgataaacttaactaagccgaaagatttaaaaaattatctgaagagtaatataagtatttgaactgtcatatatctcaagttcaaaaaaaacacggtcatatctttataatttaaattttgattcataaagaaattagtatataatttgaaaaaaattctaacaatgcaccaccttaaaactaggatatattgatgcacctttatttgttttagtcatccgaaataattttttagttctaaattttttctcatggtcatgtacgttatagttatctaaaacatcctgtaaaattttgagaaatttagaaaagttaaacatgccgaaaattatgttaaaacagtgtgttggacgcgtgactattttattttatacgcgtgtaaaatagactgtttgaacattattttctatattgtaaattattccgaatttttcaaaattttgtaagatatcttaaataactataacgtacatgaa

SEQ ID NO: 180362 - DNA, 1020 bp, Cannabis indica
gtactacctatgccctaggaaaagttaaggtttctagggggaaatatatatacaagttatacttttctgcctctatacataaatatacatataactaaatctaccacagattaatttacatcaactacataactagaaaatataatatattaatatagggacaacagtcctgaagaaaagccagaacttaattatacacacttgaacaagaaacacaagatgggttgatagcacctaaaaatcgtgatgcaataatattctgctcgtgaatttataaataatttataatgtatatatgtacaaatgagcaatatttgggaaattgttaattagattgattccatatagttggtgagttttttttggtaaggatttagagagagatagaataaaagtgagagagctaacacaagtatatggacgtattcgaaggagcataattatatagacagtgtaagtagatctactgattggtgtgatgataataatacaagagaaaagggaatcgatgttgggatgtatctgactctatatggttttgagagactcatcatgtctttgagtgttttgtgggttggtttagtaggaaattcttgtttatttctaatttggaatgtcagtgaggtatactcaatggaaaaatgtgctcattctaatccatgtcatttttttggtcagtttctatactcccctttaaactcaccctatatatacacataaattaatcttatggtaagaggttttcaaatggttacatttttaatgtaaacctatctatggttacatttttttaagccattggattactattaaatggttgtgattaatttgaaaattaaataaaaataaataattattaattttacataaataaatttacaaaatacatgtatatattttattaagatgtaattattcttatatagaggtatactttgttaatatgtgactttaaaatgtataactaattacaatttagaggttattcttatttataactggtcccaaatcgggacttga

SEQ ID NO: 180363 - DNA, 981 bp, Cannabis indica
aagtggaggcttgtgtgctagcgcttcagacacagcaactgtgtggaatcatcgttttgttgttgtcgagagcgattcagagattgttattaaagtgatgattggaaatactattttctggcggattgatagctatattttggtttgtaatagattgtcatgtaactttttaagttgtgtaattttgctgctcacaatgttgctaggtagtttcaaacaatttttttagtatacttaatgtgtcaattgttcctacaaacattatctgcaataactttgagatcttattttgaacgttttcttttaaaaaaaatctttataaatatatataattaaataataatatatcaaattaaattttgttagatatattactactaaaataaaaaaggtgcttaatactgattttttttttttcaaaataaaataaagtaaaagatctatgatatttttcttcaaagaagaaaactctttaaataaaaaatcaataacggaatcttgacaaaattaatagtggcgaggcttgacttaaatagttgtataaaaatattattaagtagttatatagcatattattaaaaatgaaaataaatatgagagaataacatacaatgatatataaattatatcaatattgtataaatatataagtactcaaatataattaacatgctataatataattttggcacttaaatattataaataacttacgtacgtatactacaaacataataattttcacaatgaaatatttatatgtaacttgatcctaattaaatttgataagaacaatgaacatatatctaattaaagtctaaagaattaaataaaaaaaaaaaaaaaaaaattaatgaatgatataagtgctcacatagtcacatatctttatatattaaaagtgcctatctaacggcatttcttggtttaacattcttggtttaacattcttggtttaacattcttggtttaacattcttg

SEQ ID NO: 180364 - DNA, 586 bp, Cannabis indica
ttttttaagaaaataataactttgaaatttaatgaagagcagctgagttttttttttcgaaagtcagcagctatgcctgtagaggtaaactatgaactaccattaagagctttttaaaaatattagagttccttttattataatgttattattatattaatttaggagaaatattgtcttgtatttacacaattatttcagtcccaatatttttggttgtacagtgactagactacatattgttcttgaaaaatcccgagtgttttataaaaatagtttttataaaaaaatttatcagcaaaataatttcttgtagtcgtaaaaatgagggaaatttgcagcaaaagtccccaaaaagttcagtttgatacaaataagtccctaacctccaaaaatagcggcaatagtcatcaaggtcatattttttatgggctattttcaaaaatatgggaaaaattattaaggttatgataaatatggcataaaaagtaaatgccactaaatatggcattatctaaccaatcaaactaaaaatatgggtttttttctaaaaaaaaccatataagacattaaaaagaaatctgaa

SEQ ID NO: 180365 - DNA, 884 bp, Cannabis indica
attaaatcggttattttataaatattcctagaagaaataaagagcaacttaaaaggcttaataacaacaaaaaaaaaaaaaaaaaagataaataagctatattattattgatttgtttaataatgagttttacatataacttattttaagagcattgcaccactaatatttagtactactataaagttgatgttttagaaataattaggtgcctgatattgaattccatcaatagcgttagatatcactttgccctttatcattttgaggacaagtttactgagggtggtgtgaggtcaagggtggttacgcgctagtaataacgagtgacaccgtaaagttaatgtcttatttagttaatctaaaattaaattctatcagtaaatatgacactttatgttggtgcttgacattactgtgcctttctaaggacaagtttgatgagggtagtgtaagagttgcttgtcacatgtagggttaagggtagttaccactgtaaatttgatttttataagtagttagcctaataatattgaattccatcaatagtgatatagtattacgctaatgctatagtattacgctatagtgatatagtattacgctaatgctaaatattactataccttttagtatttctacaatagcaagtttaataagggtggtcttggaggttgcttgtcaggtataggtcgtggttgagtgaggtgaaagaaagaaatattaaaattgttaaaatttatatggtgttgtagccactgtaaagcaacatgcctaaaaattttttttaaaaaaaaaaataattaaattataaatctaataaaataatagaaaaaaaattgctattccttataaaaatttcatcaattatataattggatacc

SEQ ID NO: 180366 - DNA, 1168 bp, Cannabis indica
agttaagaggtagaagatttattattaccaatctagcagatgtgtcaattggaaatgtttggaatgaggagatcatcatgcagatttttggtccaaatatgggacaccgtatccttaatatccctagaattccttatcctttctcggatcaggttttctggaaaaataatcaaaagggccaattttctgtcaaagaagcttatctagtggatcaatcttggagattcgctccagtaaaagacatttggaaatggatttggaatggtcaaattcaccccaggaattcagtgatgctttggagaacgttaaatgaggccattcccacaagaaatcgtttgccttttcttagagaaaagtcttgttgtttatgtggcatgatggaggaagataccctgctcctgtttagagattgtggtttctccaaggctgtttggttaggtgggaaatatcctataaggatagattgcattcctggtgatactatgattagttttgtggagaacctgctcttaaccttctcagatttcaacagatttgagctgctgaacttctgtggctgcctgttttcggaaatttggcaacaagaaattctttttgcatcagaaacttggtggcagatcctatccaggctttagtaagaattgaaaaatcggtggtggatctttgtagtctggaaaagaacatcgatgcaggggggattcaccttctacaaaacctggttttcatctgggaacctgatcttggaggtggaggcccgaggaagaatggctcaccatgtcttgttcactgatgcgtcttggtcaaatggtgagagtgggattgctgctattggtgttgatacaagacaaggcatctggtttgtcaaagcttgtaaagaaaaggctcagtcagttcttgaagcagagctcaaagccatcctccttgttgtttcctgggcagtcgagaggggttggaatcaagtgcatattctatcggactcttatatcgcggtgaaggcccttgtcactgatgggagaccgcctgattggaaattatctagtgtttatttttcatttttgaacatgtctaagaaactgttaaattgtgttttcttttttattaagtaggtgttttgaattttgtggtcggatggagtggtaaaaaaatctagaatctctagtgataatgc

SEQ ID NO: 180367 - DNA, 952 bp, Cannabis indica
cataatagatttgtattctttgtaaattgatgtgtaggtttgtaaaaaagtttggccagaattttgattagagaataatgcaaattatcgtgaagtgatagaggtaaaattgatcgaatgattgaaaaagaagtaaacataataaattttaaaagagacggtaaaaattacaggtatcaagttaaaagagttatgttatgcaatttccttctctttctatgtgtctctctctccctcctggaagtctcactttttttcttgatttttttgtgatctccctacctttttactttgcaagtggttttcttattttttttaagaaaaaattgtttgttatatattaatttcatgttaaaggactccatttctctttagcaatcattcaacatcgtactaaaaataaagtaaaaataaataaaaatatatataaaaaagctatggcgtgattatttttagctaataactgaggctgaagccataaaattaatcgacaatctgcatatacgactcttatctggctaataattgttgttataggatcttttttggctacggtttctttttatccctttagcgactccttcaataccaacggttgtgaatttttttttcaaaattacctataaagggtagaaaaatattctgcctctaatggctattttttttagtagtgagtggtcactttgtaaaggtggtgtcttgcgattagttagcgacattttataaaagctatcatatattaaattatattagactcagtatttaattgtaccaataacgatatgattgaaagtgtgaagcactagaaattcatgtgcattttaccatttctctatactctatttaataaaactatagagactttcattccaaaaaaaaaaaaaaacaaaaaaaaaactaagacttattgttgcatgcgatttataatagaaactaaaaggactctcgtggt

SEQ ID NO: 180368 - DNA, 728 bp, Cannabis indica
gaattcatcgatggaggtaggtggttgaagttttttcaaatggtttgtgaaacggaaagggcgcataaaattatagagagagaaaaagagaaactgagagagataaactaaacaaacaaaaaaaatataaaaaaaaatcagaaataatataaaaataagatgctcaataattcggtatttctcgcttaaacattacacaacttcattaaatgacatggcgcattttgaatggctctgagatacccctatcgatgggatctttctggagcccctataaaagaggttctctataaaattatatcaaatgtaatataatatcatatgaaaatatataatatatatatataacgagagctattacagtaaaaattgggtaaaatacatatcaataaagatagtaatttatagcctttaatttaatccagcgactcaaattagctcttaaaaactacactacaattaatatatttatttattttataattaatttagaaaattattaattatagatttaactaacaaaatcctaaacctaactccaaaccataatttttttggctaattagtaatttttccttctgaactttgacatgtagtaaatcgtgccccctgaacttttttagccgttaaaaattcccccgaactattgagattgttaaatttaaggacttttgtctaatttcattcaattttactgtttcagtgattgttcatgtactaaatcatgc

SEQ ID NO: 180369 - DNA, 607 bp, Cannabis indica
tattactcaaaaaaaaaaaaaagtttcaatgttttatcaaatggtctctctagccaatcagccatgacccgtgttatacacttccaatcttatgtataaggaagtgtctatgcataaactgtgtccatgaatctgttgggtaaaatttctacaagaatatgtacagtagttaacagcatatagatccctaccggtggctactggtcaacatgtcaatgagacgatcagggcgttctttgtgtttgttagcatatacattaatagcagcacccagtacctacacagcccaagggaacttcagcaaaacagctcattaaaacaattacttgcctaccatatacaaatatttgtcatgatatattttcttcagatagccatgaaaaaaattaaaaagttagaattatttgaagggaaattttttttgaaaaagagcaaggaaccccttgtcttagacatgtccctgcccgttatacattgaaagtcctcacttgtggcagaggaaaaccatggttacaagaattgctcataaacaagaggcaatagcagttagcattcagcctagatcaaaaagaagagaaatttgagcatctaagcttaataatacctc

SEQ ID NO: 180370 - DNA, 606 bp, Cannabis indica
ggtccgaagatgtggtcgaggtcaaaaatatttatgaaagtgaatatgttaaataaaatttaaaagtgatttttttacaaaatttttattttcattttaaaaattaaaaaattgttcagagaataaatttctctcttaatatatatacttttttctttttgaacatatcttaatatatatacttaaataatcataaatcataacttaaattattttattttttcaataaattataataatgcgcggttacgttaccttgttcatatggatatgagaaagacagcactgatgaataaggagcagaataagcataattatagatatggacagaatcaaattatgcatgagtagtgacaatgatacgctatactatttagttaataatattatgaactataataattctgtgttggttgtgtgaaagtatgtgctaccaaaagttgttgatttgatcccctaaaaaaattataaaaacatatgcctaattggttaatgtcttaatgaaaacaagaaatgagattataattattcctaaatatatcagtaaatgtattgtttcttttttctctctctaatatttgattcaattttcaccttttaactgca

SEQ ID NO: 180371 - DNA, 499 bp, Cannabis indica
attaagagctgattcagagttatgtattgatgatctggatccatcatttactttttaaaagtaaaaatagcgattgttgggaaattaagtttaaggtcaattttgggtaattatttgcaccatactgatctgaactctgattctatgtttggttttactattcaaacacattgatacataatactttgttctacggtataaatttttatttctttatttattttaggaggctgcattagtttgtttattcattaattgtcaaagcaatcattgttcaattcttatgcttcttgcttctttcaggtacacaagtttcatccaaccagtgacagcctcaaagctttataatgatgtatattttctgtctatgtgctgaagtttgccaccaacctctatttcaagctcttgttaacattatcctggaaaatatcacaggtgaagtcacataaagatgttatacacttcgaaactgcttatgttgttaaattccacagtattg

SEQ ID NO: 180372 - DNA, 647 bp, Cannabis indica
  modified_base (566)..(566): a, c, t, g, unknown or other
acacttaactctgtcagatgaaagttgagcctcctattcttttctctataggccgaaccacttctcttctcttttcttcttctaaattttcgaaccttgagtgaatgagtgagtgcccacacacatcaagtggtatctcaatcatagtgtggaagattgtgaagaatccaatcaacaagaaggagaatcagcatcaaaggaaggagagaaagagatccaggttcagatcttggtgatgctctgctacagaaaggaatcaagggctagagatctgaacggaaggagtcattatattccgctgcacccaatgtaaggtttcctaaactttatatgtgtttatttcattgttttagaattcatattaggatgttaatgaaacatacatggtagtaaatctagatcctggtaaaatatttccaacagttcgcacatcaaaaggatcgtcaagcatacattctccaagagctacgtcaaggtgaatgcagaaaccactcaggccatcgaagtttatgcaacaaagctctaacataggctactattggccaaccatgcgagcagacttctanaattttgtccaacaatgcaacaagtgccaaaggtttgttcaaatatctcatctacctcccagagaagctcccattcttcac

SEQ ID NO: 180373 - DNA, 653 bp, Cannabis indica
gattttaaattgaccaaagaaaaaacgagagatattaagtggtgtctatagcttcttcttcatctcatcatccacaaaatttccaagaaaaatctcacaagaccaccaaagttctaaaggtaagtatatatatagtcaatatttactataaatttggtatgaaaatttatgtagttttgctcattattaattctattgaattgaaagttttgtagtgaattatgattctatcaatatcaatatgacaccaaatattaaatacgacgttttcataagctttagaggtgaggacactcgcaacaatttcactagccatctcgaaaaagcattgtctgataaaagtttacaagtttacatagataagaggctcgagagaggtgaagagatttcttcagctcttttgaaagcaatagaggaatcaaagctttctattgttgttttctcaaagaattatgcatcttcgaggtggtgtttggatgaactcgttcatattttgaagtgtaaagaaagagatgggcaaattgttgtccgatatttatctacgtcactccaagtgacgttagaaacaagtaggagtttgggacgcagtttcgtgaacttgaagaacgctttaagagaaatgtcacgagcttagtggattgactcgagtgatg

SEQ ID NO: 180374 - DNA, 966 bp, Cannabis indica
aactctatacttcttacattatacatcaccttattatactttcttgaccatacttttacattctaacatagtgaactaaattaaagttaaacgagtatatgctccaaatttaaaaaccaatcttaaaagaagatttaaaagagctacgagtggtctaaaattaatgagcaaaaatactcaccatcttgagtgtgctaattgataatatgaagaaactttatatcatttatatcatatatatatatgagtgtatacacatttggtaccatatgttttatataaatacaggtttcgtatcatgtatttttaataatacttatttggtaccctgtattttaaaagtatacatatttggtatcttaaatttaaaattttttgataaaattttatcaatacaattaaactgtcttcaattttataaattctggattcaaatttaattatttaattacgtataattgagaaccgtttggtgaaattaataaaattatattgattaaattttatttagagtaccaaatatatataattttaaaatataatgtatcaaataagtattattgaaaacataagttaccaatgtgttttcagaaaaaagatagagtactaaatgagcaaatttttatgttcctaaagcttggaaattgtggggtccacatggttttttaattggttgttcatttccagaaactcgattcaatattgatttaaaatattgacgggttaattacaatcttctattataatttctagtaaattattgcattcaaatcacatgatggaatattttttttcattagcgatatttgttatagttataataataggcgtgctactggcaacctcatattgaagagtgctactttatattcatattgtaattagatgttcgaaaaaactttaaaactttatttttagtactactgtaaaactatttcaaaaatttttctaaaaatttttctaact

SEQ ID NO: 180375 - DNA, 678 bp, Cannabis indica
ataaaatcttggatgttaccaatcataaattgagcatttatggtattaattggatggtttagttgagttttaggctattagaaagactcccaaactgtcaaaaatgtatacatttgtgtgctagaaaaaaaaaaaaatagtaactagttactagttactatttttttagctttggtcaattcttctccaaattgttccaaatcactcccacttaattttgaactatttatacaccctataaatgaataaatcaattctccaacaactgtattttcaatagctatcattcattcacattcataaacaattagtaacatcttttactaatttaagagtgaaaagaggtgagagttccatattcaagtgatcatcaaattaaaggatttgcaactcctattttgtgatcattctacacacattttataacttcatgatgtatgttataatttgaaaaaattaataaatttgccatgctgaattaatttataacttaaattatttaaatctaaattataaaataatataatattcctccactaaagtaaataataatctcatttgtagcaaataatattgtaacacaaatatttatttaaatctaatcaaaatatataatcatgttatagagtaatataatatccccatcttgattgaataactccactctaattgaaagtt

SEQ ID NO: 180376 - DNA, 614 bp, Cannabis indica
taccaaagattcctctcttctctttcttcttctaaaagtaattgtttctaatttttctcttattatattgtatttgtagcccaacaaacaaaacaaaatgtaatgcagtgtcttaattacagtaatgatgtttacgcttattgaactttactataaaatcaatatgaacattacggaattttatagtatttttatttttcaaaaaggttataattttacatatgtagttttttttttttttttgaaatgttatttacatatataattagatagctaggtcacaaacaataattttttggagatgaaattgaatgtaagtaaactcgtgtgacgtgatttgtgtgaagaattttttttttttttttggtaaggaatgcatcttgttttgttggttccttttgtttttgttttctgggaaaatcacaaggacctgtcatcacaacttgattgattatacctacgaataagttaataagaatttggtcagaagtgaagaaaaagtgccaaatgaagagtgaccaatgaccatgtaatgtatgatgatcagctctatattttatcaaaacatatatatatttaggttgatgtcatgtgcattaaattaaataatacat

SEQ ID NO: 180377 - DNA, 1198 bp, Cannabis indica
attatcatgtcttcatctgtttcgagcacagagctatcatcatagatctcctctaggtactataatttttcacttcctgtgaggattttgggaacgagtactgctcctagattatcaccattagaaagaagaaaggattcgagagatcattggcagtgctggatcaagaattctcaccaacaacatagtatctattcgaatcattagaaatgttctcagtgtcataagtaaatcgagtttgaactcctccatcgcgtaccatgagtgaaaaaaccagagaattaatagaaaaatgaaaagaagaaagacgatgaagaagaagaccacacatcaatggtggctctgataccatatcagctaagcatcgaaagaaagaagaagaaaacagagataaggaatgaatctgtattttattgattatgatcaatctgttacaatacattttaactacttatagtagcttgagttagttacaatgctaactaactaactcttggacaacacaacattaaataataactaacactaactaaactaactaccttgatagaggatttttaagaattgtgtagcaccgacataaataattctttgtattgctatagatcaaaaaaatctaaattgttcattcattgtctaacagtgtttttgtttgtacatcaaaaataatattttttttgaatgtgccctttgtacttgcttgctacatactcacttgtagttgaataatgaatatttcctttcaggcaagtccattctgatatacttattgtatgcttgaaatggtttgctttgaaagcaagtggctttgaacttctctgcaaaagcatttaagaagaaaattccactatgtttttttgtattattcaataatagtataatgaaaaattaattatttttattttttttggttgatttcacgataataaatttgttacctctgtaatagttcaagtgttgttgatgtagtaggagtagtaggccagtaacgttttatatctgacaaagttttagattatgttttgcaaactttttttattattattaatcatttcccattctagctattatgtaaattatttatatggaagaaaattcttcagtgaccatcttgagtgggttgcttataataaaagtaaaaagaatgagtacatattttatttgagtaatttgtgccattaatacttaagtctatctc

SEQ ID NO: 180378 - DNA, 662 bp, Cannabis indica
attgaaaatagggtcaccagttgtccgatttgaaatgtaataactcaacttatttttctaccattatttattagaagtatatagaaataaaaataaaataataactaacaaaaaattatgaaaaaaaaaaagtaacaatacaaaaaatattaattttatatatatgcttgtataattttttacactattatatatttactaataattaaataagaagaaaatttaaaaaaaaaaataaataagtaaaattcaataaaaaaaaagtaaccaaagaagaaaagatggtaaaataatgtacaacatacttttttaccagctgatcttgtgccatgtgttagagcatggtagtgcacacacctattctgaataccttgttttgtctaacggctcctctgaacactttttctgtcaggcgtgatcttacccgacacatgccctgcccaacagtggtcccaattgtacgaatccatcacccaacgagaggaaaccttctaaggggctcaataatcatgtatataatatattttaccttaaaaattggcaggcttttgacgaaaccctaaacgggttatgggtatgtccggactcgaactttaagttatataaatcctttcatttattcataaggaggatcaaagaaaaaaatagtcgaaactctacta

SEQ ID NO: 180379 - DNA, 897 bp, Cannabis indica
ttttctcactccctctcttaggccacccgaacccccctctctctcctcactcttcattttttctaaaatttagaaattaatctccaagaaagtcaaagaagctctctcttgatccctcttcaaagaaagctccattgaagcttccataagctaacatgatcaagggaattctagggtaagttatatgtaattttctattatgtttcctttctttttccaaccatgattctctatcatcactcagttcttgtatttattttgttcaatacctctcactagaaggaaaaagctccattggaggtctcctcgtggttccaagctcattactataagatttaagaagaggtaagactatgttgtcttcttcttctccttttcatctatagggctgaaaccctaatcatcattttctcttatgtattctgagttgttacattatctttgatagaaaaataccaagcttggggcataggtaaaatcatagaaagatcaacccaaaagatccattaaaaccctacccaaaaccttagctacaagaggtaaatctttagattttgagagagttttagttagtgttcatggatgttttatatagtgagtagttttttcattttttagtttttatatttcaatgtgttatatattcttcctactttttattgttagatgccatgctaggggttgtgtacttggtttggtagaaatccaaagtttctaccaaaccgtttgatttgaaagtgttttccaacagttttgagacttgacttccaacggatcaaaaccaccaattatagttcgtattattattttaggggttttttccatttttatacttcaaaacaagtttttttttttttttttactatttttacagaattctaaatggaaaccccctat

SEQ ID NO: 180380 - DNA, 651 bp, Cannabis indica
cgcataattcaaagtgttacaccgtcaagcaaattccaaggaaacaaaacataactactaatgccttggcacggcttgggagcagaacggtgatagataggccaatctagttccaatttaatttttggaagaacccagtatccactgtgtagaagaaaccgaaatgatagatactgcatcaaactggatgactcccataacagcttatttcaacactggagaactttcaacagaatgaggcttgaaatatgatgacaaaagctacacggtacatcatagctgaagatgtaatgtatagaagaggcttctccatgccattgataagatgtgtaagaaaaaagaagttgcacgactcctgtctgaagtacatgaagggttttattgtaatcatgttggtgttggaaattattttaccaggatcttagatctactcacaagtatgtttattaacatcctaaataagaactttctaaaacgataaattaaacacatataaagtttaagaaaccttacattgggtgcagcggaattaaatgactccttccgttcagatctctaacccttgtatcctttctgtagcagagtattatcaagatctgaacctggatctctttctctgaatccttgatgctgaatctcctttgctgatga

SEQ ID NO: 180381 - DNA, 1126 bp, Cannabis indica
acatgacacaataaacaaagataaagataaacaattttttatatatattatttattttctaaaaaattattaaaaaataaacataacacacatagagtgatataataaacttatgtgaatattattattttgtttattaaattagtatgtttaattaatagaaaataaaataaacacatatataaaatgttttatattattggatatttttttattataattgtaaacataaaaataaacatagtgaatattagcatatatatataataatcaattattattaccatatatattataaaagaaattgaaaaaaagtttttaatatatataaaaatgtatgagaaaatgataataagtttttttgtacatattttgtaattaattaaaataatgtatacaaaattataaaatgccatttttacttttgaaaaagatgcgttaaaagatatatagatgaattaaattaggtttattacaaactatattttttttggtatgaaggaagcttcaatcctgccaattattcaattgtggggaacaatttaaaaaaatctaaaaatcttcataaaattacattctacgaaagaattcataaagttcttgacaatagggttaaacctttaaaaaaaaaaaaactagatagcaaatttgtctattttattaacgtaaaataaaaagatactgtttataaaatattgacaacatctttcgaaaaaaaaatatattgataacacattgagggtatttttgtatttagagacatggccaaattggtatttagacatgacccacacccacttacgagttacgtggccataagttgaggtaggacgcaataattggaaacgtccaaaaatgctattgttttctcatgtttcctgtaaatcataattatttgaattaaaaatttaatttgcctaccatattccttttctttttctttggataggcctcatttattgtatttattttcttgcttaacctcatttgttcttttatatggctcatctcattatgattattattggttttttcttttttgaaatggattgttattggtattttgggtgcctcaaaatgaattaaaattagctgtttttagtttttcatgtctatgatgtgtttc

SEQ ID NO: 180382 - DNA, 547 bp, Cannabis indica
cttacttcctgaattaatgataatttctgaatgtatatgaatttatattgaaccctgttgttttctgttattaattgtactttaatttcgaatcttcattgttggtctaacttagcttgttgtttttaatgggacaaatcccaaaggattgtcatccattaaacaaacataatagtgttagatctcaacagataaatatttgtaaatgcaacatctagttgtacatccaaagatgacaacttagactagtatttacaatatgaaacaatgaagagatttataaaataagaatgactttgactctcgcctaccaggacatcgttggattcttattttatttgaaattatcctttagttcacaatgcgaacaggataaagtataagaataatctatgttagtgacaaagtataccgccaagtttgatagacttgccaagttggtttcaagaatcatgccaactaatttcattaagaaggaaaattatttagtggggcttgacaccaatattgaacacgatttggcaattacaagtgatgaaggcaccac

SEQ ID NO: 180383 - DNA, 521 bp, Cannabis indica
acctactaacaaccatcaaaacaaagcttaaatcaacctatctagacatactataactacagaaacatacttcaaacaacaacaacaacaacaacatctaattcacaaatcatacaaaatctcttcacttaaaggttagaaaaacaaaggagattaactctgagaaccttacctttgattatattactaacacttgatctaatactctgattgcagcaagaaaacactagtcacaaagctgttggtccttagggtttcgaacaagagaaagagagaaaataattttctctcaaatttccactttcttctattttcttaatttcccaataaatcaaaattatacttagattaattaacatagtgtggccagctgccactctaaaattcagccaccaaaacatagggtaaatgactaaaataccctcccccacatggtaatcaacaaaatggtcatttctaaactctcgactatcttaacatttcactatactaaaaaaaatactaggatatgattctaatag

SEQ ID NO: 180384 - DNA, 837 bp, Cannabis indica
aatttataattacaaagtataggttatactttatatttattatacacttaatatttattattcacatctttattcttattttggattgattcatttttctggatttagttctttaaaaaatacaaattttaagataaacaaaaataaaagacaaaataatttatatatagtctaaacatataacaccacaataatttttaaactatgtgggatttatttatttttttaagaaaaaaaattactaaatagtcctccactaaaatattaaaataaaaatctaaggtaattgtatttagaaatttttacatgaaaaatccattttacacaatttattacaaaattactcatacacgcttatacctacttttttacttacaaagtttgttttattacacaaataccacttagtcatcattccatccatcatcaatcaaatcctactctcttccctctcttttttcattttctatcaatcaatccatcatttcactctctttttttcttcttttctttttatttttaattttattttcagttttttaatttttaatttttaattttatttctagtttttatttttaatttttaattttatttttcagttttttaatttttaatttttttttccattaacaattcttcttttcttttttatttttaatttttaatttgttaaagtctagtttctttatatatttgttgtcttaggtcttaggatttgacttctatctaatcaatccatcatttcactctctttttttcttctttcctttttattttattttatttcagtttttattaaatctttttaacttattagtttaactttacaacttc

SEQ ID NO: 180385 - DNA, 1570 bp, Cannabis indica
ttccttagggtaacgaaaataaagctatctcgaggccagtctagactccttttggtgttgaaccaataatggagaccgtaggttacattgacatctattccttctcccactcactattttaggttaatgtatttatttattaatacatattaaccactttaataattatgattaatttatttataataaaagcctcaaattataaataaatttatcgtcacaattattaaatttaaattaaaactcttttaattcacaatttagaactattttaaattaaatatgttaattactattttaacaattcaaaatagattttttttcaatttctatatacaatttttatcctaccccttgacagtgtttcaaggtggcgatctggtgaccatggacctataattctaagatccaataagttagactatttattgaatctcatcaactaaataatcttatttattaattccatgattagtccgctataaatatggaattgaactcttagtaattgtagaattatatttattgagttttagtgcagtgcctatttatataatcaatttcagtgattagtcctccttgtgtcagttcgtaattagttttggtcaaattaccggtttacccttctaattacttctttatcctttagtaccgttaatttgctagttaagtataatttagatctgatctaaatttttgtacaacttttcagttctagaattaacacttaaatagaaataacattcgacccattaggaaagtcaggattccataattgtagatcatgttcctaaccatccacattattagattcccaaaaacaaaagttgtaagaatcatcttctctgagaaacttgaatgagtgaatcgaagaaactaataacatgaatatgatttcatgattactcagaatttttggccaatctactattgatcaccttatgatatgaattagatctttatggtaaacaacatgtttgataaagacaacttaattacatatcggttcatgtcatgtataatctctattatatacaataccttcacttagatgttatatatactacatcagtaatctgaatcaagattacttgcaccaaataacaggcattagtgaacttcactagcaaccgttgattaaagattctataaatttaatatgttgttgactgttttattcatggctaagtgatattaactctttgtacaatacctatcacaacctcatgtatgaataaggaattgtctgatatttatatgtaaattattcaatattcaatattaataatttaacattcaagcacatataaaaatattcaactcttatttataatcagtaatatctttacaagctttcaaggtataaaccttaacaacttttgtggttagttgtacacccttcaaagagatcttctttatgtattaaaattctttgggttagctagttaatttgctcaagttgacatgttgcttctcttcaagtatgcctacaaatttgtgtgatttcatggctcatattttgggggtttctcgtgttccttaccatgataaatatcttggtttctcttat

SEQ ID NO: 180386 - DNA, 775 bp, Cannabis indica
ctttgtcttttttattaaatattttaagttttttttatatattttattaataaataaataaataatatttaaaatttaaataaaatttaatatatcaaacaacttaataagttactaaaaaatatttttttttattattttttatatttacatcttacaaaattaaataaaaataaatttatttttataaaactattttgatagttttataaataatttgtaaataaattgaatagtatctgaaacatcatataagttacactgaaaaaaaagtaacatcaaagtatcttaaacaataaaataacataatatgtaacctaaaaatataaagaagaaataaaaaagtttctttaataatagtcgtcatttttctgtaaaaaaaaggcaaaaaaaaaatatatatttctcacatattaaaatagttattttatattttatatatgtgtaaaattctataataaattttttaatagaaaagtaattcattgatatcttatttatatcaaaagtaactaaatagttgctttttaaaaaaactttcaaaaagcaaaaatttctggaaacgatattttttttagttttttctattttcgataattattttgaattttggtatatgctgacgtggtataacggtatttctacaaataatttcttaaaggtatttttataaataaaactaattttaggtataatattgaaaaaaacccctttaaactttttatctttcccagttttttgtaggctttacctgtactcatttattgggcctttc

SEQ ID NO: 180387 - DNA, 963 bp, Cannabis indica
gaaaattaatttaactttaaacttattaaaggtactattacagaaaatataataaaatattaaccttaataattttaaataattgaactaatatatatgcacttaaaaataaaaactatcaatctatttatatatctatataatttttttattagggtacgtgaagtggcactctatatttctaatgttgcaatttctttagtttgtggtttttctaaattaattactattttctacatttttttcactaatataatttataacatgtagtgcaaactatgtaacggtagctaatttataatagtagcataatgtatattatttcaaagtgaaatgcatatatagtctatcttataagttataatgatttaataagtgcacatacagttatttttttttcctttcacttctctttatattaattgtaaacatttgaagtagtaattctttttttttaaaacaaaaagctaacccctaatgaaattaccacaacaattgttgtactaatatgggtattagagaaactaataacaaataagagccaattactcttatgtaattgttgtactaatggagtactaaagaaactcataagagccccttattattttatgaaaataataagttcaaataactcaatcaaaaatagctcatacaataaaataaaaaaatatttaaatttaatatatatattttaaatacggtgcaataatttagtgtctctttattacatatatgaacataaatagtttatatacttttttatttgaaagataactaaagtacattttatgattaaaaaaaattaaaaataataattaatgcacacattactatcaaacatatctaagccatatgtttattgaatatttacacatactatttatatctaaaattttctacaatacatatgtccatacggcaaaaaagattatagtcttcatgattatctttaattttttg

SEQ ID NO: 180388 - DNA, 621 bp, Cannabis indica
caactatatttcataccatttgaatcctaaatctgaccactcactctttattcatcacacaaacacacaaatctaggcacattaagctattttcttgtgcctattcttgtgacagggagtgaccctcttgctgataattctctcattactgccttgggtgatcggttctccctaaaaaatgtaggcacattaagctattttcttggaattgaagtaaaatatacttccattgtgccaagctaagtatgctaaagaccttcttgccaaggctcaaatgacatgtgctaaatctcttcctacaccaatgaccagtggtcttagattgtcagctcaccaaggggatcctatgcttgatgtttaactttagagtctattgttggtgctcttcagtaccttactatcactcgacccgaactgtccttcagtgtaaataaagtgtgccagtttatgcaaaatcctttgcaaactcactgcaagttataaagaaaattctcaggtatataagtggtataactgaattcgggcttcatctcaccaaacctatgtcctatgagctgacagcctactgtgatgccgattgggcatcggatccagatgacaggaagtccacttcggggtttg

SEQ ID NO: 180389 - DNA, 771 bp, Cannabis indica
aatatcttcatctcaaaatgcaaccttccctctctctctcccgccctcttacaatttttttcctggtggctgtgttaattcggcgtgaataaattttgtttttttagtacttagtaattatgcaagaataaaattcatcaacatacatttttcaataataatataaggccatcggacaacaaaaattcaaaaataataaaattttgacacaaaaatgctctaacttaacttaaaatatatataaaagagtctacactaacccattattattattagtgggacatttttggagcactgcaattttttttttattttttgtacattttaataattaaataataagtttattaaaaaataaattaagtccaaatgaacatatgcaggattggatgtgttgttaggtacaatcagagagtattaattgttcagttataaaaatctaataattcttactcatttttgaaaaaaaaaaaaatctaataatgatgtactttattcggtatttttattgagaattttgtttacacgtttgttttctaaaacatatgggtctttttttttatttaagtgtttatatattacaattatattttacttgggactcaaatacaggacttccaagacacacatccacctatagtcacttagcctcaagtggttctaaaacatatgggtcgatacttatactattattatatatatatatatacaaatttttatatatttacataatatatatgaactcaatttgttagtgcttcattagttagc

SEQ ID NO: 180390 - DNA, 969 bp, Cannabis indica
atactgaatccccctaggccttcttgatcattgctcttgggtggtgttacatgtgttagcactctccacttatccactataagctttactcagcgctagagagtgtcatcaggtctatgagctataattgattaattttaatgtattgccaacaaaattttgttcaatgtttcacttatcaagttaaatacaattacattactgtgagctaagttgaaagaaaaaagattatttaaaataattgttgtagatttccttcttcatccaagcttagctgtttgactttttagtttaggagtcttacctttgcgattgacctcttaactcagagacaaatttgtcgcattccgtcattttgaggggaaatcgatttacttacacaaggtaaagtgaatcttactataaagtgagctattttgacggcagttgcttttattggtagtaccatcatagatgcatcccattccaataccttggtactggtactggattcaagttgtagtcatagtgtgccaacttgtatgtttggggttaagtgcttcagtgcgacatatggtccttcccaattcggcccaagtactcttactgatgcatctttcgtgtttaggaatacttgttgtgacaccatatctccaggctttaatttttttactcttttaacccttagagtttgtagaaattttccgactcttgttgatacactgcctttgtaagcttgacctttctctgatcccttcaattccatccaaagactcgtccaacaattgatggttggcttgctggtcgtatgttagtctttgatgtgatggtggtgttagcactaagggtatcatggcttcgtacccatatgttagagtgaagggtagtatgacctattgtctgtttttttggttatgcgataaacccattagtacttcgggcatttctttaggtcaattccctttagcttgctctaggtgtttctttagt

SEQ ID NO: 180391 - DNA, 802 bp, Cannabis indica
ccaagaaaaaaagagtaaaactttaatgttaatttttatatatacatataaatttgacgtataacaatataaaatctaattactcatccaaactaaatgaaaatactaattagttcgattggatgctggatgtattggatttttagacaccacatccaccatccgatccgatccaattggatatttaaaaataacatccaatccgatccgatcacaattggatatccaatgtttggcggtcggttgtaattggatcggtcggttgtcattggattggatcgatttatgcacacccctatctaagatcctggtaaaataatttccaacatagtagccttcttttgacaggcctttcaccttaatggcatcggccatgaacctttgaatatagtttttcaagggttcatcttgtctttgttttattttgacaagatcctccagttgtgaaggtatttgtctcgatgccgagaactgagtatagaactctcaacagaattcctcccaagagttaaatattcatggggctagcttgaaataccattgttggactatttcagacagagttgctaaaaaaatctggcatcacacatctccagttactttttggagatctgtttggatctcaaagtatttttatgtgtgctaggggatcttctttccccgtgtacatcttctaagttggcatcttgaacttaggtaggggcaatgcattatgtatgcagagaaatggtgaccccccgttgaccctgtcaagttctaggtcagcaactttgggccagcaggcctttgatcatgtctttga

SEQ ID NO: 180392 - DNA, 935 bp, Cannabis indica
ctagagcgttcactacactgggatagacgcgcatggccattaaagcacgggcttttggactacacccaagaaaggttgtgcatggtacatcgttacagatagagttcaagactacgagtcactctagtatattctaagttgtattcacaacgcaaaggttcaaatcgaaagatacctttgtttatgctcaatcttattgcttagaatactgctcgaaaagatatttttttaaaaatttcaagtgggggattgttggaactttgtgaaatgttaaaaaatgatgtgtgtgagtaggagtcccacatgggatagaaacacttcatttgaagtgtataactagtgcaagtttgagatatgggtttgggccccaaagggtacctagttttgtgcgcatgggtgaggactcacacacctgaccaccacacacacgcgcgcgtgccgccgtcgccgtccgtccgtctgagccaagctggcgggcgggtgtggtgtcaccttattttttggaagaaaatttatttattaaattattatttattaaattaattaaaacaatttttttttaaacgtgtttgattaatcaataaacaaaggcttcctgatttatagcatcttcctgattttttgcatcgttcccacgatcccatgttccaacgttcccatccagtaacgtctttcttcccattacaattttcagcgcatggcctatataatgcgactgaacagtgggagaaaaatatatctttttcactctgaaaaaattatacgatatatatacatactactatattacatatttatatttttcgaacagtagttggtttttgggtgtagtatttcgacagtactctatcgtgtaatgaaagttctgatacagtgtgttcgactgggactgttttatcttgggggtacgagtgaggctgatagtctgcttgcac

SEQ ID NO: 180393 - DNA, 663 bp, Cannabis indica
ttaagtgtttttgttgaattgatcgaacaagattcagttttcttatttcactgccccatggcaataagcatttaaatctaatgattactctgctacaaaatgtttgccaagcactgaagtgggcttgcatggttgactcttaaaatgttttgaggtttgagttcccccgagcactatgtagcaattgttatagtttcttattcctcaattattgtaatgttgggcggatagagcaaattaaaaataataataataataataataataataataataataataataataataataataataaagtgcgaagctgtgatccatttaagttcatgtgtatgacgataatgccttatgatagattttgcttacacatacttaattataatttattaattgaaaggtaacaagcagatgatattggtgggaaaatgtatacttgtccaattttgaagtaattatgccactatgttttcattttgctaacactctaccctactcttttttttcctttttgggctagctcaagtaagttcaatacctatagttgatgataacgtactccttgctggatatatattgtcggaggtcagttattaaagttcaatacctaaatattgcttctttgattacaaactatgtcggtagtcctcaaaaaaaagttgt

SEQ ID NO: 180394 - DNA, 934 bp, Cannabis indica
ataattttcaatttaatcactaatcaccgaccactatgatctttggacgttgacaattattgatattaatttcttaatgaaacttatttaattgtgatttatagtatattaaaaaaacaataaaataaatttatttatttatttataaattttgttattttataataacttctctgctagcttaacaatttgggatcaaaacaagagtcctagtaattcataatttatatttccataataataataataataataataataataataataataaattctccattgattcttgcacaacaggcgctcttaaatgatggaaaattaattaattaatttaatttattaatatataattgtaaagttttggtataattccacttaatttgatactctataagtaaattaagatatattatttgggctttggattttatcaaatatatagtaaaattttgaaaaaaaaaaattgttatagctcatagttttctcttcttcataaaattatatttccattaaaaaaataatttttcctttagaattaatatttatatatattattataaaggctgttttaaatttcataaaattaggctgtactcaaatgatttagttttttttttaaaaaaaaattataattattaatttattgatcattcaatccaaacatatgagaaaataaatatttttaattcatttccccctcttaaaatccaaattctaaacaagatctaaaggtatattaaaataagagggagaagaagaaaaaaaaatagcatatagtttggtaaaaaaagaacaaaaaaaataaaaattaaataaataaaagaaaagaaaatagaaatagaacaattatagtttgttaaagttgtcattataatgagatatgtattatatatatatatatatatatttatatatatgatggtatgtataa

SEQ ID NO: 180395 - DNA, 579 bp, Cannabis indica
acaatcttagggatcacatgctataggagtcttatacctcttcctcctttaattgagtcattggtattgctatttcggttttcatgacacattgcatttaatgaaaagggctaaattaattatccattaattttaaccacatgtttactaataagtaataggaatcaacagtaaggtaatcatacccttatatttgtttatttaatttattaaatttaggaaggtaaaatttcattaaataagtgagaaaagaaaatgagaacttccctaccaattttctaagtaatgccattaagggtaatgacttttatttatttttattttatttttaaatttaaacttataatgacaatttaatcatttaaaatatctattacacaataactaccatataatatggtttaactcaaaaggataatttagtcaatttaaatattctaactacgtttcctgataaagtaaacaagatgaattattatcattcttttttctaaataattttagtaaataacatattactaatattgattccggttattcttcatttattttgttacatactgtgtagtaatcgtgcca

SEQ ID NO: 180396 - DNA, 877 bp, Cannabis indica
gggggtttaattgggaaagtgattagggtggagctagaagaagacaatccgagctcttggaacacatttcttagagttcttgttgaggtcaatctaaaaaaacctcttgtctctggttgttattttgatttggattcaggagtcaaacgttggctccagtttaaatatgagaagattgggatattctgctacttttgtggtcttttgggtcatcaaaggagaggttgcaatctgtctactccggtcacggtggctaatcttgaaggtaatccttcccctttattcggaccgtggctgtctacagactcgaaataccaggacgtgttctctggtgcgtcgaacaagaacactatggtggctgtttcgaaggtggcttcacctgttggagggctccgttgtacggccttgtcgtctcagcctcgtcttgccggttcaggggctaaggtgaagatcaacgtggatcgtggaccaagacgaggcttgatgttgatggatcgagtttctccagggaaaggacaaaagactctgaatcgttgggtacccaagaaggtggctgagggagtgaaacgaggaaatgctgaaaatggtattatggctccagaaattttgaattcaggtgaaaggtctcctgctcaattgcctattttgaaggagttgactgtaggagaaaaggttggacatcctttggttttaaataatgagtcaaatgaggaaagaccattgggtaatgtggagggcttcaaggaagtggacactttgcccatttcaaaagctattgggccgtctgggccgtctgggccgaaaaggaatagctatagtagcaataatgctaagttagtcaagctgggtttactgtgggcagctgggtatgagtccg

SEQ ID NO: 180397 - DNA, 540 bp, Cannabis indica
agtactttatataattactcatcattttttttaataactaaatgtgctttcatcaaacacaaaagggtgatcaaaagttctaaaataacttttatcatattttattttctccaagtgtaaaatacggaggtaaaatgtacttttttttgtagttcacgctttaaatacttttaatttgataatggcttgatcgtgagtattaatgccatgacataattgtttgaatattgctaagaagtattatatggtataacaccatatgatacaatattttacatttgactaacttgaaaaatttaatcatttaccttttacttaaagccccatcaaaatgagatggtgcttcttcataacctctatcatcatcatcatcaccacttaaatatttatattgataaagttcaaccggctacctgtatccattgattaataagggacaattaaaaaaaaaaaagtcaatagaactttcatgaattctattagagaaaacattatatgcattgagttaatttgaatcgatcttttggaccaaataagtaa

SEQ ID NO: 180398 - DNA, 905 bp, Cannabis indica
aatattgagaaacttttgtataataggaaaaatattggaaataaaaaataattgatggtaaaactctcttgtattttaattatatatactaaactatgtgatctttttttttttgtgataatattctcttaactttatttttgtaaatttgaggtgtcaattgaatattatagttcaatgctaactggaattacctctgcatatacatgtgtacatgtggcactaaaacatcaaagtcaataaaaatatgtcacgtctacacaagtgtacatagtgacaactcagttactatttaacagttaaatttaactaaccgtttaaatttgtaagcaaatgaaattaaagggtattgtttcaaaaaaaaatttagaaagtttggtgtctaaaattaaaatataacagtttcactgcgaggaaaaaaatgatgaaagtaatgccaacaaaaataaattagttttttatttttttaaaactaatttgcgacatgaatacttaagatttattcccggctgcagataaatatatatgtttaatttttaaaggtaatagtacctaaattatatttttagaatttacgtaggtacgtagctattaagtgtcacatgaccattcacgtgatagtccctgattagtttatgccatttaatttttttattttttaattaaaaaaattaatataaatatactaataagaaaatgacatgtggataataacttaacacttaacggtcaaataccttaaacttatatatttagaccttaaataactaaaaaaaatacataaccttattttaccgaataaactgtaaagtgtttgttagtcataagattcattaaagcaaataaagttcttagattatgatagtgctttttaaggacatggcaacatacgtgcatatgtttta

SEQ ID NO: 180399 - DNA, 893 bp, Cannabis indica
tggtgtagtgaatcataaagttttactagttatagtagaaactgactacaagaacaaattcgttttctagttgaattggatttttcagaaaatacattaactaaaaagtataaagattattctttcaaaaaaaaaaagtataaagattaaagagcaggacaggtcatcaagtggagaaagttctagccgacttcctcggctgagtgggcccattcggagcccacaagcgaatctcccatcgaatcttctctagtcacacaagaaagccactacccaattaatgtttcaaataaccctcatatttctcactcttattttcttccccaattttatcaaaatcattttacttgctataatatgtattttgtttaatttaatggtagcaaagcagccaatagataatatataaggtggtttgggaatttggggaaagacaagacaaggaaagtagttggggaattacgcctagctacaaacaccgttaaaattatataaataaagagcattgttattaggtactatcttttcgacatatcacttctgattaattagtgatacttcctaaaatttattatattaaactatgtaggacccgatacttagttaaactaatagtgatattaacacacaggaggatgctagacatgctctttaacatttctcataaataaattttaagttataaaatagaagagaatacatatactttatactattaaatatcatgcaggcgtgacaatagtaagatcaagcagtaaagtaagtttattacacatctctctcaactctcaaccaaaaaataatttgtaatactacaaatcctaatttttttatattcattttttctaatcctcactttaaaaaacgtcgcctctctttaaaatccatttaga

SEQ ID NO: 180400 - DNA, 942 bp, Cannabis indica
aatatataaatcacagatccaaacatattcctaaaagtgctttaatatagaaaaccctaaatcataaatctataaagcctttgctaaattaaagaagaagaagatgataaaatatgagcggaagcactaacctgaagccattgttggagattgcagagaaggttttgatcttccaagaatacactattttctagagtattttctctgatggggaaggagagaatacagaaaccctagtgtttcttggggaccactacctatttatagagtcatcttagaataactcttgggtatttataatttggcccctcaacaaattataaattaacttatggtatctacacattaattccatgacactttaatacccttttgatacccataacataattggtcacttaattttgtatcacactttataatagcatatacattatacatatgtgcccacataggatttttaatccaacattaatttttaatagaaataaataaaataataataaaaatataatattcaaatgaagtatagaataaatatacaatataaatatataaaatcaaaatagaaaaaaaaaattaagtgatatatttgaaaaaagaaatgctagtatgagtgctctaactatcactcactataaagttttaattttttttggtctatagataaattttaatctcatttttctgattgtagctatataaatttttcttactagctttttttgtttatttgttttttttatttttttaaataattgcaatataatgaaagcaacctctaacaacattttctacactgttattgttttctgcacacaacaagttatttgaatactatttttaacaaaataaattattaaaaaatttcttaaaaaaatatttaactacaatgtataatttgtacaagttataaatcgtacatcaaaatttaacttcttt

SEQ ID NO: 180401 - DNA, 605 bp, Cannabis indica
gtttcactctcaaagaactagagcaaaattttcatctaagcttttttgaaggacttactggaaaacccctggcgataccatccaagcagattaagaaagattcgaattagtgagtaagtcagtctccctttcttttagatgattccaatgtagtgtatgcattatttccgaattctttattatagatttgcctgttcttgaactgtcattggttaattgtagatcaactagttttagggtttggaaatttaaccgatgtttaaccatgacgcctaattatctgactgtgcttcgattttggccataaattgttcattccccttcgctcataaggtttcgacaaatatcaggttccaattggagtttagaacttctaggactggaaactccaactctgggtgaaatcgtttattttgattcttaatcaggcctcgtcggcatatgcaatatgttttcattcgttaccccgaccaactcttattctcttgtctcccaccttttgtagatgaaccctagtgatttctggggaggcaagcatcatattaaccaggacttgcttcaaattttgtacgaagatcatccccacctccgtgatgacccatctt

SEQ ID NO: 180402 - DNA, 674 bp, Cannabis indica
gttttctttctattctgatgattctaactactaatactctctcttcaatgtttgatcataacacaaaatactaatttatacgtcatgtacaactctctctctctctctctctctcctagggttttcgacacttagcttttctttttgtatggtctttgtcttaccaattgtttgtatgatgtcatcacatgtgatccattttgtgtcctaaattaaaggagagatatagatctctctctttcacaattcattgaaacatatggtcatgacccaaaatatcctttattttattattcaaacattaaatgatatagatatatatatatcttagtgaaaattatgccaagcttagcggtgaaagaggagtgagaaaaaagaagaggacatggattcgaatccaatatatatatattttaatgaaaataatttttattaaacagaaatatccgctaatataaaggcctgaagagcaatgggagcatcggtctcagtaaaacgacgacctgaccaccttacaagaaatgtcacttttaccagcgcagttcgctactgcgctggtaaaagtaactttaccagcgtatttcgcaaactgcactggcaaagaggtcaaagttttaccagcgtacatttgcagtggctaaaatctaacttttaccaacgcatttacgcactgg

SEQ ID NO: 180403 - DNA, 538 bp, Cannabis indica
attaaaagattcgaaaataacaaatttttacaatgatatagttatttttaattttattatctattattattattaataaatagtttttttatctaaaatactattaattaattaatattgattaataataataacgtacaatcataataatataaactgaaaaacaaaattaagtagcattgttattgcaattaaattgtcaaaatattttttattattattttaattagtctcttttttatttatttcttttacttattttcggtattagtttttttgggaagacaaaaggtattgacgtgagtttttttcttaaaaaaaatagactttattagaaatgcatatatataatttttaattacaatgaatttattttacattttttgggctttttttttttaatttttaagaaataagtaatgttattgcaattaaattatcacaataatatatttgtatgcgaaattaatgtataatttctttttattcataaatatattattatttaattacttaatgaaatttaaaataaaattac

SEQ ID NO: 180404 - DNA, 883 bp, Cannabis indica
ctcttttatttatacgcatgtaaaataaggtgtcgtttggtaatatttttgtttttaaattttttaatcacaaaataaaagtaaaattttaatttttaaatattttatttttgaaaaacaaaaatacgttcagtaactatttttattttttaattttaaaaataaaaaacaaaaagtgtgttctgttaagtttatttttattttattttttgattttatttaagtcgaatttaagttcggggtcagattcgagtttgggtcggtgaggggagatctgggttcaagtttggtcaaaatttaaaatattaattaagaaaaaaaaactgtttaaaaatatattgaaagtgatttttttttttatttttaaaattttaattctcaattaaaaaaaaataaaaagtgaaaacaattttatagaatatgttttaaaaaatattttactttttattttaaaataaaacagattaatttttttacctaaagtcatttaattattaaaattaatttttatgtgtaaccatttaaatccattaattgtgatttgctaatgtctatcttaaaatagcgcgggagaaatattcgtatcggaacgaggagtgatcccgtggatcaaactgatattattaaattttcgggggctttatatgtaaaaaagagtgctgaacaagcttttgaaaaagaaaaaattaattaaaaccgcggacttgagttgagttagtttgcgccaaattagttggttgtgttgtgcgctattttgttatttcatttcttttttccaaaatccccaaaaactcagagactctaaatttgaagacaatcgaaatggcagattccaaaggtctttagcctccggatcgtctctctcgccaactacatggcaccg

SEQ ID NO: 180405 - DNA, 809 bp, Cannabis indica
taaatgattgtaggggtataatcgtattaacctattttttaaaaatcgtatgcattgagcttttggcagttcagaacttcgaggcacatcattagcatttaatgctctaacggttctcattttacaatgtttccatccgttaaatcttatttcctttgatgatacagtaattattaattgggtataaattcaaaatagagcatctatattgttattttcattttgtttgaaccctcaagctcttctgtaaattgcaagcagttcactgtcctttacttatttcttgtgcattttagtcgacttcatctatagttttagagatcttcgaaattcagttttagaaccttcaaaacttcaatcgtcaagtttttctttacctagaaattctaaccaaaatagtaagtgatacactctcattttttaatggttttccttttctatacttgtagttttgttttcttgattgatgtttctttatctgtattttttgtttattttttggtaattttgttttgattgtttggatagttatagggctaaggaaaattttaggttattcagtttatagatttatgggttaagtcatattgggtttttccagaaatcgggataacattcgttcacaagtatggcccaattaattctagaaattcgatcttagaattcttagaaatggattgtcctcagaatttagccactccattcagcccaaaacaacatacccaaatttttttttgagataaacaatgcaaaaattgggaacatctattagagcaaccatgatgacatttcaggtcgatataggaaac

SEQ ID NO: 180406 - DNA, 544 bp, Cannabis indica
ttttaatacttctaaaatattagctctttaagggtgttttaaatcttgcactaaatttgactcatgctaaaaattgaactaaatatataatattatgttaagtttatcacaggataaatacaattttttaatatacatttttaattataatattgtcatcaattatttttttaaatatttaatttattgaagattattaatgatattttattttatttttttggttataatttgcaatataaattgctattatatattggaggcattataggaaggctaattatgattttttgcccactgaactttgacatgtaacaaatgatgtctctcgaacttttaaggtcgttaaaaaacttttaaactaaacttggacaaaagtccttaaatccaacaatctcaatagttgaggatgcatttttaacgaccttaaaagttcaggagcataatttggtacatgtcaaagttcacggggcgaaattcttaattagccttataggaaatataatttatttttttgggttttttttatttttttattttttta

SEQ ID NO: 180407 - DNA, 1207 bp, Cannabis indica
catagtgcattaattactcaaattactaaaactctaaagattaagattttggtaatatatattttacaatttactcacacattgtgagacaaaacacacatccatatgtcatgcatttctgaaaataaaataaaataataacactcctatttatttaatacaacatatataagcatatgaattcccaactagttgtgcaaacatcattattcaagatccagtgactacattttcataattaaacgagttgttttggaggataatagcctattattattcaccctttagttagcacatgacacaaaaaccattatgatcatgttggaggattttaatttttaattagttaggtagttacccaaatttatttggttcattattaagtatttattaccatcactaaatgagattttaagtattgtgctgataaaataattttttttagatgcattttttacatcgacacaagggattaaatatatcagtacttgattaatgagtttaaaattctaatgatttttaaattctttgttcctctcaagctttgcaaaattctcttgttctggtagaattgttttaaagagtttttttcatttttgtaattcaaaattttgtgagtttatctttttaggcattttatatcgagttcaatgggaatagaagcaagatgttcagcatgatgatgctcatagaccattttatcttggaagacaaacaccgttagtaatcttccattaccggtcctaattatatatcttaaggacatactataatatgatgatatacaaaaatgaaattaccttattttgattattatttcaattaattatataattgtattattttcatctttacctcttataacatatgcttatgtttatttttttatttttaagcaatattacatacatatttctaacacttaattataatatttttactttaatatctatatatgtcgagtggtcactggtcactggtcagagctcacatataattttggtttaccaaccaattgtatgaactgatataaacaaagatatttggatttaaatcaaaaaaataaaataaagatgctttaataaaataaactaattaacaaataaaataaaatgtgaaaacaaaacaatgtggtgccacactttgacacagtaacactccgacctcgaccgataacttcttttcttttttctttttcctaaaaaaa

SEQ ID NO: 180408 - DNA, 870 bp, Cannabis indica
atgttgtacctgtatgtgaaagttttggttttgagtaattattttagataatattgtagagccagtatggctgagtagagttgactttgttgcctgtagttgtatttagtccataatcttccttggcttaagtcctgcgaatgaaatatctcttatttattaattttggagaacatgaccatatgttgtacctgtatgtgaaagttttggttttgagtaattattttagataatattgtagagccagtatggctgagagagtgactttgttgggccaagcaaggaaataaaattcttgttttgtgaaagaataaattctagtaggggaaatgattgtggacttttggctagagatatttggctcatgtaactacgttagggtatgaaatagtctcttctcagttcttttcaactactcggtaatcacttgtcaagttaatttgttaatttttttttacacattttgtatcggttgttcaaaatatgtaatgtaagccgaaaactgaattgattttaattttttatcacctgtgcttccgcgccaattttatatggtgatttgtggttttgtaacagggatggactctttttgagatactaagatatgctccccaacacaactggtctgcttatgaggaagctcttaaaacaaacccagttttagccaaaatgatgattagtggagtggtgtattcgataggagattggatagcacaggtttttattatgtgttgagtttgagcatgaaagttcagcagtttttaagttcttatggagtatttacgaacttaaattttgtgtatttgcagtgttttgaaggaaaacctctatttgagtttgaccgcacacgtatgttcagatcgggtcttg

SEQ ID NO: 180409 - DNA, 869 bp, Cannabis indica
cgcattggtgttattttgtactccaattattggagccggatttacttctagagaatttttgatatatttttatgttgtacttttgttattttgttatttgtatattatttttttatattgttttgatgttatttggatgttatttcttgttgttttcgtgttgttgttatagaacactgtaaaaatgtaacagtcagtagtcccgtgatccgtaaggggaaataccgggtaagctgtgcaatcccacaccgtttgggaaagatcaagtgggatgattttgagactgtgtaggtagggaactacatagttgaagaggacttaaatggattgattggtactacctatatcaacaaggtccatcttatttttcggtagctcatcacgaaagaactccacggttaagcgtgcttgatctggggtaattttaggatggatgacctcttgggaagttttcccaggaagtgtgcgattgaggacaaagcacgctgtaaacactcgtgctttgtagttgattttgtgttatttgtatattatttttttatgttattttgttgttgttttaatgttaaaaatgtaaaaaatttacaaaattagtgttttatataaaatttttttaaaatttagttataaaataaagtgttaattttacaaacactactggggttcggtgggaaagaacttctgtgaggctgttgtggacttctttacaactggggttatgcataaagggtttaatgtaagctaatatagtcttaattcccaagggtgttaaacccaaaaaaaaactgttgcagttcaaacctatctcgctttgtaatatggtgtacaagatcatttcaagatattagcaagcatattacacttgtcct

SEQ ID NO: 180410 - DNA, 1335 bp, Cannabis indica
atatatgtaccttaaatgtccatggcaggcaggcaagcaggctccacaccaaagataatcaaagtttctatagggccatttggatggaatggaatggattgtcattatttgatttgatctacagcacagattttatgaaagtacatattaagttttctaaccatggaataatttaagaattttacagaagcaatcacaaaaagtagaaatctttttgaaaatactcacctcaagaagacaggcttgacttgacttgacttctctcatattgtcttgttatgagatgaacccttgtcataaatagaaactgctgaacataattaactatgtatggacttatgaaattggcacccaaaagccaagttgaagcaaataaaatatgattaatacattttcaaagtattcatacagattaagaatattgttcttgctcatgatacaactaagaacttgtgaaaaaagcttcaaaatagatatttgttagagaaaactgtacaatctacatttctagggattttgatcattctttttaactgttttaggtgaagcatctacaaaacttgcttctttctcaatacaattacacatctgattttctctggtgctataattttccgacaagggaacaaatttacggaggcaagtaagaaacaggtaagtgcggcgataacctcaacttgcaccaatataggaaagattctgttgacagctgagtagttaagatttggggcagattcgagacagagtttctctacttccttccaacgtatgctccgagtttcgataaatctggaacccagaatgatagttcagaagatccagtcacaaacataagatttccaggagcccatttgatgacagggggctcattttcagcactcatccaacttgcgacctggacacaagtgttaaagtgtaaacaggggtgtgcatgcagagttaaaactatactattatcgtctagaagttgataggaagccataattacttgaaattaaaattgaattggatattgctaattcatatgttagcaagctctgtgaacaaaatcattaatgacatttacttgctttttcagtcgaactattttctttaaatttgatatacaccatatcaaagacaagtgtaatggtaatgattttccaactggagtactactaatacttaccaggcaacaaacaacttcaagatagtgaaatacatcagtcatattgttaggaaccaaaacaggaaaaatataataaaaaacgtatatatacaaaacagaatgcaagattaaagataatttaaacttacttccttcccaccttctgacgctccaagcatagacactcc

SEQ ID NO: 180411 - DNA, 656 bp, Cannabis indica
aatttcgtttattatacttaaaattttatttcaaaaatactcttaatgtttttttttttttggaattaaaattcaacttcattaactcaagagcaatcgctcaaaagtacaactttaagttccgaagggacatcatccttcgtgaacatacgatcagcaaacaaccgagactgacgtgcaacaacatgtgcagctcgattagcagaacgtttaacaaaccttaacgaaacattattcatagagtctaacaaaaacttacaatctttcacaattaaaccaaacgccgaaaacatctcaaccagactattgatagcttccacagtaactaagctatcactctccacacacacatgttggtacgacttgtccttcaaccaactcaaagcctcctgtatacccatagcttcggcaacagctggggcaggttttcccggctgagacaaccccacagccaccagaagctccgccttgcagtccctcaccacgaaaccaatcccatatcggctattgctgtcaaaaattacagtgtccacattaagcttgatcccattaaaaacaggtttagtccaaagctcatcccctttattgagaaataacggattcaacgaagggtagttctcacccatttgagcttttctccattgatcaaaagatct

SEQ ID NO: 180412 - DNA, 548 bp, Cannabis indica
taactatctcaattgatgcagagatttcactcaatactttgcatacccattctattctacttatctattctttttttacttacctatttatactaccctattctccactaaataactatctcaatacaatgacaattataccctctcatactaactacggtgtctaaaaataaaataaattggattctaaacaatctaagcataaatcatttcaatctcagattctcaagtctgtcaaattaaagtgagcaatgagttcatgttattgctaactgacaagataagataaaagactaaattattactggaatatatcaaactatatttatcttaagaaccatttcatggaaccacattatgaaaacagataaatctagtattatcgtcaatctttcaagatttacaattcaaaatatataagaaacagaggattataaacaataatctaagcagaaattaaaagtgagcaatgaagaagaaagtaagaacatttctctgaaaattgaatttagttcatattattgcttcccatgtctaataatacaaac

SEQ ID NO: 180413 - DNA, 671 bp, Cannabis indica
tagagtcactttctattatcacaaaatgaaagaaattgcaaacttggaaccaaaaaccccattggtaatttctagccaaggacaatacaattcatctttattcagtcatcaagattggtgggaacttatgctttcaatcaaaatatttagtaacacttctaacccctaatcttttttcaattttatatttatcttcaaggaatggtgggttatctccttttttttcaatttaatattttattagagtaaggagattcaaacttaatgtgtggtactactaggctatttctgtgactagtaaaatagtaaaaatagtaaaaaaaaaaataggtaaatttactgaatgtaaaattagttttggagtccccattatgttgttccttttgggctttagtatagtttattatcttttgggctttagtatagtttattatcttttgggcttttgcctaatctacccaaatttgctgattccatgctaagtctatcttatctatccaactttcacaaattttacatatattatggattttttttctttttcttgatttcttatttttgtttaagtagaaagttggtaaaaaatttctaagaaaattatctcaacacttaattcctataatagtaagatgtcactctttgaaatgaacaataacgtagcacaaaagaaa

SEQ ID NO: 180414 - DNA, 641 bp, Cannabis indica
actttgtaacaaaaaagttaaataaaataaagacaataatattctttaattggtaggttgtcacatactaagtactattacttatatatatatatatatatatatatttctttttttgagaaaagggcagtttcttttatgttaattttcagtaattcctctaagtttgtctccaactaccaaaaagaataatgggttatcgtttataagtagccacaaacaaaaagtaaaattatttacactttattcctttgataatggccagcaaactctatatatataataccaagtcactttacagaatatttgacctataacagtaaactatatatatatatataggtagcgtattagtataatttagctggagtactttcatgcttaagatacgtatatacttttggtaaaaagaaaaattggtgatcataaattcataatttatatgatttcaaaaaaaaaaaaaatcataatttatatattaattaattttttgcatataacttaaagtttaatacatctgctaataattttaatagttttgtatgctttggccataagttacaattggttttctttgattaggcttctacttttatttatagctaaaagtgaaataaacataaattttaatttatttttac

SEQ ID NO: 180415 - DNA, 945 bp, Cannabis indica
aaaacccttctctttctctctcttctctctctctctacccatgttcggagctaccacctcttcctcctccaggtccccaaaggccttcctccaccaccactactgctacctcaacctttcgctcctcccgcaaatcaccggcgccgacctcaaaacccgccggacgtccgactactccttctacctcgtctaagcagccttctcctcctattccgtctcggctttctgtttcacccacggcctcggcttctgctcatactcctactgctccgatccacgccattgaccgacctgatgttagtaaggctaaggagaatgttaccgttactgttcggtttcgacctcttaggtaaactctgtttggatttttgtactggaaactgttggttgagtagttgtttagttggtgtgatgaatgtgattgttcttttttgattttgtgtaaatgtgattggttgaacagtgctcgggagattaataaaggagatgagattgcttggtatgcagatggggataatacagtgaggaatgagtataatccttctattgcttatggatttggttagtctttttcttatgctgaaatatataattttatgggtttttgattaagacagtcagataaagttcgttaacgttttttttttttttttcctatttactgagaattgggagtggtgcagataaggtgtttggtccagctacaacaactcgccatgtttatgatgttgctgctcagcaagttgtttgtggtgccatggaaggggttaatggtaacttttatttaattttactaatgtgaatccggttttcgtgtgggctataatgtttcctttcccacataaaatctggttatgttatgctacttaagttcatacataacatacaaacatatgaaaatgatttcaacttggtgatttgctatttatgcaggtactgtatttg

SEQ ID NO: 180416 - DNA, 818 bp, Cannabis indica
agaaaccactagggtagcagccgtacatgcatgcattattattatcctccaattcatgcattatgggagaaataattgttttgggttttgacttgatatatatatatatatatatatatttgtttatatagtgcagaagataataataagggaattattaaataatattaagataactttgatactattgaattttattgttccttaactaattaaggtctttagtttgaatattaatatatgtatatatttatatagctatacatatagctagtacattgcatgaggttattggatggaaagagactgagattgaagaaatttgacaagcaagctgtgagataatgagggagacattaattgaaaaagaaagatttataatatatgtatatatataattatttttttctaataatgagtgagtgaggcagttaggtgaggcctctatgtcaaaatatttaagtcttcttggtgtgccccattgggattcattgccttggccccttttatatttgaattggtgtcttggaaggaatggggtcagtcacatattggttttgtcccttaattgattaaaaggggttgagttgggttgggttgggttgggttgggttgtagaagaaagaaaggttttgatatgttaagattcatatataggagagaattaaacatatgtatactataatgtcctatagctagctatgcctaatattgtattggtgatcgcttttgatggacaatccatgcaataattaagggtaatatattatatcttttatataagtttaatggtatttttttgattttttttctttaac

SEQ ID NO: 180417 - DNA, 1026 bp, Cannabis indica
cactttcattaaataagtaaggaagagagtaagaatagttcaaaaatcctgaaagaaacacagcttaataatagcaacaaggctattattaacacagagaaaatataatgaaaacaactccttcacaatccagttacaccaaatagaaaatatagtatagcattgagcttttttcctaatctttaaaaaataacctataatgggaatgtaaaagtacaaatgttatataaattgaagaaaatgtaacaaatacaaaggtagaagatctgcaatggtaactggcaaggggcggtgacgatctgcggtggtaatactccaggggtggcggtcggactggtagaggcgagatagtctagacttagtgttgaagggaaaaaaagagactagtggtctggatacaagaagatgagaatatggtagaaagtttagggtttattatctaaggttataattataattttatcatcaaatttttaactgaattgtcattttgttaatttttttttaaaaaagggacatttattaacttaattgttaaatttagggtcattttgcatggtccatttctaatccccacaaagataaaggattcaatcacattttggtgcctttatggcccaataatataaattggcccagctcaaatgttttgggccactttaatttagcagagcccataatggccatttgcacccaatcagacccaaaccccatgattatgagcttggacgatctttgatgtgcctcgtggccactgtcatcagcgactgagccactctcttcattacagagatacgtttggagcaactaaatttcttctataaataggagttataaacaaggaaaaaagaacacaatttttagtgattaatgtttagcctgaactaatttttcttaaagctttatgtttacagttttttatattgcttgaataattttcttgttggttataatgtttatatttgaataattattcttcatcttcttcattttcttttatctacaaagtattatacgcaatctttt

SEQ ID NO: 180418 - DNA, 500 bp, Cannabis indica
ttaaaaaatcagtaaattgtaagtgaatggaaatatttccaacgatttgtttaattcgaggaaaattttgcaacaaaaaaaaaattaaaggacaaaattctatagtttaaaaaacaaaaatcatatttaatcttaaaataaatttcattaattatatatattttttcaatataaatatgtattgttaattagtataatttaatattaaatcacacatatttgtatcatataaatagttaataatgctaaaaatgcactagcactgcctaatagtgtttccaattttttaatataataactattaatattataactactcataagatacttccctatgatgatattgttggacattcttgatatctaataatttttaaattaattttttaacaccaaatgaagtgtcctattattatatattagtgaaattagttttacatattttaatttaatatgtaattaaaaaaaaaactaatagaaacactcactcataaagtgtc

SEQ ID NO: 180419 - DNA, 912 bp, Cannabis indica
accgaatttgtttactatatatacatgattattatggtatatgtgaaaggataatgtaatataatatatatatatatatatatttcagttttatgtaatttttagttacaactatataaagaaggaattttcattttttttatgtttttttttgtgaagtttttacaaaaatatagtttatattttttttttgaaaacattatttattgggaaaattaaataaatagtgtaactaaaggagtaacttgttaccttaatttttagtgttactaatagttactttatcatgtttttctttatttttttaattttttttttctataaattaaataacttttttgaagaaagaactatataaaatgtgtaattttcattatagaataatgtttgaaacacacatctataaattaattactaaggttataattaattataactatatactaaaaaattatacataccactgtaattttttttttgaaatataaaagtgacgaaaatacaagtaccggtttctgataagtctgttacattagtcggtaaatattatttacaaaattattacatatatatatagttacgaacttggaattatataattataaatttaatttatagacctaaagttaaaaaaaattattattacaaatcatgtatatttgttaattaatagaaaatgaaatattgtctttattattatatccattctgtatttttgtatactttctagattttgtaaattttaaattttaaaatctttaattattttagctatagctaatatttatttaacattaatgtgtattaatctcatattatattaattgtaatttttcatatcattatctattgacgtcctaaaacaatactcatgaaggcatagtgttatttaattttagcaaatgacgacat

SEQ ID NO: 180420 - DNA, 445 bp, Cannabis indica
aactattttgttttataactgcaatagataaagatattacaatgataatttttaaaaaaatataaacatttttttttaattttattgtataaaaataaaatagtaatataaatatatatatttagatatgtgcaatgaaattaaaattgtattggaatattatataaccatatttggtataagataaaatataagagatagtgttgagttaatttaaatttaaattgtaaaatactttattgtatacaagataaatatatttatatgattttttttttttttgtaaatcaatatttatttgaatttaatatatatatataatatacatggccggacatgaaggagtgcaaagtaagagatagtgttgagttaatttaaatttaaattgtaaaatactttattgtatacaagataaatatatttataaaattttttttttttttgt

SEQ ID NO: 180421 - DNA, 759 bp, Cannabis indica
ctgaggtgatgactgatgttcggccaatatctttatgtaatgtcctgtacaaaataatttctaaggtgttggcgaatagattaaaagggattttgcctttggtaatttctgatacacagagtgcgtttctccctgggcggttgatttcagacaatatcatggtttcatttgagataatgcattacttgaaacgaaaaagaagagggaaagaaggctacatgacccttaaactagatatgagcaaggcttatgatcgagtggagtggaaatttattgaaaacttgatgcttcatatgggtttctgtagtcggtttgtggcattgataatgcgttgtgtctctacggtgtcatataatgtggtacatggtggacattctattggacctatcacgcctggtaggggcttacgtcagggagatccattgtcaccatactgtttttgatttgtgctgaaggcctgacggcccttttgaaaaattatgagaggcttcaacttatcactggttgtagagtggctcgtggggctcctgcggtttctcatatgctgtttgctgatgacagttatgtttattgtaaggctaatacacgagaagctcaacatgtgattcgtcttctcaatgtttatgagcttgcttccggtcaaaaaatcaattttgagaagtcttcagtgttttttagtaggaacacagcgtggacgtcaaggataggctctgcagtctgatgagattgagtgaggctagtgaaaatgtttttatcttt

SEQ ID NO: 180422 - DNA, 678 bp, Cannabis indica
cataaaaacaatacaaaaacaacttagtttgataaaagagtaggatcagaattctggcttggaatatcaaatgaatgataaactaaataatagcgctcagtataatcagcttcgatcatctggggaaaaaatcatcacttccaactctctttcgaacaataaatttgatgataactatgaacttggcctaaaccttgcaatatttacaattgctcgtagctacctaaggactcgaacatcaaaccttaaccaacgaacacaacagaagagttcacaaaacaatgtcagcaaaatgaagacaatgtttgaagctgatcttataaaaaagatcctaggaaaaggataacaaactattccttcccctcaaaccgcttcgagatgatatatgcccctgtctgaaccaaatgtgggtttaaaaaaagaccaccttccagttattcgagggcaattacaactaatgagaattttgcaataaatacagaaaaaaagtgaataaaacacaaatatacaaatgagaaagtgaaaaaatgtccgaggatgcttgagagaactgcaaagaaaatttgcaggactcctcaaaaatgcctcagataaggaaaaaagagaccagtacggcctctttttattgaattaatctttgccccttaactaagtcagatatgaaactgttaatattca

SEQ ID NO: 180423 - DNA, 720 bp, Cannabis indica
agaggagtagttatgatttctcttgagcggacgagaatatgaatttgaacacatcaaattaatttatttacctactctatggagagagtgaacgaagttatggcaaagaaatttgggaaaagaaggggaagtgagaaggtcgcaaaatacgtaggataatcgggaaagaatgaagaccgatggtagagattatggaaaaggactatggtacacagaagacttgacccacgggaatagggaaagagtgaagaccacatgtaaaaataatgagaaatggactatggtgcagaagacttgacacacgggaataagtgcagtatacttgacacacgggaataagtgtagttgagcaagaggcaagagcaataagtgctcgtttttgctggaataagggcttctccaatgggacattaaaacctcaaaaatagtggagtttagacataaaattattccaatggaactctaaatgccatcttatatatatgggagtctatagtgtcacacaaaaaatagtgggacactatagactacactattttttttaatattaataataaaatgaatatgattaaatttttatatttatataaatattataatgtaagatagtttaataaaataatataataataaaaaaaattttttagtataaattttagtgttgtggttgtaatagaaaaaaaattagagctaaaaattatactcatttagtgttgtttt

SEQ ID NO: 180424 - DNA, 678 bp, Cannabis indica
agcaagaacaataagattcgattctcaacctccacgagtaatcgtgtagctaaccatagaaatgcattgaaaaattaaatccaccaaacacctatggaagcttatttaaagcatcatagcacacacaaaaggccactataggatcataaaccttactcatataaaatttcaagaccatatatccttccttaccaatccattttctttttcaaataatgtattatcccaaaagaaaacataatattgtcataaattaattttccaaaaataaaagtgctttaattctcaaaaattacaaacacaaaaacacattttaaacgattggccaagaccttagaacacaccacatcattacacagcgccataggtcttaaatcccccatattagtcaaattcttctttttaaaaattaaaacaatatttgtatgatttaggttgttgaacatgatttaattattaattgctttttaaaaaaaatgaaattagagtagtttgaatactactcattcaccatttgactattagccctaaattcttcaaccaaataataataataaattctcagcaaaataaaataaaataaataaaaataataaagaaagtctcgaaatttgtctgagtgtgtcatcacccggtggctgaaggactataaagattgaaactttgtcctattttctc

SEQ ID NO: 180425 - DNA, 555 bp, Cannabis indica
ataatccttgccctggagagtttgagataatttcctaataatagcttcttattatcttaatcgtagtttaattaagctctctattaattgctctgattttaagattgtattaatgaattattcatattaataaagtgattttaaaaaataaatacaaattattatatacaatctaattgtgtatgtgtccatctatgtggctcttgcgtatattgcattatatatgaaagcgattgtatttatattggattgcatcaaaaaaaaaaaaattagtatttatattgggtactttttgactgaggttactatctgataatttactcgccttgattgatctctaacaagtaagtaacctatattattattttaattacaattaggctccaaccaaccatatattgttgccatatagcaattagcaaaacctttctcgtaagtcactttcgtacaatgtgtgtccaaagaatattaagtttctcttttacaaaaataaatatataaatatatacctcattctggtcccccggcccttactatataacacggcaaaacaaa

SEQ ID NO: 180426 - DNA, 633 bp, Cannabis indica
gttaatacttttttaaactttgtgttttataaaaattattgatcgaacccttgttttattaaatattaaaatatagcatgttttttataaaatagtatagatatgatccttaatttaatttttgaaaattttttaatataacatatgttatttttctaattgagttttcaaaacatgacatttttaactgtatatttctataatggcttatttcaaactgacttaaaatatgttacttgtaattatatcaaattctcgtgtggaccattgtaaatattaaatattcatgccatatccatatgaatgacttatgcataaataaaagattttttcacaaaaatttactaaaaattttaaacaaaaaaaattataaaaataagttaatatagaaaaaaatatatatatttttaccttttgaatttttttatttacaaaaatatctattcagtaaaaataatatactattttttagttgttttataatttatttataattgtattaaaaattgtcgttagattatgttttttggttcatttttaattgtttttataatttatttatagttttcgttgaggttgttttttactttttactaagaaaaatatatttttataactatagtttatttatac

SEQ ID NO: 180427 - DNA, 719 bp, Cannabis indica
gtttattgtcattgatattcattcttacaatgttttgaacaggtttgccaggtgttttgtttgtgcttcctgattcttatgttgaccctgaaaacaaagactacggtggtaagttgagacgagctacttagttgacattttgcacatatgtatttatggaggcttgttaagttttcttgtttgggctcttagttaaagaaaatggactagtaagaatagagatgactatatcgtttgactattctctgataagttgattagtaagatttttttttttcagttcaactgtgatcctctaactgtctatgatgtttactttctgtggagatgttggtagttaatactatttgtctccgaaatgaatctattactatttttcttagtccatcatggaaatgtatgaaaccttacaaataatgtttagttttgaatgctagtggactaatatcaaatgtctctctaaactgttctgtgctttgaattttggtagagatgcagatcagtagagatgaaacattttttaatgataatgctgaataggcaggatttcttttgaatcaattttttcatttaatcttaatctctaaaatgtttccttagtacagtttatgttgctttaaacgttttttcatctcagtccatctaggcaaagctagttgttcttaagttggcaatgtctagctttaaatgcttatggactcagatgcattcactccgaa

SEQ ID NO: 180428 - DNA, 570 bp, Cannabis indica
  modified_base (505)..(505): a, c, t, g, unknown or other
agtccgggttattccttttgatcaatacctcaatctctcactttaaattattacattcgtttgtgtcatggccgtagtccgcatgaatgggacaaaacttagttgtgtctcttttacttatgtcttttttcatgggaggttgcttcttgtacgaaaccatagactgagcggttgcatagattgtctatatgtcatccattagaaatgagaaagtagtaaatttggaggcattttccctgggatgttgtttggcgtttccagtgaacttccctttctttccattaccctacctattgctattgttagaccttttcccatttgaatttaaaatgttgggatatttcgaattctagggggatgtttcgaccgctgtggtgtgatgttgatttttcttttgctcgacaatgtccacatgacgtactgcttcctcgagcttaatgaatccatctgctcgatccaaatattcagccattgatcccacatttaatcttttaatgtccttccnataattctcccacgaggctcaatgcccccacgtataggtgctaatcttccctcttcagtcaaccc

SEQ ID NO: 180429 - DNA, 752 bp, Cannabis indica
gatctcaaaatatatgttgtatatagttattttagtttgatttaatttactaaaattttaattatttgcgtttttcaataaactctttgattagcaaaggagtgcacaagagtaattaaaaaatacagtaatgtgcctaatctagtagggcgcgtgttacaatttggtatgaaaaagttctctttcgaagatcttcacgatatgcacaatcatcataagagataagttctactcacggttcagtaagccttttattttatgctttattagtatgtgataagaaaagcttgatatgaagcatgttagtagcatgatagttgaatatgctgatgttttaaactcccaggttcgggtttgaggtcctggatccgggtccaaggttcggggactgggtccgagtctgggtctgggattgtacccaggtccacattcgggtctgcgtttgcgtccgcgtccaaatttgggtctcgagtttgggtacgggtccgggattggttctaggtcctggatctatgtcggagattggggttgacaccagatcttatgtaaatattataatataagctaatacagacaatttattatgtattaaataatacaacttacattgtattaaaaatattggtagtaataattaatacaattgttttattcaaacatagtgctattaattatttaatataatatgaccttttatacgacatatcatacgagcccttaaattacaaaaatagcaatatgtaataggtcca

SEQ ID NO: 180430 - DNA, 607 bp, Cannabis indica
gttggcaaagatgatgttctgctgtgaaaaaggttggatgttgctctgcatagtttgtggaatgaaaagtcctggtgtcatgatcagtacttgatctctatttctggaatgtggtttagtaccacaacttaatggaaaaaatatgagaaatcagattgaattgaatgtgctttctagtaccatgctctatctgggaagagacgctagaaagttcactggaaacactgctttggacgaaagagattcatttatgtctttggtgagcatttttttttgggaactaaattgttctttttttttttggaatgtacttcattagtcagtttttgttaggttatatttctatttgtatttattgatcactgtagtcatttgttgtgggggctttattaattgacttattgaccttttagttttcttctaaatcttacatcttaagcacttctctactactttttattttattcatcaaaagaccttataaaaagtgtacaattttatatacctggaattttctatattttcttttacaaatttgaaaatattatatcttaaactgaattaatttgtgcttcacaaggtgtcgtccaacccaatttatatatac

SEQ ID NO: 180431 - DNA, 814 bp, Cannabis indica
cacaaatatatacactaatattaacaattataaataattttagttctatatagtgttaaactattacataaataaattctcattttttttaaattttcccaatgatgataaaattttatacgaacaaaaaaaaagaatacttcaaagagaatacatattgaaattatggatcttgagaaatgtcaaaattttcacatcagttgcattaaatattaatattggaactccacattattattacttttaaatataatataatagttttttttttttgtaaaagtataacacttttgctgtaaagaccgcttagtttaatttggaaattagcagttaattatgtttaattatggaaaattatttatagatatttaaataattatttatactgttattattgaattctgaaatgcattttatgtcatttagtgattttcataattttgcatttccggtgcccggtaacatggaactcggtgtttggctcagtaaaatcacaacttagtatgttagtattgtgggacggtttattagacattgggaatgtcgggattggccgggaatttagaattttccaaaaatacccctttagtaccctttatgttattttgtgtggaggggcaaaatggtcattttgccccatttgtattcttgtcctttagtggactttgagtgaaaaattaaatgttatttgatttatgatggctgaaataaaaggtttattttgcatttatcctcatttggttcaaagtaagaaatttgaaaaaaattggaaagtgcttttctctctctagcctctctctctctttcggcctcc

SEQ ID NO: 180432 - DNA, 715 bp, Cannabis indica
atattctatattaaatttggtacaatatttagtatgtgccaaatttgatttacatcatacactagtattaaatctaaatttaaaaagtagaactaaaaaatatatatacatcatctttatattgttattgggtaccagtagtactatatctaatacattttataagtggtactttataattggttagtgatattctctaaaataatatacttaaaagtaaattaaaatatatatatacattatctttatattgctattggacaccaatggtatcatactcaacaccttttataagtggcatcctacaattagttagcgatattttttaaaagttatttatttatgttatatagaattcgttacttaattaccccaataataaaatcacggcactaataatacattttagcaattcttataaatactctccaaaaattcacatcatgctaaataaatgttattaatataattttgttgaacaaattaaaatattgttttaaaataacataattataaatataggagactacaccccatcaaaatgggtgtactgatgcaactcctaactgtttcagtatttataagaattttttagtctaaatttgttcataatcgcgtatattatagttatttaagacaacctgcaaaattttaaaatatttggaaaatttataatacaagaatcaatatttaaactgtctatttcacacacgta

SEQ ID NO: 180433 - DNA, 825 bp, Cannabis indica
gatgaatgtagatgcagctgtccgactctagcaaaggtgtgatcggagttggtgctgttattagaaattcaaatggtgatgtggttgctgctctttcaaagaaacttgtgggcaacttcagctcacatgaactatggaagcctctgctcttttttcatagtttcaattgggcaattcaacatcaacttccattgactcatgttgaatccgatgcactgatggtggttaatgctttacgagctcccttcaattcaatctcatcttttcatgatttgattgtagatatctcttgtctcttatcctttctccctaatgtaactatctcacatgtcaaacgttcggccaatatggctgctcatggtttggcaaagtttgctttaggggtggatgaggcttgttcttggtttgaggaaatccctcctccaatttgctctgttattgtaaatgaatgctatttctaatttataataacatgtattttaactcaaaaaaaaatggctatacttaattttgaaactaaaacaagcataatatagtttgtatgtaaattgtttgtgcagatataattactattatatatcttttctaattttccttcattttctcacctgaacaatcaaattattaactccttttttggttgaaatttatagtttttatatatatgtaggaaaaatacatgtaccatacactttagctcaactaatttggaaaaatatatatatcgggtgaccaaactatgaaaaaattaaatcaaaattttgcatgtagatgtagtacgtttagaaggcctttattattgaaaagagttcctaacgacaactg

SEQ ID NO: 180434 - DNA, 796 bp, Cannabis indica
tctctctctctctctctcctactaaatggggctttgctggcccatatcaccttcacatgggccccttcttaggcaacccaatcccacctatgtatacacttgcacaattcacaaggaccaatttacccctctcaaattcacttattaaccctcttaaaccaaacatttgtttgcattaaaaattaagctttgtcttcctatatatggagatcatgtcatgatccttaaaaacattagtttaattttgttgtagtactgcactttttttttttattttgtttttgttttttgtcttggattatatgcttctttattaatttagttttatttatttatacccacgttgtccttgtaggattacatgcttgtgttctggataaagatttatgtacatgatactaaattatcgttttagtttagctttaaataaagaagttggttgtgacgataattaataaattgtcaacagaacggagggcattttcggaatttagaatttaaaggtcctggaaatacatgtgcggctccagattggcaggctttgggttgagcaagttgattgagctctcttcccgctttctattttcaagatagagaacgaattgatatgtgaaattacattaatagcctccgttctctagtattgtgtaataaatgttttttttggtcgtagtatcaattgagtatgtatatttttttacgaaaggtaaaagaactcaattaacattttttttctttctaaaattgaaattgaattcatatatcagccaagtgctataaatttgtgtgtgttgct

SEQ ID NO: 180435 - DNA, 799 bp, Cannabis indica
tttttttttttttaacttttggtcttcttatcccatgcatagatatctttgtggacaaataaccacccatttaaggtttttttttttttttttttttagggggggggggggggtaagtatatcagtacctatataaggttcattcttcatttttccttcattttacttcaccccctctctctcctttgtattctctctgtaagaaaaagaagaaaaaaaaacttttacgtttcctttttctaaaattgacgccccaagcacctccattccttgtggtttttaattttttcgtacgatccgattgttgctcgagtgtccacaatggtcttcctcagtggataagtcttcaaatcttactttttcattgtattcttgaatttgcaattgataactttaagctttttaaaattttttattctcacgctgtagtgtagtcatttttactattataattcgtttgatagttttaggatgtataatgtatgaatttctgattaaaagattaaattttgaactctattttgattcttgactctttgagtcacgaagaacattgtttgaattttagaaaaatagaattttgattttttttagtcttctggtcagcacatagggtctgtttgtgaccctggccagtttgtggtctttacatgtaaccctgaccattagtggtttcagcagagaccttggccagttcatgattttagcccaaaaaacctggctgtacgcattttgcatcgcaagtttgcctgtctggctatacttggtctttgtaaaaactctgtatggctttttgtag

SEQ ID NO: 180436 - DNA, 776 bp, Cannabis indica
agaaaaaaaaaggatgggctctccctgtctaactttataatatttggagaccagaaactatcgcaattgtaatgtagatacccgagaggaaatcgaaactcaaaccttgtggaaggaaaccacatatgacattcgagaccctcttgggtgctgtattgtgtccatcctagaaaaagattaggccactaatagccacttataacttgaagctccagtcaaactctttcttgaggttcatctttaaaaactctcttcaaaattggggttggcacatgttaacttttctctcaacatccaatcctttttaaaatctctctagagagctaatccaaatctcaacaaggtcatctccttcttgtttgatgtgtttgacatcttccaagtatcccttgacgaatggcggcctattcctagacatttcatttcttatatttctaactaaactttcaaatataagccacctctatttttggttaaaagccaaaaacagttagcctattggatggtttttgtaattaatcgacaaccaacattcatcgtgttaaagcattatgaactaaagtgcatctctggttattccgtaatttccatcagtatatatcatcttactaatggcaattcactatggtatttattagctgatagagcaacagaaatagaagaatgaatcagaatgaattcaaattggaaaaagagtaattacagggtatttatactgatacaagaagaatacagctcagcctaaagtgtagctaaactaatagtaacaaactctt

SEQ ID NO: 180437 - DNA, 844 bp, Cannabis indica
aaggctatcgcatatggagaaggtttttataccaacagaaaaaaaaaggtatgaaaaactaaggaaaaaagataggagaggaatgtggctatgacaatgcttttcaagcccttgctgggagagctgaagatactgcaatttctagtagtaaaggggaatttgaagttaatgttactgtggtaaagcaacctagttcgagtactgctgcacaaaccagtagggtaaaaaacaatgaaacaagattattttattgcaacaacaatggagattgtaagtggaatagaggccagtgataggatagaaaatgcttccagtactaagatgattgaaatggggaatactagaggagggggagtacctcctctacccaatggatagaatcttaagttggaacgtccgagggatcaaccaacaacaaaagtagactttagttaagtaatttattgctcaacaataggtgggttcggttggtctcctcgagacgagagtcaaggctcataaacttggagcctaatacattagtatgtttgtagaatggtgttttacgtcaaatagtacttggaaaaaaaaaaaaaagaaaggattggcaatagagctcaatttaatcactccatgaaatttttacggtgttgatcattgtcaattagaagatgtcaagtttagtgggagtttctttacctagaataacaaccagcaaggagaagatagaatttatttcaaaatagatcgagttcttgccaaccaataatggctgtctaaatttgatcatgctaaattattttcctataatgaaggtttgtttcgaccataccccagctgtgttacagtttatcaggtacataat

SEQ ID NO: 180438 - DNA, 1346 bp, Cannabis indica
atattttaaaaaatgtatcttacaaatactagtctcgcaatatggtaaataacacaatctttttacaaaatatagtgaatttatatccaaaccaccaagttccttggtctaagacacagatcccttgtgcgaatgttgagctctttttcaacaattttattcaatctgaaatcccttcaaaaatctggtgatgaagacataactgaaatcccttcagtctcaactcagcactgtcaagctctgatctacaactatggatttacacctccaagttcaagattcaaacctgcaaaacaaaaatataacaaaagatatcatactcaaatctaaccacactatcaaaagagacgatatgaaggttaattaaaactataaataggaacaactatatacatacatgagccaaacaagacttaacagaataacaaacacaacgatagttattaacactaaaagactcaaaaatgactgatatggatattaatagaacaattacttccagttacaatagattaatctgacatacaaaaatttggaccttacagtttacaatgtcaaaattaagtttcaaacagttacttaccacgtatataaaaaatagtcatgtgtacaacaaaattatttgaactttatttttgacattgtaaattattctgaataatctaaaaattgacagatggtagtcttaaataactataacatacacaattttaaaataatagactaaaaaattattctggatgctgaaacatatagagatttactgaaatatatagacttaccttattagattttttttttcatttttctaataaataaaaagtattaaaaaaataaaatatttaaataagattattgtccataaaaatcttacaattatatattaaattttttaagttatgtatacatagatgatataaagatatatatatatttttttttttaatttaagcgttttatatattacaatcatgttttatttgggactcgaaccaagacctccaacacacaccctagcctcaagtggcttagatgattaatatgctaaatttatgatttatctacatataaacgctcatatattgtatatatatcaaatgaaatggatgtttctttaattagtcttattatgtagtagaaaattatatggtattttagaagtacacgatgtactcttatttgttttaacaccttaaataattttttatttattagtttattttattatagttctctacgttatggttatttaagacagtcatttaaaaattttaaaattcaaaaaaaaattagtaacaacgctaaaaaataaaattcaaaaacaatactattacatacgtaaactc

SEQ ID NO: 180439 - DNA, 530 bp, Cannabis indica
atttcatttttgtttacaaattaattaataaggtaaactatttattaaactctggtttttatatatatactaaaatttcttttttcatcatgttacacagaagatgttatacagttacaaattttgggaaatatacatatatggttatacgtgtgagtaattcttcccttcttagtgttttgctgttgtttctttcttcgcaaattattttgatttttgtttgaattaattaattaggttgatttttgtttaagtttgattaatgagtttgataacctaagaaattacgtgctgatgaggccggctaacgatttttgtggactgacttttgttaccacgaccaatcataattgcttaagaaatgtcgaataatctttgagtttatccttttccactaccaaatgaactttttactacatactatatcattaaataaacaagacttggatttgaaatattatagtcaaccatgtaaggttacaaatacattgttttatgtctgtgttttcttttttttttttctttttaaa

SEQ ID NO: 180440 - DNA, 715 bp, Cannabis indica
tagaggagccaaaccatttaggtatacatctccttctccaacaatctttcccttattttcatcaccaaatgctacagaaccctctttttcctttttgttagttaaccaacaactttttgttcctagtcatgtgttgagaacatccactatcgaagcaccactgtccctccacaaaagcagacagagataccttagctaccaatccaacatttagttcaaggtcagattttgttctccattcccggtgagttttgtgcccttaagttctatttggttgtagaaagctatttggccgattgatcacagctttcaagtagttctgtagtttatagcacttggaaaaaatgtgtccctttctgttgcagaaatgacatactgggatgaatttttcaatttgtgacaaacttttagggactattctttctcttttcaaatttcaacttgataggtccagatggaacatgaccattcatagaggaatctggagccttgattatagaagtaacgtctagtttctcgttatcctttttcaaccaatttgacagttaaagtatgtggatccttaactgaaaaattattcccttgtttgtacaacattttgtacctaatggaggttcgatcacctatagggtttctgaagttgtagagcctgattgatagcagctgtgcctggaggaagaaatttcaagtgcatgtttagttctcaccagatcag

SEQ ID NO: 180441 - DNA, 786 bp, Cannabis indica
acctcatcaactacttcttcctcattggccacagcgtccatgtacttcatgacgtatactccgcaatctcggtcattgtcttgttgaggaagcccgcgatctttcctgtcaattctgaaatccacgaaagtcacattcttcgacctattctcctcaaacaaaaggtccaacgtcgacaactgcaaaggtatacaattagttagagtcaatgaagaatgagttattcacatcaaacaatgaaactttgcaagtttaccatttctttcgtagcctccacacgatacttctcattcattgcggtgtgtagggagtccataaatgagacaaccttcgacttcatatttacttcggcaccaaaccaatgtggtgcaccttctagagtcaacaccggcacaaacatctacaattgaatagaggaacaataaagtcaaaaataaattgaaattacagaccatatagatattcgacactacaatgaccaatatgcatcgctaacatatctcacttttcaaaattacaattaagaacgaccatgtgtatatgatgaagtaccttgacgcatttttcgaagttgtcttcgtaaaacagttttgaccactcccggtctttcgcaatcctcttcacattaaacgaaccgagagtttttgtctgcaaagacatgttcatctctcagtaacagaatacacaaactcgaatacaaataaaaactaagactgtactagcaaaagacaattaaccgtaacgatagtcgacgtgggtcgaactgtaccgtaaaaccaaaccgaa

SEQ ID NO: 180442 - DNA, 859 bp, Cannabis indica
aaaaaattggtataagagagagggctgaacagttaagaaaagagttttagaaaaaatctttggcaattgatacgtaaaagtgaaacaaggaaaaaaaaagatctgaagaaaaagaaaaaaagaaaaaaattgcattattccaagtcatttttcaagctctgcaagggtaagtgtagatacatgaatggatctacctctttttcttcttcttagttctttttattttgtttactgcaaagagtcattccaatctcctttgattcactagacttcagaaaataagttgatgtgatatataatcaaaaggggaaagaaaagactaacattcttacataatcaattttcatcataattcctatatttctctttgattcactagatttcaaaaaataagtcaatatgtgatatataagcaaggagaaatatgaatttttcatggtgttatgttgcctaattcatgataaatctttacgggtttcctttggttcactagacttaaaaaaataagtcgatatgtggtatataaccaaaaaaaaaataagagattcaaaataattatcatgtcgtcaaaattatcactgactgtgggtttcttaaaaaaaaaaataataataagagttgaatagaaaattcggttaaatatgtaaactaaaggaagatattttgagcaaaaaatgtggaattagctcaattgattgatctaccctaccaaaattactcttttgacgatacaaaaaattgtgggtctgaatctctttgtcaaaatcagatataaaaattaaggatctcatatatatatatatatatatatatctttatatattaaaagtgtctatctaacggcatttcttggtttaac

SEQ ID NO: 180443 - DNA, 688 bp, Cannabis indica
tcagtagtggcagttgtagtgatgtgcatgcagtggtagtggctagtggtatttgcatgatggtggtttttttttttttgtttttgatgagtacaaactttattgaaagcaaagaaaactagtaaccctaagagggggctacatcccttaatagaccagtggcctcggccttatgcactctcgcccaacgggtaagtgcatcagccattacattgtgttcccggttcacatgacaaacaaagaccttgtcaaaagccttacacaaacacgaacaatctcaaaacagcgggtaagtatcccagccataaggaagttgagcgtttccaaaggctgtagcagcaatcaaagaatccgtctcaattttaacaactgaggcctgactttcctttgccatccgcagtgccaaggcaatcccaagaagttcaccctccaacacacccctgactttattccagcccaagtacaccagagaatttccaacatcagcatcattaatctgtattgctgcaaaaccagcaacaccatcacagatagaagcatctaccttgcagcaccacggcataatcgagtcactgcaatgaggcacaacagtccccgatcaatgagtctccattcgatgctcttcaccttgttcaaaccagattgtcttttacacaaagtcccgctagcggtggataattttcctgta

SEQ ID NO: 180444 - DNA, 594 bp, Cannabis indica
gaagaatacctttaaagaccatcatgagatggctagttttctcctcagcgggcccttcactattaaggcccaatttcctaacaatattcttcgtattgggaccaccaagaatcaatgggctacctgagccacattctactgacagctcatcattcccaatcaccttagcgttaccaccacccaaatttgaaagaccattcgtaccctcttccgtactatccacattagcattctggattgatccacctttcaacaacagagcatttggtaataccccatctccatcattttctatattaatcataaccccatcggaggcttttgcaatagcttctcgatgaatctaagttcccaaaagatctggttcgaaatctccatcattttgcagtatatttcttctcatttcttcatgagcattggcctctgccactttatgttccattctatcctgttacgtaggatttgataatttgaaaaataatcctttatgctagagccgagtctcattcaaggtccatacatggggattgttcatccaaagtcatttacgatcatttgccttttagttcgacgaagaacaccttcatgtcccac

SEQ ID NO: 180445 - DNA, 618 bp, Cannabis indica
gatatatcgatgaaaaggatcagagagacaactcataagagagggcctatgtgtgtgtgtactgctgtgctgaaattaccaaaatagccttaacgtaccatccctctctttgaacatgttaccgaggcagcagtactggggaccccatgcatcacccatcatgggagacaatcttgtcttttcctaattctcttctttcaattaattaattaatatcttttaattaatcaattataaaacgtcatctcatagacattcaactattttgatatctcagtctcgaattaaaataggctataaagtaaaaaaaaaaaaaaaaattagacccttattataaagttaaatggtatttttaaaaaatatttttttttatttgagcccttaaaatgaatgggtcctagacacgggcttagcccgcctatacctagggccggccctgcacaagacggaccctgaaatataatgggctattagagaaaataaaattctctagctcttaattagaagaaaatatagtatttttttgagttcctaagctaggtatgccctaagcacaaatttaatcagcttatgccaatagtcgggcctggtgccccatagcaatgcttaatgaaaaat

SEQ ID NO: 180446 - DNA, 663 bp, Cannabis indica
ctcttaatatcaaatttcaaaacttcttcttctctcttctaaacgtaaattactgctagtgcttctaggatcggggtttctctatacttctctcttcttactttcttcttttaacaaaaatattgttaattgattgtctgtgtgcgaactgaaggtagaaaatcattcatattgtttttttttagtattatttttcagccaaggtacttgaatcctcgcagggtcttgtgaaactttctaatttttgttatatatatataaataatgtatcatttctcttgtacacctatgtttatttgaaatatttctcttctaagtattttttttattatatatatatatatatataacttacctaatatcatatatataaatatatatatatttaatccttttaaatttacaacaactcagtgtgaaagaaatacctgagaaaaccacggtagaacatagcagactataaggcttttcagtggaagaaaccgcatacaaagaaagtcatttattttattttattttatttgtaaactatcgagaagatgtttgtttcgtttttttttttttatgatttatgagttgtgggaacgaattggtgtttgttacgaaaggttgtcttggtttgtataatttttttacaaatgaaattggtttacttataaattg

SEQ ID NO: 180447 - DNA, 1012 bp, Cannabis indica
gattcaagttccgatctgtccctaacaagctgcaaccgtagaacagactcaagcccgatcatttttgagcccaatcgatacagatcccaagatccaccatcgtctgtagataaattcaacaagagagaacgagagggaacaccatataccagagatctatatacagaaataaaaggaaagatgcgaagaaaaaaataaaagatgagcagaaatcaagaaaagaagatgaagaagaggaagtgggtacctgaatattttcggggcgaagatctcggattccagcttcgttgaagctgtcgcttgcggaagagacccagccatcgcctgggtcaatctcttcgtcgtagtcgaccgagagagcagcgaacactaagctcatcttgagcgtcaacgttgatctctctgacgttcccttgcaatcgtggttggggaagaaggtggccggagtaaatcattggctggatctaacatttttcttttttttttttttagaatgagctgtgcggctgtgagcagaaacaaagaggtgagaggtaagaggtgaaagagagaaataggtttgttttctttgaattggttggcgttattaggctcactattaatgttttttttaagttgcagttgcttttttcttttcaaataaattgtaatttgcttttttgttttaagttgatatgtaaaacatttacttattattatatcttttatttttatttatttattaaaataatattaattataattgtatttttttatttatttttttaatttaattattatatagtgacgcgctatatgagttgggatatatttatctagtcacgtttggtgtgtcactataggctaatatttttcatattaataaaaactaaaaaattaatgggatttacattttagtgacactccatatttttagtgacactctatacaggtctctaacactgaatatttagagtcaatttatgcatgtcactaaaaatcaatcctaactctttagtgacccgcactataa

SEQ ID NO: 180448 - DNA, 1159 bp, Cannabis indica
tgtaagagaatgattaccttactattgattctcattacttattagtaaacatgccataaaaataaatgtataatagtttaaaaattatatcaaaactaataatatatcaatatatatatattacttttaattataaaatatatattataactaacaaaaatacatgtttatctttttcaaggagcgactgcctcctcgccactacgtgagttcgcctatcatatatgtgtagtagacaccaaattaagacattattttttttagattatggtaaatagtaattatatataaaaaaaataataaaaaaaaactttagacaaataatatacaatcaatgactttgatactagggggagagtaggtaagtcattagttttttttttttttttttgaaggaaggtaagtcatagttaatatgttttattaagtggaaaaaaagaagtcggtgtggtcgttaactattgattagtgacttttctgttaagttcgttggtcctaattgtgtaatttaataatctttagataaagggattttagatttaggaatgcttgacttgtgtagtatattattgtgtgtgatctaatctttttgctaaaggattgtgtgataataaagaccaaaaaattagggggcaaaaagagaaaagaaatacactaataattcactttattatttttgtaaaatggaataatttatattattcatacgcgttttgagctcctttaggctttaaggtgagacaaaatttaacaattactgattaatttatactaatctagttagtttgcatgttggaggctgttgctattgcttaaaaaaattaaaatagatatggtgaaaaaataaactatagggcaataaaatgatgagtattacaaagttaagaaaacaaaaaaagatatttaaaaatcaatttgcaggttattatagttgtccaactaaaccacacgaacatattttaaataaatattgcataactcaacgtccatttacaatattaaaattgttattaggtcgattttataatagaaagaaaaacatacaagatcgacatctttccaaacagcataattctatgtttgaatttcataaaatatagaatactataaatatttaaaaaaaatataatattaaaaaaattgtaagaaactatttttc

SEQ ID NO: 180449 - DNA, 624 bp, Cannabis indica
tttttttttattattaatatagaattatatgtttatgcatgataacataagacggaccatgtgttgcaaatgaatattaaatggtaaaaataatgtattttatgttaataatataataaacattagtggttgataatattctctaaaaaaaaatattatataactagtcgattttcacatattgaatacgatgcatcttacattttaacttcttttatagcattattatcattctcaatttctcattatgaacattgagcttttcggctcaagcaaaaaaaaatatatattaatatatttatatttttaggtaattttttttttttttttgtaagataggaaaaatactagataggaacaaattggtttatttagattgctaatgtatttatatttattataggaagatttttattagatcattaccatactttttcttgtagaaattataatttattttttttagtatgactgtttatctatattatagttataatattatttcttttatttaaaaaaaaaattaaataatttatagtattgaaaatagaatttacatagttagtatataagtgtgacttttcttttgaaaaaattggtttactatgcttaaattaatatgaa

SEQ ID NO: 180450 - DNA, 642 bp, Cannabis indica
  modified_base (612)..(612): a, c, t, g, unknown or other
gtagaaaattgacataaagcaaatagagagaaacttttgattgatcaattcacctctctctctctatatatatatattatattatggatatatatgttttcaacataaagatcattgcttttgtttgatcagaactctctctgctatatagctggcccttttgaatttatatagttttattatgtcgtatgtacccattgtctgtttctttactatgcagatgatgaacgtacgtaaccaataagttactatatatatatatatatatatatatttaaggagtatgtaaattaatatgagtaattgccatggaatggatatttaactctcactcacttaattacaaagagagaaagggttttgttatatatgtgcttatgaatctccaatatcaattgaaactatttaagagaatatttatatatatatatatatatatatgagcggtgcatattaattgaatacattaacaacatttggtttttgtggccgactcaacagtgaattttcccagtttttgtagatttctagtactactagtactcaatatctatgtcttcatctgctgtaatctctgttacagagagacagtgtttaccccgtttatttatntatatgcatgtttactttattttttgtttt

SEQ ID NO: 180451 - DNA, 776 bp, Cannabis indica
atgtttcaattcatagtaataacaaatttaaatctatcacttggctatcggagaaattagaactttcaattaacattatatatagagtttttttatatgcttctaataaaattatacaatttgaaaggtgtttaaatattaaaattttatgctactggaaatgtctacaacaacaagtcttgaaacaaataaagtaatttataaatacatatgtataaaaaaatatctttgcttcaattccaagatgaaacttaggttaggtacatcaagttaggtataaaacttgtacaaagaagactacaagaacaatttaatttattaaaatcagcaataaaaattgattatgtagtcataagcaatattatttaattaaattaatctagcaaaaatcaaatttattagtactaaatatacaaacataattatacattcacaaaaattattattagattattatttatatatgtttccataaaaaaaaaacttgttattatctctcaacaaatttttttaaaatatataacaaaaaggaatatttacaacaaatattgttggagataatttttttggagtaaaacttaataataaatgtatatctaatgtatcaaataatcttatataataaatatatatatatatctattaataaaaaatttggtaaaattacgttcatatactagcttttttactttttttaaaaaaaaaaatttacggtttagggtttctaaagtggttgcagcgctagttgcaataggagtttttaatacgtatttttt

SEQ ID NO: 180452 - DNA, 617 bp, Cannabis indica
cctggacaagactctttacaacgagttattataatgggtgacatgggaaaagtaagtaatttgagtattttttcatcaagcaaagtatttgacgatacacttattatatcataaaatatagagactaggagttcctcagtattttcttataaaaaatgaatctaaagggtgtaagaagctagctatatgaatgatgtccctatatgtttattttaggcagaaagagatgggtcgaatgagtatgcaaattcccaaccaggctcacttaacaccacagatcaactcataaaagacctcaaaaactatgacatacttttccatattggtgatatggcatatgctgatggatacctttctgaatgggaccaattcatagcacaagtttcacccattgcttcagctgtgccttatatggttgcaaggttatacacatacatatataggttcaattacatgttcatgatttctatttatggttggttagtgatgtaatttgtacatataaaatttgtaattgtgcagtggcaatcatgaacgtgattggccaaattcagggtcattttgggatactactgattcaggtggtgaatgtggtgtgccggctgagactctctact

SEQ ID NO: 180453 - DNA, 1237 bp, Cannabis indica
  modified_base (1204)..(1204): a, c, t, g, unknown or other
aaatttcaacacccaagaaataatgaaccgggcctagatccttcaaagaaaactctttgttcaagccagtgatgattgtagagattaatgatgagttggggcctgtgatgagtatatcatcaacgtagacaagcaaaataacaagattagagccttgcccatgtatgaatagagaagtgttagaccgactgctatgaaatccccactgtaatagagtatgtttgagcttgtcattccaagcacggggtgctcgcttaagaccgtaaatggccttgtcaagtttacacaaatgagttggataccgttcatcttcaaaaccttgtggttgggacatataaactgtttcttctaactcaccatttaggaaagcattactgacatcgagctgctgcacaggccaattatttgagactgctatagagagaacaacctgaaccgtggcaggtttcacaactgggttgaatgtttcttcaaaatcgattcttggtgtttggagatatcccttagcaaccaaccgtgatttgtatctatctaatgagccatccacattaagtttcacacggtgtacccacttgttcccaatcacatgcataccttctcgaaatggaactaagtgccatgtacaagcttttttgagggaaccgattttagagttcatggaggctaaccattttggatctcttaaggcagcttttagtgatttaggctcactgggaagtagtgattcgggtaaggggtgctttgtggcaagatatgatttaggtttgacaatcccattttgagatcttgtggtcatagaatgtgtgcatgagggggtagtagcagtagcacaaggttgtgtattatggttgttttcagtgggactcaaggattgatcaagagtgttattgagaataggattggtagtgggagatatgtggggagctatagtaacctggggtgcaacaggtgggtcattggccgcagtcacttgatcatgagaaccattgggaacaatggggggctgctgtggagcaatattttcctcagatatatgatgaataggagctgatgccaagttaagatgactgcctggggacatttttggggcagtatgcagaggagcattgttggacacagctggtgcaagtggaattgcagagggctcagcagtggcatgcataacagggttgagaatggtgattagtagttggaaaagaaaacncagcagtagagggatgtggaattagatgatacc

SEQ ID NO: 180454 - DNA, 464 bp, Cannabis indica
aatcgataataatggatgaagaagtaaagctggtgggatattgggcaagcccaatgcctccgagagtgatatgggcactgaaactgaagggagttgagtatgattacatagaagaagatatttacaataagagtgaattgttccttcagtacaatccaattcacaagaaggtacctgtgtcttgttcaatggagcaaaacccatttgtgagtctctggtcattcttgagtacatcgaagacacttggcctcaaactacctctcttgtcccaaggacgcttatgaaagagctttggctcgcttttggatgcgatttacagatgaaattggttaagttttttttttttttgttatcgttgacaaagaaaattagattatgtatgcgtttccttcatttttcaagagctataattaacagaagcaatagtctcgttgacttttttttggagaaatttctgtgtatta

SEQ ID NO: 180455 - DNA, 526 bp, Cannabis indica
acatgagctcttggatgaagggagatcattgatgatggttaggcatgcatctactcaatgatggttagatcgtcttactccggtggctgggctcctttttccatgcatcttgatcggcgggtcactaaaaatggaggtttgttgaaggtatggagatttatgaggggtttcaaggatattattcaaatggagggctttacgcttatttccaccagatttgtccagtctgacagcaacaatggcctccctaatagtttactagtgatttctcgatgggtataggcttcgagtcataatcggaatcttagatccaagatggttctccaactgggatccccaatggttgcgttttggggggcttcgtttgagataggatgttagtgccacgaggtctctttttgtgtgtgtgtgttgtttttttttttttttttttcattttgtgcaataatctaaagtggtactttagttcatgagttgagtattttaatttttagtttttgaattcttattttatgttgtcttgtag

SEQ ID NO: 180456 - DNA, 693 bp, Cannabis indica
aaaatttatttgattgtcttctacttttcctatcgtagattatattgatacctactaataactcttactaaacaacgggtgtcaagtctaatgcatgttaaagcatacatgaggcctctcactgttgatgcttaattattttcttgtctcttatcttttctggaatagttaaaactgttccttagataaatatactctatgtatgggagtcaaataacttcctttagggttacccattgaaaaaatactctagcatcttactaaagtaagttgcttgcaccagagtaagtaaacaactaggtatactcttcggttgtgtcaatacaacagagacagtgagactatcttatatggtataagatgatggaacactttgggattgaatcaactagtatatcctctactttgctactttgtattcggatatagtcatgttcttatatgagtagtatttgttgaaacaaacactttctcttcttaatgagcatagtatggtccacctctaatcactttataatagctatcaaacattcaaacctcagctggcaaatctagccttccttaagttcatgatcagggcatccctgaatctagtaatggtgtacactaagtatatgtaccattctcattctgaggttgtcttgggatcagacttaggtgggacgacatagagtgtcgtttgctgtctcaggc

SEQ ID NO: 180457 - DNA, 1245 bp, Cannabis indica
cgacgccatagggtccctatggcgacggttatttcatacccctttagcgttatccggatcaatgtcggtagcgaatttcgccaaaatcgacgttgaaagaccttaaaaaccgcctctaaaacccaattttatagtagtgtaaaaataaaacaataaaatatttcataagtttgatgacattgttaattaattaataactattacttaattggaattctacccaaaacataaaaaggcaacacccacttaattcccctagttttatccaattaatctgaaccatccaaatcgtccgactatatatatttgcttgacttttttaccaatagactttattaatattggactctccatttccaataaaaaaaaaaaaaaaaaaaaaagaaaaaaaaggactctacatgatccattagtccttccccactagccattgtgaaaacctcttatggtcaatgtttatcatttgtgtctttgtttttttttttttttttaaaaaaaaaagacttcttctttttatgaaaagaattaattaaatataattttgtggtctctcttccttttctttttatttctaaaaattatagtgatctactatcaatctttggcttatctgataagtgttatattctttatagtaatataaaatatagattaaatatgtgtaataaattaataatatgtaatatatgataattaatgtatattagttgttatgcttttgtaatatttagaggagttacttgttactatgggtactattatcaacaatattatgtgtgtaaaaagatgttacacattttagtttaaaatttcttaatgctatagaagttatagtgtgtgcatgagttacataatttgagtccataacgtctatgggggttatgagtttgaatttgaaatggtgatatcttaaatactatataataaggtataaggtgctcatattgagatgagaagttttctatcaaaaaacacataactagaaaatctaaagtttgataattcccaaaattatttccatgtgagttcccttagtgctaagagatagtcggaaataaccttttgaacaaaggtgtaatacattgttcaagtcatggtgatctccactagtctacactcaaggttgtgagtgagtgtatatatatatatattatattacatgtgttgtgatcttctcttcttttaccttttcatataaatatatatatgttatatatattgtgtatatatgtgtagtttgtaaac

SEQ ID NO: 180458 - DNA, 544 bp, Cannabis indica
aaaatactgtaaaatgaaaaaagtttacaaaagatatttgtaaacttttacccgaaatctagtattttttttagaaaaaccccttaaaaaatggggattttacaccacatactaaaatttttagttttttttcttttttactgtggacagaattcttttcaaaaatactgtgtaagttttatattgtgtactgcggtaaaattttcaccgttattctacggttattttttagttgttctactattttttctaattgttatgttttgtattttacggttattttataaaaggataataattttgtaaaaaaaatctgtgtggagtaaaattgtaaacttttgtctaaaattcagtatttttataagaacccgtaaataaatcccataaatatataaagaaacttggcttgggcttttggatatgcgcatacacacttgggcttttcttgatattttggtcttaggcctacaacagaaaatttagtgggctgacactttgttagagtcatgaatcaggaaaatgtgcaacgtataccaaactaata

SEQ ID NO: 180459 - DNA, 1054 bp, Cannabis indica
attttgtttagtagtatattcttacaatattagaataatgtgttaattaatttggttggttagtttaattaaataataacttgaaacaaaacaaacaggtgcttagaggaaggagctcaaatgttcatgttaaaagcccctaaaagcaatctgacataaagagactgagatgtcatttggtgaattccagaggctaaaattgaaccacctcacaaactggaaaccataggaatttgctttacgttctcattatctttctgctagactttttaattttagactttctacctcaaactttttatgtgtattaagaatttaattattaatctcacacatattttttttgccatgttcctgttgattattatgcgcttgatttatttttgttaactgttttcagccccaagttttttttttttttgtaaaatttggaacttgaatttttgggagggaaaatttgatttttttaaaaaattatttttcattatttttttgtagaaacaaattgttatataatattgatacattattcattacagaatgggcgaaggaaaaatattccaacgaaaatcaatcatcatccaccattaaaatatttgcacattagtccaatgccttaaggaaattggatacaagatttcaaaagggaagaaactcaaaagacttcaacaaccttaaaaaactttacatcaatgcaatctgaaattgttgcacatctatcgaacaaccattttagaaataaaaagataatgaaagcattaatttcttgtagttgaaatagccttgagcaatgatggatattagccacaatttctctagtagagttttcacaattgttacaaaactgactatttgaatcaggaatacaattttgcatctatcctctatttcaggcatcctaaaggtgggttaaactattttttttttttttgaagaaaataggctcttgcaatgatgcaaatgggatttttgttggttgtttcttgtagccctaaaaaatgtaaataaatgagatcattgaagtattctgttgaataagtgtatgagagaagat

SEQ ID NO: 180460 - DNA, 744 bp, Cannabis indica
agaaagaaaaaaattgtatgtagaaatattttaattttgttcgaattgtatatagcaaaaaataaattatataaaagaattgaatgtacattttattaagttttgaaatatttttattataggtattatattttcaaattactattttcttacattaaaatatcgattgtatacataatttataaaaaaattaatattaatatgtgtggattggtttagatctgttatttttacatgtcaatcaacatccaatttacacaagtacgaattttaaatttacacaagtaagaattttaaaattttcaattcgatccacacttttggatcaaatcgtgcaaattcaactggatttgatattttataaacaccccagacttcaacgtatgcaattatatatgaatttttttgttataaattatgacatggataaattttatgtttttcgtaccttttaagttcgataatagtgatgcgacagttagcctaaagagtcacttagacaaggtagtgtattttagttttagcgggataatatttttttaaacatttgaaatgtcggcagtgtttgggttttggtttaggactattttactcctaagtttgttggttactttatgtttatgtcacggggtagatttgttatttcaccttacctttgtcttttgtttaaacttagtgggttttttaattaaacgtcactgttttattagtatagatatatgctaaaaattggaatattgatcc

SEQ ID NO: 180461 - DNA, 787 bp, Cannabis indica
taatttaaaatttggcaaacggaaaaatacattatgtgtttgtatatgtattaaaaaagaagtttttgggtcctatatggtcccccagagatatgagagcccatcaaaagagttgggagctttgtttgttggccattggagattgaaataattaaagtctataaacactatagggtttgactctttgtcatagtgtacccttattgagttaattctttaatgatcctttgtctttgtgttgggttacatacaatgaaacaagtttgacaaattctacaagaaataccaatttaaaatgaagtgccattattgtaagtagagttaatgtcaaaaaaatcaatattgttggtaaaatttgtggctatttcgttgaacacatttagtttatattgttgaatactattctaggagcgctgatgtttggaggggatgagcatgggaggaagttaatgctgtaaagaaagaaattggcataatgtcattcatttctttgaacattcagcaacaaccgaccacactatttttttacattaattatgggaagtgtttttttttttactttaagtcatatccatggggaattactgtgttataccctttattataacatatgttctaatcatatacaagggtatgatcgtaaatacatactactacaaaaaatactattcgcgtcggtcaacgcaattattcattgcatcgaccgcgtagatagtgtcccaatctatgaagctatcggttctcaaacgacgttcaaaaatataattcgtgtcatttctaaaaatga

SEQ ID NO: 180462 - DNA, 895 bp, Cannabis indica
gtcactttttagaaagataattattgtattgatttttttttttcttttattcattttttacaattctctgaatgtttgaagaattgaatttttaaagtttggagggttgatctcttctctctctttcactcccttttgccaaacaagagacttaaagtatcttttgccgaacaaaaaattacttttgaagtttttaaaacataagtcacgtttggataaggtttgtcttcccaaaccgtttggtggtctcgggttcaagaatagtgcaacttggaatcgttctattctagggaagtttgtttgggctatcatggataagcatgacattctatgggtcaaatgggtcaacaacatctatatgaaaggtgctgagttttgggattacgagttgaaaggggatgtaagttggtattggaggaagctctgtcatttgagaagccatttcagcaagcctatggtgacagcagctgcaaggaaaggtaagtttattgctgccagattgtatatgggaacattaaagctgaatattgatagctattacaaatctgtttggtgtaatctttctctgcccaagcatagattcatcttatggtaggtggttcatggacacttgcttactagagataatttccataagtttcacatcattttagactctagtttctgcccagtttgtggtaatgaagaggagagccaccatcatcttttcttcaactgttgtgtctctagggaggttgtgaagcaggtctttgactggtgtggtgttgctgcctggtcgctggactacaataggtggcgctgctggttttctagcaagatttctggtgtgataaatttgctttttgctgccactgtttacatgctttggaaaaataggaatttttgtgtgcataat

SEQ ID NO: 180463 - DNA, 679 bp, Cannabis indica
tatatatatatatttatgtaatagtagtaataagaaaaagcaacagtaataacttattagaacaaaggaaaatccttaattcaaaaagcacagctcgactgtcaaaggacaaagtacatacataccccagtgttgtggttaatgctttcattcaaaaaacagagttctactgacaaaggaagttgtaatggttttccagttaacttttttcgctccacaggccttagattattccactccttactgaattccaaaacagcattcctacaaactgggttgtccatgatagaatttaaagttcttctattgttagcaacaggagaatctaaaggctcaagttcctcaggtcgaaaattctcaaacagtggtcttggtcttgaatctgtcccagaaatgcaagaatacaagtggatcctaccagtgtattggctcacctaaaaaacatgcaaaaacagcaattaaaaagattgagttagcaatccattgaaacttgacatacacacagcaggaaggacatggtacggtgatgcagatcagatgaataacgcatgcttgaaataaatttctacggtcaagagaaaacaagccttaagtgagcagaaagagacctctcggtaaaattcacacaacgttactacaaagttgacaaacaacatacattttaatttttaatacatac

SEQ ID NO: 180464 - DNA, 602 bp, Cannabis indica
gtattcattatttaaatatatatatggaaattaaggatttggtaaaatgttatttagtatatatttattgtatttattattttttatttgggattgatgtgttattatatattgagataaagtcaaaactcatttgaatcaattttgttcaaatttggcatactaaaattttaaagtttgtctctcattctaaatgagttgattgaaacatgatgtcgccaaagcaacctctcttgtgtagattgctcatgaggaatgttagatgtttgtgtgtgtgtttctcatgtaagtattgatcggcccaaaggaaggttatacttattttgagggcacacatacttgtggtgataaatatgtgacaattataaggtttccatgtgaacaatatgtacagtccaaagattgacaaattgtttgacaggatttattgtcaatatttgattgctacacaagagtaccgcttacagttaatattactgtccaaagacttgatataatggtgtgtttggtatcttgagatgggatttgccatattgaacttatttgttatgttgatctttgtgaacccttggtatttgttcatttttttgcttcatgtttag

SEQ ID NO: 180465 - DNA, 1062 bp, Cannabis indica
caagatttttgcccattaacaaaatatttgcatatttggcattagtttatgaattttctttaattaaaaatttcctttctcaattaaatagacagctttttgtcataattatcacgaaaagaagaagaaaacaatggtgcatatgcatagacaaatatcttcattatcattcatcactatcaaaagctaaacaaatatgcgtcttaaaaccgaccaaatttaaaattaatgaagcatttcgggcttgataggactacatgcgtcatttatgtcgaaaaaaaccccaaggagatgcttattgcaaggacccaaataaatttgggccaaatctaaaaggtaatagggagaagtaagatgaaggtttttggttagcaataataatcaccaagcatacaaaatttgaagttatactctcaaaattctatttcaaccacaaaactaaaaattacactaaaaaataatttttattattatatcaataaaataaaaaaaaaaataataatatttacatttaaatttacccacattaaattaaaagatatttttccaatgcacccctctaaataaaagacagtttaaactttattttcggcgtgttaaatttttttgaattttttaaaattttacaaaatgtcttaaataactataatgtacacgaccatgaaaaaaaaataaactaaattctacaatgcattagaggtccaccgatgcacctcttatttatttcagcatataagagaaatttttattccaattttattcatggtcatctacgttgtagttatttaagacatactgtaaaaaaattttaaaaaaaaaaaaccacgccaaaaatatgattcaaataatctatttcacacatgtataaaataaaagaatttcgcatgcaatagattgtttgaaccttatttttagcgtgttaaatttttttaaatttctcaaaattttgtaagatgtattaaattgctatagcatagacgatcatacaaaaatttaaacaaaaaatttttctcaatatgcaacaaatagaaaagtatcgatagatccattttaagagaatgc

SEQ ID NO: 180466 - DNA, 911 bp, Cannabis indica
gaaagtttgattatgaaaatattatttaaatattaaattaaaactaataaagaattggtatgatcatagtatagcccacaaaggttagtgggataatataaaaaatattatatataagaaaattagtagagtattataatgtagttggaataaattttgtattaaatttcaacaaatttaatattttgaataaagttggcctaaacatactcttagttaaaatagaagtgagtcttaataataggaacgtctaaccttacaaatggtagttcgaatggagaaggtcaaaaaatatgatttgtttattttgtgaattttaatataagttttttcatactaatgattgtttagggtgttataataatttggttgtatgatgttaattaagtagtaatttaactaaattgattttcaaaattactagtttaagtaagttaagtagattttgtcgggtgattattagaatatttcagctataattagaaacttctttatgagttatagtccacctttatttatttatttattttttttgaaaatgaatccacctttatttatttaattgacataagttatgtatttattattaattttttttggaaaagaatgtatttaatattcttaatagggtagttgtgtgcaatataaaattatacaaatgctacccctaaagtcttatataaaaaaaatgaaattcaaaaaaaaaaaaaaaaaacgtcttaaatataaaaaaaagtacttatgtaaaattgaaaaaagttaaataggtatttttaacgtattaatacatcccctatataaatattacgtacagactatagtgtctatttttcaactcgtcacattttttttttttattgaaaaattgtcacttctttttgttagaactaatgtcactctatctttgaaaa

SEQ ID NO: 180467 - DNA, 697 bp, Cannabis indica
gtttataataacatatttaaatacttctctgcactttcttatttttcttagtaattatacttttcatatactactgtttatctattattattttctttataattgtagagagagtttttttttgattgcatataacataaatttatatttcatattattgtggaactcataaataatgtctcattaattatttaaataatataatcatatatattcttttatttttttttagcgttataattgatttaactaaaaattaaatctaaccttatatatatatagatagcactaaaatttttctgtggtggtaagtatgtttagtgaaagaaatataattttttttattaattaatggaaaaacatcacaaatctttatcaaacaaaccataataattaaatgcttataaataataaaaatattgtgttgaattataatttttattatttattatttaaatattttagatttaaatttgaagtcaattatatatttaatttttaatatcaatctaattaattgtaaaggtttttcaaaaatacattaatcttatattgttttataaaataataaagaaaaaataattttttttttcacataataattagaatcactcatgaaattgcgatgtatatatccacaattagtgtaaaaccttgatctttgaactaaaatagctcattgtctaacaaaaaaact

SEQ ID NO: 180468 - DNA, 594 bp, Cannabis indica
ttcagtactcttacacgcaaattattattatccccaaataaataggattatttcacaaatacataaaaacaataaaaaaattataaaaatatggttgtacgaaattttaaatatttttacgatttttataattttatttatagaaaatacaattttttatgttgcacttattaatttgttgttgattttttgttatatgtatgttattttttttttgttattttcctatgagtttagatagttttcttattattttcgtgttgtttctatgaaaaattgtaaaatataaaaaaaaaaaaaaatctaatatgtcttatgtaattatcttcaaataaattgtttagaaagtccacactatatctacaactatctaaatatatagtaacaatatcaaatgtatttgaaagggacaagtcgtccactttgctcattgttttcttggggtctaattatcatggttgttttcattcattatcataataataactgacataataaaagcttttatatctttgttgaaatctggctattatttagaggtgggtgtgtgattgatgcttatcacgttcaaaaccctctgcctttcctttcttc

SEQ ID NO: 180469 - DNA, 764 bp, Cannabis indica
aaccgcgtgatccttataccttattaattgatgaaataatcttcttaatattactgcacttgcacttaatccaagttcaaattttgatactaaaaccttccaaactgctagaactacttgtaaatttaaagtgtcatccattttttgccgttaatttctaatataaactacatatgtatacacttttgtatatgtgtcaaatttatattggtacacttaatattattattttaaaaattttaaattatttcaaaattaatcatatttttattttttatttatttaattttaaaatgaattttaaaaataataatattaggtctaccaatataaacatgtcatgtgtagaagagcgtacacataaacaacccataatgacagttaattgaatgacaccttaaacttaccactagttcagtaatttagaggattttaccactaaaatttgagtttgaaagttaaatactagtaacacgacagttaaaaagattttggtgaaaaaaaaaaaaactcattgatgaataaggataaatattaggagttgatgatattcctttgattgaaacgtaagcaaaatagtgttgtcaactaagtgtaagtagcaaaaattatatgccccattggcctttagtgctcgccagtattaagaatatattactttttcagtaacatattattaatatttttttccttctctctcacagatacatcaacttaatctgtatagcaatattacttatacaagtaactatttcaaaattaat

SEQ ID NO: 180470 - DNA, 669 bp, Cannabis indica
tgctataggtgataatcaaaacgatgggagagagtatggtggtggtaatcatgatatggatgctggtgaagaagatggtatgccatattaattcagttaataagtttaagtcaaagtttgttattattcgggctttatagtatattctaaatataaagctagatcttctcagttatgtttttattggttgatgtaaatttagattctgctatgtagagtctccatttgaatttcgggccttggaggttgctttggaagctatatgtagttttcttgctgcacgcacaacagaattggagacagctgcttatcctgctttagatgagcttacctctaaggtttatagttaattatttcatttttaagtttgaatttttacatcactgttcttctatccatttttgctatctcatgatcctattcttctttatcatttaccttcaaacaatttccctcagattagtagtcgcaacttggatcgggttcgtaaactgaagagtgcaatgactaggttgacagctcgggttcaaaaggtatgccatgcctgcttcttgtggcttcacatatttttaataatacctttgtatttactaattaataaacttagatgtgttcttacttgtgctctgccatccatggtcattatgaatctcatttttatttgataaa

SEQ ID NO: 180471 - DNA, 745 bp, Cannabis indica
gttcaaagacatattatccaagatgggtgttcaagacctatacactccatcttgaaggggcctattaaggattaattatggaaattagttaggaagttttgttaattaattcggttttttctattattcttttttcttggcttttgtactatatatatgtattacatttcattggttcaattcaacaatacaaattttctctttgttcaaacacttttattgttctattcctaataagctactctggtttacaacatttggaagatcataaatagtgcttacgatcaaaaaataccaacaactaggctggtgttttatacatggtagagaatggattgggattttatgtacaagttgtaattaagttttgagtttggttacatggcgtttgagttgtacaaaatgtttgtggtgaatataattgtagctgatttaccaaagaaaaaaattatgccataagtatatatgttttgactcagattttttattgagactgaaaaatataattttttcgtagtgataatagtataaaagaaaaatagtatatgtgcatgtaaaatatttaccaaaacattacaaaattagtgattttctcaatcaacatatttatttgaagggtgttaattacaacctcctattacagcttcttagtcaactcccatgtctgaaatcacatatgccgaaatgttttttttcaaaaaaaaatttcatagcgttatcgttatagttacagtatcatccctgt

SEQ ID NO: 180472 - DNA, 555 bp, Cannabis indica
atcacaccagaaaccagttgaaatttatgcgaaatctatggcatatatctgtaatttttagcaggtttctacttcaaactcagttctttgtttgaatcatactttagctgatcatataccatggacatctcctcctcaagggcaataaatctgaatgttgatgatgcaatacactcatcacaaaacagaatgggcttgggtcaaatcaggggactccaacactaagttttccatcaaaaggctaataccatacgcaatggaaacaagatcaactctctcatggattccaatggcattactcgcacttcacactctgatatttgcaacattattgaagattactttcaaaatatttacacatcgaatgggaattgataatgtcgcattagatcaagtcttgcctactgttccatactctatcactactgatatcaaccattctctggtgcaaccatatacttctaaagatgttttcagcgccttctcttccatgaaagatgatagcagcccgggtttggatggcatgtcagttactgtttttcactactacgtggc

SEQ ID NO: 180473 - DNA, 1038 bp, Cannabis indica
acctcaaaattttgaaaacatattttttttggaacaaaaaaccataaaaaacccataaattttgtattttcctcatattttttacattaaatttacaataataatgttactaatattattgatgtgccatgtcagccaaacatgacattttctatatttcttttttattttcctttttttctcgaaagttaagtttttttactaatactattgataagagaccaattagttaaacacgccatttgagtgtttctctaaaaaatcaaaaactgaggtaattttcgatagtgtgcccttttttgggtctgtggaagttaaggtttcttaacggttttttcctcttttcaactgttttattcttccttattcaaaatcatctttgaagataactgttccttccaatatttccttcatcatcctccatcgccggcttcttcctcctgtactaaatcactcttttttcacttttatgaatattgtaatggacaatctccactctacattatccctcactgatgaggaaagttctatccttacgctccctgaagttgctgcactacaatcaactgatctccaacctggttttgcccttttggcaagggttctcaccagccagcatgtttacaaaccaggcttcattgaccaaatgtctggccattgacaaggtcgataccccgtcacgattactgaatacaagggagaagatggcttatttcacattcggtttggctgcgaaggagataaacgtcgtgtgctcgccaaagaaccatggcattttcagaaccatttaatcatatttcttgcgccagatgctctgcaaaatgtcacaaaggaaaatctgatttatactcttttttgggtgcaaatatatcgactaccattcttaagtaagtcaaggtttcttgctgaagcgcttggtaatattataggagactttttagaggttcatgattactctactaatgaaggttggggtccatttctgaggatccgagttaaactcctagttacgaagccacttatgcgcggtcaaatgat

SEQ ID NO: 180474 - DNA, 796 bp, Cannabis indica
atttcaagtgtagaaattttatcgaatagaacttagttattaactgtgtatagctttataaatagataaaagggagaagacaagatgatttagtaacttgttctttattaaaagaataaaaagaagatctacggatttttatattgtgtttctttttttttttttttttttttaattctaagaataataatctttttattaatcaaacaagccatttacaaccaaataggaaatacacctataaatttacattaaaacttacaaacttttagcatttctaataacaattctctcaaaattagaaagcttcatatcttgaataagagacaatctagttttgagattctctttaatgtttctatctatatacattggagctatacattttctttcaaaaaccacacaagttccgattgagccatataccatatatggcactagctagtgtagcatagtaaatttctattaataaacttctcggtctttttccttgaatccaatcaagaaacaattgaaaatgtattagactctttaattattttttcattatagcataatagtattacaatcaactaataatttaatagcagtgagttcgaaccatgccttctctttttctcaaccctccctcaccactggctttacactctttaattgttaatttactttttaacagttcaatcgattcgtacccatataataataaaactctatgtaccacttctctcatttaatatataatatatatataatatatatttaattatataaatatagggatatgatttttgtccta

SEQ ID NO: 180475 - DNA, 645 bp, Cannabis indica
atatatatatatattatgttaattgtgtacgtacatgaattgatttctctatatagtataaaggtggatataatattgtatattttttttttatacaaaaaatattaatgattattgtgactaaagaaatatgtaatattattttgttatgattaaaaaattgtgattaaaaataaatgagtgatgactaaagattgttgtgactaaataaaatattaattagtgacaataacagttgtcactaaaagaaaataagttgtgattaagagcatctctaatgacacacattatcactaaatttagcgtaaaaaaaatatttctactccaaccacaacactaaaaattaaattaaaaaaattccttattattacattaattttttaataaaataaaagaaataatatcatattaattaacaaaaattaccacaattactatatttaactaataatttaaataaacttactaattagattaaaaataataatactcaattttatttttagcgtgttaaatttttcaaaattttataagatgtcttaaataactataatgtacatgaccatgaaaaaaaattatataagtgtctcgaatgccaaaacagatagtagtatcagtgcgctacttttataaaagtgtattatt

SEQ ID NO: 180476 - DNA, 1108 bp, Cannabis indica
  modified_base (1066)..(1066): a, c, t, g, unknown or other
atgacttgctttcacttggctcaatcactcttcctcgcctctgcctctgcctcggcctctcatagttcttacactttcatttccaaaccctttcactccttcaacaaccatcttccccaactctcttctgtaagtatctctctctctctcatttctccatttctcaacttcatcgcccatttcttatgttacgtatacatttctcttcaggttttcctccacccaatagccaactctgcaactttcgcgttttgttccaaacctggaagcgaattgaatacagtgtcacccaaaagtatgtcgaatccggattctatatcgtacctaacacagcgtcaagctgccgagatcgatgagaccctcatgggccctcttggctttagtgtcgatcagttaatggtcagtcttttttcctatatttttttttatttgccttctttattcgaaatgggtttgttcttaatctcttttctccctccattgtaggaattggcaggtttgagcgtggctgctgcaatagcagaggtatttagtttctgtatgagtataattaaattatgtaaaattcggattttgggaattagttttcctattgaaaatccatctttatggataattgtggacgtgaaccaaattcaaatttagtagattgcattcttacacttctgttgtatgaattgagaatttaattctgatcatccgtagaattgaatcgtgttaattttcattgtcttatagtttatattatgttgggagaagatgtggtttgattatattcattatcattccttgcaacacgactctaactgttacgtggtcatgaattatttttgggggctactgcctttatcaactttttgtgagcagcagaatactcgaggggaacaatagaaatatgagatgcttgaaatgaacatgtccctattttttattataaagtttaagggactttcattgcttttatctctatttttctaaaaaacctattactgtcatttatttttatttgtttttagctttaagaagaaaatttatgaaaggaaaaattaaaataaataaaaagttnaagggggctcccaaagtggttccgtaactgcctactcaagtc

SEQ ID NO: 180477 - DNA, 939 bp, Cannabis indica
aataggatttttttttaaggtaataaaaatcagtccaaattatctcattttccactcatattaattatctcatttcactacaaaaaactgttacttttagtgacaattttttagtcacaatataattttttgtgactaaatgtgatttttagtcacaacaaaaacctatttgtgagctacaagttgtcactaatttaattttagttccaataaatattgtgattgaatatacatttagtcacaacaaattgtaatttttgtgactaatacttttagacacgaactttttagtcacaacatagtaatgataatttataattagtcacaatttttttacttttagtcacaaattttgatagtttactcactgctattatgagtattaaaataagttcaataatgtggtaatatattagatacaacattcatgatatgattatctaatttattaataattaagataattattattacaaaacaaacccaatatttgaaggtttaagtattacatattaaaaaataaaacacaatacaaaccacaacacaagtccattgaaacaactatgatttaaatgaagttcatagaaaaacatacaagtataagtatacatattaatacatatatatatatatatatataacataaaacataatacaaaacattattcaaaacacaaactctaaaaattataaatagccaaacacactacatatataataatgatcactactttggttgatcgaagcagaatcctccattgggtgatgaagagttgttattattattcaccggaaagagtaaactaggatcttcatgatcatcatgatgatgattaggaagaagtagttgttgttgttgttgttgttctatgatgatgatcttgatcaccattactagaaagaaaagcatcttcattgataatcgaattgaggatgaag

SEQ ID NO: 180478 - DNA, 644 bp, Cannabis indica
ggggttatattttatatggtttttttttttaatattttttatatttatatgggattttttatgccatatttttattaaaaaaagatagaaatctcatatttgtaaaacaataataagttctgctggaaaagtcatcgacgtcgaaaaattcaccgaaaaagtgtcgttgatgccagaaaaattagtgtcgccgaaaaagtcattatcgtcagaaaagttgctagaaaagtcaccgtcgccggaaaaattactggaaaaatcaccgtcgcctggaaaagtcactagaaataaatggctcagatataaacaaaaatagaaccaattctattacataatgaataaaaacaaataacacaaaataactcaaaccagttatacttgaaatataaccatgtaacataatgaataaaaacaaataaacacaaaataactcaagcaagttataattaaaatagaaccgcttctattacagtattataatgaataaaactaaaaaagcacaaaaaaactcgaaccggttataactaaaatagaaccggttatataacataatgaatgcgtatttttgtaggtaaatatggtatgtgtataattatttagtgggttagagcatgttgaataatggatgtttttgttttgagtta

SEQ ID NO: 180479 - DNA, 586 bp, Cannabis indica
catgaaatgtgataaaatgtcagacggttttcacatatacctcgaaatgccaccaacgggaactaagaatgatgaacctcgccctacccatttgctatatggggaattgacttaattagggcattaccctctgggcgaggatgagctaagtatgcggtagtagcagtcgacttcttcactaaagggacgaagactgagcccctcatttccataaccgtgtaagaaagtccttgactttgtcgtcaagaacactatctgtaggtctggaattcccatgaagatagtatccaataatggaacccaatttgatggtgacttgttcactgaattctgtgagaggaacaaaactatcaaagcttttcgtcagtatccaggccttaggaaaatggacaagtggaagttgttaataaaaccttaaaggatactatcaagaagaagctagacgctgccaaaggcagatgggttgacgagctacctcaggtactctgggcccacataactaccgagaaaacaacaacgggacacactcctttctcagtagcatttggctcggaagcattgctgcctgttgaagtgaacatatcga

SEQ ID NO: 180480 - DNA, 688 bp, Cannabis indica
ctctatctctaagagcaagtgcgaagggagagcggtgatgtgtggggatctgctaaaaccgagtataggtggtgcccatgccttccaccaagaagtactcatcaaaaaaatgcccaattttgctaacggtcttgtccccggtgcccgtcaaccacttgaagtctggtttagagaaatagaagtaccctgacctgcctttcttaggggtggacttcaaatcaaaaaaccagctgacctcatggggagaaggcatatcccactgctgggaggcatagagaacgaagagggcggacagatacttaatgcccttgggagtgaactaggtcggacagaggcggaagaagtttgccatattcctaaagtatgggtgcaaaggcaacaatgccccttgcttggcatgagcacccgaccaggcacacattccccttttagggtttgtggctcgattgttgtgagcgggaatatagcaatctaatttgcccacgtagccatcctggtcaagatcccgtaagcgtgcctcggtaacctttgtggaggactcacccacctggcacccaaagcaccttgccttctatgaggaaccgtagcagtaagtgttggaaatattttactaggatctagatttactaacatgtatgtttcattaacatcctaatatgaattctaaaacgattaaataaacacataa

SEQ ID NO: 180481 - DNA, 683 bp, Cannabis indica
aagtaatggtagagaaagctatttcttgttacaatcttacagttcttattgcttgggtaaagttaaacacactacacttgatatgaatatcaagacaatagattaattgaaatgcacttcaagttttttgttagtgcaagtgggagtttgttatagatttatgccctaaatataatctattttaataaaatattatttgctatcaatagaagattgaaagtcatttaagtttacatgtagttttcatgtttatggttttaatatacaatttatgttaaatccaaaatatatagttattcacaattacagtgatgtctttacagtggaaagtaattgtgattatatgcttcaaagactttagtcccataatttatcagtgcactggttttatactgacgtgataatcagcgataaaggttacttacacattgatatgtggaatgtcctttctagggcattagcaaagtatactagtatcagttgtatggagtatacatcggactggaccgatattgacaatgaataagatatcataattaaacataccattatatttttctaagtcaatatcacttagttgatctaagatcaatagatcttaatcttgagatggttgggttctaacttaattgtattatttgtgttttttgtacttgtttgttaaaattaaccaaatggatctt

SEQ ID NO: 180482 - DNA, 527 bp, Cannabis indica
aatagtattttttagcttgatgctttttaatagaattcctccatttctttaaaaaaaaaaataaaaaaataaaatagtatgttatatgaggggttgttgatattttttttttttgttgggttgagtaaatttacttatttttcggttatcaaagaaaagtttacttatttttctccaatcaaacaaatactccaaatttttcattttctaaaaaaaaaaaaaaacaaagtgaaaaattgtaaaaaaataaaataatataatctataaaaaatataataaaaaaagtcagattttaaatggttttatgtaggggtgggcaacatccaatccaatccaattgatccaatccaatccaattacaaaaaattagatatccaattacaattggattggattagatgttaaaagttgcattctaattggattggatcggttattggatgtcaatctcaaaatccaattaaaaaccgatccaatccaattacatttatgtatattaaaaaaatatttatatttatttatataat

SEQ ID NO: 180483 - DNA, 556 bp, Cannabis indica
aactttacacttgtgtagtgttttgatgacgtgcactgagcctgcttcacttaaaactaccagatgggcatcaattttgatattcttagtcaattgtatctgttcttcaagcatttccagctaaattaggactttgaactcttttgcttagtccttggaaattttgaaaattaattaacaaagaaaaagagaaaaaaattatttttaacctttttctttgattttttttattatttttgtcatggaatgaggattaattagattggaatcttaatcctaataagggatgccattcaaaattagagagaaaaaaaaaaaaagaaaagagaaaagacttttggtcttttacttatcatttatcttttctttaattctctaattttccttaatcttaatagtattgggaattattgttaccttttaaatttagattcctattcttatttgtataggagtttcgaaatctaacttaaaagagaagggaaaagatataattatatttttacttgtcatttatctcttccttagaaactttaaatttaaagtaaaaacttac

SEQ ID NO: 180484 - DNA, 520 bp, Cannabis indica
tcaaaaacccaaaccgtaaatttgaaaaaaaaaagttaaaaaaaaaatagtaaatagggtaattccccaataaagtttcctaaaaaaatcaacttggatggattcttcttctttttcttttttcttttttattttttttatttttttatttttatgattatatatatcttttttttttttttgttatttttctttttatttttacgatttaggttgttccattggttgcaatttagattgttgtgtaaattgcgatgtacattacagtttgaattgagttgagatttaggttgttgtgttagttgctctgtggcttaatggttatagttataaaattatcactgtaaatttttacatataacaatgccgaaaatgaatttaattttttcttaacactactattaaattggaatatcaagaactctgtcttattataattataaatactgaacaaaagttagaaaaaaaaatattctaaacatatgatttcagacatagaaattgataaagagattttttt

SEQ ID NO: 180485 - DNA, 743 bp, Cannabis indica
tggtacacaacaaggtatgataaaattatctgttttctttcataatctaagttgaattttgagtacatgaaacctggtatgaacattcactttcattttgtgtacagtgttgacataaaatcatctgaatctttcctacgaaacgggaaaagtccaactcttaatgtgcaatcatcaggagatgccatgcatgtctttgtcaatggacatcttcaaggtaaattccttaccactcaattatgatatgacttgttgaaaggaaaaatgatagagttcctaaatgttaaatgttggttgtataatctattgacaggatctgctcatgggacaagggtgaacaagagattctcattcacaggaaacgtcaatcttcgttctggatttaataaaatctcactgctcagtgtagctgttggattgccggttagtatttctacgaaatttccaacaaaaattcagtatttatggcactacttgttgaggtagttatttttgttttgcctgcttgttgttgtagacaatggcccacatttcgagacacgacacacaggaatcctaggtccagtagtccttcagggacttgatcaagggaagatggatatatcatggcagagatggtcatacaaggtgtaatgataatgataattcaatccacttttcattggttttagaactcagaacaagtaaagtctcaagatggggttatgtctttatgcaggttgggctaaaaggagaagcaatga

SEQ ID NO: 180486 - DNA, 1262 bp, Cannabis indica
ggagagagagtgtgagagaaagtggttttttgggcaaagaaagttaatgttatgcaatgtggattggtcctatttatacacacacattaaaagtttgtataatgagatgattgtttagtaaaaattacttagggtacaagttgtggttatattaaattatatagcttagaaaatgacttgtgtccccaaatcatgctattctccaaaatatcaagctggacagttggaccaatcataccacaataacatatataatttaagcaaaactaatttatttaaaatgtatttattaactgttaagtcagtgctaagccgtgtggtttttgttaattagtttgtatggccaggctataagctagtttgacagcttcaaaaaagaagctgtggtcttgctggttccctttctttttttttttcaaaaaggaaaacgcagaaacactgttgtaaagtgctcttctggccccctttgattgtccatctacaaccaaataataattagcaaaactaatcatgatgagaaaagcttttgttgaaataacatttgtaaaataattcaaacgaccacacactcactagtcagtacatatatctagcagctttgaattgttcatcacattttcatactactactacatacattcaattatttgagttggtgtaacgtgaaattgacaatcaaagagtttctttttacttaaaaaaaaagtttgaaagtttggggttagacaataaaattaatttaaaatagttttcttctgtgaatagaagagtgacatttaatcaaaagggcttgtttgggtttggaagagtaatcatgtggtgaagacttatttaatagtagccatcagaattaataagtctacggccatcggccaactattttcttccatgcatttcatcaatgaaacgaaagccactggaattaatgtttatcatttttatgtattattaattaaatatacacaaaaatatatatacgtatattaattatggaactctattattgatcaaaagaataagcaatcataagggatggatactgaatccaatggtcacaaataatacccaataacgatcgaactataatttttgttttctttttaattataggtgccggtcttgttgaggtagtagtaatatgagtggccatatactaactagtacaagtaattaagtagaaataaagagagtacaatttattttaaggagattatgtgggcaaaacactttttttatggacaagtcaagattttttttacccc

SEQ ID NO: 180487 - DNA, 769 bp, Cannabis indica
aaatgcactagtcatagatgttggtacaaatcacgtacaaaaatactcaaggccaattaataaagtagctgtattttttaataccagagcatcatatataattatgaaccctcgatatcttgctacaaaaattgtggacaagaagaaataatatttccaagatgcaaataaccaagtattatgcaccatcagtaagtcgataaagctataattcttcctataggatgtttcattctccacagtgtcatttgatcaaagcttcctggaaatgacttcatagttggatttgacatttacacaaaaaaaaagggcttagaatactcccacaagggttggcctataagcagttcttcacccattaggagaaaatcatcaattactttcacatgacgcaagacgtattttcattgtaaaaaaaaattgctaatacaaaggtcatgtgtaaattctcactcaaaattctcaacgaagtgcgatcatccattatggaagaatgaagaattcaacatctctctactatttgattgtaatagtataattattaaatatctaaaaattccttagttatatggagaaggtataatcttgtaagaatgtacaaaagaattaagattatatgatatgaatcggatcagatactcggatcggatcagatctgacccattggggattgggatatttcaaatatggagtgcgatttttgataatgatagtgtccaagatatcgttaaaggtggtatgccaaatggtgagaatggtgatgattggt

SEQ ID NO: 180488 - DNA, 804 bp, Cannabis indica
attattattattaattataaaagttagaattttaagtgagatataaagatattctcatttatttttattttttttaaactggatgcattaatacaaatcaaacattacaaggattaggcaaatcatgctcaatagcatgactagcacaagagagtattacttcaatccacgtagcactcgctttacaatctaaagcataataatattgttattattattattattattaatttaagctatttcaaaacttattaagtatttacttttatatatttagcaaaaataagtatttacatcaatttgcctgcaggagaaacaaatgttttattattgacaattatctttttttttatgattttagtttatcggaaaaattgtaatttattggttattaaagttgtaaagttattaaattatttgaagtatattgtccagaatctattactggcattaattacatttgacaagataagtttgcttatttttaattattgctattgttacaatttattaatatagttggattaatatgtagtgaaaataattgtaaattttttatataattatttattatgattattattttttattttttatttctatatttttcttatttaatgtatattttttattttgtcagttaaaacattttactctttttttgttgtggagtcttccttcactaagcacaagattctctctctctcatgcaactaaaacgttctcctccgccctaaagttgtttgttcattgttgggtctttctatttcttttattagtagagtgtatcctaaagttgtcatc

SEQ ID NO: 180489 - DNA, 938 bp, Cannabis indica
agatgaacactttttctctaaattttctttgtttcttctaacttaagtaaatagagattttcttcttttcttttcttttaaaacactatcctatagtcagccttaattaattcaaataagaaaaaataaatcttgccaaaagaccttcttgcccctcaagccaattaaataattacaaactcccaagggtaaattggtcatttaccaaaccccgaaaattctaacacctctaatatctaacaatgataccccgataataaaattttaaacatataaaatgtgactctctaaaggcccaacgtcgttttccacagcttccgaacaccaacacagagattgagaaattaagtaatttacataaaatagcataataaacatatatgaacttaattatatttccacaacatgcattttataaatattaattaaatctcatatataaaccctaattaattaataatccaatttgttaatctcaagcggtctttacaattatccccccgttaaaaggatttgtccccgaaatctaacctgaataactctggatattgagtcttcatatcagactccagttctcaagtggcttcttccactttactattcctccggagtactttaaccaacgctatggttttggttcgaaaggaccttttcctttgcactggttgttcatcataagataggtcaggttgtaattccaatgtctcataactcaggacatgcattggatcagacacgtactttctcagcatggaaactgtaaatacattatgcatcgctaacaatgatggaggtaaggctaaccggtaagcaacttgtccgactttctccagtatttcataaggtcctataaatctaggacttaactacctttctttcccaaacgagtctgatccctttcattggcgcacacgcaggaagacgtgatctccctgctg

SEQ ID NO: 180490 - DNA, 537 bp, Cannabis indica
gcttgttactccattgactttgcagaggaagagggctagaattgcagataagaagaagagggtggcgaaatcgaaggctgatgctgctgagtaccagaaactccttgcgtctagattgaaggagcagagggagcgtcgcagtgagagtttggctaagaaaaggtccagactttcttctgctaagccatcagtttgatctaagaaatttgatatttagtttatttttagttttggtttaatggtttttttgattatgtttggaactattgatttttgtttttttttaatttttgaaactttgagtattatgaattaatgtttggattcaggctataaatttatgtttcaatttttggatgatgtttgtttgttctgttgctttgaatagtttgtttaatttacctatattattgtttttggtaattgtaattaacattgtcattgttagaaaattagttttagttaagtaattaaacagtgtttaggttgactttaatcatgtcatctgatcagctttgtgtctttcaattttgcttt

SEQ ID NO: 180491 - DNA, 726 bp, Cannabis indica
accattctgggaaagagcccatgcgctacagaagatctaccaacccccactccagaaggaccacccgttccaggagggctcaacctaagggttgccccagtgcgcggaccacgcgttcctggagaactcgacccgacattggtcctagtacatggacaacacgctctggaagaactcagcatgggaatggtcagaaccccaggataagggatgaagatcacaatcatgggggtgcccaatctgtgggagaaagatcctatgaaacggaaacccaccacctaaggcgcaatccggaagaggtgcagcggcgaaatgtagagttagaacgcgatgcagcctcggccagggcggcacaggggatgaatgctcaaaatcaacctcaacctggagtgagaagaccaggaggcaaacctcgtggctcatgaaccaggagacaggaaaaaggctcgagaagaacaacccgtagaaaatgagacatcccatgaaaattacgatgaacggccagatgggagacaactggaaactgatgaacgagaaatccgtcatgagaatgaggaagatcttgggactcaacccggtgaacgaaggtcacctgctagaaatcaccaatgttcttccaaaaccaataaagcgaggactcgtacgaaatcttatgggggaaatacgacaagccgctcttgggagaagaacagaggatgaagaagcaagcgtgacttcgaggcggtc

SEQ ID NO: 180492 - DNA, 844 bp, Cannabis indica
tcattttatgacgcaaaacatataaaaaaaattaaagcattttgcctcagttttgaagtgacacaacatgctatgcgtcaatcttcaaccaacgcaacaagtgtttttttgcgtcggttgtaaaatgacacttaggtgtacacagaatattttttacgataaaactcaccacatattaaaaaaaatcacaactaaactaatattattttgtccatacataaaagataaattaatatcatatatccatgtatatattattaactggaagttcactattaaaaaaataatataaagttagaattaataagataaattcaaattaagacaattacatgagtaatattaaataaagtgtctatataacaaatatttctaacaatacttttaatatacaagcccaaccttcataacttattaaaatttgcacgtacattacacaacgctatcctccatatgtatgattaaaaaaggttctcctactcctaacttacataactcttgatattatccgaagtacctttttgctttatctaatctcaatttaaaattgtatcgctatgtggcgccatatgctttataatgaaagactgagcaattttctgcaacaatcaagaaatttatataagccaatacacaatttaaattttaaatataaaatcacatcatttatataagaagagaaatggacctaagactagtaataagtactccaatactgtgaaaaaaagtgaatttatagaataacaactatatatgtatgctatgaaagccaaatatataaggcatactaaaccgatcacttagacaaatatataacgcaaaactataatgtatgtatgtatat

SEQ ID NO: 180493 - DNA, 557 bp, Cannabis indica
catttttgcaatgtgatcatctctgtaattcaaattgtccctcatctgaagttctaattttttccccatggtgataccaaattttatagcttttgtctataccgttcctaaacaaatgttctttaatcttaaaaattttcatacgctccatgttgccacatttcatgcacggacaatgaacaaaattaggattagaagccttcttctcagcaaactccaaaaacagatcaacaccttccctatatttcattgacaacctatctgcactcatccaatctctatccattctgaagtttctaaaaaaaaaacattcacgttttaatcaatttcatctatgagccatcaaagaaattatagttgttatcctattgaaattttggcagcataacaactatgatttaacgttcccaaaatttttaaacttactataaacaacaaaaaaccacttactataaacaacaaaaaacaattaaaaaatgatcacccatccgaccgcagtatataaataatcgcagaacctacttcactacggatgaatatctaagatattcaaactc

SEQ ID NO: 180494 - DNA, 620 bp, Cannabis indica
caaaatgagagttctggaaaagaaccaagaattgaaaacttggttgtttggtagctagactataatacgagtttgttaaagaattgcaccatgctacatctcagtcatgacaaagggcaagtgcaaatggactttcctagctgctggtgtgcttggaataaacgctgatgtcagccgaagagagtcgtgaggtgtgtagtgtttgcagcaactgtgagagactctagtggagtttgtataggtgccaaagttgaatctttcatagacctttaaacaatcttattattgaaattttggcctattaaggtggggttattgctcagtaggggtgttcatagaatctgcactccgttgttccaaactccaactaatccagaccaaaccttttgagaccagaccaaatgaattcggtgtgaattttcttgtcaatccgaaccatttaaaattctctggttcgatcacggttttaaaaatctcggtagcagttcaaaccaaaccaatctatataattattttattatacctaatatatattttttgaaaaaaatgttaacattttagaacaattttagaacaactttagatagaatattaatattaacttaatattattatgatac

SEQ ID NO: 180495 - DNA, 545 bp, Cannabis indica
ttgaatatgacatttttttttttcctttttcaaaaaccgttgagaatggggccttaattttgcaaaagggtcactcttaaataattgttctagctttgaaaaaaataaaaagattgaatttgcctagacaaagaagtggtgattagccttgtgaaagagtagtacttgatgaggaagaaggggttgatgacagagtatccttgcagtaacggatcacaaccttgatattctcttctcgctcttgtaaactgctatatttgtttgtatttatagtaacacaactcaagttcttattctcctcccttttttccttttactcttctttgagccaactcttcttcttactgatttttttgcatggtcttcatcttgatctccatgatcatgatcagatgttaatggcatccccaagcagatgggaaacacatctcagtctcttccaacactttcgattatacaagaatcgttggagcccaaaatggtgcttagactcggccaagaccacaggtggtgatgatgatgatgatgatgatgatgatgaagct

SEQ ID NO: 180496 - DNA, 789 bp, Cannabis indica
gttttcttttacgtttgtttttcttagtttttagggatactgcccatgacaatgtggatgcgtaacaaattgcctatactaaactaacctcctagagggcatagcttattctaattccatgaaccattataggtcgtttcctaacccctattttttttcttcgcccaactttatgttccatacaagaaaaaaaactgtgaacattataataagtgggtcgtcacattatttaataatttagcggtataattttaataatgctgatttttaaaattcaaatttaattacgtattacatatgagcaaaaatagatttgtaaaatataatttcaaattaaagaaatatcaaatgatcattattggaaatattctaaataagtacttactcaaaaatgtatgtaaaaaaatgtaaatttatagtgcacatacttattctatttacgacgtcacaaaattcccccactaaatctacaacaaactctaactatttaaggggaataggtttttgtatccaataaacaaatagttccataaaaaaagtgctaaccaaggtttagagtaaaacagtgtcatgatttagtaaaatatgttatagaggatgaaaatagagaacttttatttaagaatatactaggaatcaaaaaataaatagatttgcactaaaaaagtcaaaataccaaaaaaaaaataatttaacaacaataaaataaataaatttaaatactatattataataatattactttaattaaataatgatatttattactatgtattactaatttagtaa

SEQ ID NO: 180497 - DNA, 630 bp, Cannabis indica
gtattttgaacaatagtagtagattttataattttgcggcccataatgtggccaagtaggcgtttatccacaaaaatatatatatatatatatgcacgaggtcttttgtaataaccacgaggtctaatttatttttatatatgcacgcttatttaaaaatatatatctttatatattaaaagtgcctatctaacggtaatttttggtttaacgatgttgttttgtttccttcgttaactttaacagaatattcccaattaatttatattatttttttaacaaaaatttattcaaaaaaacacacattccgttaacataacattattttattaaaaaaaaaatacacattccgttaacatcccaaaaataaccaattatgctaaaaattaggagaagagaatgaaacaaattgctagacttattagttaaagataaagataaaagggtgaaccaatcatacataatcatcacttttcagaattatcttcttcttttttcttatatataaatatatatatatatagaataattctatggtaggcacacctgttttgttcatatagtataaggactagttttttgaccagtgatatatatgacttttgactgtgcatattattagatatatag

SEQ ID NO: 180498 - DNA, 795 bp, Cannabis indica
catatatatatatatacacatatattaatattctatttattatattgcataaaataaataggaacagaattatcatatatgacttttgttgagttgaggatactaccaagaaagtgcaaaatagattattatggatcagcctcgttatattttggataaattgataaattttatgttatatatatttttaataattttatacaaaaaaaagaattagcaattaatttaaccatgcatgaagtcatgtctataccggaaatatatattcatttcattttctataaggtttaattggcaaaatatttagtcactttttttaaatgattttacaatattattgtttttaacttttgataattttttgtaaattagcttttgtctaaaattcaatgactgccacaattttttaaccatgtatctagatcgtaaataagtattgaaactaagctaaaaaacataataatacttttaaaaaaaaaattattttatcgatccagactaatataatagggataattactattattttttgtaaaaaaaaaattatatttttacgtttaatttttttttaatttatatttttacgattttccacaaaaaataaaaaaataacataaatttaacaggaaaataacaacaaaataacaataaaatataacctacagataacgaaaaatcaacaacaatttaacaataatacagcataaaaagaccgtattttctgtaaataaaatcataaaaatcgtaaaaatatttaaaattttatgaaccgtatttttgtaattttttttatta

SEQ ID NO: 180499 - DNA, 514 bp, Cannabis indica
cctagcagacaaaccttgatcagcattgtctgctgctgttcgtgatgatttaacggataactgcaatcacacaaaattaattgtatcagaggagatcaaaactaagagtgcatacactacaattcacttgaatacaccacacaaagttaaaatcactttccaaatcctattgaaaggatgattattcaactcaaaaaaagctagtacacaggattgattaagagttccatacgtcaatatctgtcagggatgaccccagcttgtcagctagagcagaaagatgctctttcgcgtcctgaaaaatgtattcaaattcagcatcaaggttagacaggaaaaatattaggaagcaacacgaacaaggtctaaaaaataaaaatcattttcagcacatccaagatagtccaagggtagcatgaaaggcacaatgttgtaagatgtttttcttttcttattttattttattgttctttagttaattttatctttaaagaaaaacacacacacagagaca

SEQ ID NO: 180500 - DNA, 759 bp, Cannabis indica
ccagactaagcaaaccagggaggaagagctcaagaagtaggttgaaagcctggaaatccactctaacatggagagaagagtgcggatatttccaggctttcgaccaaagaaaatacgaaggcaaccacttctatagttctgattgacgagagcgacgaagctcatgatgctcagaatgttgaacctccggcccgcacagaccaaaccgatctgtacaaagagcctaggatccctaccatctatttttttttttttttttttatcttttcttctttcttcttctttttatttatatatgtgtctgttcgacccataggcctttttctgcgacaaagacgaccgatcaagcagttcttaaacttgggttatattttttcattttaagacaactagctaaccgggtagcttttaatcctgggtttaccgtgatttgttatctttttcaatgaatactatcccttgttttgataattgtctgtgcaactgtgtttatttacttttaccaatgctttgtacgggtatagttgcccccagggtgaccgagcagactttttactcttggtcacctgtattgcacaagtataatttttgtatgttcgacacaatcaaaatttagatagacatctttattcattcattgttcggaatatttttttaccgtagaaacttacataaaagctattgtatgatctaatccattctttagctaaatttaaacaaaacaaattgcacttaaaaagaaattgtactttcaaagta

SEQ ID NO: 180501 - DNA, 604 bp, Cannabis indica
atgatgtgaaagaaaaagaagaaataaaaaatatctagctaagagagaaatcttggctaaatatagagttgtagtatattgctatttatgagctaaaattttaagatattttaacttaggtggtgtttgataatatttttttaatcagttttctgtttttaaaattaaaaaagtgaaaatattttttcaaaaacatgttctacaaaactgttttcactttttcaattttttaattaagaataaaaaattttaaaataaaaaaagtcactttcaatatatttttaaatagttttttttttcttaatcaatattttaaacttcgaccagacccggacccaaatccccctccacggccctaaccataacctggtctctgacccgaatttgaatttgatcccggacctagatccgacttaaataagataaaaaaaaaattgaaaaataaattttatagaatacacttttattttctgttttaaaattaaaaataaaaatggttacaaatacattttatttataaaacaaattttaaacacaaaatttactttatttgtgattaaaaatcaaaataaaatatactgtataaataatataaataatataa

SEQ ID NO: 180502 - DNA, 968 bp, Cannabis indica
ggcaccactggtgcctaatagcaatgctcttttcaaaatcataggtggcgttttatgtttttgaaattatgattcttaattaaaaaattgaaaagtgaaaacagttttatagaacatgttttttttaaaaaatatttttacttttctaattttaaaaaatgaaaattgattaaaaaagtgttaccaaacgccacttaagatttttattttcaaaatttttaattacaaaaataaaaataaaaattttagttataaatttagttttggtaacaataaaaatagtgtgttataaccacttttattttttaattttaaaaactaaaaataaaagtagtgttttgtaatttatttttatttttatttttatttgtttgattttatttaagttacgggtctgaggtcagaatcgggggcgaagtccaattctaaggctgggtccgggttcgaatttctaatgtctaagttggaattgaagtccaaaatattagaattaaaaaaaatttaaaagtagtattttttttatttttaaaattttagtattcttaattaaaaaaattagaaaagtaaaaactaattttatagaacatgaatttagaaaattattttcacttttctaattttaaaaacaaaaaactcattaaaaagtgttaccaaacgtacccttagcaatttacaaaagaatcaaaatatttttacacttgaatttgttcgttgactttaaaaaaaaaagaaaaaaaaaaactttatacacccagaaacttaaggaaaaaaaaagtcaaaaataggttatatttaaaaaagaataaatagcaatttttcttattgaattttgcaccctactagattgggttataaacacagttactgaaaaaaaaagaacaatattactgaatgaaatttttgggttgagtcgcaaactagatcattctctttaagacgttcacggcattgcccaagaatgtgtaagt

SEQ ID NO: 180503 - DNA, 1016 bp, Cannabis indica
ctataaatagtatagtttatagtggttaaaacacatgtacagtactgtaatttgttgcatcaaattattataatttattttccatgctcggctttgtacatcatgggatgagaagaatgtccccattaaaaatgcttcatttagagattgcaaacaaactctgcccttaacattgtgtttttatacaagtgtacatgaattttggtctttgctcatgttttgtaattttcaacatttttcttttttaacagcttacaaagatttagtaaataaacaaatagtccatcttgatcttatgagttagtcaactattgtagtaatatgtggctcatttcttgatatatgtgcacacacaaatgatgcaagttttttctaaacttcgaaaaataacaattttttctaaggtataaatgagtttgaagtgttattagttcaaatcataattttactttttaaaaactaatataaataaattgttgtaaaatgttgattgtttttttcttcttcatctgcaccccaatctcacccaaacttactactttccctctatctcctcagatttcactcacctagtataggtaatcttgaagaagatgaaaagaaaaaaaatgtaaatttttaagattttaaaattatttatttatttatttatttattatttaaattaaaattatgatctttgactaataatacttttacacgtgtcaatttttaaataagtaaatgaattaattaaatttaagattagcagacttataacaaacatgaatttagattattgtcactatttctcaaagttaaggaccaatctacattaaagtaaattttttgtaaattttctatttaagtataatttgtgtgtacaaaacaaattcattatttttccaacaagaccatagtaatgcttttatggccaattcttataatagtaattaacatgttcattactttgtctgctttttttttattattattattttgtaattcattacattgtagtggttatcatattgtat

SEQ ID NO: 180504 - DNA, 615 bp, Cannabis indica
tacctaagaagcttggcgcggagaataggactaccagcaacatttcatcagccgatgcttattcactatcttatgcgcgaacaccgccggagatattgaggacagtttatggaaccggtaatgagtctcgtcccggcggattctaccctcatggtgccaatggaaacatagctagaagcttccttttcccagataaatattaggagaagaagataactgtatggaggtctattattatgaaaccatatcactaataaatgataataattaataatacaatatttttctacgtgaattaaatataaaaatattaaattatatataaaaaaaagagaaatgctaaatgatacaattggtgcctagcactctcttatgtgtcagtattgctattggtactactaagtatcgagtcccacatagtttaatataatagattttaaggagtatcgctagtcaatcgcaacataacatgttgagaaggtgctaggcaccactagtgcctaataacaatgctctataaaaaaaacatgaactactttactcattacgaattaattttaaaatggaactataatttttaacatgaagccaataatattatctataagttcgaag

SEQ ID NO: 180505 - DNA, 560 bp, Cannabis indica
ataaatttctactgttccatgtgatttcactccattgataaatgagtgatgcactccaataataaatttctagcattctgaatgaatgattccaaattctagttgctagaatttcctattttcttatagccttgatatgcttaaagtggtgtattaatctggtttcttggccatgtgccttaaaatattattgatgtttcttctaaaaaaataataaaggggtgattcaaaattaatacaaacaaaacagccaagataaaacaaaataaaggcaacaattaaatacaatatcttatccaattattagaccaattctgattattgtagcctaattatttcatgaaataagttagaagaaaacaaaggacatgaaatatggtatgcatttcaattcacaatactatttacactaacggcatcgttgctttccatctctaagccatcaaagaaaaattctaaaaaataattcttaatcctcatttacttaataagcttgagaacaagatgctagagtattccattacatacttactcttatagtcacacctttttttaaaaag

SEQ ID NO: 180506 - DNA, 882 bp, Cannabis indica
tatttgactcaatataaatcacttatctccatttctcatgtttccactatgtcctaccaataaatgagtggcaacttattttttaatgtatttcttttgggcaactcatttataatattaattacaagatttatcatttaaatgagtccttatcttatctatttatagatgagtcatggccatggcaataaaggacgagatcttaattagtttgactctccttttaggagaaattctaactctcacattataagaaactcaatatatttatattattggacataattcttagcacctttaagtatattattttacaattggttaactatactctttaaaagttattatattaaactatatgggatctaatacttagttgaaccaataacgatattgacacataagaaggtgccaagcaccactagtaccctttagcgcatttctcatttatattagtttgaataagatctcatgacgatgtcaatcattatataagaattttttggtttttttgaattgaattcaaactttaattctaaatagaatttggtaatttgttaaaaaatatttaatgtgtaactataaaaaaataataaattagtttgtgctctaattttaaacaaacaatatggtgatgacacatataaaaaagttagaaaatgaaccattataaaacaataaatacattcaataaactcgcattggaaaatactattgagaaaaatattcgaacttatccttttaaaaataagtagtgagccgtgaataataactaccgttttgtaaaaccagcgaaatgaacaatcaatgtagaatgtctatctcgggatacacggagtacacaacaaaataatcatatgttggaaagggcagataatgcat

SEQ ID NO: 180507 - DNA, 617 bp, Cannabis indica
ggtggtggacgaaggtcttagttttttgttttttcgttttacctatattgtattttgttctttttcttgatttagattaatttaataatcttaatttttaatgggttaatatatgctgaatatatgagataaaccatagattttactcatttattgaaaatcaagattttaaaaaaaaacaaaaagaaggaaactctctcttgttgggttttgtgccctaaataaaacccatttcaatataatcagatttacttattaataaagatcagaaataacattttatgttgcatggttcacatgatttatttcatgattatatatataatgtatgaattccatttaagtccagaacatatgaatttgttaatgattatagtgttgtcagcacagtggaatataatcttaattatatgttcgaaagtttattccctgatttgtcagaacactggatttagaatgacatggtataatcagcgataggtattcttacaccttggaaaagtgttatgtcctttccaggacattggcaaagtttaccagtatcggatgtatggagtatacatcggaagggaccgatattgaactttgattagatatattaaaatttaccgtaatat

SEQ ID NO: 180508 - DNA, 608 bp, Cannabis indica
actagtattttatatttcattattttaatttttttatttatttttatgtataattattattaaaacactatcattctttagtcattctctctctccctctcttctctactaaattatttttaaaaaattgctcctacaaagaatactaaaaatgtaaactaaaacttagtgcttttggtggatatgatctttttgatggatatgataatgttttgaataaataattataataaaaaaagtaaataaagaaaataatattaaatatttatataaaataaaacaataacattaaaataactctatataaaatcgtttttaatacatctagtaaagtattatccatatatataaatgtatgttattttgtaatttattatggtgctaaataagtgtgtatctaatattgtaatttattaagaacaaattgctaaataagtgttataagagcttaatttagtgtttagcaccataatctcttataacaaaagtactttttttttggcatgcaaaattagaaaatgctctaatctaaaagctctaattaaacagtgttaacttttcaccctgcatgcataacttaattgatttgaataacttaagtaaggctg

SEQ ID NO: 180509 - DNA, 515 bp, Cannabis indica
acaactggaaaaatacataaaaaacaactgattaaaataaaaactaataaaacactaaaatagaaatctaaaaaacgatttaacaaaaaaaaaaaaaaaaaaaaaaatcataagaaccacgaaaccttcatactcccaaaaatgaaaacaataacaacaaaagttctgaaaaaaaaaaaatacatttaaaactaagaaacaactaatcaaaaaaaatcaaaaaataaaaaacagtaataatgtattatttggttcaataaggcaaaaacaagcaaataacataaacagaaaaaaaaaaaaaccttaaaaaaaaaaaattaaaagtgaaatacctaaacaaatacacacaaaaatttaaaaaaaatacttaacgccatgaatacaaaacaataaaaaaaaaaaaaaaaaaaacggaatcaaagattacaacttaaaaaaaaagtaaaaaatagggaaagaatatacaaatatttgatttcactttaggcttcaaatccaaatcaggactaattcat

SEQ ID NO: 180510 - DNA, 753 bp, Cannabis indica
cattaattttttcttataattaaattcaaaggttaggcatgaattatttgaagtttgatgatgaacacagtagaacacactagtaattaataaataaaaattaattagtgtatatttatttatttatatattttgatgttataaatagtcaacaatagtcaatgatttctggataaggtagctaagacaatatgtgaattttgggcataattttctccttaatttctctgtatgttcactgtagaatttgacttattcttcattagttatattttttttatttttaatttatataatagttgccaaatatatagtaacaattaattcacacaatcaaacaattttatctacatatatgatgtccaaaaaaagtaacattctttaataattatactttggtaaaaaagtaggtttaattacgagatgttttggtaaatctcctaattattttttcatacaaaagagtcttttaatctaatttttttttttataattatatatgttatatttatttatttattaccacatataaatttttaaaaaaattttaagtaatttatattgtcgaaaataaaatttaaataatttagttgcatgcacaactaatttttttttatacgagtaggtaattgttaaagtttattttcagtattgaaaactattcagaattttttgaaaaatttatatttaatgttaaatagttataacgtatacatttataaaaaaattaaaaaaaaaaactaaaaaattaat

SEQ ID NO: 180511 - DNA, 588 bp, Cannabis indica
atgtcacatcctatataaagaagggtaaagttgactcaaaataataatgtagtcattgtatatttttatgataatttcttccaattttattccctttgtcttatttttgagtttaataatgggatttatatatatatattttttttaaaaaatatatatatagatgaaagcttatgctaaatttagttttgcctagttaagcattgaccaagatgagaatagttaatcattgtgatttatgattgaggctttgcagggctgctgctatccctagagactatgatggggattgtgttcagatgaaattgtcttacagtcctttggctccacttttcttgtatttgattgaatggatggactatagctgcatcgattcactgcctagctatttaggccttcttcacatacttgtatacaaggtacctattcccttatttaattgttatgttgttattgtaattacaaccacttaaagaggatagctcaaatgttaatgtggtttgcttctgggtactcttacatagtaactttatacatgtgatttgctccacaaagtctctgaatttcgactttcgagtccgtaactta

SEQ ID NO: 180512 - DNA, 677 bp, Cannabis indica
ttcattccaatagtataattaataaaatatatagttgtttattcattcagtctatttttttgtttgattcttttttctcttctttttttagtatattcaaatacaaacccagaatcagattattataccatatcaaaactttgctgcctttatatactgattggcatttatgtctttagaatctttgtagcaaatgttattatatgtgtaactctacaattcaaacgatatgcaaagtcatataagcttggtaatcagtgatgagaaacagaaagattctaagtacagcagatatttttttttcattattttgttttatcaggagtatcctgtcctttcttatctgatgcattaatattctataaaatagtcagtaataatctgtaatctcttatcttgaactaggtgaatttttttattgggctatgtgccctattaaatccgagatagatagatatatattatttttagagttagaaagctttttgagagtttcatcttttcagttcatggaaaactaaagtagaattattattagctcctttgaggttgaaattttaaaatttgggcaaatgcaaattttgaattggttcttttgtcattagataaaagcaaatttaaccaagatggattgataaatggatatagagaaagagagactattaaaaaggcaacaa

SEQ ID NO: 180513 - DNA, 600 bp, Cannabis indica
gacaaaaataaaagataacaagcatgaaaatgctccaaacatgattaaaactaattagaaatatactaaacttaatctaaaattaatactaaaaataacctaacaattacttccaaaaaaaaaaaaattggtgtgcatttattaaataaatataaccttatttagaaaaaaaaaaaaaaaaaaaaaacagaaggtggtaacctaactaaattaatagctacatattttatttaatgttttaaaaaataattacatataaatgcagtggttatctatcgacatatttgatattgatgtgtaccacgtttaaaaatatttatagtgcagtggttacatattttatttttatttttaaaaagaaagtatttcaatataaatattatatctatatatcaaaattacattgtatattattataataatacactataaaatggttgtcaataaaaatattatattatattttagtacaggtttttttttcttaagcagaaaataatcaatttcattaacactaccaataaaatgacaatgaactcaacagggacaaatcactcaatgatatacgatcaggactagaatatgaagagcgagctaacc

SEQ ID NO: 180514 - DNA, 752 bp, Cannabis indica
gataaagaacggacatcttaaaaggaagaatcgctactttgtgctactaaaatttcataaaataggagaaagaaagaaagagagggggagtagctcccaacaaaatatgcaagtccatttcagtcacaccaaatattaggatagatactactgacaaagaatgtatgtatttattccaattgatgaacgaagaatgtcatttttatccataaatttgatcactgtgtaaaaaggtgacaattaagatgcaagttttcaaaagctattaatcttattttttctcaaacatccatctaggtttagattttcctttttcttttttttttctttttttgatttgaagtgtcttcaagatgggattcaacacgacccctccccccaataaccccctatcggccacttgagctagcctcaagtggctatctaagtttagaattttattaatgcacactactaccatctcaagtagcaacaagctaacgaactaggcaaactgcatgaaagttcatcaagagctagacacactggaaacttcttaaaatccaccagcagtcgctcacccgccctaattgttggaagcattatattctttcccatcataacattatgttctactataaaatgcagtataaagtgagcaactaaacatttaatgtatgctcaaaaactaaagtaaagtttttcctaatttcttttgagtattaccttatctcttccaagggcagcatagtgttgtaaaaccgttgcaaaga

SEQ ID NO: 180515 - DNA, 624 bp, Cannabis indica
tccctttaaaaattgatggcatgcgagggatccatttcaacacaaaaatttcatattgcccaacttgtacgaaggagagacttgtgtttgaaataaaggaaacttccaaaagtttctcttaaattaaaattccaaactcctattggaaattttgtttagggtgagtttagaaagttacatataacaagagataattatacaattttacatgtttatttgagggcgtaattacaatataactatgtaatagaagataattgaagatttcaattacagttttcaattctcaaatataactatatacttagaaataattgagtactactacaaatatcagaattcgtgaaggtcctaaaaatgatttttttcggggaccgttgctaaaaaaattaagtaacaatttaaaactgttggaaaaaatttagtactcccgacggtttaaaattgtagtaaacaaaataggtgacgtttttttaataaaaatgcaattttttaatggaccttcataggcgacggtttaaaaccgtcgtctataagggtccattgaaaaattatcacctacttcttgccacatttcccacgtgcccacctactttttttaatttcccacatgtccacctatat

SEQ ID NO: 180516 - DNA, 620 bp, Cannabis indica
atagagtcgtatgaatgaagattataatgtatagagaaattcaacaagtagtatttgtgggtaggtactatagaaatgtaaggattgatcataaatctaagttcctctttattaatttatcttgattacattgaagatcttatgtatatttgaattcaatatagactgataattatggggttgtgaaggttgtaatgagatgaacttatatgttgaaacttgaaagcatatactattcatttatgagaaaatactcgttgactcaaattcatgaggttcaagttattatcaacaatttaatgtctattcattcccaagtaaaagttataggaggagaatagttataggaggagaattcttcaagtgtggaaattacttttcaaaagtagtaagaaaaaaagaaaaaaactccttgaaggtaattaaaatcaaagcatctttgtaatgttgaaaaatcactatgtttggtaggaaggagagagtagaatggatggagagtgtagaaaggatggggagtaggagagatggagaggatatttgttctcttttgtattgtttggtgttaggagtatatatggtaaggatggagtagtagtaataaatattaaattaattatttt

SEQ ID NO: 180517 - DNA, 708 bp, Cannabis indica
tattccaatttatatttttgaacacagaagttagttaagaagttataatagagagttaacagtaacacttatctattatttttttcatttgcaagtatcgtgaggttagggagggcctgtatggtcccaaaattatttttacttttgaaaaatattaaaaaaaatttaaattttttcaaaaatactacatatttctttcacaagggctaatcatatgttttttttgcctagaactcacaaattttcaaaaccggctctaccttttactaataattaatgatattttatagtattcatgatggcaaattataaacaaatatattttgagttgacaaataactaaaaactatataaataaatatttacatatttaatttatataaaaaatatatatgattcttttttaattgcccccctcccccctattatcctatatggctaaattcaatagtgaattatactaacaagtataatatattatgtttctaagtagttaagagtcacttttagcatattatttcttcctttgctaacaacatgttcatttgttaatttttgagtttaagtacaagaaatttgttttgatgatatgtttaaaggaaaataaatttcattaaacagatgtcttaaccacccaaagataatttcgaaatctacaaactgctaaaatactcttatatcaatgtattaagttcaataatatataat

SEQ ID NO: 180518 - DNA, 761 bp, Cannabis indica
acatataaaaagaggtatgttacaaataaatataaaattaaaagtaaatttgattaattgatgaataaaagaggtattttttcaacttaccccgataatttatttatttattttgtgtacaaaaagaaggattatcacttgaatgggttgcattggtcctaaataacactgtagtggcttaaatgggcctcacgttatagcacagttagtgttagtgtgttttttttttttaagcgttgagaactattttttttattatatattaattaaatataattataaaataattttaattgataaatactcttttttataattaaaatattaaatataacttcacataatttaataaaattagaattcttaatgcaaagatatgacttataaaattggtataaattaaaaaaaaataataaaaacaagtaaaaattaaaataagaaaaaaaaaaagtaaaaactcgttttttaacctaatttataggttttgtatataataattaaaataagggataatttcataaaaaaacaaaaaaaaaattacaaaactatagtatgcatagagtttttaatatttttacagttttttatattttatttacataaaatacgatttttttgtgtatttttatgttgtattcttgttattttattattaattaattattgttttgtatttttttttattttactatgttgttgttttgtatgttattttcttgtaacttactatgtattttttgggaaaattttattttaaatac

SEQ ID NO: 180519 - DNA, 682 bp, Cannabis indica
tttttttctacagacataaatactcatacaaatacttaaaataataaagttagaatttgtaaaatgtatgccgattcgtatatgtatttttattgtataagtagattcatttttatttttatttatatttttcttctattactttttaatcaatttaccagttattaaatagtctatgtatcttttatttatcctacaaaaaaataaatgcatgcgacaatttctaagtttaagaatctatatatatatatataaatatatatatatatatataatggaagaggtttcaatggttacatttttattgtaaccatcatggtcactatttttttaagctattagattattatttaatggttgtgattaatttggaaattaaataaaaataaataaaaaataacttgtaacctgaaagtaacctaatcatttatttccttataaactttaattaagattaattatatttaaaattaaattaattacaattattaattaatttttttgctaatttattactatataaggattttttagcaatttatttttttatacttaaattatttaaaatttatagcaaagtttttataatttaaaattatacacatataatttcataatttaaattttattatacttgtaatcttaattttaaattattactacataattatttaattttttt

SEQ ID NO: 180520 - DNA, 950 bp, Cannabis indica
tttagttgcacactttcttattctactccactaaaccatttttcttcaactcaaatttcatctcacaaacttcattttgtggcaaaatcaaactcatcatcaacatttcttcaattcctccaaactcatcaatatattcaggtcccggggccaacaaaacgacaccgttttccccaacaccttgaacatcaaacgacacaaaatttggcttgtaactttgcaattccaacccatataaatcaacctcttgccaatctaaaaacgacaaatttgccccataaacgacaaaatcagataccccttgatcattttcaacaatttcatttatttgggtattttctattgtggttttttcactaagtaatgaagccaaaatctttgtttctgtctccactaatgaaaaatcaacttcaactgagcttattatttggctattggccaaaacccctttggttcttttggggttgtttttgaaaattgtgactgtttttggatttgattcttttctgattttggctatggatttccaaattatggcacaaagtgactcgaaaattggagtagaaaattgtgactttagaagggtaatttgggaatgagaaattgggaatgaaaatgtttccattttggtgtcgttttttgctatccaatgatcaccaaccgggtcgacccgttttagggatacgggtaagtttcgggtgggtattgggcctgggttgggagtgatttcatggtgctttcggttttgggcttttgtcattgttgtttttcggtcgttggatagaacaagactaacgatttgggcccatctgtttatgtagtctgaagctgaaaatgcgtcgcctaggatatgggcccaactaaggcccaatgacattcctccacatctgaaatttgttacctatatggataatggacttggtaatattagaaaaattgaaattgaaaaa

SEQ ID NO: 180521 - DNA, 897 bp, Cannabis indica
ataatcacatttatatataaatccacggcaactttttattttaaaaataattaagaatatatatatgtttcaaataatttgtatactttattataaccacactcgatctcttaattgagaatattatatctattaatattattatttttttaaaatatatgtttaattaaatataatatataaaatgtattttaaaagtatttaattctctaatcaaattcaaattttatcaaaatattttctaatataatcctcatatatatcctatatataatgcctttcttattacgtccagcttaaaacagactttaattacaatcctattttatttacttagcacgatattattttgcacttgacgtcacaacatccaaatacaatgcaaaatcttttgaagctaaaactaatattgtttttcatattatatttagtatgaccaaagttaaaagagttattaatttgttagtagaattaagaaattacaccattcttaaattaatatgatagtttctatttttttttttttaagaattcacaaagtaaaatattggttttggcaatgttaaattgagctactaatactttaaagtataggtaggatatctaattacaactgaattggatgttaaatgttatattctaatttgattgaattatagttattgaatgtatatcccaaaatttaattaaaaacatctaataattatattagatttagattttgaggttttaattagatttggatcggataatatataattttttcaaatttcaattactactcatttatttttctattttactcaatttattttgatttcatattttctaaaaatatttttaaaaaaattatttataaaaattataaattaataactatgatattttcttcaatgg

SEQ ID NO: 180522 - DNA, 660 bp, Cannabis indica
atacacttaattttacttaaataaaaccctaataattttttttatttttttattttgggcccccgaaaagtgtgggccctaggcacgggcctagcccgcctatgcctagggccggccctgcctatatgatttgtgtttacttttttgttaatttaccctctttctacactctttaattgttatggtgcatttattggtctgttaattaactctgctcataaactctctctttgattattatgtgtgtttggttgcttataaattaatgaatactatgttgactcatgccagtcaaatataaaactaaggaaaactctgcttacacaaatataaaaccaaacataaaggctgcattttataatttctagagttaacatcactttaatagataaatattcaaaataaagtctatctcatttcaaaagaacttggattgtaatggtaacccacatataacttgaacaaagaattatcatttcttctttttagcggctccaccaaatttgcaagaaaatcacaaaaaaaaaaaaaaatttaaaaaagggaaattaaggaaccaaaataaataaaatctttaattgtataatagcataaatagaacaactgtttctagaaagacaaaaacaaaaaaagaaaacaataaataatatatatattaat

SEQ ID NO: 180523 - DNA, 879 bp, Cannabis indica
ggtgatgttatgatataaactataaaaatgaataagaaaaataaaaagtgaaaaaaaaatgttagagacaaaaaatttaggtttttttttatttgttttaaaatgaattttttttaattttaaatttatttattttataataattacttacgtggactaataaaattgtaccacgtgtatcgtgtatacacgtgaatggtacacgtgtactgctattctggtagttaacagatgaaaacggatgaaaattactaattgcgagttttgggggttttaccgctaaaatttgagttttggaggttaatttctagtgaaataaaagtattggggattttgctagaattaacccttagtaatttatagtttccatccaaatttagttgttaaataacatgttggattgtttacgtagacacagtgtacacgtggcaaaatattattattagtccagacaaataaatatttaaaaattaaattaaaaattttaaataaaaaataaatcaatttaaaaaggaatttttttttactttttttcttttttgtcttctttttttctcaaatacaaagagctctctctcgacatcatagaagcaacgccgaccggaaaggcatctcatttaatctatctcgtgcttgctttgtcgaatctgctgcacaccgaagctgcgattggagctgtcgagagagtatcgtgatagatctagaagttttgggacctagaaagttgacgatgaggattgcttcgatgatcggcgaccgagaatggccaacatggcctagccgtcgctattgttcattttatttttcagccccgatctcattcaatttcaatccccgatctcattcgatttcaatccccaatctcctctctctctctct

SEQ ID NO: 180524 - DNA, 656 bp, Cannabis indica
caactcaagatattgctccacatttatgactttaacttccaagtcgcttattctattttgttgtttctctatagcactttaactagtggaattgtcttattcaaaggtacttgtctttccagcccaaaacttagataggctgtccctcatataataaatctgtctgaagctcaaaatcgtcacaactaggaataggtgtcggatctgatacatgcattctcagcatggggatatgaaacatcatacactccggataacgcatgagttaaagctagccgatataggatacttggcctacttactccagtatccaaaatggtttaacgaatctagggtttaacttccctttctacgtatccctttcataggcgatactcaaagaaatacaaaatcttccacttagaactcgatattcctacactttgaatcaacgtagctttcctatgaatgtatatatacataaaaaattaaatcaataaacaaaacacgatcaaatatatatatgaaggaaaaattagattggggtaagtaaagcaaaaccaattgtatatataaataccaaaacttaaaatataatcaaggtagagataaaaaaaaatattttgataccatttgttatattacaatataatataaagtaaagcatacatgaacta

SEQ ID NO: 180525 - DNA, 869 bp, Cannabis indica
gatgctagtccgatggtcttcgtggacctaaggtcagggatgatgggcccgatagtgggcttgatggggtttgatgcttgacagatttatgactttttgaggactttttttttcacttttttgttagagttttgttctaaatttttaattgtgtttttttaaatgtctgtaacaggttcaactattttttttttcattcgttatgcataatggtgtttgggagcttaagggtagagattaggtttataactgagccaaaatttgacattcgaaattgatatgaatgtaacatgctcatgtttagttgatcttttgtacgaagaactcgatgttgataaagtaccgtatgacttaaaattagaagtgaattgcaagtacatgaaaggcttaaagtatagccccgaagttattggaaataataagcgtgtaaggttattttttttctatgcttgtgaagaagccagatgaatttacttccttgtttgtgacttaggtgaagaagaatgtatgtatcgatcctagtcccacaccaagtattgttaaggatactcgtagcgaggctggaattttcgtttcaaaaacaaatctagaggtgttcgcggctgatgtgttacctgaattaaacattatgatgtcgacaattgacattgttctttaattttaaggatactctatatatattgttctttctattaatagttgttacctgttcgacttaatattctttaattgtaaaaaaaaccacaaaaacaacgttgagaaatttgcaaataggtaagaaaaaatttcaaaagaaaaatcctaaaagtagctgaaggattaaatgtatttttctagactctgaaaaaagagaaaaatcaaaaacgttc

SEQ ID NO: 180526 - DNA, 826 bp, Cannabis indica
caatataaagtatctgattacccttaatttgtaacttgttaacctaagacgtaattgatttccctaaactgttttcccattatttttatttgaattttttccataaaatgtttttttttaaaaaaaaaaaaaaaaaaaaccaatattttggcacacacagtgtaaaaataaaatataatttcaacttaaaaggaacttgtggggattaaaaaaattttgccacttttattctcatgtgttatttgatatatacaatgggtagacgttggagtttttttttttaagtatacaataagttttatttgaagttcttcactatgagatgtagcaagttacatagaaagttaacaaagcacaaatgtttataatataatataatagttaataccatcgaaaaaacctagaagagttacattcaacacatacacattacatctaaaatttaagaaaaatgctaaagtgcattttagggtgtcctacatgctctgttattggtataaataaatatctaattttatatatttaaattaaaatcaaatataaaattcattactaaattgtagtaatagtaatatgatatctatcgggagggattatatgcttggttctttaggaagctagattgttatggtggtgccattcttaatgggatgggaaccctcgtgacctccaaaacttcagcagttggagcagcgtccattcctttcgggtcggcatgcactaactccaaccaagcaaatgtatcatccattagaaggtatataaatgacaagagaaaaaacaagacttatttatagaaagctatagacatatctataattagcgc

SEQ ID NO: 180527 - DNA, 840 bp, Cannabis indica
aactgttttgttacctgttttggtgactgatatggttatctaataaaagttgaaatttcattacaaaaaaactaacatagcaggccaaataataataacattattattataaattaaatatataaaaaatatatattattgtaaacttttcaaaaaaaaaaaaccagtagaaaatagtgctcaatgtaaattgtaagaagaaaacataatatttgagttatagcggaaaaagatacaaaattgctttatttcaaaaaataaataaattgggcttggcttcaatttacaagtatttaagacattcattcatattattccataccggtgtaaacataaacagactgatcaaagagccaagattcaaggtaacaaacttcttttcttcttcttcttctgagtttgtttcttgctgactcaaaatcttgtgtttaatatgcttcttgatgaattttaatcaatcttaatttattagtgtattatttttcgattcattacgtttattcggaagaaaaaagaaagaaagaaaattaagtacatacagctgatttaattgaaatatccatcaagatatttattttactaccattaactgttcgcgattccttaattatgtatgtgtataatcgttcaaccgagttctcttcttggtatatactcttcttagggagttgtatatatgataaactgaaagtattcttgttttcttactgcgtacactgatatcatccttcatcaattgatcagttcaaagaaaaatgatgagaccgaataaagaaatgtagcacaaacaaggcattgatgagtgatatattgagtagattgcctgtgtcgtctctgctt

SEQ ID NO: 180528 - DNA, 749 bp, Cannabis indica
ttcattgtaataaatctctaacatagataacaacaagaaaacttagtgcgaacaaatgttggcaagcaaggcaactggtgtcagtgacggacccaaaatttttactttgtgggtgcttatttatcattaaaaaatatttatactaacattataattacttttactagatttatttaattttgtgggagcttttttattatttcggtctataattattaaattaaaaaaattacatttaattttttaaaaaataatatttttgttaatggggactatagcccccacattgaaaggagtaggtccgtccctgactggtgtacatgttctgctctactctgcctacggggttgtgttagtagttaggagtagattttaaagattcgtggtatttattttacttggtttttttatttaatgttgtttatgtaaataaaaatagtttgtttaaatggggatctccggtaatgagactgtaaaattaaaattttaaataaatgtatactttatttatattaaatataaaattttaataaattacatctttctaatctaaaattggacttatttataatttggtttattaaagcatacatgtgacattcttagaagttaaaggcattatagtaaaacttatggtaattgtaggtatgggtgcttagttacaagttaaatattatggtgtaagatgtatatttttttttactgagtccgttaactcacagttattttacttatatgtgttgattaat

SEQ ID NO: 180529 - DNA, 641 bp, Cannabis indica
aagtaagagtgctaaaaataatgtggaagagagagaaaataaaatattatatttttgcatgatctggagatttttagcattcttaaaggatatataacattagagaaatacagacaacaataaaataaaagtttatttgtaccgtaggtccctaaactatatacgttttggcaagctgatcctcaaattttattctttggtaaattagtctccaaacttttatttaagtgaaaacataaagtcctcattcttaaatttggtatttatttatttatttagttttgtattaattttaaatatttttatattaatatacctcatcaattaaaaaaatacatatttttttatttacatctatttttttttaaatatgtcaaataggaagaaaaaaaacaaatcaatatttttttttaaaatatgcccaaatcaaaagaaaaatatatatattttttatttatatgttttttttaattcaaatcaaaatatattttgaacattataaaactatatatacatgtgaactaacaatttatcttatgaacatagcgtacacaaaataattgctaacgagtagttcatatgcacttcaagcaaatattcattctcattaaatagttgatgtgcatgcattgcaaaaaaac

SEQ ID NO: 180530 - DNA, 592 bp, Cannabis indica
ttttcacctttcatcactattagaaaacttttggtgatcctcatacttttgtgcatggaattgtatctgcaaccttcatcttcaagcgcacccagggatatgagattttatcatattatttaatgataatttttttcaattccaatgaccttgcatgaatgatcatttcccattagaactttacctccatcaactgatctataatcaaaaaatgattctcgacttggacacatgtgataggtgcatccagagtcaagaatccactcactgttcattaaagattacgagatggagaaaaattctccatccataaagcagtcatcactatccgtcgcgattgcagtagaatccttcccgtggtgatgatgtcagttgtccttcctttctccattgggagatttgttgaagtcttgttgctccttgtacttcttgcaatatcttttcaagtgtcaagaccttccacataaatagcactttcgagttttcttctctttggtctttgatcttgattgagagtgatggaactatcattccacgaggctctttcgaattgatagttagctatgtggaacgatacttttgggagacgact

SEQ ID NO: 180531 - DNA, 608 bp, Cannabis indica
gtgtatattgaattgattagttttacatgctaaccatacacaaatgtaaattttatgaacactcctaactatgagtgtaatttaaataccaaaagttactcatacatgagtaatataaatcaaacacaagtttttttttaatataaatcctacaaattagtcatccataaacaatatgctacaaaaaagaagagtaagatactaaaaacgcttaaatttatagacatcaaaattgtcatatatttatgtacatattcaatatttaaaagattttaccaaatgactaatattataatgaaaaattactacatatattatttttttttttaatttttttcgtttttttaaattttacggtttgagtttttaaggtggtttttttctagtgatttctacgtggattgctatacggattttggttacgatttaagttgctccgttagttacaataggaattttacataccgtaaaaacaaaaactgtagtgtaaaaataaaaaaacccctaaactataatttgttacttaggaatgaaaagaacaaattaagggtgcattagataggactagagcttagaaaattaaagatataaactgaagatgaaaatca

SEQ ID NO: 180532 - DNA, 535 bp, Cannabis indica
tataaattcattaccgattatactcttatataagggtactgttgaggaaagtgtggaggtcttttttattatataaaggtataatcgggatataacaaataaaagagggtatcaattaaatatatagaaaaaaagagtaaaaatgaaatgggttaacaaaaaaagagtataggatgaaataataaagggattgtttcacaaaaatataaaaataacaaaaaaattacaaaaatacggtttaacggaattttaaatattttacgatttttttgattttatttacataaaatacggtttttttatgttgaaatcttgttcatttgttgttaattttttgttatctgtatgttattttttgttgttattttgatgttacttttatgtagttttcttgttgattttatgttgttttcgtgttattttttagaaaccgttaaaaatgtaaaaaaacattatttgaacgtaaaatagtaatattttacaaaaaatgttattcctaaatttttttagtatgttacaatagaatggtctttcc

SEQ ID NO: 180533 - DNA, 541 bp, Cannabis indica
tggtttaacttgttgcctgaatgccttaaattatttatcactgttgtggacattagtcccacataggaataaatggttagagaattgagccatatataagaacataggctactccagtcatagccaattagctttgagatggaactccataattctcaacatggtattagagccatatccattgcgggcaagtgatcctatccaatccgcacctatacagatagtgaccatgtccactgtgatatggttcaagattgatgagcaaaaataaccatcatcttgagggggaacgctgtagacgttgtcccacatagaataaatggtagagaattgagccatatataagaacatgggctactccactcatagccaattggttttgacatggaactccataattctcaacaatcacgtttattatttcaattaataataaagtcaaaactatagaaggagtcatatatttttttaaaaaaaaaaataaaagagaaaaataaaacatttgaatctcaccgctgaataagaagatatttatattggc

SEQ ID NO: 180534 - DNA, 747 bp, Cannabis indica
gtatctataggattttccaaaatttcatggtacttactataaaacccaaccaattaattaaccattttattaatattttcttaagtgttaaattaaggagttgtgttgtactgtccttttcagtcattacctttgaatatggaattggcaatctctgttgctgtctgcaaattaggtgctcgaatcaacggcatccctctctacaaggtatatatatatacatatacatatatgtgatgatgatgatgatgatccctctgttgtttacatgtattatatcatagcacattgcaaagcttgctggccacaacaagatgaaaatgcctggtcttgctttccccttggtgaaatgtgcctcaactccacaaaagtatcaggcatgtgtatgattaatattcataacttccatttgtaataatactttaattactttttccagataatgatactttctagtaattattattttgttttctgtgttcgtgttttttttgtaagttcaggatttaatggttgtcagtccaaggggtcatgctgttttcaaatccatctttcgatattcctccacaaatttctttttcctacagcatttaacggtttgcttttattcactcggaacttgttcgtatcttttttttagtaggagattcattcaccctactaagtacaacccttatatggctagtgtagacttgtagcaaaatgaggatgaaaattatgaacctttgatctccaatctattcatga

SEQ ID NO: 180535 - DNA, 721 bp, Cannabis indica
ataagaatgataatttataatttgttacaattttttaacttttaaattacaaattttgttgtagactaaaaataaaatttttagtagtgagaagaaatagtagaagagagtctaccaaaaaaatataagaaatttttaattaatgaagatatgattgaaaaataataatattgaaatcagataatttagcaaaacaatataataaaaaattaaatatcgacttgatcattacactattttacaaattaaaaaatttgtttgtataaaaatatctataatttaattttaatttttttattacaataagttataaaatattataaaaataataaataatattttgttaaataataatatattatgttagaattaataaaaaaactaaataacaacctttaaatcaaaaaattctattacattaacatattttatattacacatattaaaatcaaataaattagtatcaaaatagtaaagtaatgcaaagaaaccagtcacttatcttaagagaaaataaaaacaaatttaatattcaacaaattatatatatatatatatatatgtatatattactaaagcagtactataggtatatacgcaattctcctaatctgagttatatatataatctgttcacatccttatattttcctacaaaattgggacccctcgagtgcttttttggagagtcagcttacgtcttgctgtcaacttgtttggc

SEQ ID NO: 180536 - DNA, 504 bp, Cannabis indica
gttatgaaaacctagaactccagacggatttgtcatacgaagagcaaccagtttaaattttagacaaaaaagataaagtctttcaaaacaagaccatagctttggtcaaggtgctctggagaaacagtaaggtggaggatgctacctgggaattggagttcgatatgagtgctcaatatctagagttatttaggttagatttcgaggacgtaatccttttaaaggggggataattgtaaagatcgcttaattttgatatgaaaattagcagataattagggtaattaaaaaattagacttttaattatgatttatgaatttatggggatatatttgaatttctggtgtattttttgtgctatatatatatatatatgaaatttcatgtttttcatattttatgctcggtaacagtggagcgcgacgtagaccaatagagtcacattttcatatagtttagtattctagtaatagctagacaatatagatagacatttggatgtc

SEQ ID NO: 180537 - DNA, 636 bp, Cannabis indica
gccaagtttttgacagatcaaggaatcttgtttagccatccttgtcctcatactcatgagcaaaatagacgagttgagagaaagcatatacatgtgactgaaacaggtcttactttacttgctcatgcgggtcttgatctcaaatattggtggcatgccttctcttgtgccactttcaccataaacaggttgccaacacctgttcttggccacattagtccttttcaatgtctatttggtcaagaacctgattactctatacttaaaacctttcggatgtgcttgttttccccacttaaggccttaatgctcacaagatggacatgagatcccaacagtgcctgttcttgggatactcatcttatcacaaaggttacttatgtgaaaataattaagggaggatttacatagcaagaaatgtaatttttgatgaaggcactttccctggccagcacaactcacatcatagcaacaatcaggtaacttccaacaatcagacaacctcttttccttctgcatcttttacaccagccaacataatgtttttccttaatgcatctatttcatttaatgcaattctgaggaacaatactgctgctggtgctgaggaacaagttgcagatgctcgaaatgaca

SEQ ID NO: 180538 - DNA, 506 bp, Cannabis indica
tgggttcacacattttaaaaaaatggtctgaattctaacattgaaaagaaaaacagcaaaaaaacatatattgagacaaataaaagaattgtgaaattggaacatccatgaaataaacaaatcattagataatataaccgaacaaaataaaataaacacatacataaataaattaaaaatgaaatagaagaacaataagtcaattaaaaaaaacctgagattctatgtatttcagagtaaagaaatctagcatttaaagaagaagaacaccgaaacattcaacaaagagaactaaaacacaataacgaaatcaaaatggcaaaacgattaaataactaaagtagaaatgaaagtgaaaatgactatcgcaccgctttcatacgtatgagacaagagttgaatcatgaatgaagcaaataataaaagattgtcataaagatcaaaggaagtcctttctcgaaggggaagtcatctttcatacctgatcatatcgaagccaatacttc

SEQ ID NO: 180539 - DNA, 919 bp, Cannabis indica
gtactattatcattattttgttatctaaatgttacgaacttatttcttacgctgaaaattgtttggtggactttcgtaacatttctattttacattttttaatcataaaaatataagtaaatatttgatttttaaaattttgtttatattttttaattttaaaaataaaaataaaaattatttcctgtaaattttattttaattttcatttgttaattttatttaagatgggtatggggccagatctgagttcgggtctggatttgagtttgggttcgaaccggatatgagtctagagctgggactggatccgattcgggctgggaccaagttcgaggtctagatttgagtttggattcgagtctggatccggggctagggtcgggtctgagtccaggcttgggtccgggactgggttcgtggttggggtccgagtttgggtctaaggtcttaggccaggccttggtctgagtccaaggtccaagtcggggtagggatcggggtccgagtctgggtcaaggtcaaggtccgggtcaaggtttggggtctgggtttgcaacggggtcggggtccaaggtccgagtctaggtctgggtaggggtaagggttttggtctggaactgggttccagagccatgactgggtctgggtcaggggtctaggttcgggttcaggtttgggtcgggttagtgtttggggctagggttcgggtttgcgtttggggtcgggattggtgttgggttttgtgccctaaataaaactcatttcaatataatcagatttactaattaataaagatcagaaatcccattctatgttgcatgattcacatgatttgtttcatgattatatttaatgtataaattctattaagtctagaacatatatatttgtttcatgattataatgttgtcgacac

SEQ ID NO: 180540 - DNA, 611 bp, Cannabis indica
atagagatgaatatttaaaaatatataaatgatttaataataatagtgtacataattaataatccagaaagactttggagtagttgacttgagtgttttggggaaggaatatgggagagaaaaaaacatataacacatatttgaacaaattattaatatttctttatattattatatatgaatatctaagaatcttatccacaaaaaattattagataaatcttataatatataagtcgtgacgcagagacagcaaataatattgaactaattaatcttttttagtctttgttattaattagaattcacatgtttgtattctaggctaaattattgttaagataattacaactaaggttctaacacaaaagaataatggcttgggtcttccttctaaatattgcattaattatagaaattattaattatagaaattaaatgtcatattaattatatatattagcaaactatatatagagcacttgtttgtacaatattttagtagacgtgcttagacaaagctccccatgcactattgtattatgttcataatttacactataaaattttttatttttagttcacagcaaaacttgtgactaaaagtaaaa

SEQ ID NO: 180541 - DNA, 660 bp, Cannabis indica
gttaaacatatttggtacatacaagattcacacactaaaacctggtagaatgttgccactcttgtccattgaatcgcgatcgttgtaatcagcagggaaaaggcgagtatgacaccttttctgaatagcaacaaatgtcactcgaggaagatatccttcctcgagcgatgaacaagcctgtaattataaacagattagatattgccatggctaaatacctcaaatcatttatgtttggtaaaaatgaagaaaagtgagaagaaaaatatggtgtggaactcaccaatttttttctcttccaaattccaaatttggaaagaaaaatgaagagaaaagacaaataattttacaaaaaatatggtattaatatttttaaagataatatagtaattttactatataccaaatttctatttttcttgtaattccaaataagaaagaaagaaatatgttatcatttctttctttttaattttctattccttgtaaattttttttccttgctaccaaacatagtgtaagtgtagtgataattgtaagtaaatacctttcttatcgcatccatttcgtaaagcaacactcgattgaactgtccatcactaacgccatctctgcacaaaacagagtaaattaagaggcagagtaatgaaaaaccactaa

SEQ ID NO: 180542 - DNA, 625 bp, Cannabis indica
ttactaagttttacatacaaaaataaaaatttgtaaggacgccatttctctgcattagtattgctaaactacatactcatccttaaatatgtcctccttcacaatattctttagtgttttagaacacctctccaatgagttgccttaattagggcactgatcttgactttcatactcttttccttgaccttcaatgggtccttgccaattggaatggtccttttagtcctctgcaaattaataaaatcaacacaatcatgatcatgattattttttaaggtacataaatttttaagataagagaggtaggtataagtaggtacctcttttggaagaggtgggttccaagctccattattccattccctatgaagccttaaattgcggtgtagacatacaattgcaattgatcgagttgaatcgtgcaacctaacagtgtacctcaacttatcctcattcatactcacaaccacaccacgaaaccatctgttccgaaagaaaaactccacatcatcgcctgcgtcgaaaacgacctgctcggcccgcaacaatggcctaacattgtcggcattgactatttccctaaggggattctccactggatgaggagatccgtactcaacgt

SEQ ID NO: 180543 - DNA, 568 bp, Cannabis indica
ttgacaggaagctgacctatcaccacagaaggactggctgcaacatcagcttgagtgatggaaaacacccgagcaggtataggctttgcctctggcttctcctcttctttctttgcctgaaagaaatctttcttgaaatgccccaccatgccgcactaaaagcatgtcttcttgttgcactctctgggatgatgtttcttacaatgtaggcactcatggtaagagtaaccctggtgtccacctctgcctatgttcccacggaaccacttgctctggcctgagcaaccagatgtcggggtaacttttctcttctggttagtggtggaatcaccaccatccccaccataagtaggagtagtaaatgtgggggtcccaccaacacttggagtcacacggggctcttgaagaaacttaactgcaccctcagcttgcagagctttctcaaccatctccgcatctgatgttgcctcattattagtgatcaccaaatcatgtcaattttttacattgaaaccgtccagatatttttctttctttatgaattctataggcacgatacccgaggtga

SEQ ID NO: 180544 - DNA, 518 bp, Cannabis indica
taggtgttttatgtagatagttgtacctatatgtgggaggatgcaactcttagtaatttatatttctagttaaaattaactttttatggagaatattctgttaaaaaaacataacaatctgttaaatgcacaacaaaaatggttaaatagatatttatataataggtaagatattaacatgtactaataaaataatatggttgcttctataattgcacctcttaaaagtattaatgatacctttgatctgctttaacatctagaataattaatttttagtataatttttttttttcatattttaccaaattaattttgacaaataaaatttaacagttaaaattaatgttaaaaaaagtctattttgctattattctcgtataaaataaaatcctcatccatataacacattgtttaattttatttatggtgtgttataaattttttaaattttacaaaaatgtcttaaataataataaaatatatgactataaaaaaattcactacaaaaaatctta

SEQ ID NO: 180545 - DNA, 540 bp, Cannabis indica
ataccgaatgaattatctatctctattgcattcttaggacaactgttttatacctgttttttttctctcttcttaggtctttattgctatttctcttattctgggggatggaatctacaatttggtcaagattatagccattactattaaggaaatgtgcaatgcaagcgccagacagagcaatcttcctgttgttgtagatgcagccgtaggtgagagtttactgtcgtaattttctaatatgttttccagtattccaccaacagttgaggaatctgtgctagtcatgtaccacgccactgaaatttaaatcctcatcaatttttattatatttagcttaccatatatcttttgtgaggcatctgctaagataaaaggcgagttatggcatggcattttggctctcaccaataaatgaaaagtatttgtgtgaatcaaaatattaaaggttcaatctgttggatgtttaatctgttttggttgtttgtttggctcatcagccaaagaaaagtctctgtacctatcctaaaaccaattgt

SEQ ID NO: 180546 - DNA, 931 bp, Cannabis indica
ataagtgcaagaagagtaaatactcaccaagaacattctctatatttaatacactcataaatacacagacttgtggactaaggctcattaacgccccaaccacgtaaaaatgcatctcttaatttcttggagttctctaatcttatattattttattggttgccgaaaacctcggtcaacagtcacatttatttatataatctcaatgaaattaaattcttaagggattaactggtttatgattcaaaaattatattttctaaaagagtattttgaaaacaaaaatttaaattttgtatgtaaaaaattatttctagaaatgtgattaattgtagtgtaattttgtgttttttgaattttaaaaagttaagggtacgtttagtaacacttttttgatcagtttttttttatttttaaaattatttttcaaaatcatgttttataaaattatttttactttttcaattttttaattaagaatctaaattttaaaaacaaaagaaaaaatcacttttaaaatttttttaaacagttttttttaatctgaattcgaacccggcctcagacttggacccgccctcagtcccgacctccaacccagattaaataaaatcaacaaattaaaataaaaaataaaaatttacagaacatacttttgttttttatttttaaaattaaaaaaaacgaattatagaacatattttatttttcaaaaataaaattaaaataaaatttaattttatttctgtgattaaaaaattaaaaattaaaagtagttaacagacggcacttaaatttgtaatatgttgagaatctcacataaaaaaaagtaaagagaaattttaagagttttttaattcactactaattttgaaagagaacaaaattttttagttttctattttttaaactaaacttcaaaattatattc

SEQ ID NO: 180547 - DNA, 555 bp, Cannabis indica
ataagttatgctgatgaaagattgaaatttccaaaaaagatttttcagacattaaaattaaaaagaagaaaggctcgactaatccgtaaatccttttttttttttcaacttttaattcaaaggatatctataaatatatttctatttatcagtaatattcctagaataaatgtacaagtttttttctatttttttgaatcaacaaaaaaaattcttaataaatacagttcctataaaaaccctatttcgactaacgaaacaaatccaaatataactcagtttatttcgactataaaaaaatcaatttctaatcttaataagtcacagactttttatgacttatcttatttgtcacaagcatatgtcttttataaattatcacaaccccccttttttcacttttttaatttatataagtcaaaattaagatctgtctttcaatatcaatataagggaacatctttttttcttaagaatggaataaaggattattttgttggaacgcaggaaatttttaattccgaattaagacatagaaaccccagcaattatgga

SEQ ID NO: 180548 - DNA, 505 bp, Cannabis indica
gacagatagtatcccaagattattacattcatagaaaaatgaaatcataactgtgaatcagagttcatggaaagaatgagaggaaatcgagagagaagaaatatattgctcaatcttgagctgattggcacctcagatatttatattactgagtttttacaaagctttgttaaagcataacagaaaagtatcacaacaaacttaactaactttctgtttttaatataaagagctaactaatttgttctcctaataataactaagaggaaactattctgaccacttttaggatctaaaaggacagaagcattgagtcaattttcaaaaactaaacttgtcttacgatgtcataacggttttgaaaattcttagaacacaaatatacaccttcaactttgaaaaaggtaagcttaagatgctagttatgaaaaaaggatttctctttctttttttccttttctttattttaccatacagactttggcctattaagtagagactaaag

SEQ ID NO: 180549 - DNA, 726 bp, Cannabis indica
ggtactagaacgctatttttagtttttctaaaaagtaaaaatttttaaaagtaaaagtttttactttcatttttgagaatttaaaattaaaaaacaaaatgttaccaaacggcaccttaggttttttaactttttccatttttttttatgtttttatatttttgtaaaattgtaaataaaaaaataatctttttatatatgagtgttcaataaattttaagattttttacattatatatattttaaatttttttaatttttttttatttttagaccagaattttttttttaaatattgtatatttttttttatttatactatcttgagttttttatttagttatttcattattgttttttattgttctgttttgtaattttagtgttttttataaaaatacaatatttttgtaaaaattttcgtgtgataataaaattataaatttttatctaaaattcaatatttttttaaaaattcccagaaaaaaattacataaactcaaccaaaattgaataaactcacaaaaaaaaatataattcaaataactcaacaaataattcaaactgcttcataaatataagaaaaattacataaaacatcaacttttataaattttttacatttttatgttcaagattacttttttaaaattttttacggtattatatataaacatacaagaaaacaaaaagttaatcacataaaaataacaacaaaacaatata

SEQ ID NO: 180550 - DNA, 791 bp, Cannabis indica
tttttgtagtgttatttaatatttattatttttttcacataactaataacaaaataaaaacaaattattgttgccaacaacaaatcaaaataaataaaacaaaaaacaacaaacacaagtgaagaaaaaaaattatatgtataaataaatatttagttttgtaattatactgtgtgcacttgcatagctagcaaattaattaccattgtgtgcacttacatagcaaataagtttgcaacaataaactattacatttgaatgatattaatgccttatcgcacgtcttataattatctaaaattgtcacacattattaaatttgaatgcgatcgacggtaatcgagatcgtttagatattttttagtacaaaacttctcatctatttattatgtagttttttatttgaaaaaatttattattcaattttttatttgattattattattgcatgtgttattttattatgcattattatactatatgcaatataaccatcaatttatattaacaaataaaaatttaagaatctccaccacataattgtaaaccttaaaaattttataatataagaattgttgcatattaataaattttaaagaaatttaaattattgttttgaaaaaaaaaaaatcaaattatcaaattaatttaaaagcttaaattaaaaatgaagtaaaataaaaaaaaaaaactgaatcatgttgttgtctcctaccgattagacgacaacttgtccctttgattgagatcaaatttggatgagatcaaggtaatcgagatcattcaaatct

SEQ ID NO: 180551 - DNA, 1077 bp, Cannabis indica
ttcttagtattcgaatggtaaatttttcgctggatttttttttcttttttttctttaaaaaaagtaaacttagattaaattctgttttttgcctactttggaatgttttctagcacaaggaagtggcgtaaaatgatgatatttccagtttagaaattttcttttattttatcagaagattaacttgaattttctgttaagaaatggggttcacatcagtttgtttttgacatttgggtaaaattgttttgtaatggccaagttgacaaatgaaatttggaaattgtctttttttttttttagaaaaaaaaaaatgaaattttggaaattagctgctgctttccttctagaattttaaaactgatagtattgaaatagcactatatcattaggatttagattttgaacacttggaggaatgtagcaaggtactgaacatcgacaatggtggtagcatcggatttttcataggggaagagttttttatcgaattatgaagtatgtactgcttatagatgaaagatttctgttttgtttgggggggggggggggggcaagagaaacataagattacagtggtcttatctccaaggtctacaacataacttagggattaacttctaatgtattattcttggttcttacctaagatgggtgtacttaattactttagttaaagttatttatattaatttgaaagttgtagttcttaagcactcctacttaacgttataatttgttgacaggaaaggatattccattgtaatgaatacatggaaaagatatgatcttttgaagcagtcaatttctcattacacaacctgttctgggctcgattcaatacatatcgtatggagtgagcctgaccctccatcagattctcttaaaaagttttaaatcacattgtagaatccaatgctaaagatgggcgacttgttgaattgaaactttgatatcaataggaagacagtttgaacaatagattcaaagaaattactgatttgaaaacagatgctattttttcgatttgacgatgatgttatatttccttgctcttcagttgagtttgcttttagc

SEQ ID NO: 180552 - DNA, 748 bp, Cannabis indica
gtaaatatcaatttgtatatttatgcctttttttaataaaaaattattaaaataatagtaaaatatcaatttgtagatttatgctttaataaaatattaaaattgagagaattaaggagagaagaaaaatagttttggagtgattttagaccggcacgtcactgcctcatacttttcttttatatatatatatatatggaacacttcttaataggtattacctattggtgggtaataaataaatttaactataaatattaatttttaaaatattaagtcattagagtttgatctgatggcgaataataaaagaaaaatttaaaaatctacgcttaaattagctacttaattaaagagaatatcaaaaaatacatctttttatactttattaaaaataagtttatatgaaaaatatttaaataaaactcaataatttttatcatttttttgctattttttattattattattttcttttatggtaacaatctcagctcatataatgaaaaagtgagaaatttttgtaataaaatagaaaaagtaagcataaaaactcaatttttttttaatattacttatttatggataataccctttaagagtgcacctatatatctagattaacaaaccaaaacatttggtgaagatgaactaattaaccaaaagtactctacatgatggtcttttagaatcacaatattcgaagttgagcaatattaaataagttcaatattatatataaagtgag

SEQ ID NO: 180553 - DNA, 649 bp, Cannabis indica
tgagtaatgttctaaagctaaaaggccacatgccataaaaagccataggctatgtggaacatgaaaacattgtctatctggtacaaatataatactgattactattaataaaaatgttgtctgcatgtgtgcaagggcagaaggagctgaatttggagccacgagattgagatccacagagtctaggctggccccatcatcacaatgctggccggcctggtagtcagtatcttggccagtcacctcctccacaggtgggtcggccaactcctcgtcgtgtgtgttggaaatattttaccaggatctagatttactattatgtatgtttcattaacatcctaatatgaattctaaaacaatgaaataaacacatataaagtttaggaaaccttaagcaatattcaaatttctacaaaaatatccaagttctttaaatatttaagatataatttataaatatctaataagtaaaatgatataaaatagtaaaatatcatttttaaacttataatttataaataatttattatttaacaaaataacaaacttttgaatttgaaaatattatggttagaatatctataaaaatatctaagttaatttcaaatttattaatatttaatttgtcatataagataattttaatatc

SEQ ID NO: 180554 - DNA, 1224 bp, Cannabis indica
atttcaaatatccaacatttaactagtaagagatattttatatggactgagattgctccttcaattgaaaaaaaaataataaaataaattctttactaaaaaaaataaataagttgagtttgacttaaatattttttatataatataaaaagagatactttttgatatttttttttattaagtagctaaattaaatataaaaatttaaatttttcttctactatttgtcattggatcaaaatggtaatacccaagaaatgttccatatatagatatattaaccaaaaatactgacttatgaccaaaaaattaaatatattaacaaagtaacaatgtactaacttatcataaattgtttgatttacgattaaataaaggggaatcaaaagatggaactatagtttgtaaaatattacttagaattataataaactatcaattattctcccacatcaacaacatcataaactactactactactacaacctatataacatcattcatcttctactaggactattattacctctcatatatttttaggtgtacactacaacatatcctccaaaggtttgaaagtttttccgcattgtgaacatttttttccgcattgtgaacattttgttttgcaagaagaaaatatataaataattgagaaatgaactaaaaaaagtgattaatatatatataataaaacgaaaatgagcaaaaaagcaatatctagaggtttcgatgtaggaaaaatactaccattgacattctagaacacatgaagcacatgatttgattttgtcgaccacttgttcggaaaggatttatataaatgcctaaatggtatgtattttttagtaaaggtatatgcatttcacttaaagctatgtcaatttttttagttgtcctttgacaaagtcaataaacatataaatgtttagatttttttttaattacaatttccttttatgagagtaattattatatacaatttcctcctatttattattattatttttttttttaattaaaagatctacttattttctatcttcttttaaaatatttattatttaataatactaccccacatcacttcttcagattttttttaaataaaataaaaaaaaaaatgaaaactaaaaggctaaaaggctttcaaaatagataatttagtatttatcattctcttcttcattttgtattttatatttgttacatcaattactatt

SEQ ID NO: 180555 - DNA, 574 bp, Cannabis indica
aaaataaaacatcgatcaaagaaaattgatgataaaggaacaaataaaaacaaaagagattaataataatatgtacgattatattagtagataaaatagtgaacagacaaaattgaaggataaaatataaaagtataagaaaaaatattttataatttcttatttaaaaataaagtgtacaaaagactacaaaaaaagtctgagattattattaacaaaaaaagtgcagaataataggaaaaaaaaaaggatagaaaagagtagtataaaaatttaaatgaaaaaaataagatgcacaaaagactaaaaatgatagagtaaactattattattttttgaggaaaatattattattattattattattattattattattattattattattgtagggatatgattttgttccgttgttgtactttcacggattgtaatccgtgatgtacggcagccgtcagatgaggaagttttttgatctgacggctgagattgatctaagggtaattagggttaaaaagtagaaacgtacgctaacactcatttaatatatcctgagagattattattaaga

SEQ ID NO: 180556 - DNA, 821 bp, Cannabis indica
ttagatacttttttttgataattagagtaattagatacttgatactgtttttttcatattttatatatttttttctaaaactttcccataaaataatgtttttttttttagaaaaaactgtatttttccaaacttatacttcaaaaaccataaaaataaaaactaccctgaaaatatagctcaaaaaccaaaattataactagctaaagataagtaaaatatttgatttatgtttttcatttgataaccatattataagaatatttttataatgaaaagttttaaaagaatttttttttggatatcattaaaaagataatatattttgcaagtaaattagaaatttcataaatgattgtttcatccaaattaacaccccaatattaaaaataacatattgtacctgttttctaactgggcatgatggtgcaaccgtgcaacgatagtaagctcgtggacatggatttcctttagcaattttctgcccatatttcctccattgacatccatcgttcatctgttcaaaaatatcatcatcatcatcatcatattaattatctcttaatcatacatatattaaaactaattaataattaaataaataaatatatatatatacgtaccgttggagtatcacatcttgctctgacagaaactctagctcttttaacttgagcttgtgaaactacttcatcttgatcattattactactactagtacaagtactactcttaatcatcttattattattattattattattattaatactattttggaatttttgttattattattttgctttctaaatataactctg

SEQ ID NO: 180557 - DNA, 821 bp, Cannabis indica
tagtttagagctgtaataaatttttattaaaacttattggacctgacttagtatattgagattgttacctatgtgagatgaattttctgattctatataaggtggttgatcatctattcttcaaatactcatatcatagtatataataatggtttttcttgtagtttagagctgttttaactaaattgagcttgtttgctgctcttgtataatggtttttcaaatagtcatatagtataatggttttcttgtggttgtattaggtctttgactctttgttgggcatatgttatatctgtaaggctgtttgaactgaattgagcttgtttgctggtattgtggcaaataatcttacagagcaagcacattccttagtgtgaaaaaggaaaatggtggctgcaatggttgaacacatttcatccaaatcatgggcattcagattcaggtacttgtcacaaaactcagttttgttaagctctcgtgtattctgttccgaaagcagggcaacctcaagcaacgaggttgagactgtttatggcattataagtagctcccagtcctcaagtaacttgaagcaattgttgaaatcgagtcaggttttcctctcaaacgatttgatagacaaggttctgaaaagagtcagatttggccatgccaaccctttgcaaacttttgaatttttcaattacactggaaatagaaaagggtttttccacagtgctttttctttggataccatgctttatatcttaggaagaagccgtatgttttgacaaaattttgggatgtttttggatgatgtgagacataaagatcgaacg

SEQ ID NO: 180558 - DNA, 620 bp, Cannabis indica
ttttttttttttttgacaaaagttaacgtcacgttatttggacgttagcttagaaaaaaaaataacaaacaaactaaccttccttgtttattgagaaaaaaacaactaaccctcctccttttttgctcagaaacaaagtgtttttgattccctttctttttcaaattttgtttcgcatatcttcattctcaattccaaattctctccgcctctattcgcatcataaaagcctaagctttgactctcaaacctcgtacagataacgatgaatgccccgataatcggtaagcttttctccttttctaatttatttgaattttctgcaaatttctgatgattggtttgtcattttatagtctaagtttttataattgcctgaacttttttcgtgctttctctttttctctattttttttttgggtaaagatccttgcaagggagttcctgaagttatagaagagtatttggtaacatggggtcgatgaagtgcattgtctttaaatcgtcgcggcactcttcttgctggtaatattcgtcattttagtctatttcccttactgttttttcttgtacttactgttactagagtttactatatatgcgtgtttcgtcgagttggt

SEQ ID NO: 180559 - DNA, 620 bp, Cannabis indica
tgctgcacctataatcttaggcgataatcaaggtgcaacatctctggttgctaatccagtgtttcacgcaaggtcgaagcacattgaaatcgatctgcactttgtgcgagatcagatattggccaagcagcttaaagttcggtttgttccttcaatagagcaaacagctgatattctcacgaagcccctcactaaagaaagattcagctacctcaaaaccaagcttcaagtgtgcaccacaccatttcacttgaggggggatgttaaccaactaccttctccaattaattagttaattcagtttttactgtttgttctcaactgtaactaattctgttacactcttgttctgttttctttagtttgttatttcattccctctgtatcatactctctataaatagtgaaatggttcctctctttggttttaacctttacaagccttagagactttgtattcattgttttctgttatgtgcttagtattgataggttcatacataataaatgaaagttggactaacattcactctttttttttttatttaatctgaccaaaataacatttatctgattatcaagttatggcttaatagttacttggtgtaatataagttcca

SEQ ID NO: 180560 - DNA, 806 bp, Cannabis indica
taactttgataagcttacagctctaaacgccaatggttttcaccacctcacctcacttcaacacttgaatctcaagaacttggaaaagttagagtgcttgccaataggacttccccagactcttaccactttaaggataaaaaattgtcgtctgttaattccaaggtgcaagagagaaacaggagaagattggcccaacattcaacacatacctaagatatacataaatcatcaagtaagtattcaaaagtagtagtaattgaaagtctttattcttcttagttgtactagtttcccctaacaatattttctttcatattgctttttctttacttcattcaaaaaaaaagtacaaatttattttccaagatgtaggcatgaatataactcataacttctttttcatattatgaatctcttttattcactagctaaattttctttgtcagccctacgaattgtaacttggtttatcaaataatgtaggtctcattgattcctatcaaatttagccatacttaccctttgttctacaattcttatacctcaagtctttttaattttccttttctctcttgtctttagctcattaaaagataatacaggaggtgaggactgaggaggcgtagccgttggtgtcgtttttcttcaatctcatcatgtttttactcaaaattgttgtgttagctgctggatgtttgtgagagttggaaagtatacatgaagtttctcaatcagtaatctgttttgtatttcaagtgtaaaagttgtgtgctattggtagtttttttgttttctggtttgtg

SEQ ID NO: 180561 - DNA, 673 bp, Cannabis indica
cagttaattatattaatgtaattattatttttttgtttgcttaatcaaattaaaaagttgtttttctgctgtaaattcaatatggtttaagtgttttccattattttttttaaaaaaaaaaatacaattaaaaaaaggttatagttgtagtgttatgtaaaatttgtgaattctagaaagggcttttttagtgtgtgagcccaagtgctccttcttatgctgcatttgtcagtgaccgtccccacaagccattcccaaagctcgtacttagaattttatcttatttttctttcaaaaaaagaagtttatcttattttattcacgaaagaaaaacccaacaaaaactcgtgaaatgattttaaaagaagaaatctcgatatttgtctttcataaactccttaatataaaatgtcaatttgatatctgatacaattattttttagggaaaaacaagtagaatgaatttccactcacaagtttcatattatgattaatgttattattagtacctacttataaacctataatgtatgttaaattcaacctaaaatacaaacatttgagtttggcttttatttttaaataattatttctgagctacgtattttccaatttctattatttatttatttttatttatgttcgtattgttcagatacacgacgacgctatc

SEQ ID NO: 180562 - DNA, 871 bp, Cannabis indica
ttagaagtcaagggacaaacgtttctccatccatatcataaggtattttattgattaattacttcaatttttttcaatatttttatcattctactaaaacaattttatcaaataggtaaaatataaagaagcactccataacataacatagaatatgtgtttagtattggaatttcaaatcctcaatgcccttgaatgtactaagacgagcgtataaacaacgttgacaattaattcctgacaaacatttttaaattagctgaattttttcatattaaatttaacaagatttatgtaaacatcttatttattattttaaataatagaaacaataaatttattataaacttattataaatttcactagagtagctttatacatcaaaatatccataactaaattatgtaccaatccttcacaaatttttttgaacaaattaataatttcaaacttaaatattcaaattaatttgctgtgatcatgaattgttttgcaaaatgtattaaacaaattgaaaatatataataacaataaaaattcattatagtattctttttatgaatttgttataatatagcgtacatatattcatagacccaccgctatagctctcccaacaaaacccatttcttgaatttcaaataatatatccaatagaaagtcatattgctgtataatttattatttttaatgtataattgtcctattcatcatgatatgttgtttaaataatttccaaaggatttgttttcttgtttgattctctccctctctttctttatttttcatttttcgttccttttgttttattattaatcaatatatttttgatcatctatatatataagaatttttacaggttctttcact

SEQ ID NO: 180563 - DNA, 787 bp, Cannabis indica
tccttgtctccaccagtgctcatcgagccggagccagcaacccaccacacgagcaggagcaatttttttttttctattttaaaatataaaatttgagtttaaaaagaaagagagggagagagttgaccgagttgactcacccggtcaacccgcaaacctattagccccctattttatgggcgaatagtactattttttaaaaccaaaacccatgaacctgaaattcgaaaaacacccttgatgttcagccctaggtaaaaagtgtatccccaccaacaatgccacatgctggcgttacaacttccaattggtcctcttcatttttggtcccaaaactcaatatttattacatgaagaatatactttcgccacccgtcaccatataataaataaaacctaccaaccatgaaccattaaaggtttttattttttcaagattaatatgatctgtctatcgccaacatttaattactacatgtacttttgaggcacacttttctctttttataacaaaagaacctttaatctctggaaaaaaaaaaaaacaaaaaacaaaaacaaaaggaccttttaataatattgcttttgaatacccttatcgatattctgtacactttacacatatctgtatcaatcagcgaaaaggaaagagacgcctatatatccttttctctatagcaattctaaattatattggtggtggttaataaaatataacattactcaattttactagcggattcatacatggaatctggatgtgcatgacatttcacacacaacatat

SEQ ID NO: 180564 - DNA, 264 bp, Cannabis indica
tagggctgagcatgtaacccggtgggccgaccaacccggccaacccacaccgaaaatgggtcaaacaacctgtataattttgggccgaagtccacatggtttgaaaaattcataacccgctggttgtgggtcggacacggcctggacatattataacccaaacagcccaacccgggccgaccctatcttaagaaaacaaagtggtatgggcttctttattacattgggcctcttgactttctaaccctagcatatatatatata

SEQ ID NO: 180565 - DNA, 989 bp, Cannabis indica
atatagttgattgattattatggtctatacgcttacttaaaatcaaacaatgttttataaatatgaagaacatatgaaattactataggttggaatcaaagttatttattaattttattacttttcataatatttttcaggtaaattaattttattatttatcattctaattttataaaccacattaataattatttttatagtttatcattactctaataaaaggccaacttttcagtcttgacaaatatctgctaatatttataaattgctgtatagtgtatcgtgtttatatttttttaattttttacaaagagaataaattgcatgcttttaatgtatagaaatcgaacattttgatggtttgtaatcttagcgcatctataggtttcatgtatagtataactctcaaagtttgaaaaaaaaaaaaaaattgttactgtcagttgttcttcgttaacaaaattataatatataactataatgtacctacttggaagttggaaattttgagaatttgcttctttttggaatgtttttttctgtttgaatacagttgacacagaaggttttagtatttttttcttcaaaaattatgactctcctaataagctactaaaaaaagtaatatgaacaattgtgacaaacaatgacatagactaattaaagaaaaattatttttaatatttaaacattaactgttactttatatatatatatatataaaaaaaatcataactatatttgaatatacaattaaatatatcaatacaaaaatgtttaacatttaatcataacaaaatttatgaataaagtaaaaagttatgactaattataattcatcactcctatgttgtcgttaaaaagtctctggctaaaagtattagtcacaaaaattacaatttgttgtgactaaatgtgttttagttacaatacttgttgtgattaaattaaattagttgacaatttgtagctaaatactatgtttt

SEQ ID NO: 180566 - DNA, 607 bp, Cannabis indica
ttatattataagcatttataaatttattgtttttttttttttagatttctattttgtatggggttgtttacttttaaatttttctcttactataacatacatttagaatgtttctttgtacgactactttcttttttataaaattgtacaatgatttttttaagaattatttaatgttctttatataaatttattatttgtctaataaatatgtttattaaaaattatatataattaataataactttgaaattatttgatgcaattttactattcaattaatattatataaaatcagtagggaacctaagatttaaaatgaggggagtgtaatttttttggtaagtgagagggcaaaaaagtaaatttaaaaaggagaaaaatacatttaatgagattagaattcttgttctctaacaagatatgcttaatcattacaccaaatttaatattatgttcaaaaatattatttttaattattacaaatatatatcataactaattaaattgtatatatattttttttaggtggtacgactactccacttcggttatatgtagatcgcacctgtatatataaactatatataatgtaaaatttctataa

SEQ ID NO: 180567 - DNA, 508 bp, Cannabis indica
atatcattcgcgattatgcaagatgatacacaaaagattacttttttttttaggtcttcctgcattagtaggttgtctcataaaacttcataagtaggcctatatttctaaaaatagttaaattgttaatggcaggataaaaccaaaaaacaacccctcacttgcaaaattatcgaattgtatatgtgtgatagcattagcatctactttaccaagaatatgaatgaacccgattattgaaattgctcatgatagccttttttagttgtttctaaacctatttcttagttcaagatccctcttactaactggaatcattttccttccaatatttttctattggagcttccctcattcctttaatcaattataattagaaactgaaaagtactaaacttttggtgaatgataaaataacataaaaacataaaaataacataatgtgtctatgagtaaggaaaattacagagacaagaatatcagcagtctgcaactcttacacatagaa

SEQ ID NO: 180568 - DNA, 844 bp, Cannabis indica
atatatatataatattagagatattctaactactttttataaaaaatttaattatatatttaaaataaataataatcaaattcaaaatgttatctcccaaaaattcggcaacataacactttaaaattgatcattctcaaatttttaatgtctataaacaaaaccacaaatacaatactagaacaatctaagtattaatatttgtcacctatccgaccgtagtatattttttcacagatcctacttcactatgtatgaatatataagatattcaaactctactaatatgcattttcattttcaaaactaaagtaacatattataaaatcatactaacctctaaatacaacaagaactgatcaactggcacaacaggtaaagcgacactgaaaacttatttattaaaataaattattagaataatacaaaaataataacaataattctatacactaatatgtgtatacatatacatacacacaaatatatgtatctatatacatacaaatataaaaaaatatatatgtatagatacgtagatatatatacacatacacaaatatatatatatatatatatatttatacactaatatatacatacatatacatatacataaagttaaccaaaaaatcaaattatatatgttatacccaaaattcagcttcactccaaaaattgacacgtgtacaacagaaggaatatgaatcaattctgaatgatataataatattatatcaataaatgcatattaaataactcgttaataataaataaaagtttgatagataatattcaaacttgttgactgtatagtctaaaagcgagacaaggataataacta

SEQ ID NO: 180569 - DNA, 526 bp, Cannabis indica
atctagcaatgccccctctcgtcgtcaaacccacaaaccaagatcagccccttgtcgtcgtcaaagccccacgaaccaagaccaaccccctatcgttgtcaaaccccacgaacccaaaattagaactttatatatatacatatatttttttaaaaaaaactatataacccagaccagacccctatcgaagagtttgtttcttgtcactacaacaaaaattggtatttacatcggttatatggcgtcactataattatataaccaatgaaattaattaatgggtgaaataatatacgtcggctttgcaccaacgtacgtttagtgttgtttctcaaaaaaattaatttgtgtcagttgtgcattgatgctaatgtcatttgtgccaatgacgcaaaaaaccttatttaaaaaaacgttaaaatagatatgggcttccacccaatttagaaaaaaaaacctacatctaatataaaacctaacattataattttttaaccctaatcagctgccgctcctctctctctct

SEQ ID NO: 180570 - DNA, 1046 bp, Cannabis indica
caagatttttttttttaaaaaaaaaaaaaaaaaaattgggtggaaacagatgaaaaatggagaaatgggggatgagaggcggtggtttgggcgatggtttcatgaagggacaactggttattttgtttggagagaagactaagtgaggaagacgaagggctaaatagggttatataaaccttatggcatcggtcattttgtaataactaacgctataggggacacgagtcagccaatgcgtgctataagggacacgtgtaagccaatgcgtgcccctatggcgtcagttattacaaaataaccgatgccatatggggtgttattaaaaatttaacaccttatggcgtcagttattttgtaataactgacgccataggtgtttttattaaaatttcattttgacacactctacaacatcggttgtttattaatcaactaaaaaacgcttctaaatacttattttgtagtagtgttataagtaaaataatagagaaatcttaaagggtaccagtggtgcctagcactcttctatgtgttaatatcgctattggttcagctaagtattgggtcccatataatttaatacaatagttttatgggagtatcggtagccaatcataacgcgacatgtcgagaaggtgctaggcaccactaatgcctaatagcaatgctataaaaaaaatatataagtcaaatattaattatagatcattaaataacttagttaatgtaattataatctaattcttcatcatattcatgattaagtttaaatataactcaactttttctgattatttttttcttgtaaattattcaagtttctggtttaggaataaaaactattttaggaagaaaactatttttggtttagttttgaggaaaacagttgttcaagttcagttttgtggtgtgggactcgtcggcttctttggtgatttgctgttgtgaagaggaaaggcggtaaggtagctccaaaggcaaaagtactcggaataaaagaagctctcagttggctacaagtctcattgtttcgctcacactct

SEQ ID NO: 180571 - DNA, 607 bp, Cannabis indica
aataaagaaaaaaaaaatactaatacttgtccaattctcttatagcatttttcaagaaaaactaagactcttgtttcactccaacattcaagaaaacatgattaattatatttattatatttgtatttgcaagaattaatgtacttatagagtaaataaatatgtaaattaaaaaaatcaataaaataacaattagagaaaaaaagaaaaaagagatgcaaaatgaagaacttacaagatttttggattcgttagctttttgaaactgtttgttccatatctcaatagtgtcacaattaatgacatgtaaataatctttcttcgtttttttcttgtctttgttagaaatacgaacacataatttgagataatataaaaattttaaaattaatttgtttttattaattagcatttcaatataaagtgcctacttataaattatattacaaaagtttgagagaatttcaataaatccttctggaggaacaaatatatgagctctaataattattacaagaaaaaatagattattgataaataaacttctttcaaactaaaaaacaagatttacattggctcaaaaaaaaaaagttaaagataatgcaaa

SEQ ID NO: 180572 - DNA, 817 bp, Cannabis indica
ccttggccgccaccctctctctctcttcttccttagaatttcgaaattaccttagtgattagagtagtgcccacacacagcaagcaatacctcaatcatagtgaggaagatcgtgaagaaagatcatcagcaaaggagtttcagcatcaaggattcagagaaagagatccaggttcagatcttgataatactctgctacagaaaggatacaagggttagagatctgaacggaaggagtcatttaattccgctgcacccaatgtaaggtttcttaaactttatatgtgtttaatttatcgttttagaaagttcttatttaggatgttaataaacatacttgtgagtagatctaagatcctggtaaaataaattccaacaggtacaaggtgcaagaccacttgttgcacctgcaactcgcaaccacataaggtcaacttgtcccttgaggaccacaagtgtatctcaggccattagagcctataaatatcccattctcaaatgtgagacggggttagaaaatcattgtaacacttgacctagagaaatatacacttctatgtttctccatagctattctacatttcttattaaagttttcctattttaaatttttatcttagtcttaggtcttacatccaatttcgattttctggctaaaattttgttgacgagttttcaccatcaacatatgtatattgtgaatgtatggttaaacgatgatcattgtgtaggaattatttttatttttcttagaaaatttttaaaccattttatggggcataagattttgtgtatttttatttttttctgaaaaatt

SEQ ID NO: 180573 - DNA, 780 bp, Cannabis indica
tagatctgccaatgaaatgaggaaggagataagatgaaattatcaagaaagagaagaaatggggttagctcaaacacagtacggtgcagatatagagatacagctatatatacacatacacaattagagaacacgcgcgcgtgcgtgtgtgtatgtatatacagagatctgggtaatggtgaggaaagaagataagtgtttgagacaacctttgggaatatatatgtgtgtatatatatatatatagatatggtggaggctgctcaacccaagttcaacctcttcttcactgtgttttttttttgggcaaaagaatgggctttttgcaattcagaatctttgattgtactttttggtaattaaaatggaaaaagatatctttttcgaaattgtctatgtaaaattaattaaaaatagtaaattacaccattttttaaaccattttctttacaaggtgattatacattaagggggatatgattttgtcctattattgtacttttacggtttgtaatctgtgatgtacggaagccgtcagatgagagagttatttgatctgacggctgagattgttctaggagtaattagggttaaaaattagaaacgtacctgacactcatttaatgtaccctgagacctatctaatgtactacggaatacattccgtgaaagtacatcacgggacaaaatcatatccctacattaagacatttctaagacctctgttaacttttttttttaatttacttgttaaaatattatttaatttgttgtgaatat

SEQ ID NO: 180574 - DNA, 856 bp, Cannabis indica
  modified_base (720)..(720): a, c, t, g, unknown or other
gattattgttatagtaaggaattcgattgcaatgcctattgcattgagaaaggctacaaaaatggaggaaaatgtacatttcaattcaaggggaattatgctcaatgttgttgttttaataattaaaatttgtaatgtatatccttcatcattaaataaataaaaggtactattataataatagtataattggttttattattatttctacttttattattttcatatattgataaaaaaaaaatcattttagtaaaatgcatgtaatctctcaagaagatattttacacaaaattggggtattataatgttaacattatgtataatttaattaaccaaacatgcacgtttaaatatcgaaaacaagcatacaacattttgttgttgttaatgtaaatgcttttgtcatgcatgggaaatagaaaaaaaaaagtttgaattctttcctattaaaaaaagtaattattaattcactgattaaataaaattggtattaaggaataatctatattaaccatataatttttttctcatttatctttggacgtaattgaacaatgtattgttcaccaataaattagtgaggatctttattgttgattaatgagagtttctattcaaaaaaaaaaagtttgaattagcctaatgtggcacattacttagtaacttttaaatgatttgtcactggttacttttaagatggtaactagttcttaaatntagtcactgatacctttaagatagtaactagtttgccagatgagaatatttatatttaaaaaaatagatatttgaggtcaaatttcacattgtttttaagaaaaaaaaaaaaacgaaaaaaaagtaggggacgatg

SEQ ID NO: 180575 - DNA, 1111 bp, Cannabis indica
aatagagctggtgttaaggctaacttgttcacatttggttctacagtgagtgctgcagctaatttagcaaatgtaaaacaaggaacacagtttcatgcaatgatcattaaaacaggatacagttcagagaccgaggtttctaatgttctaatcactttatatgcaaaatgtggaagaattgatgatgctcagagagaattttctgaaatgccagaaaagaatgaagtttcatggaatgctatgattactggctattctcaacatggacttggtattgaagctctaaatcttttcgagcagatgaaacaactcggtctgactccaaaccatgtcacttttgttggggttttgtcagcttgtagtcatgtaggtttggttgacaagggacttgcctactttgattctatgagcaaagagtatggtttaagttccccactcccgaacactacgtgtgtgttgttgatcttttaagtcgagctggtctactcaacgaagcaaaaagtattcatagagaagatgccaataaaaccagatgcaattgtgtggaggaccctattgagttcttgtacagttcataaaaatgcagaaattggagagtatgctgcccatcatcttctcgagttggaacccgaggactcagctacatatgtactcctatcaaaatctatatgcaatagcaaagaaatgggatttcagggatcaaactaggagattgatgagagaaaagggtgtgaagaaagagcctggtcgtagttggattgagattaacaactcgtttcatgcattcttcgtcggtgacagactccatccactcgcagataagatatatgacttcttagctcatttgaatactcgtgctgctgaatttggatatgtgcaggactgttattacctcttaaacgaggtagaacaagagcagagagatccaacaacatacattcatagcgagaaactggcgatatcttttggactccttagctctactaatagccgtcgtcctatacatgtgattaagaatcttcgcgtttgtaatgattgccataattggattaagtatgtatcgagattctcaaatcgagctatcatagtaagggatgcataccgttttcat

SEQ ID NO: 180576 - DNA, 622 bp, Cannabis indica
ttttagccccctccaacagtttcataatcacccacaccacgtagacacccaacaacatcttagaaaatataacattattatatattagtgcataaatatattaaattcaaatacttcaataacaaatttaaaaaaaaatacctgagagtatttcattattattaacacgcaaatcaattaaatttggagtaataaattgaaatccattaattggaatctgaatcgtttcttcttctaacttcatgagagaagttccaaccaaaaaaataatcctatactcattggaaagtggtctatattcccctgtgcttttgacaaccttgaaacccttgatactatacaaggagccttcactcaataggttcttaaacctaggaactaaagtttttgtgatggtggcatggattagattttcctataacaataacattattcaataagtataatgtaattggatgaaaaaataataaaaatataaaaaagtttataaattaatattaaaattacctgctcatcaataaaaatcaagttgaggtgaatcaattctccatttttcttagtgttaagagattcccacattcgacataccctaatccttatcatccaaatcttcgattcattg

SEQ ID NO: 180577 - DNA, 812 bp, Cannabis indica
  modified_base (112)..(112): a, c, t, g, unknown or other
acttgaaattgctcgatgcccccaaaaggcatatctgtcacacaacgaccattcactctctaacttctcaaaaactcaggttgcctcgcatcaaacctgcatcaacacctanggaacccaatacaaaaactcagcaacaatgatggacaactttttgccaaatccaactcaatatagaagtttaattagcaaacttctctatctcaccatcacaagacgtgatattagctttactgtaagcaaactcagtcaattccttcaatctctaagggaacctcacatgaatgctgcaactcgaatcctacactaccttaaaagcacccgtggccaaggtctattcttctatgccaattgccctgccattcacttccaggcctttgctgatgctgattggggagcctgccttgacactcgaagatcaatttcaggatattgcgtcttccttggtcgatctcttatctcctggaaatcaaagaagcaacccacagtgtcccgctcattagttgaggtagagcacagagccatggcaaatgcaacttgtgaacttactttgctccacaatattatcaaagatttcaacattcaaccacaacttccctcaactcttttctgtgaaaatttggctgctatacacattgcagaaaacccagttcatcacgaaagaacaaaacacgtgaaaatcgactgctacattgtcagagaaaaagtctcaaatggcagcatcaaaatgaaccatgtctcttccaaaaccaacttagtcgatgtattaacaaaacccctgtttccaattcacttcaatgaaattgtatcca

SEQ ID NO: 180578 - DNA, 900 bp, Cannabis indica
aggaaggaagggaatggtggtgggtggtggctgtgaaggattcaggtttagggttctcatggtgggtggtggctgggaaccttcatcgtggacaaagaaaaagaaaaagaaaggaaggaaaaaaatatattttttttattatttatatttttttttatttcaaattaattttttaatttcttttaaataattttttatgtagaccaataaaattgtgcgacgtgtacactatgtccaatccaacatgacacttaacacttaaaacgaacagaaatattaaattactaacataatgtgaatattgagagttttaccgcctaaatttgagttttggaattaagtgaaactaaaatgaaaatttttggagtttttctgccatttacccctatcaaataggacaaaaaaattaattaattagtaattaataattaatcattgaaagaacaatactttatttatcaatgttacttttttcgttagtgtatacttatgtattaaattttacggaacaagaatcaagcacgtaaaattccatacataaattttcaaacaaggaaatagtttctcattgaaagcttatgtccaacttaaatcccaaaaattgacatattaaatccaaattaagatatacttttttcatagtgctatcaagaaatatacaagacaagagtaggaaggaaaatgaggataaattaacctttgacgtctcgaaagtagagttgttttggtaatctccacagtacaatagcattacatttctatacaagtacaccagacaatgtgcagagggaaagtcgtttaactcacatcaacacatctctaactttcaaggtctttggcttcacaaaattggttttcaaatatccttgagtacctttatgtttctgtctttcattattg

SEQ ID NO: 180579 - DNA, 865 bp, Cannabis indica
attattaattgcttttattttatgtgtttatattggaaattcttattatcgatcccaatgttattataataatttattatacaaataggaataatttccgaaaagaaaaaaaggaatagttagcaactcttcactttattattatttgccgcaacttcctaaactcaaaaataattagaaaaaaaaaaaaaaagtcaaataaataagtgatttaagaaagaaaagaaaaatgaattaaatgaactgcaattaattgccaaaaatatctatttagcattaaatcttaagataagaaattaaaattaaaaaatgggtggagtggagacaatgtgttaaccattaatgtatattaagatattaatatattgtttattgtttaatatataatataagatttatatttattatggcttaggtacgacttccactaagccacctagaatgtctaatattctgttaattaaatatttattattattcattatacaatttggtactttattatatattatgaatctataccttgcaaaaaaaaaaaaaaatatattatgttctatgaagtcttacatctagcaatttaaaaacttagcatacaaacaaacaaacaaaaactttgttagagattgagtaaatattttattaatgctcatattataacataattaaattaaaattattttagtttgataatattcttattttatcttagttaaatacagctaactaaattcatttaatctgatttaaaattattagttttttttttttctaaaactaatttataatatgaagtatttttttaattattttttaataagggtagaataccatttttagatcatgtatttttataaaaattattttt

SEQ ID NO: 180580 - DNA, 820 bp, Cannabis indica
ttattgggtatttttatagtgcatataacactcaaaaagtgagatactatattagtgtattttatatcgagttctattacatttttgattttaataatttaatatataaaaaccgtttaactaattataaaagtgttatatcgatatgatattgagtaccttaaggtacgaaatagcaatgtttatttcttaaagacaagtctcctgatgcatttgatttctgatatctgaatagttattatcttgatttgtagtttttatataaagtgtatattgtagttatataaaatattttataaaattataagaaatttaaaataatttataatatataaagtatgattctctatctattcaaataatttattttacacacattaaaatataagatgtatgtgtgatgtgcataacataattgtgtatacattatttttaatatgttaaattatttttaaaattttcaaagagaattgttaaaaagtactactggtgtctagtatccttctcagtgtcattacgttattagtgtaattaagtattgaatcttatataacttaaggaaatagtttttaagaaataccgttaaccaatcatgaaatgatacatatagaaggtgctaatgctcattctcaaaatattacaaaatgtcttataaaataactataatatacactataaataaaaaaaattaaaattaaaattatttagacaaaacacaaagaaattaagtgcattgatacacttcttttttaggatgcaccacataatttccttaaattaatattattctttctgtagtttatactttttataacacctt

SEQ ID NO: 180581 - DNA, 707 bp, Cannabis indica
agcatgcgaatcacagatagcatccatatattacacatacgcatattcatatacaaatacattctatgctagtcttaccttattttttaaattaagtgtgtcggttgacatgaatggaaaatcacgcattgaacggaggaaacacgaggttctaaactcaaaactaaaagttccactatcgataaatagcatggaaaagccctaaatatcgaggaaacacaagaaaaaactaagaaacgaggatactacccaaaaaacgataggctattttctaaaaaaatggcaggccattttttttgggttttacaccagtaaaaacgataggttatttctagaatacctgtaattatccatataaatcattctatgtggtaaaaccaagtatcactcaaaattacacaatccaccatagttgagccaagtttgagttcttgaactcatatttgctcaacaccaactacaacccttaaatctaaccaactaagcctaagccaacttaaatcaacctcaaaaaacattccctaactcctagggtttgaatagaattgaattataatatttgcttgcttgaaactaaaagaaataaaaaaaaaacttaaaagaagataggttctaaggttcttacctttgattcttactacttgaatttagctagaattccaccaaatttgctccacaaaacccaaaattgcagctggttccttcta

SEQ ID NO: 180582 - DNA, 604 bp, Cannabis indica
cattagagaagttatattgttctgtactggaacaccatgatcttgatgtgtttgaatatgtttccatttttttaatacataataatctatggttgttacttgttaccactacctcctaagcataagttatttaatgggcttcatacaatgcctttatactatagaggctgctcatttcattttctcgattttcatgtattcgttcaaacttgaatatatgtagctgtactctttactgtatcctgtacatataattttcatattctgggtctttgcactgtaactgagttgtctatgagttcttttgtacccttattcgatgccatattctttacttggatttattttctaccatcgagtacgttcatttccatatgattagcattttacaactattatttctcaatagcaatttacatttaagaggccttaacttatggtcttttctgcagccattttggccagttgtgagttatgcagacagtaggggaaggggagttgtgggtaaggacctgctacctctcacaatttttattggttttcatggtcaccagaaatgtatgaatttataacttatttcttttatttctttttcaggtgtgct

SEQ ID NO: 180583 - DNA, 773 bp, Cannabis indica
atgacacaaatcgtaacatggcatgaaaatatcagacctacgggccgaaccggacttattctttaaaaatgttagtacgacatggcatgacttgtatttttttgtggcacaatatgacacgacttatttttcaaaaaaacacgaataaatataggctggactaacatgagacttacgaacttagaatactaattgcatatatgattccataaacacgtaatgggtagtttagtacatatcaagttttttttactggtaaagttattttagttgcgagagtgttaattttattttattaaaaggaaacctacaacttaaaaaataaattttaaagaatattattaactaattgtgggacgctatctataaaaagtgttgagcattatttctactcaataatattattctaaataaaaattgttaaaaaatattattaatgcttaatatatactcctcaatatcatattacaattaatagatataaaatctcatataacttaaaagaaaaattaaaataatatcgttaacacaagaggttgcttataaaaaatactgaatagtggtgatcaatagaaatactcctcaactaaatatatttaagacattaatataaaatgtagtatttggtgtgtattgtgtgtgaaaggcgattagtattagtgattatggaggtgtgtaaggaagatgagagtgatgagtgtggtccagcatggcacacatcggacggctgcaagtgggccgagtgccacgataaatccaacctagaaagcatc

SEQ ID NO: 180584 - DNA, 598 bp, Cannabis indica
tatcattaccgtttttgtaccttgttagtaaatattatgggtttttttatttttacacttcaaaacagttttttttttgtatttttacgaaattttacatagaagctcctattgcaactagcgctgcaagcctgcaacctaaattgcaactaaaaatcgtacagaaacctctattacaactagcgctgcaaccactttaaaaacccaaactgtaaatttgaaaaaaaaaaaattaaaaaaataatatataaaataattctcctaaatattatcattaggttttatataatattgtatgtcttaatttaaaaacatatataattttttacttattatataatttatcttttatattcataattttatttgtttttaaataggtgatatgggagctgccttgaccccttatatataattttgtaattgttttttttttaatttttctttataaatttatatattgactgtctttaattgtattattatatattattattgccccttttatattttgtgcttgtttttgttgactactccgttcctgatggaaaatatacagaagcagtaacagaaataaatataggagatgtgaatatgg

SEQ ID NO: 180585 - DNA, 553 bp, Cannabis indica
cacgataagttgatgcatgttcattattattattattattattattattattattttgctacaataaaaatggatttatttaggtgttaatggtatttatcttgaaatgacctgattttaattattaaccttacataagtatgcaatatattgacgtttacttggggtatagtgtatgcaatttcaaattcaattaaataaattttgaagtgtatattcatattttccacccgtatcagttcataagatttttaatcttttatcaaattggtatttaatcatttttacaaaaaaaaaaaaaattagaaacttctcaaatattttatatttcttaatataaggcaaataatatctagaggaatacttataactacctctggctaatacattctaacgtcgatagctagcttaagcagttattatgctctctttccctttggagagaaggaacttttgattatttttaacttctcgatatgatttgtagacatgtaattcacccaggtaaatttctctaaaggtcacatttagttagtctttgaattctatcata

SEQ ID NO: 180586 - DNA, 531 bp, Cannabis indica
attatggtatgtttgtcaggatacttcttatgccttaggatactccttatgccgtagcactgaatagtaaaatacaaggacaattcaaggtgttaaaggcctcacacaaatatcccatctctcctcttctatttgttctaatcatggagtttctaactcgtctgcttaagcaacactctaaaaacacaaaattcagataccattcaatgtttaagagtatttagttagtaagtctttgttttgcagatgacttaattgtcttttgcaaaggaaatgtgccttccaagaatttagtaactattcaggtcttgtagcaaacaagagcaagtcaacattctacttcgttggggtgcaaaatgaagtgaaacaagccatgttagagttgctgccttttcaagagaggtcgttccctatgaaatacttgggaatgaaccttaacccaacgaaatagagattctcagattgcaaggtgatctttaaaaaaagcttcagttgaagcttttcagtacgtgggcaagtcaatatttatca

SEQ ID NO: 180587 - DNA, 812 bp, Cannabis indica
atatatgtattgtttagttttctacagaaaatcatgaatcatgttcgtgtactgagattgcttctgaatatatgaatatatttatatatgtgtatgttagatgtcaaaaaattattcgtttttagatgatctatgactcgatctctctgtttatgagctcaagttatttataacagtccacaacaggtaaaattacaaatttacccgtacgctaataccagtccaaactcttaaatacaatacgctaactactttcagttacaatcaacaaccaaaagtttaggtggcgtttggtaacacttttttaatcagttttctgttttaaaaagtgaaaaagtgaaaatatttttcaaaaacatgttctataaaactgtttttacttttcaattttataattagaaatcaaaattttaaaaaaaaaaaaaatcactttcaaaatttttttaaacagttttttttcttaatcaatcctttggattacaaccagacccggacccaaatcccctcctcacggccttggcgctgaacccggcttctgacccgaacccgaatccaaccccggatcttgacccgacttaaataaaatcaaaaaaaataaaaatgaaaaatgaactttacagaacacacttttgttttctgtttttaaaattgaaaaacaaaagtggttacagaacacatttttgttttttaaaaaataattttttaaaaacaaaaattttactttcattttgtgattaaaaaattaaaaaacaaaaagtgttaccaaacggcaccctagataatcgaaagaagaaaaaatacagcttagcact

SEQ ID NO: 180588 - DNA, 1322 bp, Cannabis indica
gtaaacctgctacttcatagatattgatataggaagataatcatattaagccataattcaatagaaataattgaaatcaaatccctagttttattaactgttaatttccttaaattgtttctctttcactgtttttattattttcttagattttttccattttttaattttattttaaccaaatagaagtaaaagtgtaattttaatgtacttaactacaatccccgtgggatcgacctcactcttggtgagtctattacttgtaaacgatacatgcacttgcgtgtgcaaaatatcacaacaattggctgtcgggagctatttgttaacctcacctagttattgactcttatgctctgtctcctttttagcctcttttgcctcctttttcaagttggtggtgctagttgtagcttttaaggccgtagacttggcccgtgagtatgtatatgccattttcaggttgagctacacaatgaagtaaaattaaaagtctacagaaataaaagcatgtgaaagaaaaccaaaggaaaattacttactcagtggattcctttagcaaactgcccatgagaagctccacaaacatatcctcccctccggccagctggtcgttcacttcagaagcactcaatctaatagaactgaagcatctccttccccttcttagtctctaggttcaggatagtaggagttgctaaaggcttgggtagtccaagcccatcagtgcttcctccctttgaacctttggacggggcaaccatagactgagattttgagttcttcttggccgatgggtacatttgatactgcttcctcgtaaacctcagttggagggataaccaagctcttctcaacaatcaactgaggagtcttggtgtgggggatgatgctcttgggtggcatatcgtccaccttagagagcttcactggagacttctagccggaggcatcaccagacctcttcttcaatgcacacaacatcctctgagataaagctgcacatgagtaaaacaaggatgtcagaacaagcatgaattaaacaagtgtaaatgaggttaagaacaaaataaagtatcctacacatgaacaggggcaccttctcaaacaagtaaagaaggggcatcttcattagaagagtcctcttcctcttgcttgaccacaatggcctttccctttccttccacctaggcggaagattgagcaaccttctcaggattgtctctgatcctaatagcccgctcaataggtacttggtcaccttgaggaaccctcctcttcttcttcttgcttggagcgtcctgttcagatgtaactcctcc

SEQ ID NO: 180589 - DNA, 498 bp, Cannabis indica
tactattcatccaataattccaagagctatcgtctaaactaatattagatagttttctaactttttttttttgtaaaaggaattcattaatcagaaacacgaaacaggattaggcaaatcaagcaaaatagcttgattagtacaagagggatttaccccaatccacatggcgctagctttgtgaaccaaatcataattggctaatacatgagcaattttattggccttgcgaaatacaaatgagataccaaccacattatcatgagacaataacaatctaaatttgatctaggagacaatcaacatctcggcagccatcctcctttttttggtattaattgaatagcttccaaacagtccgactcaatgctaaaccgttgtatatgtctctgtaacccagcttgtatccctctcaaaatagccagcagctccagttgtaacggtgagtgttccctgggcagagaagtcgacgaagcaaagatcacttcaccatgttct

SEQ ID NO: 180590 - DNA, 541 bp, Cannabis indica
cacgaccttggggtatgaattccatcttgagtttctcgaatcttcttctaaataactaacttgtttggactagaaacaacattgtgggcaggttttttaagattcaagtttctaatgatcagccattgtgaattggtatatcttattagagcactttcaactgttgatttacactagggatatatcttattgctgatacttttgctggtgggcttgattttgatttctctgaatgagtttttttatttgtttgatggtgtcctagctttggttcaaactgattggtttttatactgcacttgtctcggtggagttttagacttgctgatagaagttcgtttggtagtgatatatcaaacatttgtgtattctctcttcttttggatggttttgtttgaaagtatatttactttttgtctatagttgaaatatgtgtattctctgttctagatggttttggtctatagttgaaatttgtgtattttctttaaaccaattatatatatcttgataactgcatcagtgatttaaaagttattta

SEQ ID NO: 180591 - DNA, 864 bp, Cannabis indica
attaatactaaactcaacgacgtgaattgttttgtaactactatgactatgctataggtgcaatataatttttggatgtaaaccgtgatcaaaatgtaatcatagcagatgacagctgtaaatagagagatgatgttctttttgtaaaataaactcaaaactaaatagaatgcgacttatatacttatttttatagtttgatatagctctctccaaaaaacaataaaaaaaaaaaaaaaaaaaaaaaaaaaaaaaacgaagaaatatacattaattttatgagtattgttggtcccctccacctctacaaaacttaatttggtcctcctttctttgctcctatcctagtgctgaattgtttttttttcttgaaaggaaagaatgttcattaaacaaagaaattaaatctcgtaatcattacacataatttttttaggaattgacacattaatcatacctgtaagattcttagaaagaactcacctaacaacattgtgagcagcaaaattatatagtctcaaaataaaagtaaaattacaatccaaaaaactacgtgataatttattacaaaaaaatacaaaattatcaatacgctagttagatgaattcccaatcaaagctttgataataattttcgaattgctctcaatgataacaaaattgtgcctccatgcagttgccatctgaagtgctagcacacaggcctctgcttccccaatcaagggattagagtaggcaaaagacttagaagcaacccacaacatagttctcgcatggtctcgagccaacgctacggcacacatcgacccactccccacttttacatcataattaatcttgatccaatcatcaggaggaggggac

SEQ ID NO: 180592 - DNA, 573 bp, Cannabis indica
agagcgcttaaatcacataacatagtttttttctttctcataacgatatttattatagttataacatatataactatatatattttaaaaaattctaaataatttagtgttaaaacaactacttcgtctaacaaattgtttaagactatcttttacgctataaagtattcatttccaaatcgtataaaatgtttgctataactatattaagcgctacaaaaaacgatcaccataatatttctgcgcataaaagtggcgtgaggtaccagtagaacatcaataggacatcaacacaggtataacatttttacatgatgtacatatgcattataccattctaaaaaattaagggaaaaaataatgagttaataagttgaaaaaccaatcccctatcttgcccaccattcatcctaataataataatttttttttgatgtatagataaatagattgaacgtgggcgtttaaaaaggaaatgatgatggtaaggtttttaaaacttttaaataatttataaaatcgaaaatagagtttaaatagcttgttcttggcttaatttctatatgcatgtaa

SEQ ID NO: 180593 - DNA, 746 bp, Cannabis indica
caatcaaaaacataaaaagtattatttatttacttttgatcaggctcagcatgagagggcggataataatgttcttagagctgagaacgaaagtatccaatgtgaaaatattgcaattcgagaggcactgagcaatgtgatctgcccttcttgtggaggtccgccctttagtgatgaagatcgtcaacacagtttggaaagacttcaagttgaaaatgtccacttaagagaggaggtatttatatatatatatatatatatattccttttatatatatctcttcatatataaagtgtggttagttaacaaatcaaagaattaagtcatagtttttggaacaaatttattattagttcttttgcttgaaatatttatatttgaactaaatttttatattattttgatttgggatagcatgaaaaggtgtcgaaccttctggccaagtacatggggaaaccattaccagaaatagagaagctggtaagtacaatccctggaagtacggatgggtcctcgtttgacctacttccatctgctgtaaggtcaggcccatcatcaagcaccccaaacatggaacaagaaaaaactgaaccaaatcaaaggtatcacagagatggaaaggggagttatggtgaaacggcagcacttgccatggatgaactattaagcttctcaggattgatgagcctttgtggaccacggcatcatcctctctgtgcccaccactgactcatggcgatggtgg

SEQ ID NO: 180594 - DNA, 524 bp, Cannabis indica
aaagaccaaatttataagattatgatcatccataatcacaagttcatttcactacaacaaatataattattaggggcgactttaatgacttttcgcccctaaaaagtcgtctttaataattcgcaactaaaaatgctagtaggagcgaaaaaatggttacctgaaattagaggcgacaatgtcgtccctaaatgtagtacacgaagtttttatgtttatttttaggggcgacattaatactcataaagttgtccctaaaaggtgttgtcataatagttgtttttgacttttaggggcgacaatgtcgttcctaaaagtttttaaattaaacaaaattatattatttgatatattgatttttaatttataaaaaataactataatcacaaataaaataaaaattaataattaatatcaaaatgtaaatttcttgattaacatagcacaataacataataaaattaaatagttcttataaatataatattaacaactaaagaaaacaaaaaaaaaaaaaaaattat

SEQ ID NO: 180595 - DNA, 678 bp, Cannabis indica
tatgaacatgagtaggtgtgtgtgccgctattactttacttctatttctaaaatttatttttagttttttagattagaatttcaaattataattctaatttttttaattttatgtgtaatgattcggtggaatgtgcttatgtctaaccattcctaccatatttgaaaagttttcaaataatttatatgtgcaaatgattatttaaaatgttttttggccataaatttttcgaaatatgagaaatatgagcaattttcacaagtgatgtcattccctaataatttccagaaaatttaaataaggaaacctattaagttttattatttgtatgattaaaaatataaaatgctttcgaagtagacaacaaagtgttattaattaataattgtgacggtggtgtttagtaatatttttattttttaaaatttttaatttataaaagtgaaaataaaaatgtgttttataattattttttttaatttttaaaaacaaaaaaagacaaaatcatgtttttgtaaattttatttttgtttttttgtttttatttaaatgagcaataagaaactcacatgagagaaagtaggtcagggtccaccatcagggtttggagcaaggagcaggggtcaagtttaagtttggggtctatggtctgggacagggttcgaggtctagctcag

SEQ ID NO: 180596 - DNA, 1349 bp, Cannabis indica
atctcaactaataggtaaagcatggcatttttctagctctttgtctttgtgtataggactgtatatgcatgttttggttgcttggaggatatgaaatagtaattatgtcattcttccaataaaaccatccctttgaattttccaatcaatgtgtcttattattaaatcattaaattttgtagttatggtgtgccaaagatgataatccggtttcatattttatgtacagcgactgtgagacatttatttctgcagatgaccttaggataaacttgtggaatcttgagataagtggtcagtgcttcaacattattgacatgaagccatcaaatatggaggaccttactggtacttgtgtcatcctttatttaatttgagaaattttgtggcattttttcatctcatatatgaaagtatggtcttcttttgtattacatttctaattcttccctatgttttatacagaggttataacaatagctgagtttcatccaattcattgcaattttctcgcatacggcagctcaagaggatttattcgcctagttgacatgcgtcaatcagctttatgtgatcacagtgcgataatgttagtgttgtttgattcatgattaaattgttgtttgtgttgcaactttttctgtgcaggcctttccagtatgcttactgttacacttagtgctgttataaacttatcatgtgggttgattttttacagattggaagatggaggttcacgcgggtcgaaagtcatttttcacagagattgttgcatccatttctgatatgaaattctctaaggatgggcggtacatcttaagtcgtcgattacattgaatctaaaggttctcttcattgtgacactttaaagtccatactatacttttatttttattactttttttagaaaaaaaattagaaataaaaattaatgattggttagatgttattatttcttttcttaagtcaacatagtcctcgtatcatcgtaattgtagtgatttactacagtaatttctatctttttagccttgaacaacaaatttagtcttctattaaaatggtaaatgcaataaaattatggttggattttaattgttgcaagaaaatgtgtcagattttttaattcacaaaaaataccttgggctttcaaaatttgcagtgaatagccattatgttctagaaattgcataaaacacttggacgtttcaaattttgtttggaaatatctcgtattgtcaaattttgctagcaaatgtctcatattttaaaaatttcgcaaaaaatcaaaggtataactattccaaattcatacgtgatgatgatatgagagatttttgaacactttt

SEQ ID NO: 180597 - DNA, 631 bp, Cannabis indica
acacaaaataataaataccaatgatcattgacattttgaaccaaataaaatagagaaaatgcaatgattcaaatgtgtcaaaactacttcgattttgatttggtattattgcatgatacgggcttagcagaagagaaatgagttcaccacaaaaaggtttccaaattacaatatcatttagcaaaatgaaaagagataataacagtcatatcccaactcataatccacagttacaagattgcaaaacaacccaaaatatcatgtaaacagaagaaaatggtcacagaacctatgtaaacaatgacaacagaaatactcaaagcaggaggattaacagaaacaatgtaaacatgcaacttcatcacatattacaaaaatggtcttctaaaatcacagtgtaaaagaacacttcaatcaaatgtcatcactggaactaagaaaccagacccacgtggctattcaaagcaagcttaataatcagtacaaagtaaattatataaatgtatatgtgagcgatagtgataccttcaaactcgagaagaacagcaaactcgagaacacgaagaggaaggcgaaggactctccagtagccttagaagctctaatgggcgaagaggatgagaatgattca

SEQ ID NO: 180598 - DNA, 1010 bp, Cannabis indica
ttatatttcaccgtctggtttccaaagttaatttttgattgttttcgtcccttgaaggatttcggggtagctgatatatttgggtgtttcttcggaggcctgcccctgcgttttttctcgctagactcctcagaagtaaccacagccttacctttactgcgacccctgcttcccttgctactggtagagccttgttcaacaatcaaaaccaggttagaaattatttgatggagggagaaaatctaattccacctccactcctttttccactttggcaaacccatggtcaatcggcttctccacactttctgcagtgacttggctatccttcaatggggaagacggtttggagtgatcgtgagagaaagagcctttacttggggatgggttgaaaagaagaccatcagaagccttgcgtttttgaggcccttgagtatgttcatggactctaaagtcctcaatgtcaagtattgggctaaagagggtgggctccctatagtacttgtccaccgtcaaagactcaaaaaacagttcgcgggcttttgggtcggcccaacaatcaatagatggccagtcaataaaaactggcctgggtacccagcaagtggattgtagacaagcttattgggccccagattaaagtcagatttttcaacttgaatgggcttgtccttatccgtgggatccaacgggttctggggatgatgtaaagggtgtgtgttgttattaagggatgggttcagagataactttacattacctttatttgtatccctcgaactggaaagattgccattatccgtctctttcatcttctcattcatctcagcagtggccaactccccacttctatccgtcagagccgaccccgaagcctcattggccatgtccgtttttgcatctggagccgcctgttgcaggtcaaggcaaagccattttgaatgtaccaatggggcaaattctcctatacccggtaggtaaaccaaaggcatctgtgtaataaccagttt

SEQ ID NO: 180599 - DNA, 703 bp, Cannabis indica
acttcttatgcagaacttcattatagttttcttgccttctccaaccccttctttggagggaatctggaagcctcctcctcaggattggataaaattaaattgtgatgtcagggtaggcttggatagtatgtgcattgcggtggtagctagaaaccatcagggttctgtggttcggattcacacggctcagttagactttgtggacgccttatgtggagaagcagcggcttgttgttcagctgtctctttggctcttgagcaaggtttcaagtatgttttggtggagagtgactccagaatagttatcaatgctctcaatgggacggagtctcattgggcgattgagaactatgtctccttttgttctacatcctctcccacttttatttgttgtaattttgtgtatgttagtaaaacttgtaattttactgctcataatgtggctaactgggcttttattcacaaattgtacggttctattccgattgaatcggttccggtggaccttttatgtaatgaccgagaggtctagtttattttcgaatgatatgaacacgcttattttcaaaaaaaaaaaaaaaaaacctattgggtaaaacacagaatttaaaaatgtataataaaaacttaattgccaacgaataaggggactagagaatgtcatggcctatgtaaaaaatttattaactcaataaaaaacaat

SEQ ID NO: 180600 - DNA, 530 bp, Cannabis indica
actaagaacaccaatataacaatgcgaaccatctagagaaacccgtatatgtagagagaaccaaatttgatgcttaaaacaaattggaaaagcaaatccgcataacgaaaaaaaacagatattaagtattagtgaataatagaaagggtttgcttactattactctaacatccaaattttctaaaccattttaaacaattggaatacacatactgaaaaatacaaaaaacaattagaatagaatcccctcaaacatgcctgttttcacatgaagccaaacgatcaagcaactcatttaactctctgattgttagtccaccagacgtcattccttgcctacgttctagtacctatgtcacaaataacattgcagaaaaagttctttatatggcaaaggcaaacgataattaaaagtaacaacacaaaatggaactaccaatgaaaaaaaaaaaaaaaaaaaaaaaaaaaaaaactacatgtgaaaatgttaaaaaggggttttatacccagaaacaaagaggaataatttt

SEQ ID NO: 180601 - DNA, 762 bp, Cannabis indica
gctaaatttcattcataacctcacgtatgatatactattgcaaatacaacgactaaatattgacaaaaactaagaaaaccaaaagaaataaaaatacaaaaaacaagagactgcgagagaagacgacagtaggagcttacaaccgaggttaaggtctgtgtgttcgatggcagtagttctgagctaggttcaatgcaagaagtgagagagttagagagattaaagttttttgaaatgtaaggatggttttaagaaaaaaaaattaaagtataaatatattatttctaagttgggtggatatataaaaacccttgttttacatttaagcataataagccagaaagttgaaagataaaaaaaaatattagtaaaattataaaattatctttctaaatataaatattagtcattttagaagaataattattgtattattattattattattattattattattattattattattttgaagagttaaatttttaaattttaaagtttggcaggagaatgtcaccctccttcattcttcttgtcaaacaaagaggatatgctatttcaaaaaaaaaacatcattaaaactacaaaatttcaagaaaacaaagattaaaattaaggaatcaatagagaaaaaactacattacactataccatactatactatagatagaagcatccattttttccaactcttaattagtccatgaaaaaaaaaattgttaatttaaaaaggtaaaactaaacaagtcatacattttt

SEQ ID NO: 180602 - DNA, 771 bp, Cannabis indica
atcctcaaaaattacacattgaaaatagtttataaaaaaaatatgaatagaaattaagcttatataattaattcaatattaaaaatatattttaaattataaatttaaaatctattcatcaagttattatgtgaattttggaaaaattgctatagcaaaatatttattttacatatcatgatggtattttttttttttccaaaattttatttttaaacaaaattgacccaagaattaaacacaacttaagaaagattcataattttataaattaaaatcaaacaaaaggtattatcataaaaataaaagataccaacaaaaagattttttaaagatgaatatatatatatgtatatagaaaagaaagcaaataaatatatttttaattttttttactagaacagtcataaacatattttttcttgtttttttatataaaaattatataatataactactttagcatccaaacaacaaatattttttaaatgaaaaatactctactttttttaagcaaatgaaataaataattcaatgaagtaatcttggaggggtagcatggcctcggacataaggtgagtctggttccaggccccgaagccattgtagttatggtttggcgtctcctcgtcccttggaagatggtggtacactccagaacctaagggcttaatccaaccacagtaacaaccttttgcagttgatgggcgtaggtcaatgtcgaatgagttcgttagcctccacctatggaacggcatgtgaacttcttgt

SEQ ID NO: 180603 - DNA, 884 bp, Cannabis indica
agtatgtttagagagtcattagagatgcataatttaatgtaataacttttaaagagtattgataactaatgacaaaataacaggtttagaaaaatgctaaagattacttgtgtctaataaaaatactcttaatatataaatgtatagtagactaatgagtattgctattggacatctctagacatgtcgctttacaataattaactagcaatactccttaaaaattattatattaaattatataagacctaatatttaattaaactaatagcaatattaactcatataaaactaatatataatacattttagcaaatctcatatactaatagtggggtagtctcttttacaataaaatttatatatattatgagaatggtagttgaacaatcaaatcacttactaggcttatattttttaatttattcaatggtgggcgcaaaattataggtgggacagaagccaaacaaccttttttttttttttttgatgaaggccacaacctttttatttaaaacgtcctttgcatgctttttatttaccaaaaacaacaattccatagagagtaatattttgttacaagtccactaatgagattggaccaaacaaaatataattttttatttataaagggcagagataatatatttaatatagcttgattgattagcaaaattttattttgagtactatattagtattttattttactttatcaataatgtgaatatatagattttgtttaacagaactttttttttcctttattaaatttaataaaaaaaaaaacgtaacttcctactctctggctattaggttagttcctttgagcattgtgattggggcgtatggcgagagaggtccaaggacccacgaaaaggggg

SEQ ID NO: 180604 - DNA, 589 bp, Cannabis indica
attgagaatttcttgtgagattccgacgacgagatgaacaccgaaaaatggtgtggcgagattccgatcttctggcttagaatcaattgaaactttttgaaatcgagatcgggataaacgaagacgtctatattcatatcttttgtaaataaataaacaaataattttaaaaaaaataaatgaataaatattcaatatgtaacaatccactaaaatagcatgtgtctcaatattataaccaatcactattccaaattctaagagtgcatgaatgtgaccaatattagagtgtctattgtagaactaccctaaaatatataccttttatttattttctccttaattctctcatttttttttaatttatttatctctaaatttgtcactaattttttgctttgtttttttattttttgctgtcacgacttcttcttcctttttttttaaaaaaaaaaaactttaagatttatatatatatatatctacatatttttaattttttttacttgtatttgttttgattcaaaattctgctaaagtttataactttgaaaaaagtgatcggctaatgattaaagccataaatgtt

SEQ ID NO: 180605 - DNA, 497 bp, Cannabis indica
tgatgttgatgatggagtttcactgattggatcaagaagtagagttctgtttttgtttcctaataaatatttatatatgagatgataagatgtgacattaacatatatgaatatttcatatatatacatgtgtgtgttctgtgttcacatatatttaatgtacaatgtatttaatggcatacaatattactatatattcaaattttgctatttacacaaatgatgtgaaattgagtcaggtcaactatatatggccaatcaaaatgaaagaaaaaaaattatatgctatgcaatcaaattaattaaaagtaataaatagatgttgtattattattataagtttttttcatttttatacttcaaaataattttttgaattttttgagacttaacctagggagaattttttgagacttaacctagggagaattataaagctagccccccccccaaaaaaaaaacccaaacattgttggcctactgctacaaataaaaga

SEQ ID NO: 180606 - DNA, 569 bp, Cannabis indica
aaattttgtttgacttttttttatttgagtggaaagttcaatttttttttattaaatatattagaaactagctaaatgattactttcgcaaatactaaaatattcactttaaagttataaaagtgaaaaaaaaagtacaagaaataaataattaaataagacatacattacattaacataacaatatctctcaaaaatattaaaaaaaaataaataaaaacaaaaacaaatagcatgataaaagctagtaaaaaagaacctgacaaaaaaattctcaatcagaaatttttttttaaaaacttgacgtgttgccaattgtgtcacttcattcaaaaaaatgaaaagataaaacttttatttcagtagacataatataaaatgattacaaaatactctaaagtacatttccataaataatttaaaaaaagtgtaatcctcaagtaattttctctattattaaattttttgatttaaaattattaatatattttttaataacatagaattattaatattaataatgctattattagttaatatacgtctgttgtgataatgttttttaaaga

SEQ ID NO: 180607 - DNA, 732 bp, Cannabis indica
cttggacaatattttgctcaaagaagaaattttttggaagcagcgatctagagcaaattggctcaaggctggtgataagaatacccgttatttccacaatcgagccacttccagaaaacgaaccaacttcattaaaactctcaccttggatgacaattcccaaatcaccactcttaatgacatcacgacctcttttgttaatttctattctaatcttttcacttcccaaggctctaatactgaggcgatggcctttgctatgacgggtcttcctaaacacctttctccccaacagcatgcttttctttcttcccccttcactttagccgaagtcaaagctgcccttttccaacttgctggagacaaagcccccggtcctgacggcttgaaccccacctttttccaaaaaaattgggattcagctggaaatgacctctgccaggctgtcttatcggccctctcttctaacaccgacttagctccggtcaatgaaacctttctggttctcatacctaaaataaaaaatgcgactagagttaaggattttcgcctgatcagtctttgtaccactttttataaagtcttttccaaaactcttgctaatcgtctcaaatccgtcctccctgatcttatctcccacaatcaaggcgcttttctgagtgatcgcataatcttcgataacatcttcattgccaatgagattgttcacgcgatcaatcatcgcaagactgg

SEQ ID NO: 180608 - DNA, 646 bp, Cannabis indica
tttagttattgacacgattaataaatgggttgtttgagtttaatatttacttgtaatacttaaaacttaacacgacacaaacacgacctacaaatatgaatcgccaccctaaaattgacccctcataaaagaaaagctcaaacctgagtataggcatgcctttgtttttagtatgtgaaaaattataatcaaatttattttactaaattgtagttaaatagatatttttactaattttttattttttttaaaaaaataatttatagtatcgaaaataaactttagaataatatgttgtgtttcatactcatatataatatacttcaaaaataatgcattttcagcataagaatgtttaagaatctctcccacaaattattggaaaattcccaatgattaagaaactcatgtcctctactataatcaatgatctcaaattagtcctaattaaaggtcaatatttgttaaagttattattagttaataattagtttctaaacttgaattatgtaaattatattataataatattcttaatttttgtcaagtcgtcaaatcaattaataatttgctcccattcaaagcaaattatctacaacaaaaaatagcttgaataattaaggctcactcatcacagctcatataa

SEQ ID NO: 180609 - DNA, 749 bp, Cannabis indica
acaggtgatattgaattgaatagatattacggtaaattttaatatatctaatcaaagttcaatatcggtcccttccgatgtatactccatacatccgatactggtaaactttgccaatgccctggaaaggacataacacttatccaaggtgtaagaatacctatcgctgattatcatgtcagtctaaatccagtgaactgacaaatcagggaataaactttcgaacatataattaagattatattccactgtgctgacaacactataatcattaacaaattcatatgttctggacttaaatagaattcatacattatatgtatataatcatgaaataaatcatgtgaaccatgcaacataaaatgttatttctgatctttattaataagtaaatctgattatattgaaatgagttttatttagggcacaaaacccaacaatgagtccccttgtggtccgcatattcctgtcctaatagtcctactgaattgtaatagctcacttagcaccaaggttccagggggtggtagagagctgacaccaggtactcccctcttaaggagcattctaagcttttagccattttaccaagaacatatatgattttttttttgttagacatatgttcaacaccatataccaaatcacagattttctcaaatcgaattctaccattgtattcatagaacccgaataaagttgtgaatatcaaatcctaccccgacttcagacacagatatttataaaaa

SEQ ID NO: 180610 - DNA, 845 bp, Cannabis indica
taattatgtaaagaaagttatatacaattatcttcaatttgccctccaaaattgattgcaatagtctaaatattaaataaaacttatatatatatatatgattttgtcctgtgctgtggtacattaaatgggtctcagggtacattaaatgagtatcagtgtacggttctactttttaatcctaattatcaaataactctctcatctgacggctgttgtacatcacggattacaatccgtgaaagtacaataacgggacaaaatcatatccctatatatatatttgattactgaaaacatataaatttattgtaatgacaatctatctttccacaaatacaatgcgtgtacgaaaactcagctttggtggttggaaagttacgaatggcatgttgtaaaaaaaaataaactcagttaatttagagagattataaaaagctggtagagtggagttgtaattagatagtaaaaaaccatataataataataataatagtaaaaaaaaaaaaaagactttctgaatagagttgtaaaaacgtaaaaaataaataaataaaataaacattcctgaaaacatacattataaaaatgaaaacttccatataattgggccatatttaatgggctagggcccatagtagagggccgaagaatgaggccagaagcaaaacagtgtgtgatggagaagcaaaaaacaaaagggaaattatagtgattattgaaaataaagttttaataatacaataattagtaggctttaggttggacattcatatattggatctaactaaatataaaaattgatatttttataatgtgcggtgcagtgtggtttgaaccgcata

SEQ ID NO: 180611 - DNA, 665 bp, Cannabis indica
agagagagagagagataggaaaaaagaaaaagaaaaaggaaaatagatcttgacctaactttgtgtttccttggatgtttaatcatcgatgaggaagacaaagagacttcgaatcggagggacgatcgaggtggagaaaaaaccacgaccgatcgaggtgtggagattaaagtcgacaactggggtttcggggcatgaaaactcaaatccatggagctaagtcgccgtttgccggaggagagatgaacggatgttgcccaaaacgagaagtagaagagagacaatcgaagagggagaagagatgaatatccgcctctctattttttagctaaatgatcaggtttctttcaatgtaaaccctaacactaaataccttttaatttttatttttttatggaattttttttcaactagctagtgcatgcatgagaataaattaaggataatatactaaaaatatttattttatatcaattattaataatagtttttttaattaatgaaaataaaaaaaattaaggtatgatatagtgacacactttgtgggttggcacacatttatccaatcacgcatggcgtgtcacaataggatagctttttaaataaaataaatattaaaaaatttagaattttactatttagttgacactccatatttttagttg

SEQ ID NO: 180612 - DNA, 831 bp, Cannabis indica
ccctttatttaggctactccatgtatatgccttcttctagttccccatgtaaggattttgttgtcacatccatttgatccacttccatgttaaattgagtagctagggataacataattttgatagtcttatacctcaccactggagaaaaaaaaaattagtataatttaccccttcctctgtgtgaaccctttagcaactaaccttgctttaaattttactggatctcctttgaaccttccattacaaattattttaccaggatctatatttactaacatgtatgttgattataattttataatctaacaacctaaatatgaataaacttaaaacgatgaaataaacacataaacttatagaaaatcttacaataatggccgtgaaatataatgtctcattctgtttagttttcaaatctgtgatcctttctgttgtagagtatgatcaagaaattaacttgaatcttctcctccttcaattgtgttcatcacagtcttccacaaaggcctaagtatcaacttgaatagtgttgactgatactcaaaccacctttgaacaatttagagagaaaatactataatgaattcaaaatatagaagagaagagagttgtctgacattatgaaacttaggttaattttctcttctcatcacttttttttcatataggcattcacttaggattaggtttagatgaaatgaccattaaataaagacttgggttgaaagtctaactctaggaccaaattcctcatggactttagagtttagattttttgccacttttattaaaactaaaggtagtcttttctaattttactacttatct

SEQ ID NO: 180613 - DNA, 1023 bp, Cannabis indica
gaagaaaacatttggaaggtagaaaatagaagcagtggcatttttgtctccctttggaaatgtactatatccaataaaaataataataatactatattacaaataattccaaacaaacctgggcacaaaatagaggcattcgctggctgttattaagattcaaagtaccactttcctactactgttactactactatacttcatcatcagatctatatataattcatgataataactcatcacttttttattactgtaattatatatataaatgtatttttctttcttgggaaatgttatattaaaaaagaaagcttcaagttcagtagtgtcctatcatattctaagcatgaaactctcaccttagtcagctctgctggagcagtagaagatatatagttaggtcatcaaattcactcatttaaaaatttctattaattgttaaaaaattactaatcatcaaagtcaatgatcatatgatatgggtttcacatccttattatatatattattcctgaatttttgtacttgcacttgtacaaatcaacaactgctgttagtacctttttcaagaaaattttttgttcagtaactaaaactaaaaattcatctgatctcatctagtacttaatttgtacttcaaacaaacttaccattttttttagctaaaggttaatgttaattactatatcgggaaagctgaaaaaactgatggtatcaatatcatcaactaactatatcttagttagaaaatgtcacatgatttatgttgtttttgcttgtcttacaattttttttagagaattatgacactgattttggtctatttaattattaaattatattacttattctttaaaaatattttctcaaaagttgagtaattttagcatgaagcttaagtctcacctaatgtcatcttcatctatactattattttaaaatgaattttatttttcctttaataaataaataaactgcacaagaaataagctgttattctgtacacataattagattttt

SEQ ID NO: 180614 - DNA, 756 bp, Cannabis indica
catcaccatcgccaaggacaggtatattttttaaaagcttgagattttattgttagcctttccttacggtctctatagtaatttatttttaaaaaaatgacccttttataagcgtttatttttccgacaaaattgaaccgtgcggtgatctttttgcttcagattgtgcataatttatctcgtgctttgcacactgatgcaagattggcgagattagaagaaagatcaaggcacgtgcagatcaatgacgagagcctttgtgattcgtgtcatgctcgccttggaacaaaactctttgctatgtatccagatgacaccattgtctgttacaaggttggcagagtgtaataatatcattattggaaattggttttcttttcattctactttccaaatatttttgttttagcttttaggattcatgttttgagcagtgaatatcctttgttgtgcagtgttttcgtcgacaaggagaatcaacttcagttacaggtcgcgattttaagcgagatacactagtaaaaccaggctggctcgtgactagatgattcggagaaattaacaatatgatcaaaggaatttcaaagtcaaatgccagactcgtccacctttagtttgtagtcttttctcaagatcgggaccaggaatttcagacattaacagacaagagaggaccgtgtcgaagctcttcagtcaagattatgcaaagctcaatgtagttatgttcctgctgttgtgaaagtaaataaccgagag

SEQ ID NO: 180615 - DNA, 506 bp, Cannabis indica
gtatcgataagataattaagaaaattgaccgaatgtaatataatactataattgtttataattatctaaaatttaatgagtatatttaacaccctataagtaaaaagggcattatttttctagtgacagtttaaggggtaaaataatttttattttaaaaaaaaaataattaataattttttattaattttgtaagcattttaaatttaatttgattctattgctattattattccggtgaccaaagtgttaatatgataggaggggaatgactcctagatataattatcggtgtaataaaatattactcgatattcaattattaaactgtaattagaataagaataatttaataaaaaaataaatgagtttaaaatataaaataattaaaataatattttattatgctaaacatacagaattattttattttatttatataattaataaatataatcagaatgctaaaatttaactaaattgtcattgtttaaaaatataattag

SEQ ID NO: 180616 - DNA, 502 bp, Cannabis indica
gtctagtcaattggtccattgctacatcacttaaatgcaacaaaaaggtgttttaatgcaacattcatatatggttttaatgaagaactgaagagagaagaaatatgggatgatttggagaaactagcagatggaatacataaggcttggatcctgatgggggatttcaatgaaatactgtttgcaaatgagagagtgggtaggaaagctaaatgcattccttctcaaagatttaaggagtgtatggaaaaatgtgacatgactgatttgaagttttcaggttccttcttcacatggaataataaacaaaaaccagaggataggattttctctaaaatcgacagagccatggttaactcacagtggtgtatgtccttctcggattctgaagcagtttttttacctgaattgtctttcgatcacagccccttattggtatctatataacaatgtaggagttcgggaaagaagtcgttcatatattataacatgtggaagatgg

SEQ ID NO: 180617 - DNA, 535 bp, Cannabis indica
gtaacaatgcaaacatatatatctgtgtctacaatttttggttttgaacctttttaataactgccaatgaatctccaacaatttcgcgacaccattaactttttgtaaaatgtatattttgtaaatgatattacattacatgacatatattccactaatatctttttcttctctctcattctctattttatagctcacagactacaaagcaaagtccttcattaacgcttaattatataatatttggaatttttaaatgttgacacacaaatttgattattattattttttcatcataaagaagaaataatctttcttaatagatcaccaatatacaacctgctaccaaagtagccaaaaacaaaaaccttagaaaactaatcttagtcagaaggctcctctcagtagtaatccctcttccatatatatatttgtatatacattataaagaaaaatgattgtaaatagggtatttttccaaatatatattgatcatagggtcaaatatttacatttataggatcatacacttttt

SEQ ID NO: 180618 - DNA, 883 bp, Cannabis indica
tgctatgtgcttttgaaaatctgaataaaaatgaccttgctattattttgggttctctatgggttatttgggaaaataggaataataagctatttgacaaaggatggttgccggctactaatgtttttgcttggattagatcttatttagatgattacaggaacgctcaaaagaaggtttttcctactgcctttcagcttccatgtgtgcccaggagtctcgggttcctcctatagctcttgattctccaagctttgtactgatgctgctatggattgcaaaggtaacatattgggattgggggctgtaataaaagatgagaatgagaatatagttgctcgtttggccattccaatctcaggagcctcagactcaacttacgctgaaggtttaactcttaaatctgttctaaaatggtgtgttgctgttaggctccctatatctgttgttgaatcaaatttgaagttacttgttaacaaaattatatgtaataaaatagatttctagtgttatctgatatggttgttaatattggtaattctttacccaaattctctgaagttaccattagatgtgttcttagggtgttcaatgcagacgctcatcaagtagctacgaagctttagagcttgataaaaattgtgtggaatggtaatatttcacacttttaacattgtaacttgtactcaatgttttattcttaatgaaagtaattttcaaaaaaataaattaagcatgtatcctgaaaaataaagttaaatatcgggcgaatataatgagtttcgagttcatgaattttggaataaaaaaattgtacccaaatcctgttaaaatgttcaatcctattaaaaaatagaataaaacaattgctcctaacactaaa

SEQ ID NO: 180619 - DNA, 558 bp, Cannabis indica
tcaatcttttgtaaatgagaatcatggcaacttttcagtacttcaaattatactttcctcaaacattgtcagcctctgtgcgatcactaataataagtggttgttttccaatgctggtttcagatgggagtttcactttcccagtggaatagatcagaaaacgttggcatatgaatacaaggtcaaagaacatagaaatctgcaatagtttaataaattttcattttgaacaaaagtagagaaatatgttattatagaaaatagtttagaaaagtgggcaacgtttcataccaaggatagaagtattttccctatatttccagtgaagtttacccaagaatctgaaaaaaaaaaatgacaaaatttcaaataaattatcattgaactattcattaaatgggattaaaatgaaaaatgaaggtaatattattactttgatctaaggactgtacaatcatttgtgcaaaatttgcaactccaccagaaaaatcacatagaacataaccaatactaaacccctcagtgcttttcctcttgaagttcatgaatacctataaa

SEQ ID NO: 180620 - DNA, 776 bp, Cannabis indica
gattaataaaaagaaatgatttgattgattcatgtcaaaaagttttttatgatttagactatgatcaagtatggtttttatcttttctcaaaaaaaaaaaatatggtctttatctcaatctcctttcttacaaaaatacatataaaatataattacgttttgaggtgttagaatttatattttatttgttatatatacatttgataattttatttttaatttgttttgtttgtatttagattatttattaataaaaaaaatatatataatttgattgattcatgtaaaagctttttataatttagactatatatgatcaagtatggtccttatctcaatctcatttcttacacaaatctagatctatatatttatatcatgcttttgttagggtagatgatgaggtggcatgttgtatgagttttttttttttttttcctattttctttgctctctcatttttcttaatttttaacttttctattaataatttaataatcttttattcatttatcatgatttaataataatatttttatttaaattgaaaagtgtcttttcattctcttaagtactcccattctaattattatattagtcattatttaaaatttatagtaagttcaattttgtatgaaatgtgtaattgtaggttcttttatttatgatatataaaactcaatcgttattttctttaaatgagtgtagtatttattataatattataacctatatactaatagatttgactgttataataagattataataactta

SEQ ID NO: 180621 - DNA, 624 bp, Cannabis indica
ggcatccatcgaaaatataactaagtatacgtgcatgtgcattgcacgtaacttcagcctagtatatatataaatatatatatatatactctactgtagtactacatatttctttgtttgttgttgtatcttttgaaatataatcttacttcattgttgtagttttgcaagacactaaaatagaatttatttcaactgattatatttattgataagcattacacttatatgtgacaaatgttcttacattatattttttaaatatcactgttagtttaacctagaaagtgcgtactttatatgtgatattagctttaaagtttatatattttatatatatatagtagaatttttatttaaaaatattttatttaagaataacctctaatttgttataaaaaaaataaatctcaatttaggccaattataaataagaataacctctaaattgtaattagttatacattttttaaattccgtattaccaaagtatacctctatataagaataattatatcttaataaaatatatacatatattttgtaaatttatttatgtaaaattaataattttattttaaattataatacatgtatgaatattatatttactctaaaatattt

SEQ ID NO: 180622 - DNA, 937 bp, Cannabis indica
tatagcaatgttacccgacacatgatttagatcttgatgtcgttgtgtttgccctaaagatatggtgatattacctgtatggggagaagtgtgagatctatatagaccataagagcctcaagtacttcttcactcagaaagatttgaatatgaggcaaatgcggtggttagagccagtcaaggattatgactatgagattttatatcactccgcgaaagccaatgtagtggcaactgctttgagaagaaaatatctcaggcaggtttttggtaccataatgatctcacctcagttggctttagatatggttaggaccgatattgagttcgtggttgggaaactacataatttgacacttcagtcatacttattagaaagaatcagagaggcacaattagaagactttgagttagttaaaatttgagaggaggtattagctagtcaggctaaggatttctcagtctcgaacagtggaatgttagtttacaaagctagagtttgtgttccaagcagtgatgaactcagaaaagaaatacttgatgaggctcatactacaccttattaattgcacctgggtactaccgaaatgtaccaagatttgaaaccctattattagtggtgcagaatgaagagagatgtggtggaatcgtgtccaagtgcttaacatgtcagcaattaaggcaaaacatcataaaccagcatggttactgcaaccattagcacttcctgaatggaaggggaggatactatgatggactttgtggttagttttcccagaatcatgggaatgtatgattcagtattggtcatagtggactatttcacgaagttagcatactttcttctagtgaaaataacctatacaatggatcagtatgcggaattagatgtgaaagaaatagtttgtctcaatggagctctaaaatctatcatttt

SEQ ID NO: 180623 - DNA, 916 bp, Cannabis indica
gctaaggtaagccgtttaaaattgttactaatgtagataattttgtttcttttatttcattcttaactaataaaaataaaaattataaaaaattcctaattttttattttctctaatttgtagtgttttctaatttttatttaccaacaacaattaattaaaagagaaaagaattctaatagacacatcatatcatataaaaaaagttaattatatgtgttttatgatgattctaataggtaaaaaagtcttgtattaatttcatgtaatttcttagcaattattttcttcattaaattataacttcccatcattcaaaactccatttatgaattggacctattatttattattttctctatatatttttattgtcttttaaattgtttttttttttattattgtctttaaaatagtgtgtgtattgtgaacattgagaagatatgaaaagtttatatcatataattaaatatattaaattacatgttatatattttcttttcttttttgatgtcttttaaataatttttttattgtatagttgtgtgtatatattgtgaaggttgagataaaataaaaagtgttttgtaattatatattcagttatattttatgtatttataggtaaatagagatatataaaataaaaagtaataaataattaaaaaaattacaaaataaatatatataatataatattgaaaagatagcaagcaacatcatttctctaagcatcaatattatataaatttatagaatatatataaaaaattaaaattaagaaattataaataatttaaagatatgattatatatattaaaagagatatttaataacataaattaaaaatagctagaatataattctaaattaaaagtaaaattaaagatatgaaaaaattataaaatgagaagt

SEQ ID NO: 180624 - DNA, 792 bp, Cannabis indica
ttatataactaacacaaatagatttttcacttggaactattatttgcgttggttaaaaaaatgatgcatgaaattttatgcgtcaatttctaactgacacaaattatttatatgtcacttaaaaaatgacgtgaatgagccattttgttatagtgtatacaaatatacaaagtgtagaaataattattgatagattagttaacatcacattaatatctagtatcaagattgaatttcatacataaacatatgtattactaggcctcgtttggaagccgtattaggtcgtattgtattgtattgtattatattgaattgaattatatatcatatttttatataatactatgttaaactttaatttatactaaaatattatatatttaggtgtccataaaagttattaccacatatagttttacataaaaatattgcataaaatacaattcaatataatacaatacaatacaatacgacttaatacggcgttccaacgaagtgtataaacatagatttaaagagaatatttgatgattagagaacatgaaacataaataatagaagcatatcttattctcttattagaagtaatctttgggcgatgatctctaagaatacaaaactcatttttatctagtgttctctctaaacagggaagaagaaaagaaatgagtaagctctcttgtttcatggtagaaggagaactattacatttgctacaccttcatcaaaaactaaaaactatacaagtaaaaagtaagtaatactatacatacggtgaaaacatttttc

SEQ ID NO: 180625 - DNA, 689 bp, Cannabis indica
tttatatatatcaccatgcaccacttactactactactaccactaaaccaaattgtgataccgtcactcataccctaaccccctactactactattacctctccttttcatcttttcttttttatcattatatacaaaaattgatttcctttttaactttgcctttatttatgcccttttgaaaactctttggtgggattcatattgccacttgaattgagagcttttatttcttttttaatttgaagggagagaaggaattagggcccatcaacggctctccaatattactattattaggggtgttcacaaagtatccgatccaatccaatccgcacgatccaatccaattcaatccgcaaaatgcgtgcgcggattggattggattgaaaaatctaaaatccgcacttgtgcggattggatgttgtttgacctcaaaaagtaaccgatccaatccaatccacacttaactatatatatttttaaaaaattataatatataataaatattaattttctagtaatattaaaaaaaacacaaacttttaatttattaatcttttttaataatatattgagttagtgtattttatttgttttataataaaaaatactagaaaaattattctattcacatagacacatacatacaaatttaaatatatatatatatactaacttatttattt

SEQ ID NO: 180626 - DNA, 638 bp, Cannabis indica
atatccccaaaaatttggttctagacttcgacccgggcttgggtttgaggttagaggtcgagattggagtcaagatcgaggtctgggttaggactggagtcggggtagtgtgtcctggttcaagtctgagtacgaataatataattttacacaatataatacaacaaacacaatataccaaacatgtcttaaacaaacaaacttggatacatattgcttataattctaaatgtttagtttgttgtaattaacattgtaatgaaatcacgattacaattctaatactgggttttcctttacattgtaatgacatttcattgtagactattacatcacttatatgaaaagggattatatatctcatgaaattcttattattattacttaaaataattatcttatccttattttatattttttcttattaaagtaaggataattttttcaatttaccccttatttcaatattttcaacaacaagccaaatatattcttaattactatttttattatattatatttctatcaccattacaattactatttcatttccactgaattaaacacgtgcatcatatatatctttatatattaaaagtgcctatctaacggcaattcttggtttaacgggaattctt

SEQ ID NO: 180627 - DNA, 696 bp, Cannabis indica
cctaagtacaaaaagaaaaagagggattgatgaaatttgctgaccttgaattctctccattagtttacactcattaatgtatgaagatttttaggtgggatatcattataactttcgtttggattatttttatttataacatgaccaccccaacaaaatttaaattagtaaaaaaaaaaaaattctcaattcaaataatctattacatatatatgtgatttctttttataagtatgtaattaaaattttataactgttgatacttaaattaattttgagaaatctaaaactaatataagtataatttaacttattagataagaaactaattttaattacatgtaagtaattggtttttaatttattgccttaataaaattactattaactgttttttttattaaaaaaattgtttttttcatcaaaaaactgatgttgattgtatcgaagtaaaatttatatgaattttttaataatatttttaaatatttatgatgatttattctatatttttaaggattttttttaatttcatatttagtacaattaagtttgtatgttatatactttattttagaagaagatagtcttaccagctggcatgtgtgcgatttttttctctccaggttcgtaggtttcatcgttttgacggctccgaagtttcagcgtggacggcttcttgcggctagatttttt

SEQ ID NO: 180628 - DNA, 553 bp, Cannabis indica
aaaaaaaaaaaatcaacaaaacttaaagatataggctctagggttcttaccttttgtccttactacttgaattctgctagaactccacaaaatttgctcaacaaatctcagtttgttgctgattccgtctaaggtttgaaagggggggggggaatgagggtagaagaaggaaaaattggtttttctctttttttttttctttaaaatttgattaatctcattaattaataataggattaggatgaaacaacacatattggccagccgtccattagaaaatcagccacctagcctcaaaactaaaatgactaaaatgtcctcacttaagtgcttaaatggtaaaatggcttaggtccgatattctaaatatcaacttatgaataccttgctaaataaaaaggttctaagctaattcatgtgactaaatcagtccatctgtcgcattttctatcgtcgccgaacgaaaaatcataaaaacctgtaaattttgcatataacataaataatacacttagagtttaacaaaattaccataattgagaaattacaattc

SEQ ID NO: 180629 - DNA, 761 bp, Cannabis indica
tgatggaatcgggtgatgaaaggaagcagcagagtggtctcttgtagcaggaaaatcaagatcagcagcttaaggctgatacaaatactacaggggctatgaatttgattaatgtgatgcaaaagaagaatgaagagggaaatatagagaccaacaggggggctaatttagacaagaacaatgatgcaaatcaatggattacacctagaaaaaaaggctcaaatagtatacagaatctgaatactaaagctagcattagtaacggttatgaggtgttggaataaggtagaggacggaggttgttggtactgttcaagattgtcttaatgatggatagatacaatgttttggggtggaatgatagagggctgaataaaaaagagaagcagattgagttggtcgacatttgcaggattcataaggttggttttggtgctctctttgagaccaaaatcagccatgacaaaatagatagtgtgaggaagaacttgcctaattggaattgttattctagttagaatatgtcctatagaataatgtgttgggttttatgccctaaataaaactcatttcaatataatcagatttacttattaatatagatcagaaataacatttaatgttgcatggttctacatgatttattttcatgattatatgtacataatgtataaattcatctgaaaccctttttcacatacttgatcctgtttattgtgccgtcaacacattggaaagtaaacatgactatgtgaataaag

SEQ ID NO: 180630 - DNA, 505 bp, Cannabis indica
gacaaagtatacacacttgcataaccaagtgaaatatagtcaagtacactcagtgaaatttagctcttgctaataatagattattcttgatattggtttttaatattaatgaggttgttttgtgtatcaatcaggtggatttgggatcaaactcaaagcattgtttctgcaaagagagtgacttactggctgtggttgaatagggttatgaggccatgttaaaaaatttatatgctttctttcttgtgaacttcgtagaagtagagctagtcaaatgaaaccagttcagttcttcaggtttcatttcatggacgaatttgtagtatttatttttgtaaaccgttattgtatttgctttggccttgaattgaatggtcaaaagaaagattttggaaggtataataatgaaaaactctatgttttgagtaaaaacttctcaagtaaaggtgattaaaaatggtttagacgaaatgaccttatataatcttgctgttgttctagttaa

SEQ ID NO: 180631 - DNA, 795 bp, Cannabis indica
ggagaatttttaacggtaaaaaaagttcaggggcataatttggtatatgtcaaagttcaggggagaaaattactattttttttatatagtttcaataaaaaaattaatgattatgttgattttgaagtttgaaggtttttacagtcttgtgaattaaagtataattgtaaaatttagactaaatataacattaagctattctttgagttaaatttacaataaaatttgtaccttacattagagatcgtctaatggcaatgcttttcttaaaaaactctttgcttagcccaacacacccaccaattgctctactcttttacaatattacaatatttttcttttatgttatttaaatattattatttatttattatgttataagaaataagagaataaaaaaaataaatatatattttttggaaacaaaagattaaatatattgaaacggtatagtgtgtgagagagtgatagcattgcaagctaaacatcttagctattatatatatagaagacattttaaaagattttgaattatattttatttattatggcatttatctaaaatattgttgaaacataaatttacattaaatttatttttttatatttatgtgaattattctaaatcctttaaaatgtacatatttacgatatacatcattataactatttatcaataacacgtcgacctatttttattttttaaaagtacgtgtttaaaagtttccccgaattactacccttgttttttttttttttttttttattttttttttctttttttatgtgtatatg

SEQ ID NO: 180632 - DNA, 510 bp, Cannabis indica
gattggttaacgatatttttttagaatttattttcttaaattacatgagacttaattacagcaataataatataacccggaagaaattattaaacaccaataatatttttttaatatttttctactgtaaaactttgacaattattcaaatatgagactaaactcgaaaaacaaacactcatccaaagacaaagtctcgaaaaactaagcttatgagcttttaatatgttttttatttttattttaatctatagaaaaataaggtttcaaaaatgtatatacaatgatttttgaaattatatgtaaaaattaatagaaaaaataaaaataaaattaattttttttttttttaatttcacatgtattggctcccaataagtttctagactggctttgccattggcccactgtgtaaattaaaaagtaatatttttctaaaatgaataaaagaaaatgatatttctaaaaactttggggccctaagccagctactaacttgttgtcatttgt

SEQ ID NO: 180633 - DNA, 557 bp, Cannabis indica
gaaagagtggactttgatccatatcgaggtccagcccataaagaaccctttctctagcgagaggtcgatctctgctgcgaccgagggagagggaagctttcggaatcgaagaaaggaaacaatggcggctaactgtgtgaggcaaaccctacgagcatcgtcggcttctgcaaaatccctttggagttcttctcctgcagctttcgcttcaaaagcttctaagtccactggactcggcgcttccaagcccaacttagcttctccttcaccttttcacaaactcaattccttaaggtgagctctttgttgttttagcttgtgggtgctcctttgttcattttactgagcttaatttaccattttttttgcccttatcttatcaatttaagctttcattgtttttgtttcatacacttatgaagctttaagcttggtctgatatttaatttaaacctgatttgtctcaatataagtctctacaagatgaagactctaaggtaataagtctatcattatatgtattgtaactgttacatgatatgaatttgaaattccag

SEQ ID NO: 180634 - DNA, 542 bp, Cannabis indica
tttggtagcaaaaattttgtgtttagctaccaatttaactaccatatttcttagtagcaaaagatctttgtattttttgctaccaattttactaccaattgtgtttagtagcaaaataatattttcatctactaatttttgctaccatttttttatggtaacaaaatatgaactgttaaatatacgcattttactacattatttttagtagaaaaatatttcttctcgcaatcaatgctcagcaattattttttcttttataaaaatattaattagcacttttttattttatatttaataaaatataatattttgttacctactaatttattagagtaaaaatataattattatttataaaactgttatactaaacattagaaaatacagtaaataattgactttttttactaaaatataaatatatttttaatgtttttccaatgaacttaattatttatgtaatttttttattaattttagttgaaattattttttttttctttatcctttattgcctttattacctaaattattaattt

SEQ ID NO: 180635 - DNA, 580 bp, Cannabis indica
ggacatgatcaagaggatgcttcagactggacatccaaccatgcttagctgaactttgttatgtcaattctccagttgggccctttcctaatatcgccaaaaggtcaaatatgtaatttagttaaaagataggggagttctatttacacctctcaaaataaaaattaaacttaaaataatttttaaaaatcactttaaatatttttttgaaatttgtttctcacattattttgtatgaattttattatttttttaaaattttattttagatatatttttttttaagttatgtataattattttttctaataaaattttttaattttttttataatatgtaaaatataatttatgtttgtttgataagtatttttaaagaatgagaaaaaaagtttatgaaataaaaatgattaaaaggagatgcaaataaaactggaaaggatatctgtatctattctatatctatacacgtaataagtacacataatgtcttacaaatttgtcaatattgtgcagaagaaaatctggtgagacaatgacatggacacctaatctttcctttttcatttaatctttcctt

SEQ ID NO: 180636 - DNA, 515 bp, Cannabis indica
atgagatgtgttttatttttgggcatcttttggtttaggccactgtgcattctagagggaaaccttgaggaaatctcttagaatcagtgcagaattgtagatcaagtaattcttctgaacccatttcagcttttgttcaccagctgagtccaactcttggttgagccatgaatttgaattagcttgagagtttgatgaagcacaagaagatgagccagagttcataacacaagcattggctttgaagtttctgtatgaggctgtgaagggagccttactccaatcagtcttcaccaaaccaccccttgtggcccaatcatcagcattccaaaggcttgagtggattctcattggctggttctttgggtatggcacaccctttgattccaagttcttgaactttctaattggagtaccatccactgagaaactgaaaacagagtaaaagtttctattaagtcaagcttaaaacagagtaaaactagtcaagaagtttggaaagtaaaggggtactt

SEQ ID NO: 180637 - DNA, 661 bp, Cannabis indica
agggggattttttcgctccgtccccatccttattaggagattttttgctctgtcccaatcctatgagattttccatggccgatggaaaataagccagaatggtgattaaaagtttttaacggggatggggacaaggagagcactccccaccaatttcctgccctgtgtacatccctacaaataatgtttaggtgattgtttaaaattgtaaaaagaattagatatccccaacaattttaaatagtcatgaagcatccacgacagtttattacaatcacttaaaatttggcaagattttttaattagttatctctggcggtctaattgagaacaattcagctattacctcaaattcacattcatgctacataatttcaatattaaatattacaaattcataagagaaaattattatctagtctagatattaagtcaaaacaaaatatgaatatttgcaaaagcaaagataatgttatacaataaaacacatagtagcattaagaaaacaaaaagtataatttgcctattattctaccatatagaaagttcaaactttaaggcaaaattgtttttggttttttttttcaattataatttaaaagaaaaaaaaataagcaagaggaagaagaagattaggataatgaacctttctgatgtaaag

SEQ ID NO: 180638 - DNA, 606 bp, Cannabis indica
agtagtcgtaaagataatacctaacatttgacttttcgttaagaatacccttaatttatgaagaagaacaaaatgattgagacgaattgatttgacattaaattccaagtacgtaattaagttaaagcctaaaaaaaggaatttaagacaagtactagtcaaaataaggaactctttctgttaaatatatgactcaaatagccattttttattatatttcaactatcacctgagtggatttggggtggggaaagtccaaatcagcttcacaatataattttattatttgaatttatatatacaatatagctctaatctatttatatataaaatatttctatatttaacgattattaaataaatttaaccataaatattaattttaaaagagaaatttttattagtatacgtaatatacatactaataatagaaataacattggttaatttaataactttttaataacgtgactacgtcatcatttctaccgtaatatcaaaccaatcacatactagaatccaaaagaagtatctcgctccatgaatgcgttgcgattcttcctctaattacgagattgatggatcctttcgaacagcctgtgaaac

SEQ ID NO: 180639 - DNA, 785 bp, Cannabis indica
ttggtccacacggtgtccgttgactctggagtagagatgggccctccagttgtctgttctcacccaaatggtcattttgcgtgggtacacattcaagtaccttatttgcctctcctaaagaggtatgaccatcagtagtctccatccccaaacggctggcgttgatactctcagagccctcagcatcacggctcgcagaggattgtggtttttcattggtggcgtcaggtgacttctcaggggcggcatccttcaggtcttggatgactaccacttttgaattttcaccaaaaggggcaaactcccctatacccggcagtctcacaagagggatttgggtaatgaccacctccggctggtgtacccctgattcttcgtctgagacaatttgttttttggccggaagttgcagtctgcattcacgtagttcgtcggactcgccgtggagaatggccttgtggatcttaaattggtttctaagaaccgggtcatgaccaagctgcttttggagagtccaatcttggaaccatttggctagtggggaggtgaatgtggatttttccttggcttcatgtttcagccaagtgtcaaacattgggtagaagttacccttatcatctttaatcaccgtaggggctttgaagcagatactctgatcatgggttaacatcccatatttaaagcaaagtttgggtagcctctcgtacctgtattggatccacaggtctttaagcttctgcctacggaggaagaagcctgagaagattggtttattgaggtcgatt

SEQ ID NO: 180640 - DNA, 512 bp, Cannabis indica
gctcttactcacaagtatgtgaaccaataagttgcaagctctttgtttactcattctgaacaattttcattatattctgtttatcccaaaatggacttgttgtctcgctaatctcacatgctaatagttattattcacatctcgttattgcctatatggcggcgagttcgaatatttcttttaattgcaattcttgccaactgaattttttgttagccacatagacctccaactaaaagaagaggcataactcattattaggaataaatttaagtttaggtagcaagatttaaatatggtaatagttgaaggtgtaaatcctatttatttcattttttttttttgaattcaaagatgattttatttgaaaactttcagcatatacaatagtctttaaaatcaaaaaggagcatcatgctcactgaaaagtacaatctgaataattagtattttttgttcatttgaatttttcgacactacctaatcttctccttaaaaatatacggcttgtt

SEQ ID NO: 180641 - DNA, 803 bp, Cannabis indica
caaaccaatcaaaatttattatgttaactatttttgttgactcaattagagtattttttcatacaataaagaattaattaacgtgtcaattttaattagtttaacacagtatagtattaggacacctactttttaacaggagattttaattatgttagatgtgggactaaatctaactggtggctatatagcattggagaaaaatggttgaactacaaaagcaatggtgatatctgaacttttttttaaaaaaaaaaaaaaaaaaaaataagagcaatttgctgtataaatacctaagtttaactctcagttacaaataaatacctaagtttaatttttggcggtaataatacataagttataattttgaaacttttgtagttacttgcctgttaagttttaagtgaattgccacatggcaattcttgattggtaaaagtcattaaatttttattttttttaaaaaaaataatttaaatgtaccaataaaaaaatgacacatggataatgacttaaattaggtacctacagagttctaaaaatataacttaagtattattaccgccaaaaattaaacttaggagagtttaacttaagtatttatgccgcaaattactcaaaaaataataaaatggactattataattaaaatgaatgatatattaaataatagtgcatgagacataatttttagagtcgcttagcattagagtattttttagtaggaagataccagaaataatgtggaggaaagagaaaataaaatattataatatagagtattgttattttttagaatattt

SEQ ID NO: 180642 - DNA, 1006 bp, Cannabis indica
gataatgggtctggattccaattatttatcctggacagggggtcgtccacgagcacatggttgttttgggataatagaacactataaatcctccgcaggggataaggcattctcaagactcgtggaacatctactgacctgcactccttgctctgctagtgccgggtggggtagagttactcgcactaggacctagaaccccatatcctccgaaactcactccacctccggtggacggacaagtggtcataatctctggggaccccatcttgcaagaagcacttaaaactcgcaacaaagatacctgagagaggtagaagaaggggaactatgcgcaccagtgtaatctctcgtacattgcccaagaatgatgaatttcccatcacctttaccgaggatgatgccaaaaatgtgcacttccatcataacgatcctttagtaaatgatgcacagattgccaataagcgagtttccagagtccttgtggacaacaaaagctcaattaacatcctattcaagtttgcattccaggtgatatggcttacaaaagcaggtttaactccttgtccttttttgttgtaaggtttcaatggatacaccctaatgccaatggggaaaatctagttacctatcaccctcaaagcaaaaaataacgcaagcgtttttaagcacttgacttttgtggtgggagactgcccaacaacgtacaatgcgatactagggtagccaaccctaatggatttaaaggcagtaacttctattaggcatttatgcattaaattcccctacgacaatggatgtattggcatgattaaaggcgatcataaaagtacaagaaactattacaatgtttcaacacaggttgcgttcatggtccaggaagagatattcattgctcttggaatggagaatcaaatggatattgaggccagtccaggaaaaagttttactagatgagttggagtcccagagttgggacagaaagaaatttagaatcaatggaaga

SEQ ID NO: 180643 - DNA, 605 bp, Cannabis indica
gtatctctttcaaaggtacaccatcaatctccaaatatcgcaaatcgtttaagcttcccattttctttggtaactgagaaagcagttataacaatcaaacaacaataaagtctgtagattatacaaagtacaaactgaatcgtgcaactcatcaatttcagtgtaagacaagtccaaataccttaaatgttttagatagctaatcgaattaggcagctccttgatagaagagttgtttaaggaaaccactcttaaacaactttttgctgtaagaaacatatcatacgaaactatcatctttacaaaaggatatccttgtaatggtaatgctagaaaggtacgcaaacaattagcttcactaatcgagcattcgagtgtgctagcttcactaattaagtcttttctactaaactcgtaatctttgggaaatatagaacaatacacaaaacatcgtttcagatgtgcaggtaaatggcgatagctcaaccataaagctggaataatagaaccctcctcctgtacaactcttcccatgtgtcactctaagtatgtcttcccatattttagaatctctttcagaaggcaacaatccacctagagatttt

SEQ ID NO: 180644 - DNA, 698 bp, Cannabis indica
tatccttttaatattcagtaaaattttaggttcacgaggtctttatcagtggcttggattctatttgttgtattctaatatagcaattgatttttcttttcctgtcaaaattttccattatccaaatgcagagtgaagtttttttcccaggaaattgtatttttccgtgaggatctgctgtacagaatgcggcgttcatgtctgcttccccccttctgcagaggaaactgaagattcttttgagcatgttagttttctcatcttttttctacatgaatttgattgacctcatgctcgttagatcatagtgctaatgggatttatgtttctgttgtagcttgttgctaccataactcatcaaagtcatctttgcccacttcctcttgtggttcaacccatcatctggaactacgatcatgctctttatctttatccaactccacacacggtagtattttttctgatgattccttttttttttcctgaaactggactctctaatttttcaatattacaatatttggggaccagaaaattttagcaattgctatctacgtatctagaagggactaggactttgagagcaaattacatgccttatcatttgaactatccttcttggatttactagtgtcttattttatatgtcattacttgaatgcaaccttggtatgtacttaccaagactaataaatcac

SEQ ID NO: 180645 - DNA, 1151 bp, Cannabis indica
gcttcggtttcaagaattacttcctattctcatacttggtattaattaggtttgaagccatgaatttttcttagtcagcctgaattaacttagtaaacttattaacttaggaaatatggtaagatagttgcttacttctagttccctaaggcttcagtttcaaatagtactttcttctaccatacataatgttaataatttttgaagaggtataagatatgctacccccaagtgattaagagtcttgactcttggtcacattgtttcaagacttggagaaaattataaaatgacaagaaaaatcccttctgattttatttaaatgattcctaccttgaggtgtacatggaaataaaacataaaataaaatgtagataaaagaaaaggaattggaccacccttaatttactgatagtatgatcagcgcaggtggtctgcgtttcatgctcttgggatttgtgagccatctcatcactttaggcgatatgctccatcacttactttgtcttgaatttcatatggatcttccaaattcggtcctagaaccccccactcctcgctcctaagaggctagaataatcttcttaagacaagatcacaaatttcaaaccttcaaccttttaccttagagtttaaatgtttataatttagaaaatctattgataaataattataaaattttgaaattgtattaaaatataagaaaataaatttctgaaaaatatctaatttaagttattctaaaataataaaattttcaacttaaataatttttcaaaatttaattaaataacaaattaagtatcttcaactaatcgccttaatttgaaaaatatccccatttaagttgaatatctgaatatctgaataactaattttctagaataattattaatttcaaaatattctaatttaagttgatcaaaaattagtttgaaaaactgatttttaacttaaatatattttctataaaaatttaaataattaagtatctagaaaaatctaattagttataacttctttatttaattaaatacaaaaaatacatattatcttgaatatatttcattaaactaagtgtgtttatcttaaattaatttcaaaataatatgatgaataatttatttcatgtatttcaaaattaattatgt

SEQ ID NO: 180646 - DNA, 555 bp, Cannabis indica
tctaaatagcttttgctggcacaaagactgaagaaactgtaatgaggcctcgcattgttggcaaagataattcactacttgttcggaagtcaagcttgaggtcgtacaagaaagagtattctgagatgatagcttgctctcaagaaacttaatggctgcacaaactgctccaaaagctgcatccataaatatgtcaacctgtcacagataacaaaaccactgataagtgcatagatatgcatactagcaggggacaccaaaaaaacgaatcagaaaggactaacaaagaataaaatacatatatatatatatatactagatagatgttacgtgtcaagtcacgtatgttaattttatttttagttttttagtttttttttaatatcataattttaaaattaataatattcaatgtagtgataatcattgaaatttgaaagcataatagtgatttaaataaaaaaaaaaaattactattatactttgtaatagtaattaaaaaaaattattattcatcataatttatcttcggaattaatgaaaatgctcatctgg

SEQ ID NO: 180647 - DNA, 899 bp, Cannabis indica
gattttatcttattattattatatctattttatataaagtgtggttatgtaatagaattttagtttaacgatactttttagatttctacgttaactttaacagaatattctattaattaacagattattctttattaaatttataatattattatatatatttaaaaataaaaattatgtaaatattctatataaagaaatttaaatttaaatttaaaatacttaaaatattatagatatttttaatcatatttttaaatttattaatttaactttgaattaaaataaaaaaaattatgtaaatattttatataaagaaattcaaatttaaaatattataaatatttttaacgatatttttaactttattattatttattttatatttttaagtgaaatggttgtaataaaaattgattgctttctattttagttatggtaaatcgattcacaccatacttttcgtaaagtttggaaataaaaaatctttatatcaaatttacgaatccagtctataaatagacatactcaaatttaattatgtgagttttggttaagaatatagtattcgctacctaattaagaaaatttaaaaattttaaaaaatacatatatataatcacattcaaatgacacatattgtagcaatagctaattttttttttttttttgaattttcgataaaataagttaggtttggggtgctttgaggaaattgagttatgtggtattttggttggtttagaagttgtttaaaatacatgtttgagttataatttgggttgtaattgaagagtaatgcagttgtattatattttggtcaaagttttgagtttttgaaactcaaggttcttaatggtgatttcttatttattgtgaaattttgtgattttgagttg

SEQ ID NO: 180648 - DNA, 340 bp, Cannabis indica
ttaaaaagatggttggaaagtgttatagttaccattgaggcaaagagattgagattttcatggctagtgctaataattggtttattattataaaaaatttatacaatatgggagctgatgaattcataaagttactttatcataagtttttcaaataattttgtcacaccattttaaagttacaaagacttgttgtgtttagtagccaaattaccaaggcaacaccaacatcaacaatttaaagcaacaaaaagaaaaatagttaattttgaaacttacaacaatcgaagctcatcaaaattcacaaccattttttttctactaagcttcattgaaaatg

SEQ ID NO: 180649 - DNA, 725 bp, Cannabis indica
atgtacatagggacctcaacacaataattgggataaaccaaatgggatttggggttagggaacaaattgacatgaaatttcaaaagcagaggtgtttaataagaaagattatatgagatatgtcatatcatatgtatatgaaatggtaataacaataataataaatgacaataaaagacaggaccagcttattgtggatggtatgttagtgaaggtctcctttagaggtggctgctgtctattttagatttataagcactcaccatattgagggacaatatgcaatgccattacttttcaactccatacacacacaccattctcttgctttgcttgggtccacacattaatgtataaatctatatataattgtatatagaatgtaagtaatcatttttgaacaacttactgtatctctcttgtgtttgggtcttaaatcttactccatatcatttgtttatagaaagtttagggctttgggtttttaccccaaaatcagtggaccaaatctttccaaacacctatacatttttttaggggttttttactaaaaatatttaattttgggtaaaatttataattttactgtcatacggaattttttattaaaaatattgtatctttttattaaaacagcaaaacaacagtagattaacgaaaagacaaccgtggaacaatagtgaaaacttaacataatacatagtatttttgtaataaaattcggt

SEQ ID NO: 180650 - DNA, 810 bp, Cannabis indica
tatttttctgcaaatattttatattctgcctgttcagttttgctgtagcagaattactttctgctgctgcaaacgcttacagtttttatattttcttatatacaactgacatttgcaaaaacacggtttttcaagtatactgatcataatttattgtgtatttggtcttcctgtgatgtcattttagtatcgaacataaatcatagttaaattacgttgagaagttgaagcattggtgagtacgaatgcacaacttctgtttgcccaatttgcttatgttatcagttatttgagctgggaaattttcaagcacaaatgaactacaagctgccatatgtagcacaaggtacaagttgaatttaaagagaagaatagacaagaataagagtttcatggcgtgctcgattaggttaccttctaacaattaactggtcatatagcaacttatgtatatatttttttatgcttcattgtcattgtcctcaaaaataaaaatgcttatatagttggagtttacaaaaatattaatgacgtattctatgctgcagtttagtcaagcttaatttttatgaaatcatatttaagcatgggttttgtacattgtgacccacctgcagcaaacatactgatttgccaatgccttctagcagaaagagcattctaggtagatagtatatcaacgtatgctttgtttaaatttttgttaaaacttctttgttatggtcttggaagtgatatagtagttgttccttaaactttttggattatattttttaattttgtctaattttttatagtcgaagatctgca

SEQ ID NO: 180651 - DNA, 1026 bp, Cannabis indica
tagctaaagttatagcttgctcacccaatcacttttgaacccttataaaatattcatagtatacatatacatatatatatatatatatataataggtagagcactactacaaagtttctcttcattattattaattaattatatataaaatatcaagaaaagaagttatacaaaatttattatatatattaatttgagaaagagtgacacgtagaagaagtggtacgaaatagaagtacacacgcatgaactatatagcattataataaagagagcatgtgaaaattttaacgtacactctctttatatggaatcatattgctcttcaaaattaatacatactatattacaaaaattctatcgattttgattggaagaatattttagtgtaatttttttttatttatgatcatgtacgttatataattattgattgagacgtttagtaaaattttaaaaaattcagaataataaaaaaaaagattcaaataatttattcacatgcttgaattctgtttttagcgtattaaattttttcgaatctctcaaaattttacaagatattttaaataactacaacgtagatgaccatatttaaactaaaatattttctcactacaaaaaactgttacttttagtaacaactttttagtcacaacataatttttttgtgattaaatgtgatttttagtcacaacaaaatattacttgtgactaatatacatagtatttagttactagttttcactaatttagttttagtcacaacaagtattgtgactataaaaaataaatttagtcacaacaatttgtaatttttgtgactaatacttttagccatggacctttagtcacaacataggaaatcataatttataattagtctacaatttttttcacttttagtctacaagttttgtgtgactaaaagtaagattttttgtagtgtatataccgaaacaaatagagaatatatcagtagatccctctttaaagtagtgcattataatatagtaaagtatataa

SEQ ID NO: 180652 - DNA, 672 bp, Cannabis indica
atgtcgacaattgaaagactacatagagagtctgatctcgcgtgggtatttcagacagtgtgtaagacatcaagtgtaaagaccgcttaactttaatttaaaaattagtagataaataggctttaattatgaaattcgtatcttagttatgaattatcagtttacggagatttatttgaattcagaatatattttatatgtcatatatggatattcatatttttgcatgttttgtgcccgacaacattgaaatgcgacaattggctattagaatcacatcttagtatttttagtatagtggggcaatatagttagacattaggaatgttgagataagttgagattttagatttgaccaatttacccctaagtggttttatgacttttagtgtaggcaagggcattatgggctttttgcctttttgagatttttcgtcatttagtgagagtttaattgattattaatttgatttttaatggctgatataagttaaataaaacatatttttatttctttttattaaaaataagaaattagataaaaatagatgtctttctctccaagcactctctcttttgaaccccatagaacccagctagggtttgaagtttttttgctgctcaatctaagaaatttttagcaagttcttagtgatctcaaatcaaggtaag

SEQ ID NO: 180653 - DNA, 575 bp, Cannabis indica
ttattttactaattttaaaaacataatactcacgggatcccacccctattaacgtgtaagattttttttttctgacaggcttaatagtggtgggaccctttcccattggtctgctggtattaataattaatattggcgaatgtgtcagtttgttgctattgctgtgacaatacaaaccaggtattacccacagatcagtaggggtacgaccccaccggtaatgacctaaaccagcagatttcgacttctttactggagaatgtcttcgccaatgatgttgatatttcttttagtgatttctctctcctttcctatcactctctctgcccctttccttggttctcaccaaactgttgggttttatgccccaaataagctccatttcaatgtaatctattttatttaacatcaataaagaaacagaaatattttttattcatttgtgtatattttggttcacttgatcaatttctgtctatttgatttataaattcatcttaaaccctttttacatacttgattcctatttatgtattgtcatcactttggaaagtaaacatgactatgtgaataaa

SEQ ID NO: 180654 - DNA, 848 bp, Cannabis indica
attaattaattaatttgattagttattaagttttaaaaataagttttgagattattttgtattatttttatttttagttttttaaatatgtcattatcttattttgatttgttaaaatatcatattttttattattattttattttatatatatatttttttttaaaaaaataaatatgtatttttcaatatatattatatatatgtatatattgtaataaaataatattttttttaaaaaatatgttagtttgtcatattttttttaatataattaaataataattatttgaaaaattattattaacatagactttatactttttaaaataatgaaaataagactatgagctcaattttcaacaattttattatttaatataattaactttaagataatttttaacacgaacagatacagaaaatgtaatcagttttgttacaacatctgtatatcagattattaattattaagttttattttcacaaaaaatctgtttatggttctatttgtacaattttgaaaaatacatgatctattttattatttaataaaacagagagtcccattaataattttcacaaaactcaagatgcaaaatgatatttagccacgtagataacaatagtgatatatttaaacaactcatcaatattttccaacggctagtaaactgaaacaatgtcccaactccaatttgatttatttaattggtcagctaatccaattgtaaaagttttaataaataaaaatgtatgaaaaaaaatcaacacaaaccaacgatatgaaagaagtatgtgactgtaaaatgattaatgaataaaaatggtccgtgccgtcgaaggtg

SEQ ID NO: 180655 - DNA, 725 bp, Cannabis indica
taccattttttgtagctaacagacttgctccgttagttttagagtataaactttacaaaaataaattaaataatgtgtcattattatattggttagacataatatgggatataatatttggacaggtgatcttgattcaacacatagtaggtttacaggagaagcgcatgaagatggcaaaggtagataaggcattggagggagctgctcgacgaggcctacttgatgtttttgaaactataaataatgcaaatccttcaattctacgccacccaattgcatttggtgttttcaatgtggcagttcgatatcgtcatcgtaatatattttctcttttacaaagaattcctagtagaaatgcgattacaaatacactcagtatgactaaaactggagaaaagtatagcatattacaacatgcagcattattggcccctgctaatcacctgagtaaaatccctggaccagctttacaaatgaaaagtgaactagaatggttcgaggtatatatgcatctcttgtttagatattatttgaatttcaaagtttttgtgttagtaaataatccatgattagtaataaaatcaattaatgtaggaggtaaacaaaaatctacagtgttttcccatcatgtagtgaaagcagaggagttgtttaccaaggaacacaaggaattgaagagcgcaggagaaaaaatggatgaaggatacagctactgcttgtag

SEQ ID NO: 180656 - DNA, 875 bp, Cannabis indica
tgggcattgcggtttggttgagattgtattttgaattgcgattcgtattttttgctatcgtgattagtcttattattattatttttttgaaagatcgtgattagtcttatttgtgggatataattttaagtgttttggtcttgtctgtgtgatatgattttgagtgttttactcttgtctaatgtgacatggttttgttttgttttattattggtttttttttttttggaaagctcgccatcaaatcgttcttagtagttggaaataataaatctctgcgactgagtgtggttaggaataacgtaccatgcacaatagttaagtgttcaagttacaatattgaatgaacatgctgcaacaatttttactgttataattttttttaatttgaatttatttttagccgattaattgttgattactattaataagactatgatatctaaaacaaaaattatttattatcttatcttaaatatgtagctttttttttttgagtgaacctcttaaatatgtagctgacaatgcacatattacactttaatttattattataattgttttaattattttttaatgttagtaattgttttataaggtatataataataataagcatattaacgcagtcgttttaatctccattaatattctcggtagtcaacccaagccggccgctccagattttgatcagccaagactcgtaaagactctgcatcaattttcagttgaagaagaagaagagaaaatgggaggatttctctcaagcttactcggaccaggagaagcgaacgctgacgactcttcctcatcgtccgatcagtcatccgttctcgcgttttcattcaacggccagatggcagctccatttcacg

SEQ ID NO: 180657 - DNA, 728 bp, Cannabis indica
aggttagggatgattcttttcaattattttaagatagtttctcgataatttccatggctatctgaattttttaacattttgacatttttttgttttattatcgatattatctcaatggcttgtcgatacattctcgattgcttcttgaaaattggtttttctatccatcatgagtgtttatcgattgtttatttatcgattgttgttagaaaaatttattttgtctccatcacgattgtttctcaatatgctctccattcgtacttgtaaaatgtcattctatatacttcattattgtttatcaaagtttttttgatattttttcaatgaaatatatgatttttccaatttttgagtgtttttgatatttttgttagttatttcttaactaacttttttttgtatgaaattgtaggattgactatgtttctggttatattttatgatggtgtttagagtattgaggattttaattggatttataaaagcgaatgaagtttgacattgataggttaaatcgacacaactttactcaaaatacgtgatatttatataaagagttggatgttgatccagtagagtatgatttgaaattgaagatatgttcgttgtacatgaaagggcaactggtctgccagaggttattaagaaagaacattaactagagtgttcttataaatgagggcaacattgttaaacacataatttatgctattatttgtgaccaa

SEQ ID NO: 180658 - DNA, 421 bp, Cannabis indica
aagtcgtggacgtattaagtatcattcgggtatagtgttgtgactgaaaggtccgtggttaaaggtattagttacaaaaaattataatttgttgtgactaaatatgattttagtcacaatacttattgtgattaaaagtaaattagtgacaacttatgtctaaatactgtgttttagtcacgagtaattttttgttgcgataaaaatcacatttagtcacaaaaatttatattgtgactaaaaattgtcaataaaaataactgttttttatagtggatgtacctcgttttgccaaatcacagtagagccaatttttgctgaatttttaagtgtcaaggaggtcttagttggatccaaagaaaaagttgtgagaatatgaatatggagacagattgtctaataatcgtataaactttacgaa

SEQ ID NO: 180659 - DNA, 989 bp, Cannabis indica
agttgaagaggatagaagaaggttataaggcagaggaggaaggtgttgaggtaatgaaataagctctttatagctcacacactgctcatttactcacacacatttctttctactactgaccaaattctcaatcttatattcattaaggatattttggtaatttaggggttgacatgtgaggacattattgtctagtggaaagtgatgacgtggtgagatatgattggtgaaagttttattgttgtacaaaacgggtcagatacgttacatacttttgggctaccttaagtcatccaccgcccgttaaatgctcatccatagcgtgttctctctctctctctctctctctctgcctttatcgcctgtggtcgccacgtcatcatttctaatcttaaaactcgtgttacatgattacgtggctcaactactaaatactatttcttgaaagaaaaaaactactaaatactaatctctcatcccacgctgtcaaacttctatttcacgagtttagcagcttgttttatctaaaaaaaaaaaaaaaccttactatttcacgctcctcctttccttgtgtccacgcgccataaatgaatatacttttatttttaaaatttttatggtttttttattattattttttataacaaaattttagttttgttataaatattaataattacgtggatgtccaaatcttttatttattaccatgaattgtaatcaacattcctcttttccttagttttcatttttcttagtttcttaatatctcactcttgtatttgtataaataggggttcaccccattggaataaacaactcagaaattctcattcactttctctttctctcttcttcttcttctttcttctcatctattttatattattttatattattttataacacgttatcagcacgagtctctgcccaagcttcaagcatgagtctttgcctaagacccgatgtaagtattttggtttaaaaac

SEQ ID NO: 180660 - DNA, 629 bp, Cannabis indica
catgactttgcccctttaaacttaaatatgtaatgtgttgctgtacaacattgatttgtagaattgacgacatacactgatgtttggattctactctttcgatacattttcaggtttgatctgatttacttaattctagacaaggctgatgaacataccgacaggcgccttgccaagcatatagttgcattacattttgagaatcctgaggtatgatgatatatttgccaagtctcttgtttaagctcttatcttgccaaatctgtcaatcgtgatatctaaaattgtatgtcactccttgcagagcatagagcaggatgtcttggaccttcctacattgattgcatatgtaagctatgcaagaaagcatattcatcctcaattatctgatgaagctgctgaagacttgactcgaggttatgttgacttgagaaggagaggaaatttcccgggaagtgggaaaaaggtaaaaaggattatactttataatagatacagaattgttatgcacatgtgtctatggcataacagtctcttcaactcctaaacaccattactggttatgcatgaatgtttgatacgtctttgtgccatcaacggtttctgatttggtctattaacgaggttat

SEQ ID NO: 180661 - DNA, 606 bp, Cannabis indica
ggtctaaattattaatcctcacccccatgcccacaatattatgtaaacactcagaacattcatgttgagcttatgtgcataggctatttgtatgaggagaagaaaagagggaaagggggcgctgggaagggctactcgtgggagtggatgtggggagtctgggcgcatgaggaggcttgctcgcggggagcttgggcatgcatggaggctgggcacacggagagggttgctcgatgggaggctaggcgtgcaggcgtgggcgcgcgaagcttgggcgtgcaggtgtgggcatgggtagcttgacctgttcctttgctcctcctcgtaccaacacattcccttgggtgcatttttggaatttaaatttttcggacataacactaatgactccagaaattacacttagcacatacaagaaaaaatagaaaataagggcgacacattacccgcggagcatgtccacccctattaatggaattattaccggtgaatttactattcctctggtaatcttgaatgatcttgttttattaaattttggttgtttaatgacattaatttattaaaaatggattgcatattcattttttattattttgtaaataa

SEQ ID NO: 180662 - DNA, 643 bp, Cannabis indica
accgttgatagaattttcttacaacaacagttatcagagtacgatagggatggctccctatgaactgttgtacggtaggaaatgtagatcccctatccactgggatgagacaggggagaggaaatacctaggtccagagtcagttcagcggaccaatgaggcaatagagaagataaaagctagaatgcttgcctcacagagcagacagaagagttacgcagatccgaaacgcagagatgttgagttccgagtaggggaccatgtgtttttacgagtatctccgatgaaggggattaaacgtttcgggaaaagaggcaagttatgccctagatttacaggacctttcgagattctcgagaagataggtcaagtggcatatcggttagcattgcctccagccttatcagcagtgcacaacgtattccatgtctcaatgttgagaaaatacgtttcagacccctctcatatactcagttatgagagccttcagcttcagccagacatgtcttatgaggaacagccagtgcagatcctggatagaaaggataaagtccttcggaataagaccatagcattggtcaaggttctctggagaaacagtaaggtggaagaagccacctgggagctagagtcagatatgcga

SEQ ID NO: 180663 - DNA, 636 bp, Cannabis indica
gcccttgaccttcaagatattttcagcaacaagaaagtattgttaataaaaaagtttatttttagtttatttttgtggttaatttacagagattatatattatttatgttgaaatacattttattttgatgaatttttcttaatttataatcagttttatatggtggttatggtgttttctgatctagtgtggtggtggtggttatgtatgttctcgattaattatcgacagattctcgataggttatcgacaagatgttgtttaaaaaaagtttgtttttagtttttttttgtggttaatttagagagattatatattatttgtgttgaaatatattttattttgatgaatttttcttaatttatggtcggttttatatggtagttatggtgttttccgatctagtgtggtggtggtggttatgtatgttctcgattatttatcgacagattctcgataggttatcgacaagatgttgttaaaaaaagtttattttggtttttttttagttagatcgattatatattatttgtgttgaaatacatttcattttgatgataatttcttttaatttatgtaagtttgattatcgacatattgtcgatggattctcgataggttctcgataatagtaa

SEQ ID NO: 180664 - DNA, 665 bp, Cannabis indica
gaaaattttttgtctaaatttaactcaaaatatacacgatctattagagatggtctaataaagagaacaatatatataaaaatataaataggatcgactctaaaatttaatgggtcataagaaaaaaaaaatacttttggacttctatttagagaacaaatgttatatttttcaaaattaacaaaaaagatatgtattttaaaaaagaaaaaaaaaattagacccttaagctaggtagacactcggcacagacctagctatgccacgactataaagtattgttattaagtataataatacttactatttagtataattatgaagtgacactttaagaataattagcgatattttataaaatttattatattaaatgatgtgagatattataatatttaattgtaatatataatagtgatataataatttaaattgtattcaatactactaatatttattaatatttctcaaaaataataaataaaaaaaatttagcactttgctaaaaagatttaattattgataaaaagcttataatgtgaacgcaatcaacaggttggttattttaattaataatgttcattaataccaacaatatttagctttaaaaatacgaaaagtacttctcgtgatataataaactttacaataaatatatatttcta

SEQ ID NO: 180665 - DNA, 503 bp, Cannabis indica
gtttatatcctcacatttattacttctaaaaaataacctagattcgaaccacagctctcaaaaaaaaaaaaaaaaattaacttgaagataagcactatttgccactatatatagactcctctaggttagccatgatgcattactttggcacttttggcctcatcaaacttaacatatattctttccagaacaaagcaaatgccaaatctgaataatatcatgcatattgctttgtattcaacttttgcttttctctatttttcatctctctcaataataataataataataataataataataataataataataataataataataataataataataataatactagttagggtgaaagttcctataacaatatataggctcttcacatacgtgttgccatatttataaatatataatagaataataattaagcagttcctatatagtcatgctttgaccagaatatatgtaatacttatccatatatatccaagctaaag

SEQ ID NO: 180666 - DNA, 528 bp, Cannabis indica
ttcgtgttatacatttgtgaaatataaaaaaaaaatgacacaaaagagatgttctaaaaatttagaattagtaatgaacatatatttgcatcagtgcaaatgcggccacaaaagcattactaacgcaattgggctttgcatgagcccaaaatatatttatgggcttatatatttgtgccaaacaaatgctgtcttggacttgtcttggatagggttactcgatgtggtgaaattatatgtagtaggatttgttggtgcattgtttgactgatctgaagtgtaatggtgggacttggaggtgggggcttggagttggtaaagaccttcagtgagggtacccgtgaagaagtgcttgctttgttgtcttgtccttgataagacagcaaacatcatcaaattcaatggtgacattgttatgcttagtgaactgagaaatctaaagcaaatttttggttagactcggaacttgtagaatgccttttaaaacaggactggtgaggaatggagtgggaattgaagtacaaccaa

SEQ ID NO: 180667 - DNA, 506 bp, Cannabis indica
ttataaggagaattttataggtagggaggtatgtgttgttatttatgggatgggaggtttacaatggtgataaattaaaatggacatcccttttccatctcatcaaatcaaacaaaatttaactgaatagattgtttggacattggacatgacccgctgcccatatataaaagtacacatcgtgataaacacatccacaaagtaaaaattgtatagaaatttcaatcaagtaatttatttctatatttattgaaggggaatggaaggggtgtttgggtcaaattgctattggcattgagagcacagcaggtacgtaggggaccagatcagatgcaaacaacacaaataataatacatcaccagtccacacacataccctacccttgtggtgcagaatgtgtgccaggctgagggctctacatctacagttgcctgaatgctttcatctcatgcctccacactcttcacttcaccaacctgcgaactgacttcacctctctctctct

SEQ ID NO: 180668 - DNA, 681 bp, Cannabis indica
aagaaacctcgaggtttcgatggaaaggtatggcttttttatgctttttttttctttttggttgtgtttttacatttttttatttggtttgttttttttttcttatatgtttttttttattgttgttatgttttattgtttgttttaacttttcccaattggggaaagctttggtctatattcaagaggaccaaaagaaaattttgttgggtataaaaaatttgaaggatgagtttagtatgaaatttgatgaagttattgaattgttgtagagcaagaaagggtcatctgtgcccaaagattttgaggagaaggttgaagattctgttgagttttgtgccctaaataaaacccatttcaatataatcaggtttacttataaataaagatcagaaataacattttatgttgcatggttcacgtgatttatttcatgattatatatataatatatgaatttcatttgagtccagaacatatgaatttgttaatgattatagtgttgtcaacacagtggaatataatcttaattatatgttcaaaagtttattccctgatttgtcagaacactggatttagactgacatgatataatcaacgataggtattcttacaccttggaaaagtgttatgtcctttccaggcattggcaaagtttaccagtatcggatgtatggagta

SEQ ID NO: 180669 - DNA, 743 bp, Cannabis indica
caagtagtattgtctcaactagtgtggggaccatgggcctatatatccgagcttccaataagcagatcaagaatttaccacttaaattcactgacttattaattcttcgttgaatccacgcatagaacttagaattgcactctcagctatatagaacgctctatatgttccaccatagtatattgtttttatgtgcaatagtatattaaaaaaaactgaaaggtagtatattagtttaagattgtagtatattattttaatgtgctatggtatataatgaacgaaagacggaaattaaaaaatgtggaatattagtttaagtttgaggtatagttatatttcactaggaaatattgtctttatgttcattagtatatcatgaaggaaagaaaaagaaaaaaaacatgtggaatattaaattaagtttttggtatatatatattttccactatactggtggtatattaatttttcactatagtatttatgcttatgattgcagaatatagtttttatatgctattgtatatcgtggaaaaaaaatcatttaatagtatattagtttaagtttatggtatatttatattggtctaaggtatatcgtttgtatgtgatatgtatatcgtgaaggatagaaagaaaaaaaaactattaaatattaatttaagtttttagtattttttttttattttgttacagtatatctttattatgttgctatgatatattaataataaatagag

SEQ ID NO: 180670 - DNA, 788 bp, Cannabis indica
caccaaaagaatcctctttttttccattttaattaattattattattacataataatcagccaagaaaaacacataaagacaaaatcaaatgccaaccctcaaaatgacacttttacccctccgtaaatggtaaaattcaaattaaaaccctagggacatttggtcattttaactaatcccgcctaaccaacaacttaaagattaaactaggctagaatatttccaaaaataatccatcctttattttcgtgacattctaaccactccgtcgagcttccatggtcaccaggcccaaaaacattttttttcaaaaatggtatccataacacccacatattctaaaataatctccgtaatttataaattacgcttatttaatcaataaataaattcaccctaattacaccaagtaaaatcataatcttactccattaccaaaataattacatatttgataaaatatgcctatttagatattatttatttttcgggatattacagcttccctctctccaggacttttatggagcagtcaaaagcatcgttgagaaaacctctggagcataatcctgtcaggaaaagctccaatagggcaatatccattctccactaaataaccccataaaaatacaagcctagatcaatccgaaaattttcacagtaaactttcatcaacataaccaccgtacgcgttttttggacaaattttctttcagtcattttttcatatgtactttcaaagtccttttctaatcaagtcaaacagatggtgtgataggtattagtg

SEQ ID NO: 180671 - DNA, 538 bp, Cannabis indica
atacctaaattaaactaataaatatatataaaatacttccaatggatagaaccgatccaatccaacattcaatggatgttggattgattagatgacttaaattaattagaacggatttggataggcctaaaaatattggatgtgatccaatgaatacccataatcatagcagtcaagagaaattagagagaatggggcattcttttaattttgtggaataagagcatctattttttatttatttattttattttattttatttttttgtgaaataagggcattccttatatgagagcaattttttttttagtggaatgagggcaatcgttggatgaatgtatctattttttttttggcagaatgaggccattccttccatgagggtattcattttttttttagaatgagaaaattccttagatgacgacatctattttttttttttttgtcagaataaggagacatttcttggataagaacgtacatttttatttatggaataagcgcattccataagttaatagggagaaaaaaaga

SEQ ID NO: 180672 - DNA, 701 bp, Cannabis indica
tgtactctcttgaattgcataagactaaatgttaatttttgttcttacatatatataatcattttttaaggtaaaattaagtgacaaaattatatcaatagcttcctaataaaatattgtaaagtagttctactgtcattcttatatcaatttttaaatatgtaattatttgcttatttgacctcctaaaacttccaaagggcagggcaatattcacaaccctcgaaagcttctcatgttgttgttcatttaaattattttagtgatttctaatataaaacaaaactagaaacctacaactcaacctagttgtttaaattcttcattatgtatcagcaaaaaatattcttcattaatgtctcttttatttatttaataaaagatcttttgatgcttaatttctaatttttttaaaaggttgaaaatttataaattaattgggacaaaattcaacatgtcaagttaaaacatagtcgcatatattttataaagaaatgatcaaacaaaccacaaaccacaccaattaaaaaagctcaagatctgcaaactaaaaggaccaaagcccaacaaaaatagtctaaagccaaatgtcaaaaaaaaacaaagaagtgtaaaaactaccatcatcaccaaaaaaaaataaaaaccgaataacagtacaccactcagtcgtccctcactaaataaagaaagaagcatcg

SEQ ID NO: 180673 - DNA, 515 bp, Cannabis indica
tacattatttaaaagtatgtcatcgactcactaaaaaaaaatatttttaatctatttttaaacataaaataagaaaaagtgaatatttatttaattactatcaatatataaatatcttgctgtattatgaattatggttaattctattttatatatagcttatattagagttattaaaaataattaaagaatattatatttaaattccattcataattactgaatattttaatttgttctttagtcaaatttataatttaggctaatttagactttttactttaaatttagatatgtactaaattatgctctctaaacttttcaggtcgttaaaattctccagtaactattaagattgttggatttagaacttttgtctaattttactaagaaaatctgaatcggatgaaaatttaagggccacaaatttgatatattttaaaagtttatgtagacataaatttagtaaaatatcaaaagttcagggcactaattaatatatggacaatcatcac

SEQ ID NO: 180674 - DNA, 853 bp, Cannabis indica
gtcaaacctcatctgaacagtcacctcgcatttaatgccgcatgggagaaggcatattgaaactgccataagtattaagtctgactaccccccttctgcagctattacgctatgatcaataagcctagtgacaactactttatgaggaatcacatcagtcgagaggggataatggattacatccacctaacccctaaaatacctagggtatagaccatgcatttcctatgttacactggttgggaatgtgtacccctattgaaaaaatacagaaagacatgtagctcggttctagggatcaccccacaaaaatactataaatacctcccaaaaacattaaggcagggatcgagaattctggatttcatatgaaccaaagagagaaaagttaccaagaacattctctgtaataaatactctcataaatacaaaagactcgtggactaagactcattaatgccccaaccgcgtaaaaatctcgtgcactaatcttcctacaacttttttttatatattattaagttggttgccgaaaacctcggtcaacaaattctttttcattttattttattttttggcttgtgtatattgtttttgatttcttttttaggattttatattttttttagtttatattgattttttgttctattatcctttttgttggttgttattattttcatttcattttgaatttgtttatgttttagttattatgctcttctttttttttcctggtgtttatattaggtttttttttccattgtctttattgagatttgcctttttttgttacattttgttatgtatgctgacatttttttatagttgtttttgtagtttttttttctac

SEQ ID NO: 180675 - DNA, 507 bp, Cannabis indica
ctcaataattaattgacttaaaaacattcttataaatatttaaaaaaactaacattattagtattattgttattaattatagaccctcctacttctaccttatacagatctctgacacttgaaagagaacaaatgaagattcatatatatgggactcgacaactttctaaattattattattattattatttactttctgatttgaatgttgttgaaaattgaaatatataataaccaataaataaatatgtgtgttgatcatgaacttatttatttcatcattataaagtttctggggtttgatcttgtgggtttcaatttcctttgacggaataattattagttgatccatggcttgttgtattgtttttcctatacatggctttctatgttttgcttattattatataaagtttgattttttaattacaagtgttttttattattttaaatatatttttcgtacaatattaattcaaatagttcttttttttaaaaaaaaaaaa

SEQ ID NO: 180676 - DNA, 522 bp, Cannabis indica
gagttgtccctgtacaaaggaggaagttttcggtaatgcgtatttttctgggtggcaaaatatacacgtttctgagagtctatgagctaggtgtattgcttatattggggcgtataccctctcctttgtcttttatatttagatcgtacactacctttagaagacctcttactttgggaactttgatgtgctccgaccatgctggtggctggtgcaaattgagtcggaagttgaacgcttaccccaggggggattgcttacgggggcccctacgtttggtattcggtgtggaatttgttgtgggttcgtctttcttaaacttaggtagagctttaggtactaatttgtatcttcttttctttgtcttgaattttctttgattttgtagcttgcttatgatgttataggtgctcttgaatttgttgttgtcatgttgttgtaattgtagaaattttaggttgattatggtatattttgttattaggttctatgctagaatcatcttggtgtttatggtaggtc

SEQ ID NO: 180677 - DNA, 1079 bp, Cannabis indica
gtgttactttttttaattaatatatattacatattatagttttttaaaaatatatagaaataagtgcggattggattggatcgattacttttgaggtcaaacaacatccaatccgcacaagtgtgcggattttagatttttcaatccaatccaatccgcacaagtgcagatatccgcattttgcggattggattggattggatcgtgcggattggattggatcgaatactttgtgaacacccctaatcacgtgtagtaataacgaaactgatagtgatgaagatatttctaatagtattttactaacctcactttcttcttagttttttttttttttttggtaattataagccataggaatccataaaacatgcacatacattatctaagactttaagtaaatgactaaaagaaatagacaaagtccatctccaacacctataaatccctagccacagtggctcaccacacacggactgggctatgtattgttgggggccacaaaatatatatttttttctcaattttttaagttatataattttgcaattttcttttattttttattaaaaaaattatttaatgccatttcattttttttttttttttagcactttaggccattcacatctacttttggtacagtgtcgctaactacacaacagagcttgcaattcctcatcaagagaatcctctccaaacaaggctctaacaccagtagcaaccttcataaccaccactcccaacataactagaccctccttcttaatagcaatatcgagcgtggtgtagtatggttaatctctattgtggtgcggttactattgtcgtgatagagcgtggttaataaaatatagggcattttacaattttgtatacattattttaattaattataaaatatgtgaaaacaaatttattatcattttctcatacacttttatatataattaaaaactttttttcaatttttttttataatatatatatggtaataagtattgattattatatatatggtaatattggttttttttttatgtttacaattataataaacatactaataatataaaaca

SEQ ID NO: 180678 - DNA, 1223 bp, Cannabis indica
gcatatttatcttcatcatttttaatttataaaattaaagttaaaataaactaagttagaaaacggaaagatattccttattttcttcctaatttgtgtgggttctattatttttttcgttttttaaaatttaataaacaattgtatgagaatcaatatcaaactattaagttccatcctgtttaagtaaacatcccattaattgatataaacaaagtatagatactaaggacaagtgatctaacagaaagatgtattctatgccatttgtacaagggcctcactaatatacaaatatacaaaataaccatttatcataattaaacaaattaatattacttcctgaatttttaacatattatataaatggtcacagaatcaataacaaagagaaaaaaaaaaactgtcattaaaaaaaaataaataaatgatacaaaacacttcaaaagaaccaagaagtagaacaattgttgatttgttggacatatatatatttttttaatgccgaaagaattattcttctctaattttttctgtgtcatttttaacgccaactacgttgatataactttctttgtagtttggccggaattgtaaactttcaaaagcaatgtccccatccccatggtaccgttaattatatgtataaatataaatatttatatatatatagtccaaactccaagtcaatcatcaatagttacaagagttggtatttggccatgatttataaactcaatcttattcaaccgcacacagcataacactttctctggcaactcctcttggttttgtgcctataaaacataacatattatagataaaaaccagtcagtttctttatacttgtaacaaattgaggaactattaattaagtaataatcagctcaactagcataaaattggtacctgaatagttaagcccaaatcaagaataccattcttcaaacggtctcggaatgattcaagtcccctcctagagatatagctgaacctatgtatatcaaggtcaatctcaaagtaatttggtccctgaaagaacacaatcagcattttaaaattttaaatgggttgaatgagttcattcatgtctgtaaatcatcaacaagagttatattttaaccttaaaaaactaatgtgaggcgtgagagtactggcttatcattataagcattgattgtttctttcagcagaccaactgtagctctctggacttcaccact

SEQ ID NO: 180679 - DNA, 1274 bp, Cannabis indica
gaaatactactctacgctccacttcacactaattatcttgtaacccattaagtatctaccattcattagtcacgtgcgctctcctatatctttgatttaacttaaaccaaaccatacaacatgaatcctcaccttaacagcaagtggacatgcatgtacctaacaaaaacatcaatagactacaaggaagtctacaatacactcgtaaggtagtgtttcggtagacttctatttgttttgacaccaattttttaatctatttttttcatgatcgtatatgttatagttatttataactgctttataaatttttaaaaattttgagtagttcacaatattacgtgtgatttttttttacgcatggtaattgtttaaactttattttaagtattgtaaattattggtaatttttaaaaaaattataaggcaatataaatatcgttaattttgatgttgttattgatcatggattcataaggcatatatatttttgtgaaaactataaatgtaaccatattattgagttaattgtcataccatagtgtatttgttataccatttgatatgtagccattttggtaagtaaaaaaaattcaaaagtttcaaaaatagcaacaaaactacctatattaataaagagactccgcctttcaaaactcgtcgaaaagactaaacacgcctgtgcttaatcacatccttaattattaattatatataagggttacttttttttgtccttttcttttttcttatttttttaattaaaggaaacctatatatattaaaaaaaattaaacctaaaggtcattaaacaataaataagggtgttaataaaatatgactttttttaatattatacctaaaattaattttatttataaaaatattttaagaaaattatttgcacaaatacttacgtgtcacgttagcatacataccgaaattcaaaataattataaaaaatgaaaaaaaaattaggataatttcgattctaaaattttttattttttgggagttttgaaaaaataaaacaatcatttagtcgcttttgatgtgaataaaatatcaattaattacttttccattaaaaatttattttagaattttacatatatataaataataaaataactattttaatatttgaaaaatatatatttttctatctccaaaaaatgacgactaatattaaaagtagtttttttgtttgttaataaaaaaaaattaaaacttaataatattcaacatatcaaataatatcataaattaattgt

SEQ ID NO: 180680 - DNA, 630 bp, Cannabis indica
ccatcaagatgagccaactgaatgcacctccatcttgtagagcccatgaaatggatgggagcaccacgtgagtgatttagaagatctttgaaatctctagttcctagtattttatgtgctttttatggaaattcaacattatgcacccttatgagtttactaacgtgttctggactttgaacttttcagttgaagaaggtcatgtggaagagagactccattgcatcggatgcaaagcgcggttgggttacttcaactgggcaggtatgcagtgcaactgtggagcttgggttaaccctgcatttcaactccacaaaagcaggttggacgagtgtcatttgtgaagcggtttttgttagattttagatgcatattagcttaacatagatttccaattcaatgctactaatatttgtctttgtgaatataaatatatatcggaatgcatagcatagtttgcattaacatgggaattctgtagtattgtgatcgagtatcttcctatcctatacttctattcattatttcacttatgaccaacctcacatcttgtattaatttagtattggtttgattaccaactttccaatcaactcctccttactaattccaagcttgaaataaatttgt

SEQ ID NO: 180681 - DNA, 628 bp, Cannabis indica
tgtgctgctcaggatcagaggccatagcttggaatttctgaaacagaacaagagaaaaaccaaacccaccagagatataataagatcaaaattggtcgtgtgagtgtcaaataatcaaaagttgaattcttgttttgagttttgttttgtatgtgttgtgttatgttcaaaacttagtatgtacgcaggtgagttaatggcaaagagctcaattcagatatattaggtgatattttactttgaggttattatatatatatatatgtattttaagaagttgtaaaatgtgcaaccattactataatgtgataataatatttaacaatactttaaatttcccaaagtttatataatgcatcctaatcctattaaaatcactgatacaatctctaattctttcgacttctacaggaatgttttagtcttaattttgtaataattgtatatgttatagttttttttgagatggtatatgatatatttatttaaaatattatgtaaaattttaagaaatttaaaataaatagaaattaatgtttaaactatctatttcacacgagtataaaataaataaattattttttttgaatcttatttttaacatccttatctctgcacttattttaaa

SEQ ID NO: 180682 - DNA, 782 bp, Cannabis indica
aaatttagaggtggtgaaccatggaagaaggtctttggccctgtcttcatatatctcaattctgcacctataggagatgaacccgtttggctgtgggaggatgctaaaatacaggtgacatgagagacagtaccttttttctttttttctttttaataatattattattattacaaatagagataaacaacatagcaccatcattgacaatgaaacttgtattaaataaatatacagatgatgacagaagttcaaaattggccatacaatttcccagcttctgaggattttcagaaatcagatcaacgaggcaatgtcagtggtagactacttgttttggacaggtatccaattaagatacaactacttctagttgtataatgccttctttccccattggtttccatgttaccaacctttctgtgtttaaggtgggtatgcatgcagcttacatacttgtggtacgattttagaaatccccgatttctgaatttgatcactttttatttaggtacatcaatgaagattgtatatcaggaagaggtgcctttgttggtttggcaccaccaggagaagcaggatcgtggcaaagagagtgcaaggtgatttttaaagcggtcctcagggtttaacgtccttgggtgttagtatggtacaaatatagatttctgttagtacacaatttgagagacacacactaatgaagagaaacaaaaatctactgcaaaaaatctcgacttagcaagtcaaattactctgctaaatgcacacattgattgaac

SEQ ID NO: 180683 - DNA, 550 bp, Cannabis indica
acatctatactaaaaaagttatggaacttaataactaaaagaatgactgtgtaatttagaaatatgaaatgctttatcaattatatgaaaagatagaaattaataaacgaagaaagagtccaatttgtaagaatggacccaaaattaatgtaataaacactaggcaaattaggactactaaccataatgaaattgctctattcattaatccatgaaaattgcatcttgctctttctttttctttataacctttttcaggtcatctatccaataatacaattcacgatcatattcaatattagaaatgaaaacgatatgctttgtatatcttaaatagtacctataattgaaattctttattgtttactctcttttacaaatgattccccttttcttttcctcctcttcttctctctatacaattattcaccagtttagtccccaaggaagaaagatgtcacatgcatacgcatgtgcttttgtttattatcttactaaagtaaaatgatcgagacaacatatatatatatatatatatatatatgtattc

SEQ ID NO: 180684 - DNA, 625 bp, Cannabis indica
aattaaatttcactctctttgactatagtccataataatgtcaaataatgtggttttgcactcacttgtttgaatgaatccacatttgtggattatttaaaatacatatttttgtttctttttgacataagaataggaaaaaaaaaaaaaaaccttttaagtacaatattgaccctatcaagcacatttttgtccccttgtcaatgaattaagatataaaaaaaagaaattaagatagcttctccttctccggaaagttgaaattaactatttgaaaaagataagaaacacaatactattcacacaaattattgtagattatatatcaaagaaaataaaatcaataaaaggataattgaaggcttttgggctaagatggaagtcaataaactagtgcaaaactattagaaaattagttacctttaactaaatatgttatttcgtcactaagactagcttagtagtgagggaggaatgggaaaagagagaggtcatgggttcgaactcaagacctttaagctttaagctattaattaattgtaaaaatactattacgctacactaaaaaaaaaatatgttatttcgtcggtattttatagtgatgtatgatacatagatacccttt

SEQ ID NO: 180685 - DNA, 813 bp, Cannabis indica
tgtaatatcgtatcgtgacgtgcctaaactcgtattttttgtacctagtcatgatcgcgccttctagactcgtactgattttgtattatgtcaaaaagtttgatccgtatttacagcattttactaagtacaaattatatatataggtaccattccgccaatagaacaaggcgatatggaatccaagtttggaaaaaaaatattgaaatagtgaacatttatatatatctattctatataaaatgtggctatataacagaattcttggtttatgaaaaattattgggtgactttttttttaaataaaaaaaaaatacaaattattagatgttgccacgtaaagttcagcatagttaaacctaaatataattaatccacctaaagtgttgcaattaataataaatttgttcatattgtttatttttttattaaaaattattttcaaattttgatatttagaattagttaaattttaaatattattttaaattaaatttgaatgttttgatagtttaaccagatgagcattttcattaattccgaagataaatttaggacgaataataatttttttaattactattacaaagtataatagtaatttttatttttatttaaatcactattatgctttcaaatttcaatgattatcactacattgaatattattaattttaaaattatgatattaaaaaaaattaaaactaaaataaaattaacatacgtgacttggcacgtaacatctatctagtatatatatatatgtattaactttatgttgataaactttactaaataaattaatatatatat

SEQ ID NO: 180686 - DNA, 795 bp, Cannabis indica
atattaccttgtagactcaatcaattgatttaataagtcaattaagattctaaaataagacttaaaataagacataatcttatttgagaatttttacaaggattaggcaaatttgagattaaaataaaaaaaataaggatttatttgttaatttaaacactttgtgagtctaattaataaatacatttaaattgtattttatttaaccattatttatgattattaaattaaatttggtatttaaataattaaataagataaatggtaaaattagaaaagacctatttgttttattaaatgaaataaagtgacaaaaattaaatctatgggcttactattgtgtatcggcgatgggttagagttgggaaatttatatggtattctaacttttgctattttttttacaaaaatactgccagcggtagtttttacttttttactgtgtttttttttataagtttcatactacagtatattgtgttaagttttcaccgttgttctattggtgttttttagttgttctactgttgttttgagttgttctgttttgtgttttactggtgttttataaaaacacagtatttttgaaaagatttccgtatgacagtatttttgtaaaaattaaccaaaattctaatatttttgtaagttttcctaatttaggtcaaactttctttattttagtcctatcttataatcttagtgtgttggctatatagaaagaaatgagagctttgtcacctaagtcattctaagtgattttggcctaaacttgacaagaaaagctctctctct

SEQ ID NO: 180687 - DNA, 729 bp, Cannabis indica
agaataatcaatataactgacttgtatttcgttacctagccaagtagccagctatatattaaccccaaatggagtgtgataaatgatatataagttctcaatgcttagacttcaattctcatggctagaaaaactgtatttatatacctgtgaacgtttaattaattagtacttttaattaggcacttaataatatctgtggtgtgagataagtaataattaaggagcaatataaaccacccaacaccttaacacaactggaatatattataatatataataacaaaattggaaactggagtagagaagacaaaatagtcttaattaattaagtatttatgttataattgtcttagtcaacaattttaaataatgaaagaatggcatcattatacattcagaaatgctagaggacatcagtggtacctaccactctcttatgtgtcaatattgatattggtccaatcaagtatcaggttccatataattgaatataataattttttaaagaatatcgctagtcaatcgcaacaggacatatagaggaagtgctagacaccattgtgcctaatagcaatgcccttatttgtttatatttaaaataaggaaaggtacgttacaattgcatcacattcagtaaaaatatttctttttcttggtttgaaaataaaaaaaaaaaaaccttgactgcgctccactttaccttacttattggtaacagcagttacc

SEQ ID NO: 180688 - DNA, 675 bp, Cannabis indica
aaatagtatatatactatattgaataatgtttattattttttcatcaccatgttcaaatattatttattattaataatattaattgtgaagtaggttttgtttgtgagagtaaaaccttcctcagttatgttatttaattaactaaacaaaaaaatggccgacccattagagatcaatgatgatgaaacttagtacttggaaactattaccaatatcatgccttgaaatgctgatttattttataaaattgaaaatatttggtataatgcacaataatattttaagatgtaaattaattaatataaaaagtacagtattattaatgatcattaataatttaaatatttaaaaataattaataacattattataataaaaaaatttgtattaaagcgatcaatatgtgatacaaaaaatttatatttattgatttgttaaatttgatgcaacactatttatatatatatatattttttaaatttagcacatttaactacacaatgttagagatcatcacacttaaactgcacacaacacaataatgtgtatttaattttaacttataatttttttttttttaaagtggccacttttatatggttgaattacatcttataaaattatctagaataagacttttaagtcctatatatatgtgtgtgtagaagttggtc

SEQ ID NO: 180689 - DNA, 596 bp, Cannabis indica
acacaatttacaagtaaaatgggaaaatatttctttaaaaaaataaaaatatcaaaaagcattagtgatgtctaccactatccttactggtcgaattaattattggctaattaggatttttgccccttgaactttgacatgtaccaaatcatgctctctgaacttttaaggttattgaaaatgcctcttgaactattgagatggttgaatttaaagacttttgtctaattttattcatatttactatttcaatgattgtttatgtactaaaactatgttctccggactttgatatctaccaaattatgcccttcgaactttgacatgcactaaattatgcctcctgaactttcatccatgttagactttttttactaaaattagaaaaaattacttaaatccaacaatcttaatagttcaggggcattttcaatgaccttaaaagttcatgagacatgatttagtacatgtcaaagttcagaggacaaaaattactaattaaccttaattattactctcatatattttaattgtaataattttaaaaaaataattaaaacaatacacaaacaacaatctgtgttaagtagcactca

SEQ ID NO: 180690 - DNA, 696 bp, Cannabis indica
atatgcgtgcagcatttctttgaattataatagtgcaatgcatttttaatatcaagttcttacttattttagttaataagtattacatgtttactaaaatatataaaatttgacagttagttcttaaattatacaagttttaataagtttcttcatttggtccctttaatattttattttcttagaaatataaagtctccactcttaaagtttttgataatttattaatttcaaatatatatgtagtaaaatattattttgtagctaacgggaattatattataaatttatttttaatttatagccaacgggaaatttattatgaaattttacaagcgttgatgtaaaatttaaataattattaaatatatataattaaaattataatattacatattcatacatcaataataaaatatactataaatgttaaaatataaaaaacgtgaagagctagaatttcttctaggcattatatgggtctgtgagtgtttatgcttttttatcttattaataatatatatgaataaaatatattttaaatattttattgagaaagcaaatactatacaaatacttaaaaaataattattttaatttaacaaaaaaaattaaaataagtaaaataaataaaaaataaaaaaaaaatcaatatctaagagtgcggacttaatgttactaataaaatgaaagttt

SEQ ID NO: 180691 - DNA, 566 bp, Cannabis indica
gtttgttagttatttttttaaattactacaaactgacatattctggggtaaaatttttgtgaagatgtggttgactttttacaattatatgcataaaggcttcaattctcaaagaatttcgccagacaactcaaggctcacacaagtctcaaaggagtttgcctaacaacaaactattccctttacaatactatgagaacagtctaaaaagaaagtgaccacttacttttttatagagttcaaatactcttttgaatatttgaaaattatccaccaactccatggctatcacaaaatattttattggatgtttatgaacacaaataaaaagatcatacgaccaattagaacaagcaataagttacaaaataactccaaaatagagttgttacttgttatgtacctgatgacgacacatcgtctgatgcacactataggcgcttttgtagattctaaaaaaggaaagaagtcgcgagctactttaaatatttaattcttcaacgaatgttgccatttttttttcttagaaaatccttcaacttattttactttttacttttaaaaaa

SEQ ID NO: 180692 - DNA, 781 bp, Cannabis indica
attcatatcatattattttcaactcctcgtaccaaaaccctgagtaatattgggtagctaaatttgagcaaattatcagctaattaaggcaccaaactagtcatattttgaaaaaaaaaaatatatatatatatacatatatatatacatatatatagcgaaaaggagttaaaaaaccgtgaacaacattaccatgggcgacatgaattccaagagaatgtaatatatgcgaaccatgcgatccacagcacaaagccaccaaagtccaagcaaaagccacacgattccgactccgaacaagcatttcatccttcttcttcaacatctccttccacttcctcacattctccgccactccccttcccgattctctcctcttcgacgagaatccacactccgtcaacctcctcgccaagctctccgccacactcccagtatcatccaccgcaacctccgatttcaacttgatcgccgccgtctcagtcaacatattgaccgcaacagaatcaactcgttcgtcagcgaaagcaacgatctaactcgagaaacacaaccaccgcacatcattcccgatacatctaacagaaccgaagtatcaccagcggttcttgtacggacacggcagtagtagtctgagcttggagcgagctagaggtaacaaatgcaggcttggaagtcgccggaggaaaacaacgccgtcgatgatgctaaactcttgcgtcgccgttgaatccgaagctgagatcgatcgacattggcgagtttgttactattactgtga

SEQ ID NO: 180693 - DNA, 772 bp, Cannabis indica
aataagatgtatacaaataagtttagaggtaactaaaatatatctcaaattatatgatttaaaaataaaattttttataaaaaaataacgaattagtttcttatcaatactattagtaatgaaaaagttacttaaaaacgcaggaaaaaaaaactaaaaatacatcaaaaaacatacagataggtcaaatttagctaacgtgacatgtcaattatagtaataaaattattattagttaattaaataaaaaaaaaatttgaccccatatactaatttttaacgttttttttttttttttcaaatttttacagattggatttctcatgtggtttctatatggattgctatacggattttagttgcaatttaggttgctccgttagttgcaataataatttttatgtaaaattctgtaaaaatagcaaaaaaaaaaaaaaaaaaattaaaaaattaaaaatgtaaaatataaaaacccctaaaaaaatatatattattagaaacttgttataattaaataagtaggtatatatgaaaaacaaaatatgagtacgtagtactagtggactgaagtcttgatcaccaacagctccaaattatatataataattgtggtttttgagtgattgacaaaaacaactggacaacctaatcaaaacttaccctttcttatgaataaaatgcattcatgatcgaccaactattcccttcacgtggccccttcactatatataaatgtcaaatttgtagtcttaatggccttgtacctattcat

SEQ ID NO: 180694 - DNA, 674 bp, Cannabis indica
tttatcaaacttagcatgtagcttgagctaaaagaatcagctttggtgagtgaatttccactgaaactagagatggaaggaaaatagggataaggtagaggagtgagtggttgaagatgaatgggtattaatgatgatgaagaagaataaaaatggcaacttgggatgtggaagccattaaaaagctaactgaaactgagttttttgaagttgtgagtgtgatgagttgtgtgtatgtgggattaatttcaattaacaaattaatttgtcaataatcctaaatcttgaaaaaccttactatgccaatatatgttctgttttgggatatgcttattttatggtaataccatatgttggattcttcttttattttgttttttcaaaagagattttgagaaaaaaaaccctccatttcagaaaaatttgcctaactaaaaaaattgttaataatggttgcacaatgtaaatttgttgtcttgtgaggacatagttattgtataattcttgatcgtttcaatcaaatatgattattttttaaataaattttttggggaaattattatatatgtatactttttttttattttttacagtttgaattattttgagaatttgctccgtgagttataatgtaaatttgagttataatttagattattccgtatattttcata

SEQ ID NO: 180695 - DNA, 655 bp, Cannabis indica
aaaatttacggtttggatttttagagtggttgcaccgctagttgtaatagaatttttatacgattttttttgttgcaatttagattgcagcgctagttgtaacgtaaaaatacaaaaaaaactgttttgaagtgtaaaaataaaaaaagaccaaaaaaaaaaataaaaataaaaacttaattacaaaatcacatttaagacaaaatatttacacattaaatactacattacccacaacttaccgaaatcattaataatatatatgatgcattttttttttaatcaatgcatataagaatgtatattagataataatgaacattttttttttttcaattatccttatttttcaggtttgaacaatactttatttttccggtgaggattgtaaagctatgacacaccatttttggcgataaggttgttaaagctacggaactccattttttctggtgaggatcttaaagttattgtgacactccattttttttttggtacagatcttaaagctgtggtactataaatggaaatacatgagaatgtttatataattgtatagtaatatgttaaaatgtaaataagttaaataattttatgaagatatgagtatgagaatagaaaaataaaaaataaaccgttcaaaaataaaataaaa

SEQ ID NO: 180696 - DNA, 566 bp, Cannabis indica
atatattcatccaataactcctaatgccaattaagacagagttgattaagagagttcaatctccaaatgaaaggtgtcaacttgcccaagtatgtagtttagcttggagtttttcacaattattggtctaaggttcacctccaaatatttaatagggaaggaacctttttgaaatgacagcagctcaagcatggtgtgttttgaactactctgcatccccgcaaagtcaactatagagaaccaaaatagttctatctaaaaaggcatagggtagaggttttggcttcgacaacaatacatatgaaaaagctttctttgtctaatttctcttgtgttgttaaaaccataaacaatgattatatttcagaacttgattcggtaaggtaaatatccttctatatatatatttgcattacttatatatatatttataaatcatgtactcatttaagttgttttattatgattttgtctgttttttgttttatagtagtagaaatatttgtcttcaaggatatcgtagattttattgcatggctgcattaacaaaatttcctaaaagatcg

SEQ ID NO: 180697 - DNA, 869 bp, Cannabis indica
tgatcgaaagactctccattttttgcttttctttgtattgttgatttagaagggaaaagagagaagtgtttggttggtgggaaaataagattcaaagttagaagagtgtaattgtggccatgggtaaaggttgaagagagaggagtttgaggtagccacggtactgaggtgcttgtggctatggattttgcagtgtttagaaagctttgaatattgaaagtgggtcccttgaaatctgggatcctgtgcttacttggaagactgactagtcttctcagccactatttttgccacgtcttttttcttttttttttttttttttgtgcatgcatatactctattttcgtttaaggacataacttaagagcatcaatccaagctactactaaacgtgtccaaatttttttatataatctaaaaaacataatattttaatttctttttattctaaatcatttttaaacaattttatttttaaaacttgcttgtctaaagttaagaacaagcaccaacaccaccattcaaaacaattttatttttaaaattattctaatactttaaggcatctctaatagaaaaatttaaattcaatgttaaatcaacactaaaaaactacagtagcgtttaatcatttgttttaatcaattttttatttttgaaattaaaatagtaaaaatatttttcaaaaacatattctataaaactattttcacttttcaattttttaattaaaaatcataattttaaaaacaaaaaaaatcacttttaatatttttttaaacagttttttttttcttaatcaatattttagactccaaccaaacccggacccaaatcccctccccacggccttggcgctgaacccggct

SEQ ID NO: 180698 - DNA, 845 bp, Cannabis indica
aacatagcatttctccaaatgtaagtaaactctgttgtagattatcatatcagtaaaaccctgtgtctgataaatctaggaaactttattcacatagtcatgtttactttccaaagtgttgacaacacaataaacaggatcaagtatgtgaaaagggtttcaaatgaatttataaatcaaattgaaaagcaattgataacatgaaccaaaacatacacaaatgaatgaaaaatacttctgtttctttattgatgttgaataaactggattacattgaaatgaagttttatttacggcataaaacccaacaatccacatccagaatgaaccctgttagttcaatggcggaagtagacttgtcttctaagactataacctttggagcagcctcctggaccaaggctagaggtggtggcttttaagatccactcctagatgtttgtccctttatgcccttgttcttgccttccctagccacctcacatacttcctcagatgtagagttgatgttatccaagaacctgttatgtgaaccatatgtaatgtagctggctagtcttcatgaaacaaacaaaaagatacattatgtaagattatgtcaaatataattaatggaacaagcaatcaaataataaactagaagaatccaaactatttatcttagcataattaacttttcctctagaaaagggataatgtcctctcgacctaagttagtctcgtgctggaagaatcctggaaagtaaatattactacgtaggtccactctaatgtgatcatgtgttggtggacgaaaatggttaggagtccttacgatgtaatctaccttatctataaatcactgt

SEQ ID NO: 180699 - DNA, 837 bp, Cannabis indica
aaattggcgtttttgagaaaatcagatgcagaaatgataaaacagcaaaattgcataagtgaggcccattatccaaggcccatggccggccacacttataggcttttatcatttattttttcattattttaatgccaaataattctaacctaaacctaggtggttacctataaatagatagtgatggctctcattcacacttaactttgtgaactttgtcagatgaaattgagcctcctattctctatagccgaaatcaccttctctcttcttttcttctctaaatttcgaaatccttgagtgaatgagtgagtgcccacacacatcaagtggtatctcaatcatagtgtgtaagactgtggaaaatcaaccaacaagaaggagattcagcatcaaaggaaggagagaaagagatccaggttcagatattgataatgctctgctacagaaaggaatcaagggctagatatctgaacggaaggagtcattatattccgctgcacccaatgtaaggtttcctaaactttatatgtgtttatttcattgttttagaattcatattaggatgttaatgaaacatacttgttagtaaatctagatcctggtaaaatatatccaacagttacaagatgcgaatgtttcccacgtttcatatcttttctaacaagatggaatatgaatcactttctatattttgaatatataaatgaactgttgccttgaccctgtcaagtatgtgtaatcaagcaaactatgttcaattttctttttgaagtagcttattaaagaaccataaatcgagtcaagttcttcttaagtaaccttgattatctacat

SEQ ID NO: 180700 - DNA, 794 bp, Cannabis indica
tttttaaaacacaagttatgtttggttagtgttttttaaaaacaatattaaccaaaagtgaattggtttttaaaacaaaaaacaacattttgttgttttcaaaattcttgttttttgcaactttgttttctaaaaactgttttcaaaaaacaaggccaaacaagccaaattgttttcaaaaaacaattttctgtttttaaaaacaaaaacagttttttagttatgatgccaaacatgcacttagtttttatattctttggcaagatttttgttttttaaacaaggactataaggctgagacaatttaattttataattttttatttacttattttgagacattgtcttgttggtggactaactaattttaacagagcttaacatccatcatctttaatttaaataacttagttaaaatttaaatgatttaaaatacattttatttttattgtatatatttaggaatatagaaagaaagaattattgcaaaaaaataataatatagatttatatatattctataaaataaatataataaaaactctcagtaattacactcaattttattggggtatgagaaatattggaatgtaattgtttttagtaatatcaattatttagtgggaatttgattttatatgcttacaaaataaaaaaattattattattcaactaaaaatttaaacccttaaaaaactatgcattttttttcaaaaccccaaaaatacccccctcacaattctctctctctgcatcatctctctctctctatctcacactcccaacccgcccca

SEQ ID NO: 180701 - DNA, 774 bp, Cannabis indica
ttggaagtaatggattttgtggataatgtgtacaagaaagaggtctttacagctcagtatgcaagcattatttatccaatgccatcacctgataaatggccaaacccaggacaaaatccaatttatccacctgctgatactgttttacccgggagaccaaagaaagcaagaaaaaaggatgttgatgaacttcctgccgctaatgcaaccaaggctagaagatttggacagttcaacagctgtagcaaatgtggaaaacaaggtcattctcgtcgtacttgtaagaatccaacaagagagcaggtaaactttattctataattaatttgtattaaatttttataagctacttataaatgctgtaaattaatttacttgcaggctaatactgaaaaccaacaagcaactagtactagcaagaggcaaggaaggccaccaaagaaaaatccaagtgcagaaactgtgaaaagaaataagaggagagaaaaacaaaaggcaaggaaaacagcaaaacaatctcaagaaataccaagaacatctcaacaaggatagaaataggcagtggtagtgaaactattttggctagactttcttttgacaagttgaccttttgacatttacactttcttttggccttttgaaataggcagtagcatgttagtcttttgtacatttacactttgttttggtcatgttggcctttagacatttaggcttttagtcatgttggtttgtttgtttagtactcaactctgtaggcgttttggtctttct

SEQ ID NO: 180702 - DNA, 802 bp, Cannabis indica
gattggtcttaacctttttttttttctttctcttctctctatttatcttttttcttttcgaattctctttctctatcttttttttccacactaatttttttatatttatatatataaaaatataataagtgaatatttttatatctttttttaagactttgactcactcacaaaattttattttattattaaagaaaaatgcacacttattatatttcttttgctctcttttacattttcttactatttatacttaaattatttcatactatttttctttaattaatcacattttatgaaaaaatcttaattaatttcttttaacctttactaaaatatgttttattactttcacacttttttttcatttttttttaccactctttctctatcttagaaaaaaaaattaagagcaccccttctatatctttttctcttttacatgattaataaaagtagtattttttttatgttttgcagattattcgaagttgatttatgaatgatttgcatattttaacaaggttgatgtcttgttatttttatattgatttatagttgtctttttattattttatagttgtttttatgttattgtttaggtattttatggttattttattgttgttttcggttgtttttttgtgtttttttataggtgttgtttagtttatatgcattttttatggtgtatatttttggtttattctacatcatttttttgttgtatatatgtgcatttgttttgatatttttagttgtttttaagtgttttcaacatatttttttagttattttttta

SEQ ID NO: 180703 - DNA, 829 bp, Cannabis indica
attgcttttatttttctttttgttttttgcatttgtaaccgttttacatctgtaacactctctctctctccacattaatattttaaaccatttgtaagtgctcttgtggcttttgaatgaaaatttctttggtataactgtttactggtattactggtatgctatactcttcttatgatgtaaaagttgtttgcatttttgctccactaaaatatcaagcataggcaatggcaacactttatttttgtgaactgaaaatagctactctgtgatgggttttttttttttaattattctagtcagcttcttgtaaatttgtaatctcagcttatccaattagctacgagatctgagggctctctttgatttggcaaatattcatatttgtttgtagatgttattttataatgatactacctgttaaacacatcggttattgaagtctgtaattggcatatttctaatggctttagtatttattgtcttggttacatcaaagtaggtaaatgcctgtcatggttttaaatttgattatgtaaatgcctgatgatgacattttgtttcaatgagtttgtatatttgatattccatctttctgctcctgctattgcagatattcaccatattccaccagacgtcctgtgtatgatgtttgcgtacatatgtgtgcggatatcattactcatcaatgttattatttttattgctgttgttgttgttgtgtttgtttttcttcttctttttcataagatggatgctgtgaatgaatgtctgtggtggtggttgtagtggtttggtgtagagtcatctggaagatgtgattgaaaat

SEQ ID NO: 180704 - DNA, 508 bp, Cannabis indica
aaagactggccgggcataaggccagccagggatggccaaccagcttctgtgaggaagctggtctattacttgatgttccgtttgagtgtcagggtccccgtttgcttaggtactaacttggcctttttattggtgagttgtactgtcacgtggcataaattttgtccatgtaagcactgccacattaggtgggtaaaaattataataacatttgccccaagtccctgtgtagagatctctacggatagggacttatcaattagattgatgcagtttaggattgctctagcatttattgaatagaagttattgcatttttagccttttgaaatactttgtcttaaatgtctgatcttatttgttgtagtaaactaactgctttaattgtctcttttttgtggaggtggagtaagtgaagaaagggtcccacatgttctatataagtgtcttttttttttttagggaaaaaccctttttcacttttaacatatcacttctctcactagaa

SEQ ID NO: 180705 - DNA, 875 bp, Cannabis indica
aagtgaaatatgaatggattcctatagttttgtaaccattgtaaggctaaggcgcacaaagtgaacgtttgtagagaaaaggaagagccaaaaggtatgaagcaaaagaagatatgggttgaaaagaagaaattgttagtggaagactcggttgtagcaccaaagatagtggttgattcaaaagagttccaacaagtgaaaaagggcaggaaacaaactgctatagtgcttcatcctcctcatattttaaatgcttttcaggcactagatgaaattggcgaatgcacaaaaagtggagaaaattttgctagtacgaaagaagggagagcctcctatttcgaagggataagattatgagttagaacatcccagggatcaataaccataaagaaataaatagagtttaaacttttcatctataaaatgaagagagggtcggttagttttctcgagacgagagaaaggtatcaaagttaggcgacttatacgtaaatataattggaggatggttttttacttcgaataatgcatggtatgctggaggtcaaattatagttagctgaaatcctcaaatatttcagataatataatttggtgttctatcaaactaattcacttgtaagttttaacaacttctcgaaaagaaatctttttgtaccatttttttattgctttaaggaagagcaaggaagatttatattatggcaagatttaaaagagctagctgcaaagataaatgaaccatggattatgctcggcggttttaatgatattctccattctaataagagagttagtaagagattcaagatgagtttcttgggagctttctaagaattatgtgaaaaaaggtaaaaatgaaaagacaatcaaat

SEQ ID NO: 180706 - DNA, 825 bp, Cannabis indica
caacattactttatttaaaagcatattcctaagtggaggcgaagagtcttccttgcaatttttttttttatttttgtagggagttactttagtcataagagaaaaatttgattgaagaagaaaaataaatctttatttacttaaaagcgtactaaatctctagttacatagtcactagattattggaataggaatagaaatattttcgttggataaaatttgacaagttaaaagagactactattcgtcctccacgcatgacttggcttcagattcttcagggtcttcttctaggtcttctttgttggaattattttaccaggatcttagatctactcacaagtatgtttattaacatcctaaataagaactttctaaaacgataaattaaacacatataaagtttaagaaaccttacattgggtgcagcggaattaaatgactccttccgttcagatctctaacccttgtatcctttctgtagcagagtattatcaagatctgaacctggatctctttctctgaatccttgatgctgaatctcctttgctgatgatctttcttcacgatcttcctcactatgattgaggtattgcttgctgtgtgtgggcactactctaatcactaaggtaggttcgaaatatgaaggaagaagagagagagagagtggcggctagagaagagagaggaggctcaggtttttctgattcagaaagtgtgaagtgtaattttcctgaagccttcactatctatttatagcattccactagggttaggtttgaattatttggcattaaaataatgaaaatatcaacttaaaaaacg

SEQ ID NO: 180707 - DNA, 884 bp, Cannabis indica
atttttacgattttttttttattttatttacataaaatacggtcgttgaaattttgttcatttgttgttaattttttgttatatgtatgttattttttgttgtttttttgttattattttgatgttattttcatgttacttttatgttgtttttttgttgattttatgttgttttcgtgttattttttgaaaaaccgtaaaaatgtaaaaaaacattatttgaacataaaaatgtaaatattttacaaaaaatagtgcattatctaattattccaaaattaaaattattatagcgtgatatcaaatccaaaatttgtgtaattcggcctcaatgtatatataaaaatgcttattatataaataaataaaacaacatagatagtaaccatgttgtttatcaaatactttcaggcttttttttttttctaagtaaggataaaatatttaagttgaaatttgtaattaatatttgtgtacatacttagtgatgaaaaaagaatagaatagcctctttctttttctaaggatgtcttacaatttatactttcctaaattaaatgtatctatttttagcatccaaatcaattgaacaagatatttgagccccatagtttatatctaaataataatatagtcataaaaaaaatgcttaaagtattttataaataatttatattttatattttaggcgaattaaaatgagccacctgttaatatgatttagattttgctaagtattttttaccattacaaagaaattaaactaaagtaccataaaatatcttactttgaataatacacatgcttacaataggctttcttcgtgggctcaggcccaacaaatatctaagaaaagaagaaatcaggtaaccattaaaaaaaaa

SEQ ID NO: 180708 - DNA, 503 bp, Cannabis indica
cttgccaatggtttcacactttcacaaatgcagaaacccattccttcactattaaattttatgatccattccttctatgtcatattctacaaaatgatcattcatccatcatgtattcttgcaacttctgtaaactaggcaaatttgtctatataatagagcaagccgaacataaagtaatagtattggaaaactaaaaagttaatacttgagcaataatctacagtaattatatagtaaagttgcacttccccttttgttcttggcaataatctaacaaattatattaacaaaatctacaaaacatgagtatgactattagtgttgtgtccttgacagcttattgagtttctgcatttgtgaaatcattggcaagaatttctgcaaagagttggttgatagaattgtgtttgtcctgagaaatattatgagttttaaaaacagaaagaaaggaagaaaggtatgaaagtaggattttatgtaatttgttgttattaccttaa

SEQ ID NO: 180709 - DNA, 497 bp, Cannabis indica
acatataaagtatgagaaaccttacattgggtgcagcggaataatatgtctccttccactcagatctctaacccttgtatcctttctgtcgcagagtatcaccaagatctgagtccgaatgtccttctgttgaatctggattcttcacgatcttccacactatgattgaggtaccacttgatgtgtgtgggcactactctatcactcaaggggttcgaatcaataatgaagaagagggaaagagaggtggcagctaggttaggtagaaggcactcaggtttttctctgaaaggaataagatgatctacattgtataggaattaaattaccgtaacaccacaatatgttattctaactaactagtcctcgtataataagtgtaatttacttcgacgaaacgtaaaggtaaagtaagaggttaacgttacctaacccaaaccttttaattttacttccttcgttttaggtttaccgaaccgaacgtccgtaacgggaaa

SEQ ID NO: 180710 - DNA, 681 bp, Cannabis indica
gttcctcgcaggaatttttcaaaaattcacacaaagctcaaatccaatccaaacaataccaaaacttccagacctgttctaaatgtcccatataacaattctaaagcaacaaaaccacccagaattcacagaatcaaaaatcaccattggaggttcaagattgagttcaaaactcaaaacttgactaatccctccaaacagccactaaaacaagcataattcaacatatttcaacatcatttaacaccagaaaaccctacctaaccataacagcaaccacagcaacaaaaatcaagaatttgctttgaaaaccaaacttttgagctaaaaatcacaaacttaaacaaggtagcaagcatgcattataacctagttaatccattcattttagacataattaagcttctgaaaacataatcaaaaacctagcaacactacagccacaaaactcaaagcatgcaataatcatactttcaccaaaatttcaagaacttaaagaaaagctaagggaaacataccaacaacttgagatcactaaattttgctaaaagggagcttgaatcaccaagaaaataggccagctcttgctgctccaagagggccgaatagagagagaaaagagagagagtttctttgcaatttttctaattttttcttaagttggaaaaaatgaaaataaat

SEQ ID NO: 180711 - DNA, 782 bp, Cannabis indica
agatttattttattttactttaagtagaatttcaaaaatgtattatatttttttaatacattgatttcgaattcagagatatatatttatagaaaattaaatttgagttgaaaattaattatttaattaattttcgaccaacttaaattaagtaattttcataatatttattggaaaatgaatttttattttctttgatcttcctagggtataattttataaatattaaaaaaattatatttagagttatctaaattagtaattttaattaaataaatatatgttaaaataaatagattaaaataagtatcaaatgaaaatacgactctttaaaataatgagctgtagttataagaatattcgatctcaattgttggtcctacatggttaattattttcaatataacctctagatgttagactttgtcccccttatggatgatttttcattgaagcatttaacaccgtaaagatctcgaaagataagtattttgtaagttttcgtctctattagactctctctcctacagtaactagttagagataaatttacgaagtatgaaataataatggaagctcataaaataagaataaccttgactctctcctaccgggacaacgttggattcttattttgatcgaataaaaggttgctagaatggtgtccattttagatgagctgactactctattcaataaatgatatctttgactctcgcctaccgggacactgtattagtttgttggaaaccttggaaattatttaatatatgatagttttg

SEQ ID NO: 180712 - DNA, 817 bp, Cannabis indica
acagcttttgcctctagaatactccgccacacgtagctaggattagcacctaattcaacatccagaaacgaggaatggggagggtaatacctataaaaagtgttagtcactactgatatataataacaatactcttattcaatatatcactcactttaatttatatattcacactaatatttttagaattcatatattaatgtaaaatgaatttgtcatgagaaaaaaagtgtaaaatttgtaatattgatgaattgtaataaagctataaaaaatagtgtgaaaaataataaaatttaataggtatttataattgaaaaataaaattatattatttttttttaatacaaacgattaaattcttttttaacttttttatttatcttttaattgttacttcaaaaaaaaaaaaaataaaatcaatcacggtagtttgacagcaaatacggtgatagctgctgcaatttgctccaatgtataagcaacggtcaaagtgcgtatcccctcaccaatgaccaatgaccattccctgctagacaccttttcttagccattggagctggctaaggaagcatgcgtagttgcgtacgtttcctatttctaaaagtcaaaaatagaaaattgtaatgaaataaaggctttactatcaactactcaactatctgtttccatcatttggactactgaaatctaaatttgaatagtttcttgctctggttttcaacagagtgtttgtcacaattaatattattcaacaaccatatgcattttaagtggatgacttgtcgtcggacaaggcaattatttacttgttaga

SEQ ID NO: 180713 - DNA, 744 bp, Cannabis indica
aaacactttgtgaaatcatagaaataagatagactcgtgaagtataaatagttaactttaaaatcgttaaaaactttcttactatttatattcattattattctagagtttatttattacattaaagcgcatttattggttaacaaaattttgcattaacaattataaaatatatattttgtaatttatattataagtaaaatataaaagataattatacaaaaaaatttgtaattatttatgaaaaatactaagcacataaaaatattaataaaatataataatgtgagctagacattgcacacgtctagcctaatgttgtaagttcgtgcaggtcgtgccggcccgacccatatttattcgtattttttaaaaaatagatcgtggcgtgcgatgccacagaaaaatatgagtcgtaccatgtcgtgccaatatttttaaacggtacgtaggcccgatatttttgtgtcgtgctcggattcgtgtcatgttttgctcatgtcagatcgtatttcttaaacaagctagcttgttttcatattcgggcttgaattcgtgctttactttttcatatttttttcttcataattacaaacgtatatgtatattttatagctttagttatatttatataactttttaataatattttacataatatcatatacaaaaattattagcatctttagaatttaaatattacacttataaatgctcaaaattttatctcacactctataataa

SEQ ID NO: 180714 - DNA, 674 bp, Cannabis indica
gttaatttaatgagtaatattattatatgtggaaaagaagaatcaatgagtaacatataaaatgaaaatttagtgtccatgtgatattaattaactccattaataggttggttaacacttacttagtggttaatttctttattccatagacatgttctatcaattagatagatatatatatatacttctacaacttttttctaaaatatcttccaaatatacgattggaccgcttagaacataatacaccacccttcccttcccatccttatttatgtcattcttctttataaggaaaaacatatatttattttaattggcataaaggtctattctcatgaactcttaattaaaaagggaaaaaaacattttgggtcgtaatcggagttcattgaacaaatgggcccatttacatttacatgctatatggtagagtagctaggccgaagttagggccttgaatcacgcctatgatttgatgagatagaaaaggccaagcccaatttgtcatttatagtctagaacaagacccgtgttaagaccttacctcaagcctaatgcctactgcctacaccctaggttaatttggaaagaagaataagatcatatcaatatattaaagggaaacttacaaaaatactgaaatatggattaatttttacaaaaacactgtc

SEQ ID NO: 180715 - DNA, 819 bp, Cannabis indica
agtccttaaacaggacattgtggtgatttactctcactattaatttaggtctttattaacaactccacaaaaaggaagcctagcttttggttctttttctctattgatttactacaatactaaaattaaactaattggacttgtataatagttttattttaggcattttgtgtgtaatttggagttattataattgactcaacatcacaaagtcaagatttaaaatgacttatgatcttctctcatcttatcttaaatcttataagattccttaatattgattatattcgtgtagaaacttacatattttagtacaaaaaactttttatatactaaggatttgtccggtattattttctattttttatttttaaaattacattttcaaaaataagaacaaaaaatattttcaaaatacaagacgtgtttggttaatattttctaaaaacaatttttagaatttattattattattattttaaacaaaatatttcaatactttgagacctctacatgaattcaaacccgaccccaatcaagacctaggacttgatctcaatcccaaaggcgatctcaaactcgaatcttaacccgatttcagacctaggatgaaaaaactcaatgaccttgatgaagaaatatgtagggggactgtctatttctccacctgtcaacaacaaacctattgcatcaacaagtggcaacaaaagacacagaggagtacatgagtcttagtccctcacatgagcccattaaccaaaaaattagtaaaaactccctgaaccactgcaaaaaatactcatctgtgtttatgacgtg

SEQ ID NO: 180716 - DNA, 722 bp, Cannabis indica
acacgctttgctcaccttattattcaaaagaaacgtggaggaagatttacgatgataccatcaatctcgctggtgacgaggatgattgggttctcccagaacacatcaagaatatgaaagttggggtacctgtggaaaagaagcctgtaggtcgtccaagaaaaagcaacgctggaagaagacgggagaaccgtttcccgtctggtgataaaaaaggttctgtaccacgaaactgcagccgctgtggtgcttcaggccacaacagagcaacatgcaaagcccgcatctgaggcgtcttgtacgtattcgttgggaaatttgatatattgtaatgatgcatattttgtcatagttatttttgttgaggttgaatatttttcaaatattttaattatttttaggtttaatagttatttttgttgaataatgttgatattttatatttgaaaccacgtataattatcaaaatttgaacgaaaagaaaatctatatatacataactgtaatgttaattacacaaaatatacaatgtcccaataattacacatataatcagccgacattttggtaaaataaatcgacacaccaccgttgacgaaacatggctatccggtctggcgtcacatcggtcaatccacgctgcatcatgagatgctccacatactcaatgcaatacacgccacaatcaccactaaatgcaaaataaaatgtaaagtcagtct

SEQ ID NO: 180717 - DNA, 509 bp, Cannabis indica
tcaccatcctcggcaatattagcttcctcagctccttctgtaaattaacagataaatatttcaaagaagacgacattaagaagaagaagaagaaaatctgcacgctaaataaactcacagtgcgtccctgcaaacataatccttccgcctccgctggcccatcatccctgccgaaaatggaattgaattaagaaacaataaataaataataaagaaaaaaaaaacttacaaaaaggacaattgtttagagtgagtaagagtaagagttaagatgaagagagacacaccatagaaaaacttcggtgagcttgaaaagggagccgagagctctgatagccggaccttgaccttcagcctcgaccatgtccgtttctttcaaagaaggcggagagacaagttttagggcgaaaagatcaaaacaatggcagtcctcaagcaacccaaacaatttcccgctggtgttttaatggccccctaatcacgcctatagacgtccgcttttttttttt

SEQ ID NO: 180718 - DNA, 775 bp, Cannabis indica
ttgagtttctatgattagttttattaaaaatcgtctcacattaataatgtgtggaaatataataagatttgcgagttattcttctcattaccaattagttttgagatattactctttgcactttaccatacactcacattcattccaatatctaacaaatttagatagttaattgaaaataagaaaaaaaatatctattctctttaattgcgttataatgagactattgttcatagtctaattgtaaagaccgcttagtttaatttggaaattagcagttaattatgatttaattatgaaaattatttatagatatttaaataattatttatgctgttattttagaattcagaatgcatttttatgtcatatagtgaaatttcataattttgcattttccggtgcccggcaacatggaactcggtgtttggctcagtagaatcacaacttagcatgttagtatattgggacagtttagttagacattgggaatgtcgggattggtcaggaatttagaatttcccaaaatacagtacccttttatgttattttagtgtggagggacaaaaggtcattttgccccattaatattttgtcctttagtagactaagtgtaatgtaattatgtgtttttatttcaattaatcttggctgatggtatttttgataaatcaatttttctataacccttattttattcaaaaatcaagaaaaagcaaaattagcatttcctctcaaagctctctctctctctctctctctttcggtttgtctt

SEQ ID NO: 180719 - DNA, 686 bp, Cannabis indica
agcgaagctatgggcgtgagagactcagagcccaggggccctttctatcttgcctaatgcactttatacagttcagggctcacaaaagatcatcactcaaacaagtaaatatccctctaaaatagggaaaataatatctttctatcttatatttaaattacaaaaagataagtaatattcctaaagaataggttgatactagtttgaggaagaattcctatctgcatgggaagttaaggttgtttcgtaactaaaatttagctcgtggaacccaccattaatctagcctcttttcgaggctatctacacatgctggccgaccaggcctgtttttagggcctggccaacacataggacttcattggctagccaggtgtggtctggacagggttccctggctggccattttctccttgcttgatcttgcttgattgccttagaacccttgacaattgacatgtcgtgcaaggtgacttttttcggttgttgacggaccatattccacgtggttttgatttttgtctatgtagacatgccacgtcaggtgggtaaaaattaaataatatttaccccctaagtcctactgaggacgtctgttcgattaggagtttttaacttctaatcttaactgtaaaaaccttaccggtacgaactttgtcctacgttagatactggactcttcagat

SEQ ID NO: 180720 - DNA, 678 bp, Cannabis indica
aaaatatacacacttacatgtaagcaaattaagtctaggacgtggcatataaaagaaggaatatgaattttcctatttataaacagaagtgggcatcatggaatggataagaatgagttataattaaagggatcaagtgatgagtgagaaactcatcatgatcatcatcatcatcatcaatgtggcacatttatataaattgaattcgacagcatatgattctatagggctttgtgaaatggattttttttggttacgtgcaaggtatgtacatttttttttaaaaaaaatttatataaaaccaaaactaaaataataattacccttttcctttttcgaactatataatgggagagttagtggaagatgttgaactctgtaatttgttccaattatgtggcctcagaaagatgacttaaggtactcttaattactctttttactgcttttccttgatgttgatcttctaaaagatcttattaaactcgttttattctttccttaatttgcccaataaataattatgagaaagaaacaaaaagacttttggcaacttttaatacatatactaatgatcatgatgtagcctattatataatacttaaaacataaaggtaataaaaatcattagctaataaatctgtaagccaaaggtaagaaaaaaaaaaaaagaaaaag

SEQ ID NO: 180721 - DNA, 1007 bp, Cannabis indica
ggtgcatttttatgtcatttagtagttttcataattttgcatttccggtgcccggtaacatggaactcggtgtttggctcagtaaaatcacaacttagtatgttagtagtttgggacggtttattagacattgggaatgtcgggaatggccgggaatttagaatttcccaaaaatacccctttagtgttatttatgttagtttagtgtggaggggcaaaatggtcattttgccccattgttagtttgtcttttagtggattttaattggtggaattatgtggtttattagagtatatgttggctgaagtaaaataagttaagtggcatttatttcatttagtcaaaaatttcaaagttagaaaattggtattcaaaggctctctttctttctctcctcttcggttctgagcagctgggtttggggggggattcctcttggatttcaagctgattttagcatagatttggacctcaagttgttggtaagatccttgtagctctcccttttagtttcttgaagaattttgatgaaatgatgatgtttgcatgcatagtttaagttgttattgttgctgtgattttatagttgtttgcagaggtttaagcttgattaattgatgttattaagctgcttgtaatgcttgatggttaggttgttagagttgtggagtttttagtgtaaaagtttaaggttttcaaagagaaattggaattttagtggctgtagttgttgcatgagctagggtttgatttctgcagttgttaaatgcttgaatatgtgattttgatcaaggtttaatgcatgttatgttgtttagtcaagttttgagttttagaactcaatctttgacctttaatggtgaattgagtttctgtgtgtgaagctcggttttgttgctttagaaatgttctaggggttatttagaacaggtctggaaggtttgaggtgatttgggttggatttgaaagagttatgaatttttgggtgtttcctgcgaggaaccgg

SEQ ID NO: 180722 - DNA, 646 bp, Cannabis indica
aataagcttaagacctccattttcttcagtaacaatactagtgagggtatgaaaagtgacatcaaacaggaactcagaatcaactgtgccactaggaacattaattatttgggactccctctatttagatctcaacataaggatactgacttcaacttcattttagacaattttgtggcgaaactacacgcgtggaagttgaaaacactgtccaaggctcgccgagctaacttaatcaaatcagttaggctctccttgccagtttataccatgcagaccacgaaactttctaaaaaacttgcttttaaaattgatggtatggccagagacttttggtgggttgtgaaaagggtaactgagggctctatttgaaggcttgggatcacctatgtctgtccaaatccaagggtgggctgggcttcagaaagtctttggaaatgaaccagacctcattggttacgatggggttggtccctctaatgagaatcagttgttgtgttgtaaggtcttaagtgtctaagtacctgagaggttctcctttttgatttgctctttaaaactcggtactctttgtttggtaagaacgttggtgaaatcaaataatcgattatgaaggtgcttgcaagttgatatctgatggaagagc

SEQ ID NO: 180723 - DNA, 658 bp, Cannabis indica
acttttatttgaggttgaattgtgttagagactattttaaagcttgattttagttgtttatagcatttttttaggtgtaataacagctgtagaagatttgaagaagtttggttgagataggaggcagtcgaggaggtcaagatcctctgaatttccgtggtcacaacaggggccgtggcaggtttcaaagaggttgttatgaaaattcaccacaagctcctcaagattaggattaaaggtttgcaaaaatgcaagcccaaattaatcaacaagatgaagagatccagaggctgagacaacaagttcctcctgatatgcctcctcagcaagtgcctaccgctttggtcccagtggtgcagtaaataagttttttctggtaaccgcatatgtcatgaaagttgagtagtggctcataggaatttagtgagttttgaatttcatgggtgtcgttgagaatgactgagttacttgtgccaccttcaagttttaggaagacacactagtgtggtgggagatggtgtctctcagcaaggacatcactacgatgacttgggaagcatttaaggatttattaatgctaagtattataatgagttttttgcaacgctaaagaaagagttcactaatggttcaaggaggcatgttttcaatgtggcat

SEQ ID NO: 180724 - DNA, 542 bp, Cannabis indica
aaaaatatcatattttcttttaaataaaggcttatttttttttttttgttatgacctattatatttcaagatcggtcctatcacatattattaaagtttgaaaaaattactttttttatatattattgaagtcttgaaagaataaaatattatttatatatgttactaaaatatgtttagagaatgaagagaaccaatataccattttttttttatttcttttttataaaaaagctaattttttcttattctttactctaaaatgaagaaaaggtaagtaaacctcttgctgtcaaaattttagttttggtactattattagtgtcttacttttttttttcttaaaaataaaattgaaaaaacaaagaaaaaaagaaaagaaaatagttttaattacattattatggggccagcccaaaggacttgcctttttggacatgcccaagcccaactaaacaagaaacgtttaaggaaagcccatatccaaaaaatctaagaagagcaattcaacttcaaaaattccaattaattttcctaattac

SEQ ID NO: 180725 - DNA, 729 bp, Cannabis indica
aaatctatggatttttctatgcctaagtatttgataactctatggtatagagttatttttagtgacctttaaattgaaattattgtgaagagtagtgaaagtgtgtttgttatttaactttaattagtttctagcttcattttctaaatagtaagttagctttgaaatcatgtaaaaattgttatttttagttgtgtttatttaattaaatgttgtttgttggttgttgaaaaagaagaattaaattgttaggaaatacgaaaagaggcaaggataaagtgggaacaaaagctgaaactgggctaaattgctgaagcaatgctacaacgaattcaacattcttggtagtgatgaggaaagagttggaaaaatgaattttagttgtccacatcagcatgagcatgtcagttactcaaaattaagccaactggctgtcgtggaggaagaagactaaacctagtgggccaagtttggaaaggattgggcttctatttttagggtataattttgtgccctatttacccaacaaccaaaaagaagactaagtacaagcttcttcttcaagatgatggcaactgccatttttagaaaaaattaattgcaaaagcaaagtacaaaagaggaaggaaagagaaggggggaccaaagtgcaaagagagaagaacacaagcttttgtgtttgattttcttttaccttccctttatattttgctttcttcttttcttttc

SEQ ID NO: 180726 - DNA, 712 bp, Cannabis indica
ctaggtagaacttctgatggtggatgggttgttctttgtattttgttgttattctgaaatgtgaaaggtagcttgtacttattacctaaaagggtgctaatgtttagaccctgaaaaacatatgcttgtttgactcatctattgagaaatgatgtcatatgatatgaagatggtaaaggttagctagttgggtgattaaaatggtatgcatttcaagtagtattggtactggtagtcttctttttcacttgccaaaacttgattttcttatgcacatatgcattttttcttcaattactatggaagaatgtatagttagcacaacaacccttttactgattttaaattcattgtgtacttgttgtcctaatagtagttgactatagccccgtgtaatgtaaaatgataagagagaataatcacacctcttgattgaaaaaacctcatcatgttaccatgcttaatggtttatgcccgcctcttcaagtttgatcttgtttcataagatggcatacattttaagtttaaccactgcattattgttttgagtaatctaaaaacacatgcaaatataagtaaataatgttttttttttttaattttgatataagtaaattttttttgagcagcttcagagaattcacaaaagcttttctacaatagagcaatattaaaaaatctaaagaatcgttttaaaaacatgccacaacat

SEQ ID NO: 180727 - DNA, 625 bp, Cannabis indica
atgtaagataattttaatataatattttaaataaaaagacaaagttatcttttaatttaaaatatcttaaatatcaaaatatctaatcttataattaaataataaataaatattaaagaagttaacaaatttttaaatctgaccataataggaaatatttaaaattggaaacattccaaaatagaaatatttaaaaattggaaaaattccaaattgaaaatatttaaaattggaaacatttcaatttagaaatatttaaaaatggaaaaatgaattttgggaaacaatcccatgaaaaaattggatttttgggaaaaaaccccaaaaatcgcaactttttgggaaactgcccaggaggctgcatgcagcagcccaggaggctgcaagcagccccttacgcgcgcggatgcagggctcacgccgaggaacctcggcgcctgcagggtgcatgggcaggaaacctcggcgcacgcaggggagacacgggcgaggctcacgggcggatgcagggtgcactcgggcgtgtcacgcgcgcgcgattgagcaccatgcatacccgaaatcccgattttccaaaaattacataactttttactaacttttaattcggtaatcaagttactgt

SEQ ID NO: 180728 - DNA, 654 bp, Cannabis indica
atagtcgggtcttatggtaacaaatgttataagaccggcattacagaaacacaacagacagggatgggttctgacaatctttatgaaaattctagccagaagtactgctcctaattctaaagttcatatataagatatacatagattaagtgcaaagaacgcatagaaagcttaggccttaagttgtcatgtcaaagtatgatgtgctactttttctttacaaaataacacacattctgtattaacatgaaaaccatttcaacttctgatgatgcacaacaggacatactgtgctgagatagctcacaatatctcaacccggaagggtatggagattgtggagcaagctgctcagttgaatattattattaccaacaagttggctaggttgtgcagccaggaggatgaatgagcatttatgctttcatttttgtttcatttactttgtgagatttaccctcgggcacttttgtttgaaggtacttgttcttaattttgtcggttgttttggtaatctggtttctttgtattgtcttgctcaaataccttacgggtcgtgtttggtaattgattatatgttaggaagggaaagggtaatcttgatgataacctagttttgatatgaagttttaaattttttaaaccctttagtat

SEQ ID NO: 180729 - DNA, 564 bp, Cannabis indica
tttttctctcttagctaaacttaaataattaatggattaatgtgtatattgatttatcaatttgtgtagatttataatacaagaataatttgaagatgtaaatgagctagcttgtagtgaatatattttattattgtgtataatttgtctgtaaattggcttggcttatactataaaaaattgtataatatattttggaccaattggaggtgggtcgaagtgttttaaaattcaaaaatataaactctgcaaagtaaaaaaaaaaactgaacataaaaattgttgtatttgataatgacaacatcaatcgggttggaattttttgggtcatagagtttggttctgcggcctaggtggtcggagaactcctaggttaggggtgcacattaggtggattttaaagggtttcaagtttttaggttcgggttttagaatctaattgggaccgtacctgcctgtatgaaaactgagtttttcaagttttgggttcctgggttggctggttgtgctgcctcacacaagggagggttactctaatgcctcgcacaagagagagagagagag

SEQ ID NO: 180730 - DNA, 393 bp, Cannabis indica
atatttgcgagtttaaagcatgaaaaatttattatttttctttcttttcttttttttttttaaaaaatgtaaacatattatgcaaagtctagatcttgctacctgattaaccacattaccctacaccattgtttgtatcttgataatttgatcctggatctcgatacggagtagggacagtatgatattcggtgtcactcattgtctgcccttttccgttttttttttaaaaaattctggttaacataagaattactcttgttgatatttagaattgggatgtttttagtttttcgttaaaacttagtctgaatcctgattaagaagtgtctaaattgtgggttacaatagtaccattcagtactggctatttttctttactgtattccacta

SEQ ID NO: 180731 - DNA, 642 bp, Cannabis indica
aagtaaatctatgagtaatgttgacatggtttgtaaccacacgtttttcctccaccataagtgagggctctcaatctatttgagtgagggtcagtcacaattctaaccctgactctttttaaaataaaaaattattaattggattggattgaattttgaagcatacttggattgaatcagatgataattttccaaatccaaataataatcggattggattggattagaagaaaaatattggattggattggatgcccactcctagttcaaagaactaaccaccaactaatcagtaagttaatgttactcaaacaatccttaaccaaaagcaggcagcaggacaacaatataggtagctataaaaataatagtaagaaaaaaatccgagtgacaacaaaatttaaaaaataaaaaaatggtaataacgtcactgcgacatctttagacaaggaatttcaacttactactccttttacagccacatccagatctgcatcatcaaaaacaatgcagggagcattgccgccaagctccagagacacctaaatatttcaagaaattaaaaacttaaaatatatatattttatattgaacaagatgttaattatttataactaacagatacattacaactaacataag

SEQ ID NO: 180732 - DNA, 648 bp, Cannabis indica
atataaggaatgaactaaggatagctatcgcatcattcaagcatctcaaaatattcttaaagcccaagaaaccatgtcttgggctcctaggttgacgtttatgtcaacctaggtgcccaaaagtcaagttgtattgttgtaatcacttttctacactgcacgctactttgtaaaatggtcataactctctcagttcgtatacaaatgacgtgattccagtggaaaatcaaagctatttccaaggcgcatctaagtgtgtctcacccacttgccgcaattctgaagttttgggcctcaaaattgactcgcaagctaatgtaggatttcccatcaaattttcctattattttattgtaatttaatttgaccttcttccctataaaaggagaactcccctagctcaatttcacactttacttcctctcaacaaggtcagagcttctctctcttcacactttctccctttaaaaattgtgaagtgaagctagacttagtcattttttccttagttcttttgtaagaaattagctatgtgtgataataaaagctctaagtagacgtagctccattactttcgtaataggctagagcatttttcaaatgcctaatcctacttagtaggtcgacttgacgttctaggcgatggaa

SEQ ID NO: 180733 - DNA, 749 bp, Cannabis indica
atctaaacccatattaaaaatataaatattctttccggtagtgacaaaaataacacaacttactataggggttattaacttagtttaattaattgtgtcatgcatgttttatttgtattttttgtccatttttgaagtgatataaaattcaataatattaaattaaatttatatataatatttatatttaaataaatagtctccatctaaatccaaatcactagtcaaataactatttgtaagtcatccaactaactattaggtattctttaatttttgtttgaactataaaatttcaagtttgaatttatcgttcctaactttttcgtggccaaagaatcaataatttctagtgttggtgttggtgatgttgaacttgatgaggtaatatatattttcactttaatgttaaacctcaaatactcaaatgatgaaacatacatatgtaatattttttaatagtgtaatatatgtatcttcagtgacggattcagaatttttgatttgtggggcttaattattttatgagattttttacattttgttgtataattatttaactaaatagaagatatttaattttttttaacactaacttttttttacttaggtcgtatagccgtactctatcattagtgtgtccgtctctgtgtaccttaactcacgtacttactataaagttttacgtaatctactttagttcatatgagtgtgtcactaaaacaagtgatatgactaatgtgataaag

SEQ ID NO: 180734 - DNA, 941 bp, Cannabis indica
aaagacttttgtctaattttagtaagaaaagtctaatatggatgaaagttcaagagcataatttgccacatgtcaaagttcgaaaggcataatttgctagatatgaaaattcggagaacatagtttagtacatgtacaatcactgaattagtaaaattaaatgaaattagaaaaaagttcttaaatctaacaatctcaatagttcaaaaaaaaattaacaactagaaaaattcaaaggaaaaaatattaattaactttataattatattatataaatgaaaaagaattgaatatatataaataataaataaagtgaaagctttcattattattcgtatggtcttctaaaaagaccacaaaagctttatgttattagctttttgtacaataattgtaaccatctcgatcgattacatatgtacatacattgagattgaccccaaaagtaacatatatatgatatgaaatgatttttttttgttttcaaaaaaatatatataatagtatcaattaagtaattgatagaattatttcaaatatgagataaaattcaaattaaaaaataaaaaataaataaaattcaattatttcaaatatatacaataacaaaaacttatggaattgttgactctttaattattttatctctctattttgatctttcttttagaaatcctaactaattttttttttttttcgattcttaatctcgtctggaatagaatgcactattttacgctacgatattctaaatttattgattcggtttagaacatcgttacttacaataactataaaccctaaagtttaaagtatgttggcatatttttatttaaaaatacaactcgttttgcttatcacgagtataaaaaaaaaaaaaaatagttacttgtgcaaaaatattttaatcttatttttatttttataaattatttataatt

SEQ ID NO: 180735 - DNA, 804 bp, Cannabis indica
acatctttctatacatgacccacttttgttgcaaattttagcatctaatattcttcaagctatcagactgtgatttaatcttgattttccttttgactttttatgactttcaatttttctcactttttcctctcgtatacaatccaacaccacttctcgagttctttagctcactcttttgattcagctcttttaaatttaaggttgattgaacatcatcgagtgtaatcgactctcttccatatagcattgtatctttaatttttccgaacaacttttaaagaactgagtaacaataaggcttgatcctcatcttcaatggtgacactaatattttcaagatctagaatcaacttgttaaactcatcaatctgttctccaatagatttttcatccaacatcttgaacgaatatagagcctgtttcagatataatctattcaccaataatttagtcatatatagactttcaagctttagccaaatacttgcggtcgtggcttcttttgtaaccttcctcagaatcttatcaccaagattcgatatgatcgtaatatgagcctttgcaagaatttctttcttgttctttttagacatagaatcgagaagagatttttctccaagcagagcctcatacaatcctcagtgaaccaataaagtctttatcttcattctccgtaatccaaagtcattcataccaataaactttttaacatcgtattttgctgtaaccacgattacgaaccaagctctgataccagtttattgtgaaataacaatcaacgactcacgatgtaattatact

SEQ ID NO: 180736 - DNA, 536 bp, Cannabis indica
actactccttggattattttcctaacaatgtgacagtctatctaaatatatttagttctttcgtgatagactgaattggttgcaatgtgttgagcaactttattgtcacaatgcagcattgtaggcccttttgtgatcgattttaagttcttttaggatatataaaagccacactacttcacatgtaatgttagacgttgaacggtattctactttagtagaagaccttgatatagtatgttgcttttttgtctcttccaacgacaccactagaaataatcaatgaatatgtaaaataccactagtggaccgtccttgtatcaacgcctcgctgcccaactctgaattggcataggcgttgaagtttgtaattctaatgttgatgagagcatgattccttgtccaggagtacctttaattatattgtaaaactactttctagtagcagtcatatggctagccttaagtgtagcaagcaattgactcagtttgtttacttgaaaagaatatgtctgccctagcgattgttgctagac

SEQ ID NO: 180737 - DNA, 848 bp, Cannabis indica
ttttgaaacttttgtaggtatgtcaatagttatgtggcaatctctaattggtctatgttattaatttttattaaaaatcaatttaatacaccaataagaaaagtgaacatgggtaatgacttgacatttattagcaaggtcttcaaaaatataatttaagtattattactattaaaaaataaacttaagtatttatctgcaactgagagttacacttaagtatttatacccaaataactctatttttaattatatcattgtatttcgaaattgttaataaaattatatttttatcatatattgtagttttagtgatttttttttttaaaaaaacaaatcagtatttttgatactcaaaggtttaaggtaactagagaaaaatgaggttaaattgaactatatatatgagaatagctataaatacgtgtgtgcaatgccagtttgggccatattttgaaaaactagcaataatatgggtcgtgccttgccggctcataaaagtatatgaattgtgtcgtgctgcaccaatattttaaagggtaagcttagcacaacctgtaagctcacattttcgattctactttacttgggccaatccaatttcataaaagggtcagcttatttttttatgggaaacttacaaaaatactggaatttgggttcacttttacaaaaatactatcacgcagaaattttttcaaaaatgttgtgtttttataaaataagagtggaacacaaaacagaacaactaaaaacaacagtgaaccaactaaaaaataaccgtagaacaacactaaaaacttaacatagtacacagtataaaacttacatagtattttttgaaaaaa

SEQ ID NO: 180738 - DNA, 711 bp, Cannabis indica
caacatatcagtcttatgctaagttgattttataatgaatctttcaaattagtaaagaattttttttttgaaagcccaattcgtgaatttggctcaaaatggggttcataaaaatattaattgtaatacatatatataagtcaagttatagtagtacatttgtataatatctgcatataaggtactctgctctacttagatttatggtcaaatcctaattcattaagtatttgtatgatcaagcttgttgttatgtaccctattagaaaactttaaatgctagttgttagcataattttgtcattgtgagtttgttctttgctgggttaggaaggctgcaataagcccatatcacacttgacttaaggccaaaattttaaattttattgcttgattcttatcattgacaattatatggctaattaataacatttataaaaatgaatacatgagacatgattttatccgattcttaaaattgtaaaggtatctttagatgaattcattgatgcgaacattcaattggccttgactgttgtaagaaagaaccttaccagaagagaaattggagcctgcattgatagtagaatcttgcttagtatattgaatttgctttttttatttgtaagagatgagtttgatttattatatatttatttttaattttaagtgtttcatgataaaagaaaaaaaagtgcagggcattggagt

SEQ ID NO: 180739 - DNA, 716 bp, Cannabis indica
tcatcaattttttcacgaataaacaagtcaacaaacttaataacaaacactccacaatcacataaaacaaaaaaaatggattataatatgaagtcaaaaaccagtttcgtttatcacttagttaaaattctaacatagggaaaccagttagtaaagcaaaaccagttttttgaataatcaaaagaaaaaactgaaacttaaaactcagtaatgaaaaataataaaaaaccaattatgaaaactcgttacttaaaaaaaaccaattatgaaaattaataaaataataagacataccacaattttttaaaacaaatctatataaaattaaatcatagagactaactatattaaatgaccaattaaaaatacataaaaacctgtttcgtacctaacaataaaataatacgaagaaacttaaaataaaaaatatacactaatatcataatatggagcaaccccattaacagaaccctcaaatctgtgaaaccagtttcaaacatgtgaaccatgtgaaaccagtttctcgaccctgtaaaaatcataacaaaattaaaatgatgaacactaaagttgactgaaactagtttcatcaatcaacctaataaaaaaagaagcacacacacaaacacaaaaataaaaaaaaaaaaaaaaataaataactaatcacaaatataatcaaaacaacacacaatgcataacaaaatactaatcgcaaa

SEQ ID NO: 180740 - DNA, 735 bp, Cannabis indica
ataatcccctctatctacttcgtctctctctcggacggaacaaaaaaaaaaaggcacagtggtccgatggtcgcggtggagggtcgacggagctgggttggtcggggttgagcgccgaggagctcggttgagaaaggggacgtcggctgtgagaggggggctgggttttgtggttcggttgagagagaggaagagagagggtgatgttttgaaatgtgaggggtagtttaggaaaattagtaaagtggtcatattttttatagtataaaatgtattggtttaaaaaaacaaattaagttttttaagtataaaaaattaaatttcccttatacaaactcatatttttcctcacctcagattatgtccctaacaactcacatttcattatatatggttaatttggtttctatgtaaaacaattttgttgatactagtaaaattttgtatatgcttattaatttatatgttctcctcgacattagtatatgtttaatatatattatattttagtgcgtgctataattattttcatgtttattagtggcatgtgatagttttttttgaactttactctatgttttgctagtagagaaaagtttagaggaaataaaataaaatgaattagagaaaaataaatagaagcaaaatttttaaataatttagtaaatagatataagtgggtcaaaagtccaataattttttctaaaaagtaagtttataaaaatttactaaaat

SEQ ID NO: 180741 - DNA, 721 bp, Cannabis indica
acttgagaagcacagtactcgagatacatgtctttggcctcgcccaggtaatcgaaatttgcctgggggttaaccttccaaaagtcataaaaaatctcgagaccaactatctctaaggcatgtactttttctttctgcctcgccaccttcgacttgtgtttctcaatctcagctgtaagctactcctccttggtcttcttctcctcttccagccgatggaagacaatccgaagaactcccctttcctcttgaaggctattcacttctgtcgacagggtgccgatggtagcttcaagctggtcagaagcctcgaggtccttagtcaattcgactattttcttctcaacactaaaaagcctcttgttgacctcacctagctccaagttccaccctggcgtcatcagcgtccttcctggccaagtccacctccgccctcatggtgttggacatagcagcgttcttggaggcgaaagacttggctcgagaataagtgtaagccaactttagaccagcctacaaagagaaaaaactttagaatctgagccaagtaaaaaggattaaaggaaactgtcaagaaagacttacccttgtgaattccctcaagactcctcctatcagcatctcaagagaagattcgtagtcagtgccggccagctgctcactaccttaagaaaacaaactggttcatgtaaatgggaaaagcatgtccttgcctttcttc

SEQ ID NO: 180742 - DNA, 527 bp, Cannabis indica
ttatttaatttttttaaaaaaatgcttttagagaaagtccactaacaggagcaaactagttttttacttttaaaatgaagagggaatttagagcatttacttttttttctatatattttaaaacttatctattttagagtgttgtgagtgctcttataatttaaagttagcctttttttcaaaactatacctgttgttacttgttccttcgccatgagatttatagtactgagcaagttcaccatttacgcgagaaagaagcttctcagactgttcaagcctcttgctaaaaatcaccaccatcatcaacaaccgatttcaatttcttctgctaccaaacagaccccattagttgaatctcaaaaaaacactgtaaaattaagtgtttatatatgttcaacatatcaaaagcataaacgccctataaagccataccttggtcaatgaagtttggtgagagtgagttggctcttgtttagattttgtttccaagaagtgtcttcaccatttcatccagttctgtaatc

SEQ ID NO: 180743 - DNA, 500 bp, Cannabis indica
attctgtcattctttttgtatttcttttatgtatttttgttgatgttatttttgtgttgttattgagtttttttttagttgtttttatattcatctattgctgtagttttttctttgttgttttctggttgttgtatggttgattatgatgtcacggtccctgttcctagaaaaaatgtatcgtcttgaactgatccaattgtgtgcgcagatagttgttgcttggaagttgttgccgggttgtttccagattgctgcaaatctgcctgtgctgagttgttgtcatcccaatgcccattgctctgtaccaaaatttccagattacagatctccttctcttcgattcttctcctctgaacgcgttgggcttttgactgaatgttgtttttgagtttttttttttttgtacaacaatggaggttggataaatttttttccctttttgtatttggattttcgggatctgagtagtttttcttttgagatctacatttttttag

SEQ ID NO: 180744 - DNA, 513 bp, Cannabis indica
tgggatttcaaatttagaaggaatttgttggaaagggaagttcctagtcttatagcaatgctacagcagctagagcatgtgaatgtgctcagtgtggtggatgattgtagaatttggaacaaaacccagaaggtgccttttcttgtaaatcagccttttagttggttcacttcaaatccgctccatagtggtttggagtggtctaagattttgtggaaaaagagtgttcctttgaaagtgaaagtttttggttggttaacgacattgggcaaagttagtgttcatgatagagtgcaaaagaaaaggccttatctttccatctctcctggatggtgtgtctgctgtaaaagaagcgaagaagacgtggtgcatctattcttggagtattcttttatcaacaatttatggtttaaagtgctagaggaatttgggttggattgggtcttcccagtttctgtccaaaaaatgataacaagtaagttggttggttgtagacgtaagacaactttggcg

SEQ ID NO: 180745 - DNA, 500 bp, Cannabis indica
cattcatcgtaaaattacaaaggaaagtgcggccaataaagagagaaaataattttaccttcaagcatgctggagagaaaacgagtacaactttgtcaacatattccaaagatttcgaataatcaccggactcaaagagagataaagctgtagcaagtgcactctgagcctggtgcaattgagaaagctccttttctgccgcagaatgtcgaggctttagctccagaacacttttataacttttctctgattcctcatatctacattagccaaaaaccgcctgaatcatataattttccaatcagaaattggaaagagaaaggggagagagagagagagagagagagagagagatgagagaagcgagctatactaaaacctagaataagactatttctttgtaatacttaaatatttctctcactcatttactaataacgacgaagtagaagaataaactaacttgagaattacagtgaacatgaacaattatcattgta

SEQ ID NO: 180746 - DNA, 598 bp, Cannabis indica
aacatgcacaacaatgcattggagataggcagagctataggctcccattttagtattatggacagtgagattctgaaaaggattatataacttgttcaaagtcgtgcagttaggaggtattgaaactgactctccacggctccctctccaactgcaaggcaaggctctttcttctaatatgctgcatcttagatgtggatcaagttaatccttccactcaggaacccattggtgcaggtgggtaggccacaaaatttcccacaactgtcatggatggtggaactctgcagctcagcaatgcattaaacaggcaccccttctactttggagacctcatagtctggcctccccatggagggcctatgctttcgattggttcttcctgagtatggtgagtgagcagtgagctggggccggagagggagcggggaggttgatggagagattgcctttgcaagtgagagctgcgtcagcctttctggctcctccaatgcctgcatctaataactgagttatagttttttcattttgatgaatttatctgttcctggggttttattttgttttgttttagccttttgagaagttcagagttttt

SEQ ID NO: 180747 - DNA, 893 bp, Cannabis indica
aataactaatgaggtgttgttcattatttatatttttaggattggaagatgataatcttgtctaggggtcaaatataattttttgtgctgaaattcttgtgttggcaattgccattattcaataatgtttatgacacttttttcttccttcatttttttttttgttaaaattttcttcattggttttgttcttatagatttggtaagctcaagtattttttaaaaaaataaaaacatataaataattgttaattattataaaattaaagattttaggtttagaaaaaatcttatacattttatatgtattacagtttaaagcttaaaattattattttttttattttcagtaatgcaatttagaattctagtttgaagaaattttataaaaagataaatatacactttttttctttttaatctttaaaatgatttttattaaaaaaaatagtttgttagttttttagtgtgttttattttttaaataacaattccatttataaattttttatttctattaatagttttatctattttaggaatatagagaataacaaaataggaaatattaattttttaatatttaattaatgattataaatatcaaccattagatatttgatccaatggtcaagaataaaatacccatacatgggtaatacccattaagagcatacccatatatatatatatatatatgtatatgttatttttaaaaaaattaactatggaaattagtaactagtaacttgctactttgtttaataactagtaagtaatttaataattaaaataatttggttgtatattgcattatgttataggttgtgtgcttatatttgagggtcgacatatttcggtgttgatcgaatttgcaataggtatatccatcc

SEQ ID NO: 180748 - DNA, 646 bp, Cannabis indica
aaacaaacaaaaacagcacatttatacatcattccatgcgattttctcagaagagaaacaaaaacacaaaagaaacaaaacaaaaaaagcaaaactcacatggagaatttcgagctggtcctcgaggttctcaagtgcggtttgaatggcattgaggctcttggcttcccgaatggcggaatcggcatcggggtggagacggaagtccttgacgaaaacaaaacctccgtgaccgggaagggctttggattctgtaaccaccggagcagctccgtcggcttcggttccgagctcaacaaagactttgggttcggcttccattgttggtgttgagtttttttcttttttttttttttttttttttcaaaattccagaaaagcttttgatttttagaactttttctctttctaggttttttgatttatagagaaaaagtttctcttctttaagaggcatagcaaaaaaaatatctgacctttttccttgctttgctgggtttttagtttgtttcattcttttgagttttcacatttggtgttaggattttcctaagaaacaaacaagaagaagaagaaggaggaggaggaggagggggcgacgggtagggctgagagagagagagagaacgagaagagaaagaggtaa

SEQ ID NO: 180749 - DNA, 1086 bp, Cannabis indica
attcaagtaagtttctttctatatcctttttatttcagaacaacttatatgtttttgaagcatcaacttgttagttgtgttacattgtttgtaatcttggcattgatagttcgaggtacttggactgtttgtgctcataataaggacttaccatttaatttctgtagtttccattgtcatcatttaaacgtatatttacatatttacattcatgatttattaaactatttcaaggcatcttatataaactatatcaaggcatttctcccttagattccacattatggaaaactttttttactgtttttaggaattgtgttgtaattcatttattcagccacaattctgctaattttatgcaggacggaaaaaccttgtacaatgaattggaagttgttgaaggaatgaagttagaccggggctacatctctccttatttcataacaaaccagaaaaaccaaaaatgtgtaagtggttattatcttattgtcaattgtcagtgtgtgctagagtcatcctgtatgttttattttaggtctgtttatcctcatgtagagctgtttctgtatatttacaggaattggaagatcctctaattctcattcatgagaagaaaatctcaagcattaatgctgtggttaaggtcttggagttggcattgaaggtgaggtgttgtctagtctattatgttgatttcattttggttcatttgttttgctcagacgcagggtatgattgattctaagaaaaccaaacatcatttatttttcagagacaaagggaccattgctgattatcgctgaagatgtggaaagtgatgccctagcaactcttatcttgaataagattcgtgccggaatcaaggttctagaaactatgcagttttatttatttgttgtcgtttgagttgtttctatgttttagctactcatttatttactgcatatataatatcgtcatatgtgcaggtctgtgctgtgaaagcccctggttttggtgaaaacaggaagtctggtctgcaagatcttgctgttcttacaggaggagatgtgagcttatctttcttttttcttgttactgtattat

SEQ ID NO: 180750 - DNA, 605 bp, Cannabis indica
aaaattgtgtaattttaaaagggcaaaattttttttttgggcccctggactaggggggccctaggcacaggcctagcccgcctatgcccagggccggccctggccctataataaagtctgtgattcaacaaacctgatttttttcaattaaatatatatatttttgtaatatttgtgtataaatagctaacggaaaatagtaagaactagaaataaaattagaaaggttttcttttttcggttcctttaaactttctatatttatttttatttttgagacaaacaaattatatataaagaatgttaattaattatataaacaaattattaggttgcaaaatcacaaaagatttatttattataggaaagattgcaatataaatatcccttgttttattataaataaatgaataggtgtttagggtgatgatgaaaatgggtggaggtaaatcctctattttattatttttctatataatataattgaattggatgatttgattgattatttttctgaatctatactcaggtagcaatatggatcaacaattcgaagggcagagttttagtgggcaacaaaacgttggattctctccaagcaattt

SEQ ID NO: 180751 - DNA, 811 bp, Cannabis indica
aagcagagccggcggagaaaggttggaaaatgtaaaaacggcatagagacatcgccggtaattgttgggaatttgcgttggtgaacaggagacgaggaattgtagagaagtagccaaatgcagaagctattcttgtcagtgtcagtgccataactgaaatgatattatttgaagttgtttgttgggtttggaaatggaaacatattagattaaaacaccttgagtgggaactgggaagcagtacataaattcaaagaaagagcacatgtttcacgtatacaattacaatatacataacgcattaaatactgtatgaaagaaaagaaagggactgctgttggatgttccaatcggagttgctttataaatcaaaaattacatatggtaatggccaatgggaatgggatgccaggcagtttcctggtgacccactcaattttgtctgtttcaaggatcagccaaaaaggataaaaagcagcatgtccggatcgtgtattatatataatttagcctccaacacatgttctaaatctttgtatcatacacacactcctgaaaaattataaaatattttcaatataaaaaaataaaataaaaacttaaaatagtcttctataataaattatgtaattttcttaatagtaataatactaataaattaaataataattttcagaacatattttttaggtagataaattatcaaaattagataaggagccaaataatcaacttcttaataaacaaaaatattaaaataaaattaaacaaaaatattaaaataaaattagattaaaaaaattgtagtatc

SEQ ID NO: 180752 - DNA, 581 bp, Cannabis indica
acgaaataactgttagtaaaatatttatgcaactgttatgaaacattaaaaaccagaacactatttccacgtacgtaactctatttatatgtctcttcatgattcaatatgaacaaattcaccattaaaaatttagaaaacaacaaaaatacaccaagatgaacattttactatagtattaatgtaattttttttaattatacttgagttggattgtctgggaagtctagttcaactttttgagatctgcatctcacggatttgaaaattgaagtcagcacattagttttatgcaaattaaactggatttctagttgaattttagtttcgtagtagtttttctacaccttttttttcttcatgaattcgaaacagtccatgttttgattgattttgatcgtcttctcaggtaaagtcgtcagaattaatgatggtttgaatttttatttcggttgcgttgggttattgcgtggttgcgcgatgattgcccaagaatcgtagatggcgtgtgtaagtggtatttgtgtattttttttttatttagtactatatatttgttatatttggtccagctgaagtaa

SEQ ID NO: 180753 - DNA, 677 bp, Cannabis indica
gtctaaatgattatgccacctgtaataatatattaatatttaatttgtaataaagcatgtaattatattagctaataccctgtaaacattttttttaaactaaaataggaacaaacttaaaaaatagctctaaccacacataaatgactctttaaaatagtgaagtaaaagtccatcttcagcaagatctatgctaaatttgtcacaaaaaaaatatataaaatttgtgatacatttacctcactatttatattaatgtgctccaatatacatgaggtaaaataagtaaaaaaaaaaattaaatatattgatttggtattttatttaaaatatataaaaattattatttttatttttttattatttaaataatggtaatgtaataaataaaaaccgtaaggtttaataaaactaaatgaatcgtaataattagtaacgttaataaataaataaaaaaataattatttattatgtaaatacaacttttcacactaaatttagtatatttttttttagtaacactattatagtaaatataataatataccatcattttagcactctggtaatacttctaaacagatcagcattctaattttttattaatatatatatatatatatatatttaataaaaggtcaagatattttggtatcaatttaataaatcaatctata

SEQ ID NO: 180754 - DNA, 768 bp, Cannabis indica
tattaattagaagaaaagtacaaaaaaaaaccatagattaaaaaaattattactataaatttaaaagtaacttattattgtttttcagaattttaattcttattttaaaataataaaaatggaaataattctaaccaatatatatttaataatattttaacttttataaataaaaaaaataaaaaaatatatttaaataattattacagaacatatcttaaggattttttcaatttataaaatttaagaaaccacagctcaaaaaattgtacttctatatacattaatacaagtatatatatattttttaaaaattaaaagatacaaatatactaaattatcttagatcatcttcaatttattaacattgtgttaaatttgatataaaaataaataaatgttatattaagtacaacatttattattgtgcgccaaggcataataacattttaagatacaaatgaaaacaaaagtaaaatatcattaataaccattaataaataaatattttttaaaaaataattaatgataatattgtaattaaaaaatgtatattaaaacttatcattaatgatcaataacaaaactttaatataaaaaattatatttattgtgtattaaattttgtacaatattatatcttgtgccaaatttaacatatcttttatttttaatattggccaaatttagcacactattggaaaactaatttttttaaaagtgttaaaatatagcacttcactaatattttaatactctattagagat

SEQ ID NO: 180755 - DNA, 950 bp, Cannabis indica
tttttacataatatggagtaaagttgttccatagatgagagacatctcacaaaatagttaggaatttttacaaaaatattaaattttgaataaaagtttacaatttgactgctatacggaatttttttacaaaaatactgtctttttataaaataactaaaacaactgtaaaacaacataacagaacaattaaaaacaacagtagaataattaaaaaataactatagaacaaccgtgaaaacttaacatagtatacaatataaaacttatacagtatttttgaaaaaaaaattctaccctacagtaaaaaagaaaaaaaaatttaaaatttcagtacgtggtgtaaaaatctcaatagttattcatgaaaaaaaaagagaaaaagtttagatattttcagaattaaaaaaaattttaaatttaattaagcagctaaattaagtatagcaacttaattttttttaatattattaattattacattatgatacataatgatttaatatttctaaaaattaatatttatagttaatttttctcttttgttataagtgtattacttattagaaatgtgtcacatgaagttattaaattatctttattaataattatcaaaattaaaattatataaacaatatagtaatttttatataattttgttccttcttaattactaaaaaaaataatttctttcatattttgtttcctaccaaattcttctatcaatcttaaaaaaaaaataataaaaaaagaagttagtgcgatcttgtttggccagagttattgcactattttagtgtatattttcttatctatatagtgtataatctattatttttcatacaacaatttcaataattcaacactatatataacacaaaataaattagataaataacggtataagtctaaagttttaagtttataaacggcataaattcaatatttat

SEQ ID NO: 180756 - DNA, 729 bp, Cannabis indica
attgatgatactgtactaattcaatattcattcataataaccaagttttcatttttattcaaatccttgtttccattttattggttaataatctctacttttatgatatttgtttcaatttaacatatattagttttcatttcgattttagttgtttctatttcctaaacaatggtttccattggaggttaaaaggtgtctatttggatggtgaatggtttccattttccaaactatagtttctaatttgaagttaaattatttctatttttatgatatttatttccatttcatatacatatatatactgttaaatattagtcgtttctattttacaaactatagtttctattttgagattaaattgtttcaggataccataattttgatataattatgttttaagcaatgattaggttgtgtaactctgttataggttaaaatggttgagctcatgaaaaaaaatggaaattcttcgttcactatcttctaaagtcctttttcttttttttatttttgtaagaaaattgaatttttctaaaggggtttttattttgatattaatggtgtgtgtggtttgatattttgcagggttggaataaaggtaagttgtcatctttattatcaaattgttttagttttaaagttcagaatttagattcatagttgattgatatggatggacacacattggatagattagttatattttctcaatctctacaatag

SEQ ID NO: 180757 - DNA, 546 bp, Cannabis indica
ttttgtttttaaaagtagaaaagtgaaaatattttttaaaaacatgttctataaaactgtttttacttttcaattttataattagaaattaaaattttaaaaacaaaaaaaatcactttcaatatttttttaaacagttttttttcttaatcaatcttttagattacgaccagacccggacccaaatcccctccctacggccctggcgctaaacccgacttttgacttgaacccgaatccggccccggacctagacccgacttaaataaaatcaaaaaataaaaataaaaatgaactttagagaacacacttttgttttctgtttttaaaattgaaaaacaaaagtggttatagaacgcatttttgtttttaagaaataaattttttaaaaacaaaaattccactttcattttatgattaaaaattaaaaacaaaagtattaccaactacacgttggagattttaaattttgtaaaggagttgagcccgtgagattttgctatatattttcgcatatgctatataagtattaagtatatatcaatc

SEQ ID NO: 180758 - DNA, 761 bp, Cannabis indica
gatcggttctattaatattttgacacaataaaattttcaagcccttctttcaaattgtactcatttcaacttccaattgtaaacaaattctttcccaaagcctttgaatctctacagaaacatcatttgttcgaagacaacttatttaaccaattttatttgctaacatgtatctagtaatatttcagctacttcattaaataagatcaaagttatttcagcagttttgtcattgactttgatatgtattttgaacttatatattaggataaaaattagaaagatgtccttaccctcgactgggggaggttgcaatccttggttgttttagttatcaggcagattttgctcatttcctttagcccttacatactgccttaggtatcctcgcaagatgagattttcaagctcgtctttcagttgatggcactcctcagtggtatgcttgatatctcaacggaaacgacaatacttattgggacactactacaaaaaaatcctttaatgtcctttttttatgtccaacaaaattagtgttggacataaaaattattttaggagttttctagtccaataatgttggactagaaaagaacttcatcatgtccaataatgttggactagaaaactaacagtggtggtaaaatatttttttttaaaaaaaaaattggttactttctagtccaattgtgttggactactagaaattaatgttcaaccctactcatgatcagtatatgggtcaatgagctggaaactca

SEQ ID NO: 180759 - DNA, 554 bp, Cannabis indica
ctttttctttttcttcttctctttgtcccaatgtgcctggttttaaagaacaagtgtttcaattcaaattagggttttatagtctcataggtgaacaaatccaaaagcgatcagtggaaaaaaaagaaaagaaatgagtgcttcaaggttcattaagtgtgtcacggtgggtgatggtgccgtcggcaagacttgcatgcttatctcttataccagcaacactttccctacggtaaagaaaacaagactaatttttcttctcctgtttctttattgggttctgtttgtatcccgggaaaaagtggaaatgtgagagataaaagaaagaaagaaatgttggggttttgctttcttaaagtttttctggagtatgggtttctcagtttggattggtttatgaggtttagtgtttgtgcttgtggattctttcttggttttcatgtgtaattttctctctcgtgtttttcatcttccattcatgtttgttgctttcattttttcggtgtctatgtctttctatctttttcatgtttcgatttgttgctaaatttggt

SEQ ID NO: 180760 - DNA, 665 bp, Cannabis indica
tttctttgagagaaatttataaagctgtttttataaaagttctaccaacctatttcctactttgtattaacaatttaagcgcatagagttagtagtaagaattttactactacattaattgatttatcagatctatttaatttagattcttagaatacgctttggcttacagtttgttatcaataaaatgttaaatgtcggaaccattattgacgaactattcaactaacacttaccaagttaacacgtttgaatatatagacaaacgaattttgtatgtagaatgaataatcatatatgcaaataaaattcgttgttgggatcaaactttgcagatgtatagaatatagtgtgttactaagagcttaaacacattgtaagttaaatgcgcaatatgtacgtcatattggaaaactgtgcatttgtaataaactaattattaggtagggattgaatcatttaaatcatatttttttttaaaaaaaataacattcgaaacatatacacatgagaaaacagaacatgtacatccttaaaatggtttaagaaaacagttaatagttaagtagcaattataggaacatgtacatgcaactctaataattatatataaataagttataatatgaaaaatgctaattaatgagacaccaaagtgatgctta

SEQ ID NO: 180761 - DNA, 774 bp, Cannabis indica
ggtactttgatagtgggtgttctagacacatgacaggtgaaaaagaatatcttgagaacatcagaccaatgcagtgtgaagaagttacttttggtaacggtcttgttggaaaagtcatagggataggaactctcaatttcgaagggcttcctagattgaagaatgtcatgttggttgatggactaaaagctaatcttcttagcattagtcaaatttgtgatcagggttatactgtgagctttgatagtaatcattgttatgtgtataatattcttggtaaaattgtcttgcaagggttcagatctaatgataactgttacaccatcactacctatgctacttgtcactctgttattaacaccactgatttatggcatgaaaaacttggtcatattcattttaaaaatctgaggagattgtctaatggaggaattgttcgaggattacctaaattaggtaaggagtccttgggaaaatgtagaccatgtcagcttggtaagcaactgaaaatttctcataagagtgtttctgatgtgaatacttccagagttctcgaactcctacatatggacttaatgggtccaatccaggttgaaagcttgaatggtaagaggtatatttttgtgtgtgttgatgatttctcttggttttcatgggtagaatttttttagagaaaaaacattgatactttttgatgtttttaagttatctttgcttgaaattaaaagttcaaaatgattgcaaaattggtaagatagtttgtggtaagagtaa

SEQ ID NO: 180762 - DNA, 612 bp, Cannabis indica
atatattgaggaagtcatcaacatctgaggtcctataaggacgattattaatctccaaataagtggttaccatgttcaattgatattgttgattgacatcggggcaaaacattgaattttaataaaaacagtatacatataaaataagatactaatattgtttaattactgaaataaaagccaatcaatttggttttggtatcaaaatctagcataggtatatgtgatctcttatagatctcaccattaaataatactggcaatttttatcaaatggattataattgatttggtcaaatgtgtcgaaatgtattttctgtaggaaagaatatgcataatgtatatttaagaaataaatatgcacatacataatgacttaattgatagaaaatatatcatttatccaaattattaatatcatcttttagttttggagtagagatgtatttcattaattggagaaatgttaatactcctcctagagagtaactaacactcatcaaagacaacaaactaattaactctcaactaatctacaagcaaatgttaatactcctcctcaagatggagagtaaatatttctaaatctcatcttctctttaataagcttga

SEQ ID NO: 180763 - DNA, 553 bp, Cannabis indica
tggtccatttccttacgtacgagttgcggtgtactattgttttcgcaactcattttcccaattttgtattgtttttcccacttctgacactctttcaattttatcttttccaccaaggtacatcgttttcctctaaataaattaaattaaattaaaaatttaactcgtttatcttaatttgttgcaattgtcggttctttcattttttttttgaaatattttcaacatagatggttaaaaataatttttagttgtaaatatatatataaatttaatattattattaagtgtgaagtaacttgacaattcctaattaatttaaatcattaaatttttaattttttttttaaaaattaatttaaatatactaataagaaaatgacttgtgataatgacttaatatttaatagtaaggtagttacaaaaatataacttaagtattattaccataaaaaattaaatttaaaaatttatgtacaactaagagttaaatttaaatatttatgtcataaattactaaaaatacaataataatcttttttaagaaaatttc

SEQ ID NO: 180764 - DNA, 634 bp, Cannabis indica
gctttcttgaaaaaaacttcaactacaccgaaagtaaagacataattgacctgtggaaagaggcctgattccggcctcaaagctgtaatcgcccaagacatcactctcagctattcggctaatactaatagatgatcccgctgtacgctgcctctgtttattggtgaaccactctcctacttgtagatagactgctttgttgaccttacaactgggattctttatattggtttgtttcacccaggtgatagaaattcgtctatttcaagtgggttctccggctgagtttgagtagtctcaccttcacccgccgcgcgcgcactgacttctattcgtcttcaattgctcctgagcttgccagaaagtagaaagcctactctctttctgactgaatgtctcgcgtctccatgatactttttttttaatcattttctcggggcctgactgaatacaattctcgcccttgattaggtaggctattctatttattcaataataagctcattctcaaagtcctacctttccgaaattcccgactttcaaactcaaacttccgaatttgcttcctgcgtctattcaatcaactacagagacagcccgccttgattatgcttttgattctgaaccgttctcc

SEQ ID NO: 180765 - DNA, 676 bp, Cannabis indica
tgaaatgaggggatataatatttcgaatcgaatttcaatgacatgtctgagttaaaggaaaaatctaagactttaagctcgaacattgcagattaagcacacgagacatacacccagtgagagaatttgaagagacatctaacaaatataaagaatcaagctttccaatactctcacttgaagcaccactaaacttattgttggatgcttcgaaactttccaaatttggcattgatgaaaggtcaggtaacaatccaacgaattggttatgacttataactagacttttaagattgggaaatcttttcaaacggttaggaaaatgaccttccaactgattattgtcaagacgaagattagtcaaagacggaaaggtgtttttaaagtcatcaagaatcaatccaccaagttggttaaaactcaagtacaaagtctctaaggaattcttggtagaacttgatatatttccaagaagatcatgtaatgttcctctaaggttgttattagataattccaaactatttagtttaacactagaatttagtaaacaattaatggttgcaggatgtataaaaccgtcaaggatttcaatttcttgaagagaagtgaaggaatagtttgaatgggaaagagatgatgatgaaatatgatcaggtaccttaagaagttggcaatt

SEQ ID NO: 180766 - DNA, 1291 bp, Cannabis indica
ctcatcacaatttcatatttccttgaatatttcttgctcttcaattcccaaccccaccacaccaacacagatcacaaaatttgtataaaaatgtctaaggcatgcccccatttgaagggtcacacaaatatttataattgaaaccaaagcagcttttgtttaaaatctttatctgctcatccaattgatcatatcagtaccagctgtacaacttgtactgccattccttttattttcattcaatgggaaaatacacagaaattaacatttatctgagaagtacattttatcctgaaaaagaaagaagattcaaaatcagtaaactacttttgatagttgatttgaacgattaaatcaaatcacactaattttgttccttagttcagtagatccatttatttatcatattagagaaagaaaagtaaaataagaaaacttacgcttgttctgctcttgaatataatcctaaatatcataaataataatatatgatatgaagaatgttaagagtataggataacttacctactgctgttggtacttttatctctagttagttacattcagttagtctagttattcttagttttgtctgtttgtatttgttagtttctgttagtaggttagtttgtaggttagttctgtcttttcaatgtaatcagcaactatataattgtaatcttcttcatcttcattcaatgagaaaccattcttgataattctttccgtttaacatggtatcagagcctgcatgtttctcattcttctttgatgcttaatcgttcctttctttcttcttcgttgatcatccatggagtcatctccaactctttcctctgcaaccagccagaacagaagtacagctcctggtggctcatcgttcaaccccgttgtgttctcacataaactctccaccaagctcgatcatgacaattatctcctttggagaccacaagtgatttctgccattagaggccataaacttcagcaatacatctcagatactttcactcctcctcctcaatttcttctgaacaagaccgaatctctgaaaatatcaaccctgccttcttggactgggatcaacaagatcaactcctgtattcctggctattgtcctccatgactgaaccaatcctaaccagagttgtcaaactgtgaaaacctctgcaagattgtggtctgtactgtccacatactttgcatctcaaacagagcgaaaaatcgatcaattagcacagaactcagaatctcaagaaaggtgctcatactctcaatgagtatctctcaa

SEQ ID NO: 180767 - DNA, 614 bp, Cannabis indica
tctccattctagtcttatgtaatagtagctctgtactttattgttttacttttattttatttattttttttttttgaggagattttattgttataattatatcaattaaagttacagttattcttattcctaaaaaaatgtgagaagttgaagaagtacgcctgaatctaccgctacaatctccatagtttaaaagatgacattactaagtggccaatttatccatttcacattagacggttttcttatattagggaaagggattcgaatttggcaacactaaaactagtttgagaaaaacaaaagaataaatatctcagaaacaaaaccgaaaatgacttgacgtgtaatatcacaattgaattacgaccataaacaagaaacttgtcatgttaacctttcccttaaaaactaaagcatttgctagtcagtataggatgattgagttagtctaggttccctctactcacagaatcgtccccccaaagtcacaactgagtaagttatcattcaactactagtaaataaaaaccccaaaaaccaaagtagttctacctacctcattagacaatggttataattctatatggtctcaataaacaaatgaagaatcc

SEQ ID NO: 180768 - DNA, 740 bp, Cannabis indica
ttggcaatcatgcattaatgtgtctttatatctgcaaaaagtaggacacaggttgacaattatcaacgtgatcatgtagcctccatgtagtagaagatcagaacctcacgactcggtctcactaaatcggcccaaatgtcattagggatgaacatattgaccgggtttgaaccggacctggccaacccgcccagacctgacctggtcaaacccgaaaattaaaaaaaaaatccagttttatttggggggtctagttcaacctagtacactttcaggcgggttcacgggttggtttttatggtcaccaggtttcgggttgaacccgaacccgcccgccaacctggtcactttttatttttttttattttttatttttcttacatatataaaatctaatcattttatttttactacataaataatatattaaaaatagcaatatataataaattatatataatttgtaacttgaattttgtattttagatttgaaattaatgcattttttattttattttaatctaacgaatatagattagaatgttataagtttataatttatatgcttaatttaatatatagaaaaaatcacataaattttaatttttttaaaaaaaaaaaattaaaaaaattgatgagttgctgggtcaacctgaactcgcagatccgcgaacctgaaccatttcacaggtcgggtctaagtataatttttgaacccaaaccctacaaatctgcaaacc

SEQ ID NO: 180769 - DNA, 541 bp, Cannabis indica
atatcatcaattaaatcataaaagtactaatcatatttaaatgatatatagttaaccaactagcattagaaggagaaaccaccgcagattatgagacaaccccgtcaagactggctttgagttaaaataggtcataagcctaaatttttttttttggacccttactataaaataaatagtatttttaaaaattattaaccaaaaatatgtataatttttaaaagatattttttttatttgagcctctaaataagtgggccctaggcgcgcgcctagccggcctatgcctagggccggccatgaaccccatctctcttgtaatgtgtaggaatttactttaaagcacctacaccaacaaacaatcactaaactgagtctccaagatcaaaactgacctttcttatgtttgctgaataaacactattaatcctcacccaaatcgtcacagtttaggttttactcaaaaaatttaccctaacgcgaatcactctagaacattcacaaactcaatactcacaatttctaaaaaacccctagacca

SEQ ID NO: 180770 - DNA, 647 bp, Cannabis indica
aaatttaggcccagtttgccacttgggatctgatatagtttggatctgtgtccctgcccagatctcatgttgtattttaatccccagtggtggaggtagggcctggtgggaggcgtgtgggggcagctccgtcacagcttggtgctgtcttggtgataatgagttctcctgagcctgagatctggtcattgaaaagagtggcacctcctctgtcattctctctctcctgctttcaccatgcagcgtgcctgctccccgtctgccttctgccatgattgtaagcgtctcaagtcctccccagaagccaagcagatgccagcactgtgcttcctgtagagcctgcagagcagtgagccaattagacctcttttctttataaattacgcagtactgtttctttttctttctttctttctttttttcttttgagacggagtctcactctgtcgcccaggctcgagtgcagtggcgtgacctcagctcactgcaagctccacctcccaggttcacgccattctgcctcagcctcccgagtgctgggactacaggcgcccaccaccacacctggcaattttttgtattttagttagagacggagtttcaccttgtcagccaggatggtctcgatctcctgacctcctgatccg

SEQ ID NO: 180771 - DNA, 1041 bp, Cannabis indica
tgcttatccagagaaaacattagataacgtgaggttaactttaatatataaagattttttttaaaaaaaaataaataaaaaaaattattaatattctcccaagataggtttgttagagagatatgtggctaagatgatttttttaatttaaaaagagattattaatatttaaaagattgtttaattttttggtttaattattgggtttatttgttaacgggagatcaaacctaatcgttaaatttaacagaatattcttttatttttaagtatattctgttaaaccaagaaatgtcgttagatagacacttttaatatataaagatatatatatatctatattacgaaaataataattaaaatactaaaaaattaaacaactagttatttttcatatacgattctaacctattgttaccgaacattatgtatggtaatttacgatttgagatttgttgctttatttattgttctgttgtgacgcaaacaatggtgagatgctgcaaaaaataaatttctataaccaatgagattcatatagtttgaatagtttttcttttcttatcttaatgtcattctaatgacattaaggtattttgatgaaaaattagttttgtgtgtatacaggtggtatatatataagagtttgatacaaaaattttaaattaccactaattatacctaaagatcatgataatgtgttgatttttttgaacataaatatcatgatcatatattgatttttaaagatctaccctataatgatattggtcatattttaattaaaagatcatgattatatatgtataaaatttaaaaatatgccatataattatattagatcatgtttatgatcgtgagtgtgtcttcttaatagaaattttgttatttattgattgtatcttaataatgatcatgtccatattaattgccatgctaaattataataaaattattacatgaaaaatacaaattgacactttatttacaaaaataatctctataagtgtggacaacatttataagatagatttagaatga

SEQ ID NO: 180772 - DNA, 947 bp, Cannabis indica
gattgccttccacttctaccataaaatcaatatggctttgagaaaagccaattattctaccatctttttcatttttccataataaagcaaggccgccactcctgccttgggcttcaacaataaacactccttcgtagcccaaaccacgaccaacaaactccactctagctttattactttttgtttcacacagaaaaacaaaattgggttgcttttgagtaacagtctctttaaggaattgaaaagcccgttggttcccaagcccacgacaattccaacttaacacattcataagtcttggcgggcctgtgacacagaacccgccccatctaagttttttgggtcctgctgacataacaagatttccactagtatttccattcggcccaaatgaaatatcttcagcaaatcttttcctttttgtattcaaggattagtagatcaccatcaatgccatcattaacttcttccctcatattggtatctcgtatgatatgttcaatattcacctttttatttttcacctacacttaaaaaacaaaaaaaaaataacctaacgtaatttatttttgaataaaaaatagttaccaatacatttattttattttccaaacataaaataaaaatacttcaagatggatgtgaagcttttaacaatggtgaaggtagaaaccaaaaagagaaaaacagagcaagtggcagagcctatagcagaattgaatgccaagaaagcttaaccaactggttagcttgagaccaatttatttatactgtaataatgttcagtacatgagaaaataacagaaaagagcaacttgcctaactaacatttaactaactaaactaactgataataactaactgttattattgtttacatcccccctcaaacgaaatggggaggaagccatttgaagtttgccctttaggtagttaaaccgatctgt

SEQ ID NO: 180773 - DNA, 605 bp, Cannabis indica
ttacataagtttattttataaacaattttaataaatgtctaaaaaaaaagagtaacatctatattgtaatttacataagatttttttatagagtaatttcaataaatttctaaaaaagtatagccactcatctcttttttttacatcgcatcgttagttagttgagctcaagagtagtatcatcacgacctattttttcaaaatgatcattttaatatatgaaaatcatatatttgctaaattcagaaaaaatgatcgaaataaaaaacaaccttttagtttctttcatattttgttaacgaaaaagtaatcaaactataaaattaaacaaactttaatacattataaattattttctaatttcatatttataagttacctaatagtattctaaatgagtttatcttattgaaacatttttgataaattcataaaagaacttataaagaaacccaaatagtatcttaatcaatattaaaattgctaatattaaaaaattgactctactaattttgatattaagtatactttattgtaactctgtaattttatcacacatgtttaaagttaacgaaagttagtctagtgaagctatcttaaataac

SEQ ID NO: 180774 - DNA, 631 bp, Cannabis indica
gcacatcatcgagtgcgatcaaatctcttaccatacaatattttttatctttaaaagtgcgcaaaaaggcttttggaaggaactaagtactaacaaatttcgaatctttgtcttcaatagttacactaatatttttaacatctagaatcaacttgttacactcataaatctcttctccaacatatttgtcatccatcatcttgaatgaatgtagggcttgttttagatataaactattcaccaacgatttagtcatatacacagactttcaagtttcagccaaaaacctgcggctgtatcttcttttctaacctttctcgaaaccttatctctaagattcaaaatgatcgcactatgagcctttacaagagtcgctttcttatcttttctcgatagcaattcaggaagagacttctcttcaagtatagcctcatacaacccttggtgaactaacaaatcattcatcttcatcttccataatacaatatcattcgtaccaataaactttttgacattgtatttcgtagcagtcataattagaaaccttgcagtaatgaataaaagacagtaaaatagagaagaataaaaccaaggtttaatgagttcgagtctgtacaatactctacgtctt

SEQ ID NO: 180775 - DNA, 691 bp, Cannabis indica
accatatctagaaggcatgtttgccccattggtgttgttcatggagaatctctctaagactttgtctatgtaggttgtttgagagagagcaagagatctgttcttccggtttctgataatctgaataccaagaacataggctgcttcacccaaatctttcatatcgaattgagtgttgagccattccttgatgtgagtcattttcttgacattgtttccaataatcaaaatgtcatcaacataaaggaccaggaatactactacttggtcttccttgagttggtaaacacaaggttcatcttcattctgaagaaagccgtaggtcttgatgatttcatcaaaccttttgttccatgagcgagaagcttgcttaagtccatagatagacctatttaatttgcaaactttcttttcctgcccaggaagaacataaccttctggttgctccatatagatggtttcttcaagtaccccattaaggaaggcagtcttgacatccatttgccagatttcataatcgaaagcagcagctatggagagaagaattcggatggatttgagcatggcaacaggactaaaagtttcctcatagtccacgccttctctttgggtataacccttggctacaagtctagctttaaaagtttcgacttcgcctccagctcctcttttcttcttgtaaacccactta

SEQ ID NO: 180776 - DNA, 580 bp, Cannabis indica
cttatacactacaagctaaaagtacacatgtgagttgtgttaggtttctcatcctaaacctacagccaaatcatatattattgaatgggttaattgcagcataatcctaatagtgttgccttgcttgcaattaatttttaaaatctatttttttgacggtaaaatttttaaatttaaattctgttagtacttagacacttttaactattttttttttttttgcagttaactgccatgtaggcatgtccacgtgtacacaatccatatggacacaatgtacacacggtacaattttattggccaacctaattaaatatttaaaaataaattaatttaaaataaaaaaaattgaaaaacaacttttttttctttctttacttttttgccttttttttattgacttcaaaaacgaataattttgagaaaaaaccctaattcttttgtcttctctaatacctgatttgcgcaaccccttgctcctccctaatgcctcacctacacaatctcatgctcagccccgtctggtcacctccgaccaccaacagtccaaacagacctaggactaacatcccctgacctc

SEQ ID NO: 180777 - DNA, 569 bp, Cannabis indica
catggcaattgtaaatgacatcatagctatttcttttgttgttttcttatgaggtcttcaagttcaattttactcccaaatagtataatagttaaaaaaaaaaataaggctaattagtatttttgtccttgaactttgacatgtatcaaatcatatctcctgaacttttaaggtcgttaaaaatgcccatgaactattgagattattagattaaaggacttttgtctaatttcattcaattttactatttcaataattgtttatgtactaaaccatgatcccaagactttgatatctaccaaatcatacccctcgaactttgacatgtactaaattatggcccctgaactttcatctattttagacttttttattaaaaattagaaaaaaaaaaaaaaaaagtccttaaaatccaaacaatctcaatagttcagggagtatttttaacggccttaaaaaattcagagggcatgatttggtatatgtcaatgtagcaaaaatcctaattagctaaaaaaatattatagtaataacgaaaactgaataatatatacaagtagaaagttagg

SEQ ID NO: 180778 - DNA, 800 bp, Cannabis indica
acataagaaagaagtccaattccaattcccaatgacattcttccaagatcaagccacaaggcactctatcacaacattgataagatttaacttgtttagaaaagtagtaacaaaataatacaaagtggaaataacaaagaaaataaaaaccttggaatatgctatggcaagccaccctgcagtactaaaaagttcagagaccaacattgcctgcctcacaaaaatcaccaaaacaacatatcaaataaatgaagatattattaagaagaaggaacaaaagggttgtggacaatgttttataataacacttacacccttacggcctatgagatcagtcattctcccatttaccattccaccaagcattcctccaacagtcactattgatccgaaaaccgagtactgcagaagtgagtgagtcgaatttaggcctataaaaggttgtgtaagaaagaagagaagaaggataacaagtagtaatactaatagtacatacatctgctacagaaagcttaaaatctttcatgattccagattgagctggtgatgaatatccagtctgcaaggccaaaaaaaaaatcataaatataagtaatagcagactgctaccgtcaacctctttttcaacttccgtatctgaaaaacatgcccgaatattttttttttaatttttctcataattatgtttattatagttacaatatcagacttaaaaaaaattgagtagtttacagtattgacaaaatgttactgatattccagtttatgttccaaaaacttaaaacttattacactattcg

SEQ ID NO: 180779 - DNA, 729 bp, Cannabis indica
attacttgaatatatggtttcaactcacatggtaatgaattcatatatgagttgtgaatatcctgatgtgttataatttactcgtataatttctatctccaaatcagaagaaacacattctcccattttgtgaactctatctttttgtcttgcattgccccttttcctagtttttgaggcattagatttgctttttttctttcattataggaagcatgatattgcactttgatacatttaatggtatctttgactctttcttagtcaacctccttgtaaaagaatttttattaatatgttttgcaaatgaatggttatgaaacccacacacaactttaagtatccaatcatttgttactgatttttgtccactcaaagaaaatgggcaaccactacttttttgttaatattctcttttttcttttgagttttgtttacctgtcgatgactaccacttttctcacaggcaaatgtaattcttgcctttcgacctttacctgaatctgatcttgtaattacaatattgatttcgtgttgttttccttttatttttaatccattcaataagagcttctctggaattagaaaacctacaacgaaaatagtaaaataaaataaaatgaattaattaaaatttgaatatatcttcacatttaaaggaaaaaaaaaaaaaaaggaaaattatacacaataccatatcagtagtgaaaatatcactagaatcaaact

SEQ ID NO: 180780 - DNA, 595 bp, Cannabis indica
caaaactgggatcgaaacccagactggaccccagtctcggtcttggacctagacccaaacctagaccctgacttgggacatgaattgaaacaagactaggacccgtgattgggatgcagatcttatcccgtaatcatagaaccggagcatggacaagacccatagtcgatgtcttgatcgggaactcggacaagcacccaaagctggacaaggacctagacccaggcccaaacctaggacccaaaatcgaaacttgaacaagaaggtgatcaggaccatggaatagaaccgggaccgtgacctggaccttgacccggacccagaactaaaccgaacctagccccacgaactcgggccaagacctagtcccggacccagactaggactgagacttgaaccagaacctgaacacgaactcgggagtcgagcccacgaccacgaccaaccccctaaccctaaacttaggaattcagacgtagacatggacacgaactcatacacggaccaaactaactgacccacgacctagaccgggacgttgaaacacgggaccgtacgaccacgatgaagacgcagacctacgacacgaactagg

SEQ ID NO: 180781 - DNA, 636 bp, Cannabis indica
ccatacaagcccattttgctttcaaagagatcaacaaatcatcgcaacatgacaaaccaaaatcttcagaaatcttatgaccacttcataaaaattttatttaaaaattatttaaataattaaaaaaagatatttgcggcaaaactacttaaactattcattttgttacacttaactagaaaaaactgatttttggtggcaaactctccaaatctcacttatgttatgttatttcgtcttctgttagatttatacagttaagtgacaaggtggattttctatgtgggtacaatcgtacatgttgcatattttcattcgtccacatcattttaattacttaaatgttataaaaataatttaaaaataaaataaataatttaaaaataaaaataaaataaataactgtagaaattaattttttttttcttttcttttccatttatcttcatgttcccatgctccccctttctctcttttgcgcgaactttttaaaataggccatctccgacgacgaggatgagacactatcggaacacccaccaccacgggctctcatgaaccctgaaacttgaagatcaaagagtttcgtccttttcactccaaaactctactcgccatctctcttttcatggtgga

SEQ ID NO: 180782 - DNA, 733 bp, Cannabis indica
acacaaatattttacatatgtgtgtgtgtgtgtatgtagaaatagatatatacactcagacaccataacagaataaagccagcaatagacaattattacctttttttaaaaaaaaaatgattgatgtattttaatggacaaaaagaaagtaaattttactatgaacaaaactccccttacattttggaaagttggacaactgtatcaagtgtaagaagagtaagaacaatagaaataaatgtaatttttttctatctagcaaaacaaatatctaaatacatactcacagacaccataacagaacaaaactacctatagacattaaaagattggatgtattttgatgattaaaataaagaaatgtttactataatgaaatccccttgcatttcgtaaagttggataattgtaggcagcacaaattcgccttttgcacagagagaaatacatttttgttctttatagtttatagtgaccatttggtagataaattagagataaaagtagcagaatttctgaggactcattaactgccaatgcttcagaagcatacaggacttggtccttttcttttcttttttttaatccactttattgccattagatactagaaaacaataaataaccatatacttaccattagatttctaatcaagtcagaatcattgagatcacagcaaactttccacaaagtattgtagcattcatgacgttttgcaattgataatatctg

SEQ ID NO: 180783 - DNA, 593 bp, Cannabis indica
attttcttgtgtcattatttcactattgagtccccttacaaatgtattattaattaagctatttgtaattggtgaatctgataattcattagcgatttcataaagtttattttattataccctcttgataaattttgggtcctctctctagctagtcaaattaaatagttgtggtttgtagggcattacatatttagttgtatattttatacatttcatggtaagtatataatatatatcatcatatattcttcatgtggtctatatataacaaacttttcactttcacttctaccattgtagaagcatttctattttttgttcattatgaaattaaatctcaattcttcatataatctaatatattaattagaggtaataataataggcattatgtcggtccttacaaaattctgaatactttgtagtgtcgaaaaataaattcaaaatatgcctgtaaaaataaatatgcacccgggacaacttgaatattttttgattatattttctgcacaaaaaattattcaaaatttccaaaaaaaaaaacgaaggcttagatgcctagtataactataacaccatcatatgtttat

SEQ ID NO: 180784 - DNA, 546 bp, Cannabis indica
ataataaaataatttatattaataaattgttatgaataattatatatattttaattattttatataataatattatatatttaactaatactaataatataaaataaaaaaattctaaaaataaaaaaattaatttcataacaatttaaaaataaaaatttaagagataatatttttataacaatataaaataaaaatttattaagagaaaatattttagagataaaaaattactttaattcgaacacataacaatataaaaatctagaatagtaaaataaaattcttaaactaaaatttacttcatagatgtatataaaattaaaaattattgctagttaattgttagaaaataaataactacttatacaaatatatatatatatataaaaaatttattggataagacattaatcaatcactaataaaaataatatttttaaattaaagaaagtaaaataatataactactacttataacatatatggatataacatctaaatgatttttaaatgatgtgaaacttttaatttgtatgtgtagtg

SEQ ID NO: 180785 - DNA, 533 bp, Cannabis indica
aatttagatcaaataaataataggtttgttaaaaaaattttgaataaacaatataaataaataaacaaacattgtccatgtaacagatgtgaaataagatattaatataattaaattattattcttaaactaaccaactaaattttgaaaatttagggttgttaaaacaaaccttaaaatctcaaaataaaggaaactaattttaaaatatctaggtttatttgaatcaaattaaattaaatatcaaataagtgttgggttttatgccctaaataaaactcatttcaatataatcagatttacttattaatatagatcagaaatagggtaaatggcggcaaaaacccccaatactttggttttactttcgctaaacccccacaacctaaatttctgcgggtaaacccccaaaaaacccaaactattactgttagtcaatttaacccttttcccgttccaaactttaagtatgttaagtagtccaagttaggcgttgttccaccgtggacgacaatatacacgtggcacaattt

SEQ ID NO: 180786 - DNA, 650 bp, Cannabis indica
cttgcatcaaaaggtgttaacatggttcctttcaaactcaattacacagttgactcagttcaaggctattataagttttacaatggatgttgacatgttagctcattttgatgagtggcagcgatcggggaaggatgatgactacgaagctcaagatcaatggccggttgaattgcgccgagcacgcttctttccttgctgttgactatttgcaggttttcctatacgtcttttagatgcatcttaaaatttggtctttatttttattcttaatccaatgcataatttgcttatattaatttgtatttcactcctattcttttttgaatttactgtggactgaatttactctaataggcacaaagggcaaggggcaagttaatgcaagaagtaagagaaagcttcaaagttgatgcaatgattggcagcccaactgaatgggagagagtttgtatgggaaatctagttggtatgcctgtgattgttgtttcaaaccaggatttacacacatatcaaatccacctaggctcagattgtacgccggtcgaaaaaaaccgcaaaccgacccggggtatacttttgctcctccatacccatggaccacattgtaattaacgcttctacatgcctctagtacccagctagctagg

SEQ ID NO: 180787 - DNA, 846 bp, Cannabis indica
ggtgaagggaatgtcaattttgataaaccaaactactttaattaattttcttataccctaaaagccttccaacttcattttaagaattcaagttcacaattgactttctttgttgaacctctatgaaccctccaaaaaagtgccctgaacttgttggtataccagcaaacctacctctagtacctaatccattttataaacaaatgaaggttcaccattctcatgaaagtaacagaaatttccagtattgaaataccgcttaattacagttcacagctatgaacgaccacatgtaagttcaaatgtcatcttttgtggttctaaatcttctggataactctagtagtcacaacaaatcaactactattaagaaagtacaactttttcatgaaaatatatgcatgagaaaatggcttatgtagccaaagtggaattgagtaacttacagaatgatactcatatgccgaattgccctgacgattaaagtgttttgccatgatggagtactcaataggtccccattcttctatctcaaagcaattaccaagcgcagccttatacaactaaagaaaaacaaaatgcagcaaaaataaataatgaatcaaaatacccaattcccagaaaatatatgaattaatcaaatgcaagaagattcgatcgattttctcaaacctttgtggtatccactaaaagctcagttcccgctgggtaagacgcataaaaatgatcaccgcgagaatacccagctctagttcctgaaaacccccaaaccccatccatcatgacaatcaaaaatgttcaaaaagtttaataagattatgaacaatttttaggttgggagaagtg

SEQ ID NO: 180788 - DNA, 608 bp, Cannabis indica
gaatggagagatcgagagatggagatcgtgagagccctagtaggtagtaatgacaccattcaggcaggccatcgactgatctgaaaagcttatcagatcaccagccagcagctagtgactgatgctagattcccataaggtcacagaatgagtcagaagagtaattagctgattacacccccacaaactcatgtcagtggaccgtccaatccaaggccacaggttcaaactatgggccaagtggtagacggaaagattttactagattgtccattgggagggaatggtcagcttaatactcatactcagacagagatattaggccaacctcttgttcaaactggtcaaacacaaaagccttttgtcacatcagtatttgactgactgggtaccgtgcacgacctcaaaaatgttttaaatcacagaagaggactagacgaacaaaatgttcctcctaccgtccaaccaaataatgcaaataactatgtccctaattcagttcaaagagatcctaatgtgacacaggttagtcaacaagcaggtcaagttaatccatgttgagattttatgctctaaataaaactcatctcatggtaatcttattgact

SEQ ID NO: 180789 - DNA, 688 bp, Cannabis indica
ttcttcccgtggcaagaaatggcctccctaaaatgattggaacttccctatcttcctcatagtcaagaataatgaaatcggccggaaaaatgaacttatccacttgtaccaacacatcttcaattttcccttccggatgagccatggaacgatccgctaattgcaaagtgacggtggttggccttgcttctccaattcccaacttcctaaaaatagacataggcatgagattaatactagctcccaagtcacaaagagctcttccaacatctcgaccccctatagaaattggaattgtaaagctgcccggatctttcaatttgggtggaattttacttttcaacatagcactacatccctccgtcaaagcgaccgtttcaaactcgccaagcctccttttctttgtcaaaatatccttcaaaaacttcacataagttggcatttgctccaaagcttccactaaaggtatattgatgtggagctgctttagaacatcaagaaatctccggaattgaccatcgtcttgttgcttcttgaaccgttgaggaaatggtagaggtggcttttgcaaagacttttctgcagtagaatgctgactggatgctgtaactactgggggaatttcagcagctgaagttgctggtttttttcttcatttccccctcttttttggaattgaagagggctc

SEQ ID NO: 180790 - DNA, 714 bp, Cannabis indica
tttttattttcctttgtggctgtaatggttgtatgggtagattataattattagttacatataccaaatgagtcaatttcttttagttaagtacgaatttaattgtcacaatcagaacaatatatatataattattgagcaatatcaatataataattggtcacgtattatatatatatatatatatatatatatatatacattgatgatgttctcaaaatcataacattacaaaattaaagcaaacataacttaaataactcattaatggcatacaaacagacattattacacatacatgcatgtcaaattttattcttttaattatttaatacatatataataattaatttaaggtagaaaaggatagacctgaaccactaaatttttgcttgattatcatgttcacacgctctaccatagatggagtaagatgattaatccaatcgccaacttgaccttttctaaagaaaattttattatgaacgtttggccttacttcaccatacttattcacatccaaattcttcaatttactcaaactacacatctccaatatttgctcaaccacaccatcattctcttcctcttgggagaaaggcagtcctacgaacttcgctatctttttaagttgaccaacactgccttttttaggtcttcgtatttcaaaaacaacactttctctggtttctccaagctttctttccaaaaccc

SEQ ID NO: 180791 - DNA, 584 bp, Cannabis indica
tatatatatatatattactaaaataaataagctagtatatatatatatatatttaaatttaggtgtatgtgtctaagaattatttttctgtgtttttttatataaataaatgaaatgcaccaactcaatatattactaaaaaaattagaagttggaagtttgtgtctttctttaattaatatatattatatattgtaattttttaaaaatatatagaattaagtgcggattagatttgatcggttaatttttgaggtcaaacaacatccgatccgcacaagtacgaattttagatttttcaatccaatccaatccgcacaagtacggatatccgcattttgcggattggattggattgaatcgtgcggattggattggaccgaatactttgtgaacacccctaattgcattgatacacctctgcatcaggaattacttattggataatttaccatggagaaaagtttcaatatgtatctatagtctccttttttttctgaaaaaaattatttatgggttatttggtatgcaaattatttcactcaataatgagaatataaagtccaaacgttatttggtattac

SEQ ID NO: 180792 - DNA, 586 bp, Cannabis indica
atttcaaaaaataattaaagcattgtgtgatattattatttttatttatgtaaatataattgaaaagcaagagaaataaaagaattaaatccataaattaaaagataagaatgatgacttgttggtgtaaagaaggttaagtggaagcgggtgtaggtgattataacttttggtggttggtgagggatattgtgagggtggtgggaagaattggaggggaatgggtgaggtggggctcaccgtacaggtttgaccgaaagccacaaagtagttgccacgtaagaccgcttacctaacacaaagggaaggagtttcactactgttttaagtaactttactaattgtagggagtagatgacaacactcacctactacatcttcaccggacctaataggcgcgtgttcatgacgtactcctttcgtcacattctcattctcacccaatttgacttttgccctttcctccattgaattcatattaataaattttggattttttttttaaaaaaaaaactagaaaatgtatttttgttaacacacgtgttcattgtcacagccatcaacaaaataagcaaaaaaaaaaaaa

SEQ ID NO: 180793 - DNA, 827 bp, Cannabis indica
gaagcccacctactacgatccttcgagctccttcgccccataaatcctttacgtttaaaataatatttaaaataaatatggggtataaattaaaaataaaaaatcagaatatttatagattataattaaaataaataaataaataaaggtttcaatacatgtgtgtcgtccattactagcatctgcttccagggggcacctcagctatcctaatttttttttttattaagcaaagtgagtgttataggtgtataaaacaaactatatgaacttacttttgagtaaactatattattaacaaaaggcccactttcttaattaggaactcttattttaaaactgattgtatgattattaaggagtctgttcatgttaatttatcgtccttacttttgaaggacctttaattaatggaagcaactttttcttttcaaaaaaaataatatattattaataatagagtaaaataccgcataattttgaagattttcatctcactagtaattaatatttaaatttatttttagcagtaaaagttttcaaatctatcatcaattagtcatttttatttatttttagtcagttaaacgctagattaatatccatctctatatatagaatattgtccacataaacacacctatattattagctcacctaaataaatattaaaaagcaaaatttaaaataagttaatttaaaacaaaaagaaaatcatttaaaaaaatatttattttcttttttttttttcagttttttttttttttacaattacagtccacacactctctgtgtcctctctctaattctctctcaatatctcttaa

SEQ ID NO: 180794 - DNA, 549 bp, Cannabis indica
gattacaccattgtagccggcctgagcgtcgaatctttcgtcggtctgggagtggaatagttcgagggctaatgactctacgtctcggaaacgtgttgaatgaaggtttagaaagtattaaatcaagcagtcgaagacctcttgcattcaatattgaagatgatagtgaaagggaagttctctggaaaacaggaggtgttggtttgaaacttgaaaatgagtattttgagagtttggggtgatgaaaaaaggagaaatgggtttggcaaatccatttatacttcagtagagatctttgcaatttgaattggacgacatagatctcttcttccaaaaagtacacttttatccgatggataggaagttgaaaaattggcatgtaaaaactcaaccttgtcgttattcttcatcattacatgcctcgagtgttgtatgcattaaaaggagatgtcatttcaaattgtcctgccatcattgcaacatctcccaaggaacgcgcccaccaacgcgtgtgtaacaatcacataagatgcctcatgcgtgccacgc

SEQ ID NO: 180795 - DNA, 593 bp, Cannabis indica
  modified_base (505)..(505): a, c, t, g, unknown or other
aaaagaaggagagagtgagtgagatttttgatataagaggaataatttgagaagatgcaataataatttaactttaatttagattgttatttttgcctaatataagcatgctttatcaaatttatcttctaaaatttgctgcttatgtaaagctttgtctactcttgtttcttttagaagtcaaagtcaacaccttatctgattccaacacttttctttatattcctcttcaactcactacttggtttttctcttcatttaaatcttaaaagactgatctttttacaaaaaaaaaaaaaaaaaactacttaaagaactgaactgggtagtgtgagttttattcttcaaatttactataatacacctcatgtttaagtactttatttgtctaaaagaaaaacttactagtagtgtttcttttttgtaatgtaagcttggtacccacacaaattgcaaacccctactttgcgaaccaaaaactacgataaatcaaaaaactaaccgngaacccttttcgtctattgttgtttgtttgggaatattttactaggatctagatttactaacaagtatgttgaattaacatcctaaat

SEQ ID NO: 180796 - DNA, 619 bp, Cannabis indica
tttcaaatataataactaatttaattggatcaaatgagtaaaaaagttgaattagatcggatgcccaaccctaactttggggttggttggatagcacgtgatagtggtggtaatgtagttgaggcctagggccgaccatttgtctttatagtaaggattaccaaaaaaaaaaattacctatggcccatttcaattcagggtcgaccctgttgaggccgagtcaaaattgttgtttggttatgttcagccaagtatagctgaagttgtaggtgtcaaagttcatccaactattttttttagccaatttgtttaattaataatatatcaaatctttaataaatatatataggtgattattgaatggttacgtcaaatatacaattacgatggttgcactaattttgactattggatcattattgaatgattatgaatattaaaaaattataaaaaaataacatattagttgtaacttgaaactaccttttatttataattatgttttgtttccttataaaatactaattaagttaatttttttttatttaaaggtagagattttattaattcaaaacagaataaatgctacaaagaccagcatttccaaaacaacaaaacg

SEQ ID NO: 180797 - DNA, 513 bp, Cannabis indica
taaaaccgtatttttataatttttttttttgttgattttgtgtacttgtgaaataagtaggaattttattaagtattttaagaatattacctaattaaagcataaataataatatattcctattagattctttagctttttgtttttgtttttattttttatttttttgttttttcttattcttcttttataatttgttttttattttatctttttatggcagctattggtcataatttgttagaataaatattttacagatagattgttgtattgtatggatatagatcaattataatgctttatctctagctagataaatattgacaaagattgaataatatttctcaatgtgattttttttttttttttttattttttttttaaatggtcacctgtgatctttgtcagtttgtatttataaatatgcaacatgtgaactaaaataaccatgtgattaacgttattttatttagccacgtgtatgattgtaattgtacaatagaagtgacc

SEQ ID NO: 180798 - DNA, 1238 bp, Cannabis indica
ttcaacccacactcactaaaattaaagcaagaaaaattaatataaactaaaaaaatgataaaataaatgaataaaaaactaaacaactaagaaaaaattggatagacatgacaactaatctccccccacacttaatataagcattgtcctcaaggctcaatcaaataaaattaatgtaaaataaaaagaaaagggtaagaaaaaactcccgtaagcttgctttgtttaatgtcgttagctcgactgcatgttgtgctcatgtggtcttcacgttgggtcttctaacaaagactcattctttatatatttatcaatggaatctaacacattatacgtaattactgcaccatcaaatttcattttaagtattcttactttcgtatccaactttttagttgcaatgagtaagaagggtctcccaaatagagttgatgtaggattgggatcatcctcatcttccatctcaattatgtaagaatcacttagagtgataagtccattagcctgcatgttatacctgaaattaggtgagcacatcagagaaagacaacgtgtcgagtcgggaagaacgaaggactcaaacacgtaattgtaagtacacttggcatgggataactcgttaaaaacagaatttgcagagtatgtttataactcggcagattgaacagtcttgtgctagacaaaaatatactaactgttaacttgtgtatcgacgagaaaccatgcaaatgcaagtgtgcatgacgaagcattaacctcatcgcgtggaagagatataataacagtaaaaatacttagcgtatattatgtagtatatagactaagtataaatagtttggtgggtcaagatgacaaacaacgaggcgtttatctcgttgcaagatggcatgcatgcgagaaagatcatcccgacacccaaaactaaagtttagaattaaagcagtatctgttgggttttatgccctaaataaaactccatttcaatgtaatccattttattcaacgtcaataaagaaacagaagtatttttcattcatttgtgtatgtttgggttcatcttatcaattgcttgtctgtttgatttataaattcatctgaaacccttttcacatacttgatcctgtttattgtgttgtcaacacattggaaagtaaacaagactatgtgaataaagattcctagatttatcagacacaggggttttactgatatgataatctacaacagattttacttgc

SEQ ID NO: 180799 - DNA, 804 bp, Cannabis indica
gcttcgcaaagctcccagagtaatagatccttaaagggtagtacccggactgaggacaagcaacgacgaagggggtataacccccagtacacataatacacggagcttactgatactcaggagcatgtatacttcgccacccagcaaaatacacattaccgaaagcctccacccgtgtacaaggatagctcccggagagatcccaataaaagatgcgaataccacaatgacattggccacatcacaaacgagtgcaaaaacctgaaagacgaaattgagaacctaatcaggttaggtcacttgtatgaatggattaaaagcaggttatcgcacttaaacttggctctagcaggaggcccattaccttagggaggagcagggggtatgcccgaggggcaagtacctcccggaggggcgcttcctcaacaggcgcccggattaccaccccagctaaatggaagagtggccatgatctctggtaggcatcatgttggaggaatcactaggaacgagttaaacgttacacaggggccctaaaacacgatgaaagtgtgggaggtcactcaactcccagcacaacggcccagactcatggacaaacctattactttactgagaagcacgaagccagtgcgtttcccccaccatgacccctagtcatagaaactcctatcgccaataatgtggtggctagaatattggaggataacgagaaagctccgtaaatctattattcaaaaaaagccttcacggccatagggcgtcccaaacacgagagctttcgcttagcagctctcacgctca

SEQ ID NO: 180800 - DNA, 730 bp, Cannabis indica
tttgagaatactacccattgcttcaattgtaactataacgaatattgttatgataaaattttttacaaagaattatttcgacatgtaattttaggtgtggaggttgactaagaggttgtaattagtgcttctcatattaaaatttaaaataattagtaaaatatattttgaccaatgaatagtattctataaatatagaatacaaaatataataaattttaaagaaactttaaatatataatgaattttgagcattagtctaattagttcaatattttaacaggttctctattttaataaaagcatttgatatgagtgctttaaagtgttttaaatatgtttttaaagtttctctatttcccttcaaatgcattaagtaaaacaaacataaacatttaatattttattataatataggtcatgaatgaaatatatatcaattaatttattgaaatttatctaaacgtactatataagagtggaaaaatatgttattgtatcgtgtttattttatattttatttgacttgtacttacattttgtgtcaggcgtgtcggccattaaaaatcgcatcatatttgtgttaattcatgactttgacctatttttctattaaaaaatatagatttagagttctattaaaaaacttatatctgtatatgtagtttaaaaatatatatataattaaaactagattttttaaaaagtaatttcaatttgtttaaattta

SEQ ID NO: 180801 - DNA, 729 bp, Cannabis indica
actggttgtggagcgacgtgtggtttgacaagaagcccaatcagaatcggaaaaccctctgagatgcagagatgattgtgtcgaatagagcaagccttgtccaggactgcctttcaaatatcgtagcagatgatgagctgcttgaagatgtggtgtccttggagtgttcatgaattgacttagggtgttgacaacgtaagttatgtcaggcctggaaagggtaagatagagcaattttcctaccagttggcgatattgtgaaggattttcaataggtgtcccttgttgatcatcaagtttaatcttgggatccattggtgtcttggcaggcttgctaccactaaaaccgtgatcttcgagtaaagtaagagtatattttctttgggatagaaataaaccttctgctgctcgagctatttcaaatcccaagaaatattttagattgcctagcgtttttagagagaacatgctgtgtaggttagtttgcaactggtgcaatagttgaagatttggccgtgctagaatgatatcatcgacgtaaactagtaaggcaatgaaggattcattgtggcctttggtaaacaaggtgtaatcggccttgtactacgtgaatccttcctgtatgagggcgtctgaaagctttcgataccactccttgaggattgctttaaatccgtaaaatggattgttgagcttgcagccaaagttggaattctgatccattgactc

SEQ ID NO: 180802 - DNA, 761 bp, Cannabis indica
tattggactcagcagtaatatatatgtgactaggtaggcaaaatgaatcctaaatagaaagataagtaaatgttttaagaattagtaaaatggtacaatataataaattagataattaaagttgtaaaatatctttatttcatgttaattttcttaaaaaaaaaattacttaatgaaaaaattatgttatataatttctttagtattaaatattaatgtattatatataattataacgaataagtatattataccgttaaatatatattgcaaatataataatatttaatatattgtagtacaaaaaattaatatatatattgtagtaataaaattatgaatagttaatatttttatccctaaacttatgaatataatcaattgaaacatacttctaaagcactttatacaatgaaactaaaactaatacagctcaaaacatgagaccatgaaattaatcaacattatcacaaatacacaataatggcctgcttttcaactttccaactttaattattactcttaattaatatcattttagtatcttattgtttgccatcacacaacttaatacccctattatttaggagaattggtgttaaatattttaaaaattatgatatttaaaaaatagttttttttaattaaaaaaagtgtattagcataattgcaataaataattttttaaatcccaaagttatgctatcattgctatttcataggtaacatatacaatgatttcagtaaaacattctaagaat

SEQ ID NO: 180803 - DNA, 527 bp, Cannabis indica
ttttaggcatattatatcagattattcaacaaaagcatattcatgtttttatggatggttgaatcaaagtatatttttagagtcgtgtgtaagcattttctatatatgaaaataaaaacaatttattgataatcttaaaagaggattgtaacaaaacagtacgtaataatgtgttcatctaaaaaactgacaaaaatgaaaagtaacagacacaagcacaacattagctttagcatgctgttcaaacaaaaatgagaagtaacacttttggtgatctcgtctgaggcagtcagtcacagattaagaattgaccatggtaaccgttttcttcgctttcctcattttcagagtggatttctgtatgatcatcttcaaaagtgtctggagcatttaggaaacttggctgattggttgaacctagtagtagccttgcccacattcggtcggttactacaactttgttttgtctctcattaatgcgctgcatataaaataaaaaattaggaaaagaaaaaacaattgtaatc

SEQ ID NO: 180804 - DNA, 709 bp, Cannabis indica
tttatgaagcaccatgaaaattatttgtaaacagtaaagtgtaaaactaaaaatataaaaatgaattataaattttattggtttttatattattctttttgcaaaaatataattttttttttttcaaaatattattgtataggaaaatcagagaagaagttaaaaaaaaataaaaaaattaggtaaggggaaccaggtacccttatgataattagaggggtaactagaactaagagataattaagtacctaaattttgagaaaaaactacatttttacaaacttatacttttaaactataaaaatgaaaatggtgttaacaatctttattttttttttttttaaaaaaaaaaagtagggagaaatacactgtctacccattttttattttctaatttaatttttatatatttttttattaatctttaatttatatttaattatataagtcatatcctcattatctctaatcttaataagttacgtgagcttatatttcataaaaagtatttattaattaaaattattttataattatatttaattaatatataataaaaaaataataattttcaacttatcctttaaaaaaaacactacttcaaatccataaaaatgttaaaacaactctagaaccatatcttgtaatacttttgtctttctttgagtatttgtaactcttattgccttaaagttactaataaaattgt

SEQ ID NO: 180805 - DNA, 877 bp, Cannabis indica
ttccagacctgttctaaacaccccaaagaacaaatctaaggcatcaaaaccacccagaaaacacagagacaaaattcaccattaaagaccaagctttgagttccaaaactcaaacttggttaaatccactaacatgcatccaaacctatttaattctactcaaataagcatgaataagcttctgaaaacatacaagaacacccagcaatttcacagaaacaaaatgaaccatttcactcaaaaatcacatatttgcataggaaattcaaagctttaaacaacaccactagcatgcattaaaacctatataatccatccatttaaaacctaattaagctactggaaacaacaattaaacacagcagcaagaacttcaaattaacatgcattttctcaactttttcatcaaacaaactcaagaaaacaaggtagagaaatcacataaagaaatacctcaacaaaggattactagagcttgcaatccaagcttgaatcaccacaaaaattccagctcttgaaccccaagtttcagccgaaaaagagagagagaaaagggagtgttttccttgaaatttttcttttaaattttgactaagtgttgaaattttgtggaaaaaggaatataagccacatatcacattttatttcagccaacaaataaataaaataaacaattaattttcaaataaaaagtcactaaaagacaaaacactaatggggcaaaaagaccattttgcccctccaccacaaaatcacataaatcatacataaggggtatttttgggaaattctaaattcccggccattcccgacattcccaatgtctaaaacccgtccccaaattactaacatactaagttgtgatttctactgagcc

SEQ ID NO: 180806 - DNA, 627 bp, Cannabis indica
agaattggttatctccaataggtggattaggtctatgccgatcaggatagatggtagagagttaagcgctgatctgatagagatgagcttagtcgaatttgatattattttaggaatggatttcctatctaaatattcggcgagcattgactgtaagaggaagatggtggtcttccaaccggaaagtgaagaaccgtttgtatttgtgggttcggttcagggatctcggatcccggtgatctcggctatgtcagcgagagaattattgcacggcgggtgcttagggtttctggccgtggtggtggacaccactcggccagacaccattcggccagaggacatcagagtggttcgggaatttttggacgtttttcccgaagaacttccagggttaccacctcagcgggagattgatttcgtgattgacttggcaccaggggtggatccggtttccaaagccccgtactaggagtgcgtccacgctgaacttaacggtaagttaaagtaaagtctacgcgtcctaacgggttaagggtcttcgttacgaactaagggtttacggtacttacggttccccggaccgtaggttggttcgtaccccgtacccggggtagggggtaccccggg

SEQ ID NO: 180807 - DNA, 501 bp, Cannabis indica
taattcaaacaactggcctcagaaccatggtaattaatttactttcaagaaatttggacttaaaacgatgtatgtatgatttggatgtgattcatggtgatctatgtgtttattgatgattgtttaatgtttgcaaattgtttacgtaaaataattagaattttattctgaaattatatttgtcagatagtatggaaaaaattaagcaattcacttttttacagaacttaactttgattttatttgaattagttatgatttttgaaacatcgaaaaaaatctagaatggtgagaaaaatatatagcacttcaataaagatgctattataattaaatattactttaacttaatttatgtggtgagaaaaattatttgttatatgagaataaaagaattaaaattgatattgtattaacacttaaataatatttatttcatatttttgtaaaaaaaaagtttcattttaaattttgccataggcatctcaacatcttgagacg

SEQ ID NO: 180808 - DNA, 502 bp, Cannabis indica
tttattaaaatcaatcctctaatttaaacatttcgtatgaaaaaattctatcactaataggttaaaaacagtaatagttatgacagctccttttgtagttgtcatattacattcacctttgtatggaaaatattcaaacgacaccacaaaacaaaatataaaaactttaataaaaaatagttaaactatttattttattaagcaaaaaaagtctagatagtcttttaaaaataactacatcatcagatacaagatccgtttattaaatttagaaatggtgaactttttcatttattttattataaaagtacatgtaatataatatctttgttaattatacaatctttaatatttgtcataaaatcactatctttctatacattttaaaaatagtaaattatatttataatttcaatactattactttgtttataataatacacatcaaaatattatattttagattatatcacttagtataattacaatatatatataaaga

SEQ ID NO: 180809 - DNA, 684 bp, Cannabis indica
aacgaagtcttacacgtttctgtttcttaataagatttttctttttcttctttttttttttaaaaaaattaatttttagagtttacaaaaattgttgattgaatttgatggagattttttttttcttttttgaaatcatatgatggagattcgaacaaacaaataaaaaaataactctagagttttaattagttttttttttttttttctttaataagaattttaatagctgaatgactaaaataattgattaggacgtgtttcagcgtgcataggctaaaattaacgaggacattacatgcattggattaggttagtttttagcatggcctcgcttgttgtcaatcaatttaattaccttttctatattagtgatatgtgtaagtatgggagtacacagttgaaaaagacttaaatagattgattgctactacatatatcaacaaggtgtatcttgtttttcggtagtccatcatgaaagtgcgagtgaggacaaagcatgctgaaaacacttgtagtatactcgtgtataggagctattattctgtgggtgtaaaggcccaatggaagcttgaagcgaggacgttacaataatgcacccccttaaaagggatacaccgatacatctctatctattttagtatctaaaatatatctagtcaatttttttctctatggtcatgt

SEQ ID NO: 180810 - DNA, 985 bp, Cannabis indica
atgtgactctcttatgtcatggtattttgggtacaatacatataaaaagaagtatgtttcaattaaatataaaattaaaggtaaatttaattaattgattaataaaagtagtatttttaaacaaataacactattaaaatacatgaagcttataaaccaattggtatacatagacgaagaactactagtttacaagtaaaccaaacaaaatcacatctatgcaactaaaaacaaaatgcttttagactaattggtatataagcatatcaaaccacacctaaacagacttgcgtaaagtaaactcacagtcggcctaggcccccaaactttgatattggcttaatagagctaggcccataagtgtgagggtaagttggttgttttcgtctcattattattattattattattattattattattattattattatatgagagaaataactcagaatatgaagaaatatatttataaaattatttgctgaaacttaacacaaaatatagaacaaaatagtattttattgtaccaagctcacacacaaataataatataaaaaaattatatgatttatattctacattattatcggtactttctatatcattttcaacaacaccatcgacacttttctttattatcaacattgttgttaatgttaagcaaaaaattataaaaaacacacaatgttgttactattgagcttttaaaaagtatataaaattcaatctatgttccctccaccaagtatttaggctagcagtttttcaactagggttacaattcatgccatgatattgaggtctcaaatttattgaaaaattgctgacacaaatatggctcgtgacaccaaaatattataacacagacattaacatgattaagatacattttgtgtcgtgtcgaattcgcaaaattctttattatatccgtattgtgttagcgtattgtaagttaaattgttattttcagtgtcattatgtt

SEQ ID NO: 180811 - DNA, 548 bp, Cannabis indica
tgctcaaatcaggtgtggatcaaacccttggataccagcaaacaaaatttttacaccgacagtctattttggtttttgtagcaatctggtttcttattatatcacaccatattatgaatggaatgtagaccaattaagaagtgacttttctacaattgatgttgatcatattctcaaaattcctctctcttaaagtgctacacatgactgttgggtattgcattttgatgcctcgagtgaatattctgtgcagacatgatatcatttggcttgttcattggaaacgcaagacctctcttccagctcactatcatcagcaacatgatgaaaatctttttaggaatttaaaattaccatctaaagtaaaaatctttgcttggagggtcattcacaactcaatacaagtagctgcctctttgtttcagaggaaaataatcaattcaagtaccttcagtttatgttctaatgcattggaatcggttggacatgctttgtttagttgtaagcatgctaaatcagtatggcattcttcagactttactttttga

SEQ ID NO: 180812 - DNA, 683 bp, Cannabis indica
ataaataaattgtatatttgctaccatgccttggagcaaatagtattttatgttgggtgacaaaaagtaaaatattattaataattactaataaattctctcaaaaaaattacaaataaattaattattttaaaaataactaatagtaatattacaattaaaaaatgtatattaaaatttattattgatgatcaataataaatttgtaattaaaaaaattgtatttgttgtgtgctaaattgacacaatttttagcttctgttaaatttaacacaccatttaataactaatttttttagaagtattaaaatataacacttattttagtattctattagagatattcttagagcatttaccatcaaaaatgccacatgagggcttattataagtgaaccctaatgaaataaggtggaagagaaattagattgatgctaaaatttaattagtgttggtgtcaacataaaaaaacatatttttttaaaaaaacaacaagttttttaattaattattgttaatgataagaccaccttgacattctttttaactatcccttaatagtgtctgtcaaagtgacacttcactagttattagatactatttactcttaatagtttttttttttctatttacatacttttaaatataaaactaaatgacacttttttattttattttatttt

SEQ ID NO: 180813 - DNA, 650 bp, Cannabis indica
aaatttcatttaatgtacataaagaaaacccttatttacaaaaaaaaaaaaccctctgaattatttgtacaaaacaattctattaacttcccactttacccaaaatacccttattattatttttttttcaaaacctaaaataaataaataaaataccatttttattaacatcccaccccatcaactaactcttctttctcatctccattaatggttttcttcattttttttttaaaaaataaagccctcctcctttctttctagatccgccgcctacaaccgttgaagacgttcggccagctactcgaaccagcccaaccaccgtgaaggatgccggaaatccttcatgcctcattctgaccaccgcgccgcccctcctcgacctctctctcattgtggattcatgggtaagtgttttttttaaaacatttgttaaataattgtaaaagtatagcatatttcggtagatctatggtgttgttcgtataattttcattaaaatcgcgagatttattatttcagagtagtctgggttttgtatttttctcgactgattatcgattagttctcgaaaacttctcgaagcagatgttccaaggtcagtgatgacctttctcgaatgctttttggtaggttttcgataggttctc

SEQ ID NO: 180814 - DNA, 514 bp, Cannabis indica
gaaaactatatctagagaaatcgttgatgaaagtgacaaaatactcataatctcctctggattttacatttagaggtccctagatatctgactgtactaatcctaggggttctttggcatgctctccctttgcagagaaagaacgcttagtcatttttccttcattcacaaactagtaattcacccaagatgacatttttcaatggaccatctttggtttacctacgaagtctatcatagcctatatgacctagtcataaatgccatagatatgtttcatcattattatcaatccaaatggatttgtcattctctaaaacacatgattcaaaaacaaaagcgttacctttgttccaatggttcaaaagtcttgacatctttctttcgaatgtccattctttccacagtgtgaacatagaagaatacatctgctcatttgttctcaaattgtttcaatttctggttctatttcgattcaagctctcaaaattgaactcgaagttgcattgtcaaa

SEQ ID NO: 180815 - DNA, 627 bp, Cannabis indica
gggggtttcatggtagccctctttcgacgagacttatcgacgggtcgtcgctttgggaagcgagtatctgttaggctgtgtaaatggttcacaatcggaaaccatggagcttggccgcgaaatggactaccgataactgatcggaactcggaagtagcggaaaacggcgacgttgcggaagcggaggtgcgggatgctactagggtccttgacagtggtagaataattgatcttaaggctccaaatcccatttttctttgttgatttcggcttcgagtcgaacaacaactcaaagctcaagcttttcactgtgaaattgaagaaactcggtgacagaaggaattgggggaagagaacggcaggccgggccgagtatgggctttttgatactataggtctaataaaatgggcctagaatagcccaatatactcatttcacccgggcaatactaatcttaaagtagccatttttttctttttttttttttttttggattatttcacaaatacaccaaaactcaaaaaaaaaaaaaaattaaaaaatacggttaactgaattataaatattttgacaatttttttaattttatttactagaaaatgcagtttatgatgtatacatgttaa

SEQ ID NO: 180816 - DNA, 606 bp, Cannabis indica
actagcacgtatttgtcatgctttttttgtttctttctatccttcgacggttccctaattccatcctttctttttagaccggaagccctccagttatcaattctcgtggaagcagtccctgtttaaacattgctgggtttacctcctgagcttgttttcaataaattcatttccttttgggcttcttcatattgaacaaacacatgagccctcttgttgaactcagtgatgtttcttaccggaagtccttgtaaatcatcccacaactcgcccccagccgttaatggatcagtggagatccctacctaaagggttttaagttgcgtgttggcatccaagtttctaaccctagcggcagccgtgctaaagcgacttaagtacgacttaagtgttttgtcaggctgttgctttatattggttagcgaggccgcttcgggtcgtctatccctagcggcttgaaattccttcttgaaatccctggacagctactcccaggaaattattgaatgatgtgtaaacttgttaagccagctactcgctgccccaaaaacctaggtggggaacaaaatacattgtaaattgctcgtcacgttactcgctcgtatt

SEQ ID NO: 180817 - DNA, 611 bp, Cannabis indica
tttcttaaattttgtaggatgtcttaaataactataacgtacatgaccatgagaaaagatttgactaaaaaattatttcgggtgcatcaatatatccattttaagggggtgcattgtagaatttcccattactttttttattattattatatatgacaaaataataaaaaagtatttgttagtctacaagttcctaaaaaaagaagattcaagccttgctaattgaatccatttattattttctttctatttagcttactaaggctgacccaatgaagaagcaatcagtcatgtttgaagtgatttaatgttgaagatgactactgagtcaaatgtggggataaaagcattcactaccacatgcattcctttccatatattattgcctaagatttttccttaaaaaaaaaggcaagtgtggtagtttttttttattaaatgagacattttctttacttaaaatgtccaacatcacaagtaggtgtcatatggttaaattattttagttagagtgttatatcattattatttgttgtatttgggtatgtagagataacaaaattattaattttataaagatttaataattacattaattaattaaattctta

SEQ ID NO: 180818 - DNA, 725 bp, Cannabis indica
gtgttcattcaagcgtggtgcgccaaggcagtgaatgggagtgtggtgaacttaggcatgaaagcccacatactttggtgcaccaatgccaaactgggtacatggacacctatatcaacagcacagaaaaaaattatttttcggtctaagtcttttgttgttcccgaccaacacttttgaggctcatatcaagtcccaaagggaaagaggacacatattattgaacaacacaggaaaaaattatttttcggactaagtcttttgttgaacccgaccaacactttggcttgcatatcaagtcccaaagggaaagagctcatatgttattgctacggccgcaacttgtgttgatggaagcaccacaaacaccttgataacctcaggccttgaaagtgtgttgttataaaaaagggggagggacgaatctgagcgacacagggctgaatctcagtggatcgtggcagcaaggccactctgccacttacaataccccgtcgcgtacttaagtcgtctgcaaaggattctacccgccgttcggtaggaattgtacttcaaggcggccgcacaactgtccgctgtgcgagcttcaccaacgacacgtgcctttggggccgaagcccgtacctgcaggtcggcgaacggaacggcgggcggcgactgcgtcgtttcgttagcccggacgttcttcgtacgttacgtaggacggttcgtacgtacgtactaat

SEQ ID NO: 180819 - DNA, 654 bp, Cannabis indica
aggtaactaattaccataagagaataattaggtaccttatattgtttttcttataattttaaattttttctaaaaatttttcataaaataattttttgaaaaaaaatatattcttacaaatttatactttaaaaatcgtaaaactgaaaattccccatcttgtttttgcatttgtcgagatttatataaaatcaatatgatcagtagtaaaaagttaccacctttaatgaaaactaaaatatatctcatttaataataaatatactataatgtgtcaaaaaagtgatacaaatttgacacatatatcaaatagtgtgtcacaacattttgctatgataaagttttgcatcatcataaatatattatttttttattactttatttagtatatttagttatagtactaaatgatgaacaattttaaaacgtttttttttttattattttacattataaataatgataaaattaataataaagattatttttaaatttttaataaaaatattaaattttgcatcatattttatatttgtgtatttaagtacaatgctaaaaattaatacatatattacaaattattttttaattttcaaatatattacaattttgaagatggtataataggttaatgtgaaaataatgacttgaatg

SEQ ID NO: 180820 - DNA, 766 bp, Cannabis indica
attattgttgaggtgaaccttgatagcagagactcttggagtatagtggaaaatccaaattgtgagtttttcatttgttgaattgttctggttctcattggtaacaaatagatagattttattttgccaaaatgactttttattgatgtacttatgaatgttattggcttttttatatttatttgacaaattaaaaggaatttattgtagaggttctctttctggcaataggaaaaaaggctacattatgatattgtattactatcttctgcttgccagccatggttgatacgaactggtcaactataagctgcattttttttacacctaataatacttgatctcttaaaaggtttgttattttacatgaatagtttgttttattttaatttgtcttatgcttagttatttttatcatactaaatttttgattgtggatagtaactccatttgattttgtttttacaggaaaaaagagtttaatctatgttcatgaggatttaacacaaagtgatgtaggtgactttctataatatttttttttttcatattttttcaaatttttttagagtaccgtgttaatgtactaagaaaacatgattattcaatttactttttgtaataatccaacattatcaatatatttatataaaggagagtttaaaagtaatgatgtagcatttcatattttttttcatatatagtatttttactattttgtgagagcttcaaattttgtctaataaaaaaaaatctactaactttc

SEQ ID NO: 180821 - DNA, 1224 bp, Cannabis indica
aacaaactatataaataataagcactaaaaagtctactttaaaggatctggcatatcataacatgcataggcctttgtcagtttttgtattcagctattggaaacatcatatatatatatattaataataagcatataaatatatatatataggtatatacaaacaattaatgaaagatctttatatcttaatccacttatgctaagtattttaattaatttttgttacactttttatcaaaattattgagaagattctatgtgactaattgaataagcaagagattttattaatacatttcctccttataaataaaagtcatatatgaacacaaaacagcttgagcatttcaaaaaggtcttacttaaaaaaaaaaattatatatttcttagtggagtagcctccaaaaacacctacactagttaattattataaaaaccttgtaaagaaagcactctgaaagtaaataataataaaacatttttttttagttttttattttattgttgcctaataattatttcatgcttgatgttgcttcctaaggcacaaccaacagaatgttcaactatttcagtacaggaaaattcttgaccattcaaaatggaagcatttgaaatgcaaaaacttggttgagttgagccaatagaacatttgcagcagtagtaactatcctatctgtcattcaaaacttttatcaagtagtggtagagaattgaaaatgatatatcatataagagtgtgtagactagacaagaatgaggaataacaatgaggacaagagaagactccaagggcttgaaaaaagtgactcatcttggaatatcaaatggaagtggacaaacactttatctatataaaaaagaaatcaatggtgcactaattcaaagaaaacttaataaagggaaaaacaaaaacaaattcatggtgcatcacgtttttttgatttggtggtgctgctgtatatgctagtgtgacgcaatcaatcttattatacctttggactgaattaccttagatgattcaaggcatcatcacaagaagttttgcctaaatagtgtttccatttgtagtgtttcgtatttagattctgcattgactaaagtatgtgactgtaaagtgaaaaataataaagttgggaactttcctcttttaggctaacttttgagagtgattctcccaagtggtgtattaagtggtatgaagtcacacactctcgagtg

SEQ ID NO: 180822 - DNA, 499 bp, Cannabis indica
taaattatcgggtttgagcggggttatgtaatttgacaattttacccctaagttgaaaataacctagaattttacattaggggcattttagtctttttcttttgaggtttatgtggctgtgtgagggtgtgacagctgccctctttgtgggctgaatcaatgcataggaaatgcatttctcatatttgaagaaaatcaagaaaatagaaaataaaggcattaccttgaagctccctctctttctctttcggctggggcaaaaccagagggaatcaccctcaaatcttggagttttgctgaattgaagctaaggatttgatcattcttgaagttaaggtaaaccttagaccattagtttatgtttttaagctttttttttttttttgagtttgcaggttatgaagttgtgaaatagtggctgttaggtttaggtttgcttagggtttgaattctaagtttattttgagttgattttgagctctggttattaggtttgagc

SEQ ID NO: 180823 - DNA, 778 bp, Cannabis indica
ttatattttttcataaaagggagaaaaataagacaagtatgagtaatcttaaaccatcaagtacaataacagtgtcaaagtaacatagtgtaaatgatacagaccctcaaatatcaataaactgaaatcttactagttatttcaagatcaacataaacttatttaatataaaaaaaacagaacaagtgacagtggattacctgcatatatgccacagcttctgaaacagagaacagtgtgttgagaaactcccatttactctccttccggagatccactaattccctcccgtaaatctcacttcgatacagagaagtgaagttcaatgacaggaagaaaagaaaaaaattctcttttacaaaacatgtaccgaaaaacataaaatttaagcctataaacacatactaggatcacaagggtagtagtacagtgcagccaatctttttaaaaaataaaatgcactagcggtatcagttagtaactcgaagattacttcctggaaaaagcataggatgtttatcatgcgattttcacttaataccgcgtgtcattactgtaatttcatttgatagaattagattgaaagagaccaccatagttcaaacagagctatgtcttccatattgcaggaaccaaatcaacaaggttcaaaatgtacctcacagctcgagtagataacattttggtgccatgcatagccctttttacataaccaaatcgatcagccttaaccaagttccctttctccttatcaatcaagctcataccatcaaaaatg

SEQ ID NO: 180824 - DNA, 747 bp, Cannabis indica
ttgtcaaataaacacttagatatactttaagatgttttacattgtaataccaagaatttgcatagtaatgagccttgtcacatctgtcctttagctaaacagaaaaggctcccttttcctaataatgcaaactttacttctcattggtttgatcttatacattgtgatatttggggtccttgtcatgttacttctcactctaaccacagatatttttgacttatttgatgaccactcgagattcacttgggtttatctcctcaaccaaaaatctgatgtactttcaataatacatgagtttatttcttatttgcaaactcaatacaattgcatttttaaacggttcaggtctgacaatgctcctgagcttacattcaaagacttgttcgctaaacatgggatattgcatgattttacttgcattgaaactcccgaacaaaacgctattgctgagagaaaacattagcacctccttaatgttgctaaatcattgtttttccagtcaagagttcctatcaaatactggactgagtgcctattaatggattttttcttaattaatcgcactcctacaccaaacctacaaaaacggacgccttatgaaatttatttggtaagaaacccaattacagtgatctaaaatgttttggtatgtctggcttttgcttcaactatcacttcacacagaactaaattcgaaccaagagcaaatgacatgtgtttttctttggctatccaagaggtatc

SEQ ID NO: 180825 - DNA, 516 bp, Cannabis indica
agtgccctgttgctcctgctgcaaccccatcacccagcatagaaccagtagtgtccaagccttctaaggcacaaaatggcaccattactacagaaatcgagcctggaatatcacaccagcaacattcaaaatcgcccattccaggaccaaaatttgctgagcctccagcacaatataacccccctccaaatccttgctgccactacaaccaaaacaaggcagacacataactaaaccaggccatctcaagtgtcaaaattccactgcacacccccttgacaaatacctgtcttacaatagacttcacaaaaaactttcgaaaactgccatacttcaagcatacatcgaacttgaaccaacttcctatagccaggccaagcaatactctcaatggctaaaagccatggacaatgagttatttgtctctaaagaaaaacaatacatggaaaataatatcccttccccctggataccatgtaattggaaataaataggtgtacaaaatcaaatataact

SEQ ID NO: 180826 - DNA, 827 bp, Cannabis indica
tagttctaaaaccaagaaagaacattttgagatccacagtaacatttagactcattaaaaatgttaatgttgatgtgtaggaaaaagcagctccattattcaagggtaaattagtcattttcactacacaaaatcttctagattcactgttgaataaaaaaaaaggtcaacaaattcagctcccaaccaaaactatttttcatttcttgttaaataaattagtgtaacgacagaaattcaaaaaaaaaaaaaaaattaatgtaactacagaaattcaaagtaattttgtgaccgttttatattattaagtaccaattaaaagaatttgtaattacaattttgtaattgccaataaagacttgaattttcaaaatctattatataaattagaaaaagaaaagggaaaagaaatattatgatattattatttattttgttacttttttactaggctcattctctcatctctcttctctttacagttcacaagtcatcaaacagtgtcagtttcatgtcagattagatgatagcatataatgcaaagctcccaatagagagagaagtgtgcagaaatactgttggagttcagtgagagaaaatggggtaagaggtattccttgcagctgagtggtactatcacagctgctaaccacaacccattaccagtttttcgttgttttggtgtttttgatccaaatggagcagaaaatatcgattttttgcagttttagccgatacccatttgcttaaaatcaatgctttgctttcacttcaatggtggctttgcttgccttttttaacaaaccccatcactggattcattcatc

SEQ ID NO: 180827 - DNA, 678 bp, Cannabis indica
agtatgttagtttaaaaaatttatataaaattatataatatacaaagtttttcatatcttttatatattatacatgtttaattttttacataaataaaaatttatttatattagaataaaaaaaattatattcttactttatttgcctaaaccaaatgtatgtatattatagactatacttaaaaaattaatatttctacttttaaagaaatacccaattaattcaggtaatatacaaaattaacaatgatataggataaaactagaacgactacagtacaatcaaaagagaaaaatgctattcactctctaactctacattttatgtcgtaatgggtgtatcactcgaattcgttgaaaaccatttctttgccacttagattttcaagagtttcctaacaatccaatatgattttacttcatcataaatgtggtctatctattctcatttctcatttttttcaagtttgatgagttataatttccttaccgtatccaaccagaagtaatgcataactttgacattttatttcatatttgttattttttatatttaaggttggttcataaaacaataataaagaacaaaactagaactgacttggtacaattgaaagagaaagataaatatacaataagaacaaaagattcatacaatttgcagcaattcgattgctt

SEQ ID NO: 180828 - DNA, 706 bp, Cannabis indica
aataaaaaaataacaaaatacaaattattttcagcaaaataaaagtggtaaggtcgctagaaaaaaagaaaaaaaaattgttgtatataaatagtcaacatcatccgtgcagagatcgtttatacaaatgattttttttctttctttaaataagttgtgggactcaaatctcttatccgaatccgaaattccagtctgtagcgccatattatatcgtataatcagatcatgtctcctcttttttatatattacagcatctttaattatattccatttttttagccaaatttttattaaaatagttaaaaaaattagaagagagagctattttttctttagttagtctttaattattttgaataatattttataatttaaatttgttaaatataaactaatttaagaaaataatgaaaaactaattatgcttttaattaaattaaaataatttaacaaaaaagtagagaattctctacatttagagatcttcttatctatttactattataggagccacttttggtatgtttgtagctcatatttttaaagcgcattctattttagcttaaagagtttggttagagagcatggttgaaaatactcttaaagtttaaaaatacgattacagatgtacgtagtatgagaagtaggggcagacaacatccaatctaattcaattgaaccgaagcgatctaattcaattca

SEQ ID NO: 180829 - DNA, 780 bp, Cannabis indica
tttcagtcccaaattagatggagaagttaggaagaagaaggttgagtcttggtgtaaagctgttacaaggacctttgacttggctgatctctctctttaaaaacttattttctgtttattgatcatttcttgtttttttttttttttttttatttttttttttttacatttctatgctattcttggtaacaagtgttgtttaatgattgatttggcatacacatttacttgtaccttggttgataaaaatataataaatgacatttctttttaggacatctctaattaggggtgttcatctaattcaattcgcactattttgctcatactgcatccgatctgtactaagtgcggatttcattttttggatcaaattcaatccgcacaatagctcaaatccaatccgacaaaaatacagattgaatcgattattttggattggttactttttaatattaaattatttaatatttatgaaacaaatattttttttttcacataactaacaataaaataaaataaattataattattttatgtctctaacaacacattaaaataaataaaataacaaattataattatttcatgtctctaacaacacatcaaaattttactattttgattcccttcttgtaatcagaattggtttgaaaagatctctttttgcataagaacctcaaataactcagctttagcgttcttaaaatttcaaagagaatcaacatctctaccattcttcacttggcctcacttttccaatacttgattcgagctgag

SEQ ID NO: 180830 - DNA, 640 bp, Cannabis indica
aaaaacataaaaaaatcttacctacataagattatttatcccaccctgctggataggatgaagttagctggattagttatccagacttactaacatgcccaaacactagattgacaaattaacctgtctaatccaatctagtcttgcctaccaaacagaatattggaataatattaattaaataatattaactttaattctatatttacaataattacaattaaccatttttgttttttccaagagggatattgactcttaaataataatatattaactccatttttgtaaatgtacaattgataaacattaaagtattcgaacatttatattcccttaataattcctttttaataaataaaataataatagtaaagttaattagaatttttgtcccttaaatttttactttcacatgtattaaatcatatcttttaaatttttaaggtcattgaaattctctcataaactattgatattattgtatttaaaggttcgaaagacataatttagtaaatatcaaaatataaggactatgatttagtacataaataattacaaaattaataaaagtgaatgaaattatataaaagttctaaattcaacaatatcaataattgaaaaagaaatttaaaaatat

SEQ ID NO: 180831 - DNA, 714 bp, Cannabis indica
aagtattgtctttcatttgataataacatgattttaatagaagctcctttaaagaagttcagataaaaaataaaagaaaaaatttaacataataaactaaaaattaataaaactaaatcggtataaaaaaagtttaatgtttacactttgaattttttatttataaaaatatctttttaataaaaataataaattcaatttttttaattattttatagtatatttataactgagattattttgttgtttattttgtttgttttaaatttatttatagttaatatatagtagtcgtaaaattgtgttttttttttggtaaatgagccacttgcacttctccaaactttacaaaagtgggactttacaatacaaaggcttacaacaaactccaaacaaacacaatctcatttaatagactatgaaaccaactcattttatttacattgattcctttcaacccactataaaaaattctattgtacatcaattttaactttttttgaaagtaaactcaatcatacacacccaaccctcccaataagctacattccgcgcacgccatgcgttgtaactttatgaaattttacaaaataaaaagtaaaatgtgtgagtgaatggagtcccaaaaataattttcttttaaagattgtcgctgaaacaattaagtaattatttaaaattgttggaaaaattagtattctccatgatttataa

SEQ ID NO: 180832 - DNA, 1130 bp, Cannabis indica
aaaaaaaattgaaccatcgagtgagaaaacttgttgcacaagttagtgagtgggaccaaaatttgtagttataaacctagtttactatgcaaatcactttaacaagactaaagtaaatttataccatttgattgtgtgtaatcttgatgtagaagagcttcttagcttgatttgcatgttttgatccaaagttgacatttctcgagacttgactttgactttgacttttgggttaacttttgactttgagcttttgaagacctcttttgaatagggtcttgaattgttgatccattaatgaaacttttgcacttatgaagtatgaagtagttgatatacttgttgaatctactttttttaattatgtttaactttaccgagcaaatattgctactttgtgaatttgcttgcaaaatgatcaagaaaagattagtaacaaataataatcaaatatttgtttatcatcaaaataagtgagtgattgactttggtcaacaaaactgcatatgcgatttggtttgaaaagatatcctaaactcgcactacccacaccgcgaacaccctaattatactaaaaataaatatattaaattagtttgagaaaatgtttaataataatatacttaaaaaaaaaaaaaaaaaaacttagaagctattattatattttttattacatagcttcttatcgatgtgataagatcatatgattatggatttataaaatttataaatttatgtatttctaattatacacatatgactccaccttagaaatgaaataaattcataactatatgtattgaagctaaagttcaatgtcatatagtatatatggtttttacaaatatttatttattgtgaataaatattattagaattcattatttttaaaaattctctcgatcagggaagagaaatgcaattgtgatcaataaagatttttgtaattattcatggacaaagtatataagaacgatataattcaacatgatatctgccaactaaaaattaatattattcaaagttgagttagaatgagtccaaaaatgcctgaagtgtaaatgaacaatgtagaaactattaataaatattcatttgatttgtcctgaaaatgttaaatctagaggtac

SEQ ID NO: 180833 - DNA, 509 bp, Cannabis indica
gtgatgtaaaatatgggctaaaactttaacatactattagaacaaatttatctagaactagctagttgaattttaaattaaaatagaaaaaaaaagtaatacactactaatttaatagatgcatattttaaaaaaatttgaaagttattaaggatacgtattgtagtatatactataatattatacataatatttttatatactatcatgttttatattaattaattgtatgtttatacatgcacaatattattttaatataaatcaaaataagtattataaaaaatatactaaataatataatacaatataatttaataatatggctagagtcgtccttgaccaatggttaagtgctcaatcacaaaaaatgggggcattattaataaatgatatgttaatgaacacgtactggaagaaaccaatgttaaacacgattaaggttaatgttgatggtgctatttttcaagcggagaataagttcgggtttggttgtgtagcgagggatc

SEQ ID NO: 180834 - DNA, 519 bp, Cannabis indica
aaataatctcaacaccttgatatacaaatcaagtgtagtatgtagtatactctccgtaataggatctgacaggttgtattcaatacaacctttcctccaccattacatttccttaatcacaaaatccttgatattgtgaaattcctctctatatgtctactcctctagggatactggattctttactttttggcaactacttttgcgttagtcaggaagtaacactagtagttaataaatgttggaacaatgccaaaaatgtatagaactttccttagactgaataagtatctttcctgcaactttaacattcagtctctctggtagacttagagacttcagataggtttttacacttctccaaaatcactactccaccccacgagtaatcaccaactacttacttacacgacgacgaacgttttaccttttacgtacgaccaaaaacggaacggaacgaaccgtaccgtaaaagtaacttcgtagtagttggttaggttacgttaacgtaaaggtaag

SEQ ID NO: 180835 - DNA, 800 bp, Cannabis indica
ttccaggtgtaatgcacaaaccctaattttgatcaattccagcagcagtggctttttagtcactgtcaaccttgacactaaagcaactttttgtccaacttgatagactcatgctcatgtctttgttaggttgtctggtgtggtgtgggatttatgttaataatcccttttgtttttttctccttttagctttgattactactaataatattattatattagtataatttcgtgactaattaaaccattggtgtttcttgtagccaaagtaatatgaaataacatggaagtagaatgagaattttccaggtgatgtccgagtccaacaatgctataaagtgacgcgttttatatgaatattaataatttattttttttagagagaattataaaaaattattaatttaaaatatattaggaatctaatattaaattatactatagtgttacgaagggcaactctaatagagaaattcaaatttaatgataaattaacactaaaaaaatataattttaacactaattttttttttaattcccaaccacaacactaaaatatattttttattattatattattttattaaattatctcacacaataatatatataaatataaaaacttaatcgtaaacatattattttaatatcaaaaaaaaaaaaaattaaggtgtagtctatagtgtttctactaaaaatagttaagacactatttagtactactctacatatatagaatagcatttagtatttctattagaacaatttagttgtctaaactctactatttttagttccct

SEQ ID NO: 180836 - DNA, 514 bp, Cannabis indica
tgtatcagggagacaattgagcataaaaattggtatcaagtagcacactaattttcatcctatttatttttccttctaatgcgctactctttctcttttgtaattacatagttattgtacactgccattttttttcggaaatcgattaagaaattttaaattaatgaattttagtacacaaatcagtagaatttggtaattgatgccttgacctttttgtttaaaatcactctataccactacacaagacactgtttgccatccttttccgtgagtacgtagtaatatatatattgtaagggttttggataccttgaagccttttgtggctacttttaatgagaaaatgattctttgtttctgtattgtcattttctatccgagtaacattcttgtctagtatgatatatatattgtatgtacgtacttttgtttttgcatttttggctctttgaccaaatatataatttttcacatcactacttttattcacaatgcagcttttcaattgtgg

SEQ ID NO: 180837 - DNA, 566 bp, Cannabis indica
atgaactcaagtatgtatttcgttctgatgtagtatttgcttaaacacttatttgatggtaatgttacaattaatcttgcaatgaagttcaatttcattatatatatatatatatatattttgtgtgtcacttcatctcaactttgttatctttgtatgtataaattcatattgatattttgtgtaccaaagtattttgataaatgattgtgggaataacttgtctgattactcttccaaatgtcttttttgtctttctattcatggaaaaataagtaaaatctaaaagtgtttattttattttgttttgatatagaagaaaatgagaatatacatttttataggctatttatgatgttttttaaaaagtaaatggttccttaaaaaaaaaaaaaaaagtaaaatagaaaatttaattaataggtaaattagaatatagtttattacatgtagatagaatacaacaaaataaggacaaaaatactaacaacatcttaactaaaaaatttaatatttgtattttatttcgtaatgaaaatagtgattgattgcacctatactaacaa

SEQ ID NO: 180838 - DNA, 651 bp, Cannabis indica
ccaagattgttgaaaatgacaagaaaatagaaatggagagtaagggggggtcggctggaagtaaccagaaaaatgggttttaatttcccaaaaaaataatttttgttgaaaaaaagaataattggtcacatgagcaaaaatacccccccaagaccaatatatcataaatatgaaaacaaggacaacatagtcatttaaaatcacacatataaaactcaatattttcaggttttcatacttatcaaataattccaaattttaaatcccgaaaatgtgttttgagtcccgaacccggttcgaccgaaaataccatgttgtgactataccgtgccaacttgtcagaaaacacctgcaaaggacaaaacaagtatactatataataatatagtcccataagcacgtaaatatattaatttcaggattttactcttctcgggtcaaaattaccaaaatgcccctgccttaccaacggggtcttaacatgttataaataatataaattctcacatataaaattatataataatataattccacaataatacataattaactagttagggttttgctaatccattctcttaatcctatggtattacagatatgtcatcattaaactaacccttttccagcttaggcatatgcctttcc

SEQ ID NO: 180839 - DNA, 655 bp, Cannabis indica
atgtaaaaaaatattacaaacttaaatatataagaaaaattttaggttgatgttgtttgttaatattatattatttttttttaaaaaaaaaataagagatttaattattatttgttttattataattattttattttaaatattttttatttttttaatctataatatataataaataagtaaatatggttttagtacaaaaaaattattatagtcttttaatcaaaataacttattctaaaagttgggttggagcagctttagtttttagctgtagcttctccaaaaattcttcaaaaagttgttttttgactgcttaccaaacacatttttatcacatctttttcaaaaagtaacttttagctttttcaaaagttctgacaaaccgacccttagtttattttgcggggcattatgtgttgttattgttctgggatattttttgaggcattttcttaaaaaaaaaacagctaaatacatgttgtcccaaatccattacttactgatcttctgatctccaccatcttcaaaattttctttttcttcttcttcttcttaagcttttttttttcaatttttttttcttttgtttgaaagattgatccacgttttttttctttcaattgtggttactattagttcttgttcttctcat

SEQ ID NO: 180840 - DNA, 763 bp, Cannabis indica
gtagttttttttttttccttttcaaatagctttaatataagtataatttcaagtaatgttgcatgatagcataataagcatcctttacaacaaaaacaaaatatagccaatccatgtcgtattgttgtttagtatacaatagtattatctgtcaatagttgaactactgactacgcacactgctgatatagagacttctattttatatatttaagttcttgtttttcatagaaatggaaaaggctggtaatgaggcttacattgtcaattatttatttgttacagagaatgaactaagacaagtgcaggaattgtacagccaagcggcagataattgtctgaatttaaagaaaccagattaagtagcaactgaagagacactccttttcacattttcttgtattgattccttatttactatctttaatctagctagttttagcagtgatgggatggatgcctaaatgtaccatggctgtacaatttggagtaaccaagtataacaaatttataatttcaccaccatacataatctctttttccatagtgggtagaagctgcttttggctcaaggtgctagtagttgtctttaggtacaacgctgtagttcacaccagtatacgtggtaaagataatatcgtgaacccttgctaatgtcaatgccttaacgggagtcggttcacacaaactaaaaaatacagaatctcagcaaaaaaataaaataaacactgaaccaatgaatagtttctgttagtaaaacatc

SEQ ID NO: 180841 - DNA, 557 bp, Cannabis indica
ggttagtttgtggttgttgccttttctgaaaaatataacatctcattattcacgcgcttagtgggacaacgtgtacccattgggctcattatttcactcctatgtccaagtagaggcccaatcttcattccttgatccagtgtgaatttgcatttgagaaatttttataattatgtgtttttacttttcactcatcatttgtaaaaatacggacaaaaaatatgggaacagacttataaacggaattttaaagggaacttagaaaacaagtcttttttttaaaaaaaaaaaaacttacatattttgtaaacttattaaaacaatcgtataattttcactttgtacttttaatggtattattgatatacttttttaagtaccaaattcaatctttatctttctatctttagaatatctattctctcaaacagatctactcttttctacttttaataaacggtccgagctttttctagttattctagggccttcgacacaatttttttaaatttctaaatagtcttcaagatctttattttctaattacaagtaatctc

SEQ ID NO: 180842 - DNA, 510 bp, Cannabis indica
actagtcacagtgaatgttctatttcagaattggtgagttctgagctctatatctttaaggtctcatttggtatggagagttaaattggattggattggagtggactaaaaattagaattggactggatatattagtactatgttgtgtttggtttaacaagactaaataaagtataaaatatttttaaataagcttttaataattttttttaaataaaaatactattttaattaaataatgtgtaataaaaataagaatacattcaaaaaattaagtaaataaaacatatttgattttttatagtaaatataatattattttcaaaaattaaaaattattttttaaataaataaaataaatattatatattaaaaaataagcttaaaaaaactttggagtaaattaaccacatccttttggtgggttaatatagtctcgaaagggcttaatttgaaaggaaggataaaattatccaatcccatcctaactcaataactagcgaacatag

SEQ ID NO: 180843 - DNA, 739 bp, Cannabis indica
ataaaaatatataaaataaaatagatatactattaagatatgttttcatatcaactgattatctttattaaggcacgtggtcatgacttttaaaaatttgaattatagttcttttttatttatcttgaatagcaatcttaaccagtgttggatataaatatatacaatctctgtatactatgtagaatattaaataaataaaattatttagtaaatataataaactattctatgacaatttattaatttatgaaatatatatctataaatgttactaaaatataatttaaataataagatattgtaatagaaagtatatcattaatggtttgtattggttacatactttagagtaaatacaatttattaaaatagtattggataacaatttattattttcaaaaataaaattaatagttacttaaatttattaatataacttaaataattaattgattattaaagtgtatgcatttggaagtaacgaaaaatgtattacaatatatataatataaaagtgatgtttttttggaaaattaccccatatattgttttttaatttttttttctaaatttatgtttgggtttcgtaaagttgttgtcagcactagttactaataggtaaattcttatacgatttttttgtttgtcgatttaggtttgtcgagcgctagttgtcaatagggtttcgtatgtagaattccgtaaaaacttagcaaaaaaaaaaaaaaacaaaaac

SEQ ID NO: 180844 - DNA, 738 bp, Cannabis indica
tgcacataaactaaacaacaactgtacaaaaggacacacaaaaataacagaaaaataactatagaacacccaaacaacaatctaaaaataactaataaaacaactataaaataacaaaaggacagctataaattgacaataaaataacaagacatctaggggtgttcattggactacatccaatatttttaggcctattcagagccgatccatatattggatgttaaattttagggaaatttgcggcaaaagtccccaaaaaggtcactttgatgcagattagtccccaacatccaaaaatagcggcaatagtcctaaagatcacaatttttatttgtccgtttgtcctaattttaactgagccgtttacctttaaaaaaattaccacgtgtcgaaatattattggtccaaattattattttatttataataaataaataaataatttattttttttgttttttgtttttcttttcttttttttattttttttttattttttctttcttttcttcttcgtcttcttcttcttctcactgccagaaacccaccaccaacccccaaccccaaacccagcaccaccaccaccataaccactctctctctctccctaagacccccttcgaccaccgtctgacccaaagcgtcgaccacggtcaacctaaaaagccaacccaaaacccagattcttttcttcaatatacaaaccctaattaaccctccacaacaccaaactct

SEQ ID NO: 180845 - DNA, 702 bp, Cannabis indica
aaaaataaataataaaaattctatatataataccttataataatcaaaaaaactacaataaattattactatcacattaattaaatcaaaggtttaaattatgggtgagagaaaaagtgatgatgctctcacctaagaattttcctatatttatatatatactcttatgctatcatatagttagttttttctccaactcacactacaaaaatctcaattttagtcataataaaatttatagattaaaaataaaaatattgtgactaattataaataattatttttatgttgtgactaaaaaattcggggctaaaaataatagtcataaaaattacaatttattgtgactaagtgtatttttagtcacagtacttattgtgaccaaaattaaattagtgacaatttgtatataaatactatattttagtcacaagtaactttttgttgtgattaaaaatcacatttaatcacaaaaaatttatgttatgactaaaaagttatcactaaaaataactgtatttgtagtatcaaacttgcatggaaaaaaatattataattaattatgtaaagtaggggtgtgaagctagtaatgattgcttaactaataaggatcaaaacatgattgaattggaatgcaaaacagtttctcttcagcaactaatgcgatggatctctagagcaaaattgtgcaaattttagaaa

SEQ ID NO: 180846 - DNA, 718 bp, Cannabis indica
gcgacagttttacaccattgggaatgcgttttgggtgacagttttgaattgtcttccattccaccagttttgcgactgttgaataggtgacggttatagaaatcgacaggaatactttacctgacttttaaaatcatctagaaaaattagttatttagtagtgatcggtgataccaaaattgccatttagtaacacttataaatgtcacaattatatagttttagtaacacttatagtttttatagcatttgtagaaagtgtaagatatgcccatgtgaaatgttactaaatgggccacattagtgacatttgaaaatgccactaatataatcattaataatatttcaaatgtcacttaatagttttttttatatatttaaataattttaatgacattttaaaattgttattaaattatattactcacatttgttgcaatgtcattatatattttattatttaaagtatcattttataaataattaattttaaatatattaaaatattatataattagttttagtattttaattacgtatactacttatacaataataagtattacatcagagcaaaaaatattaaatacttgcaaatttgatattttattatttaaatttgtttatattacatgaaatatttgggaacatacatgaatagcaatttctatcatttgtaaacattaatatatactgaaatagatatatatacattaca

SEQ ID NO: 180847 - DNA, 677 bp, Cannabis indica
cgttgcatgttatgacagaatggaggtgatattaatttttcttcgatatgctaataactatgtggatgtggaggttattcttcaaagcaaggtgtttggtggctggcatggcttttacggtgaaccaaatcgtaatgcttgatcttctacttgggatcaacttcagtttctttttgcaagcttctagccttctatggtgtgtaataagttatttgaacaatgttttgtctcatgaagataagaaagggggactttcctatcctaaatggcttattgaaggatttttaaaaatataatttttgattatggtttaattgatttggagttaattggacattaatttactaattgactgattgaaggattttaaaatacaatttttgattatggtttaattgatttggagttaattgggcatcaatttacttggagaaaaagtcgaggaacgaattcttggttggaagttagtctcgatagagctcttgtttctagttcttagctccaattatttacagcagctaagttgtttaacatggagatgacctcatctaatcattctcccatattgcttgatccttttgtcttcctattgttccatgctagagaatgtttatatttgaaaatttggctgcaagagccaatgtgtttacaagctattaaagatagttgggtggagt

SEQ ID NO: 180848 - DNA, 599 bp, Cannabis indica
ttttcatccacatcatcgtttgggtccctcctttgggttcttgtccctgcaggtgcttttggaacaaatccctttgaagaagacttggaagttgacacttttttcggtttcctcctaggaaaatctgaaaaggaaaatttagaaatatggaaactaaaaagaaaaataaaacaaatgcactttatcttcaaaccaaaagatgtaaacgatagctacctttaccggctgcactagcattgatttgataggaaaccccactcccaggtcgtatttcggaccatgaagaaaactgaaatcaaataatcatccatgatttagattgaaacagagcaatttacatgttacaatacaaccgtggtgaaattcagcaattagagaataacaaataagaaattcacagtacaaaaacaaaatccaaagaacctaacttagaaacccctattatgaacgcataacccacttccaaatagtaaaccccaaatcgaaaaaaggccataaatttacgagtaaaagtagtacaaaagcagtagtactacataaaaagttctcacctgtacaaggtgggaaattctcccatggctaaaagacccaagaaaagg

SEQ ID NO: 180849 - DNA, 577 bp, Cannabis indica
ttggaaacatgagttgaaggtcaatacattgagagttgaaggagaggtaataaaggaatgtgccaagctagtggaaaggtgtatcaaagagaatgtggatgggagatcagacatggtggaagtagctaaagctcgaatctttatcaaaaccaacaaaaccctttagcttaaatatatattgtgtcttgtcttgccttgttatattgttattaagatgagatgattgtagaaagaaaggctcatgtactctcatgatcataacgtttaaacaacaaagtgaagttgattctgttcaatcttcaaactaacacaacataaagtctaaagatttctgtggttgctcatctatgatgccactgcaacttcatttgcagtcattttcaagtgtatttcgttgttaaacgttggaaagaactttttcactgaaatttcttcttcatcatcattaactattattgatcgtttgtagagtgtgtagttcaagcaggagtgtttgatttgggttggatggaagttatagttgctttcttcagttcctgggaagagtatagccgaagaatggtttgctctaacactg

SEQ ID NO: 180850 - DNA, 679 bp, Cannabis indica
atatatatatattatttatatatataggtattcctcttctaacgcccaagtttgctataactatttatttatttttggtagtactgttattataattatgcatataattaatcacctaaaacaaaaaaccactatgcatgagagtttgacattgtgttacaaaaattctttttcttttcgttttttggggtctaaatttttaatttcattttgtgtgatcttcaaaagttgaaactcaatcactcaattgaggaagctagcaaactcacaacaaaattaagcccatgagaggcaaaccctagattattaagaaaaaactagcacgagttaatattctaatttaaaataataatctttatattagtttaccttttctttgcttttatttttttttcatttatgaattttttgttttattactctctctttcattatatttgtctctcataatactcactacaagaaatatctacttttgttagcactatttttatgctcgcaaaagttagtattgcgctaggtaaaatagaatttacttgtgatgtgttggcaagagggggttggcaaatcaatgttgatattagaacttttaccagcataaaataaaaagcgttggcaaagatgactttttccagcacgtatatgcgctaataaaagttagattttagccactgcaaat

SEQ ID NO: 180851 - DNA, 718 bp, Cannabis indica
gtttacttgctcatgcttctcaaatttaatgtctggtacagtgatattggtttgaagattgcatgatttttacttgacttattagctttgattttggcattacctattgatgttgtggagctgagttttccttcattcactttgaacaggaaaattcacggatgtttgcaggaaaaaaattacatccttttttttcatcatggaaggaagacaagaaaaatcgagaggtgattgatgttgagggcaataagtttgtagttggtaggcaaaataaagagaagacttgtgccccgattcatgtatttgaaagaagccaggtaaaagcttatctcagttaggctagctcaaaataaagatagtaatttttgagttgcaggaattgagactgcagttattgattgttctgagttctgctaaaactttctgctacaggacactgacatgccccttgactggggaacctggaaattttctgaggagaccgttatgaaaagcctttgtgaccctgaaagcacatgccaatttattttgaaggctccaccgagtcctaagttttcaaagtttcctgttatttacacccaacacgcatcagttttcaggctaaggttcgtcagactgtgtatccaagagattgcatctatgaaacattgccacagataatgaaatgaggtatgctaggatgctggtgctctaagtgatttttttttggaattgtcat

SEQ ID NO: 180852 - DNA, 653 bp, Cannabis indica
catctaattaacaaaaggaaagttatcagttttttattttttactgaattattttttaataatgagtggtcttttcaaactaccaatgtaatattatgatgcttcttcttcttttatcttttaattaattattcatacataaatgttattaattaattagaaagtagggatgaaaaaatgaaaagctttattaaataaaaatactaattaaaaatcaaataaaatctaaaaatttgagaaaacaaataccaataagcaaaactcatatagaagatgctacatcatctccttcgtattctcatctcatttatataagtatatagatagataaatatagatatattgatatattgatttgtaaaatgatttatattaatgcatatattggtataggtataaaataaaacatgaaacactaaaaaaaaaagagtaaaaatagattaaaaaatatatataatatcgcctatttcttttgatttttttttttatttttgtttccgtgtgtattttttctatggatatatatatatgagtacatttttttggtattaaatatgacaaaaatatttagtttgtaaaagatatagtatatcacctaaaattattttaattgttggaagaatatatttttaagaaaaataactctcaattta

SEQ ID NO: 180853 - DNA, 607 bp, Cannabis indica
ttcttctcattcatctcgctagtcttattacaatttcttttgttcatcaattttcatactcctatttaatatttattcgaacaattagtagatttgtctcttcatttttgacatagtattattttgcttcttatatgacaaagttaattttgttttacctctatttttaatattgttaaatttaaaattcacattaatatttttatgaacataataatcttttattataattattctcttaatcaatttctaacctaaaaaaattgaaattatacagtaattaattagaatatattttatatttatatttttaagataaatacattatttttaacaaaatatttaattaaaaatgtttgaaatctaaaaacatgcaaatactattattataataattctatatataatttattaaaatattttatattttaatgaataattttttttttgacttgatgaataatttttttaagtttaatattttttacttaaatattaaaatattattatatagattaattaagatttttagttcctgaactttgatattaaaaatatctattgaactattgagatttttaaggatttttgtctaatttaatattca

SEQ ID NO: 180854 - DNA, 509 bp, Cannabis indica
atataattctcagttgatgtgactaaaacataactatttagagtacaaataacaaatgtcagcgatctaacgtttttggtaagagagaacaaacaacgaaagggaagtaaggtagattatagaaagttaataaaagaattaacaacaataatagagagattgccttgaacagggttacattggatgagatggatgattgagaagccagttgtactttttaaagtagcattacaaaatgacataattaattagtgtaattttaattgtaatttagataaagtataacattggagactacaatagaagaaaaaaaaaaaaaagaaaagttaaagacctaaacacttaaaaaaaaaattaaggacctaaaatgatttacttagaataaaccagtatttttttagaataaacccataatttactaaaataataataagttttttccatcacacccccaccaacttctccaatttcttgcaccttcaatggtacattcaatttttttttttttt

SEQ ID NO: 180855 - DNA, 650 bp, Cannabis indica
attctactttaaaaaaaatcacaagaataatatactattacggcagtggttcttcgaaggttatggtgaagcgagagtggtggaccagtgatttgttgcgaagtttggtgggatttggtgaaccattaaccaagtgcaaagtgttcttgtacataacaatgacagaagtattctttgaagttttttttttcttttatgaaaaatgtaaaaaggagttttagggtttacagaataaataccattttggtaaatggagtggggtgtagttataaaaaataatatttaatggggtaactttagtaatgaggtgtagtcataatatttaggggtgtaaatataatctctctattttgaataattatatcaattatgaattgtataattaaagtggtatttaactatttagttttatttgataaaaatgtattaattagttaaatacaatattattcttaaataatattaaaaagataaatatattattttagtgaagataatatttattttaatcctaatgaaaaaagagattaatgagaattaatcaatattatttgttagaaaaataaataataaatcttatttgtggcaaaattaaaaaattaaattttggactttaaagcatgatccacacgtgtagagtgacatgtaaa

SEQ ID NO: 180856 - DNA, 685 bp, Cannabis indica
gaaccgaataatggcaattttgcagagaaaacagatgaacccgaagatggatcatcacaacctgtacaaacaccacaagaacgtgtacgccttagttgtttacgtgtcttacatcagcttgcagctagtaccacatgtgctgaagctatggctgcaactagtgtaggaacacctcaggtaggttgcttgtatttataatttatcttctaatttggtttctgttgcgtgtgatagcactgcttcgcgtattatattataaatatcataccactttactcttgtggtttgcttcaattataaattacatccctgtgtttgagttaatacttaaacacctcttgtgctctgcaaacaattttaaacttatcccttaaagctcgattttaccaaaataccttctaatttatttaatttagtaccaagattcctctctaatgttttaaattaatcttgaccaaaatcaagatttaaggaaaagttttatactgatatataaacataggagtgtaatcatgtatttaagcagaccacatgggagtaatgtagtaattttatattatggtatatttacaagtttacatggtttatgtaatcaatgtgctcgaaatttcattatttagttttaaattaatttaggatattcatgaatggtggtgtgaactcgtcataggctatatgctgtcac

SEQ ID NO: 180857 - DNA, 599 bp, Cannabis indica
  modified_base (586)..(586): a, c, t, g, unknown or other
tgtctgtataaagcaaaaagatcactgcaaaaatctttaatgcaatttccttttaatacataaattagtattaatttaggatatgcctacggcttcattattcattactattattagttttttcaatgaaacataaaaggtcataataagaagagtagtaccatattgccaatctaagcaaaacttaaaacagatttcaaaacaaagaaaacaaaaaaaaaagggatttttttttctttactctcattgtattgggattgaaaagaattaagaaagaaatcagaggtaacctattgcatgcaagagaatcaaagaagaaatcaaaagtaaataaaaataaaagccttttgtcatttagttcaccaggtgtccatgtgataaaaccaatattttaaaacaaaggcttaactctctctcctgtttcacaagaccactctagttttttcttttcataatctaaccgttcaaaacctcacaaaatggttaaaagttgatatgaattagatagaggtgatattttgttcctctttatatatctcatgcatttttttcttctcattacactaaaaacacttggcttgaaagngtaaaaaaaaaca

SEQ ID NO: 180858 - DNA, 732 bp, Cannabis indica
gttttatgcaaactaaactggatttctggttggattttcgtttcgattgcattgggttgctgtgtggttgccctatgcttgttcaggaaacatggatcctgggttgaaggtgtgtgtaagtggtatttgtgtaattttttttatttgggctgtatatttatttatttggccagttaaaaatattttcataatattgttatcttttttggttaaaattaaaaaagatacctaaatatattggacaaaaaaaaatgatataaaattattccattacatcacatgattttctaattataaaatataaaaaatacattttgattaaaaagaaaaaagcaaacttttcttaattagctagttgatcatcaatatgagccatgttatatccaaataattaattagcttaaacttttaaaaataataataataataataatcaagtatggaaagcaagatagctatggctccctcatgttattgacaatatacattatatattaacaattaattaatgcttaatttcactcattatgatagctaattttttatgagtttattcttgaacaactctgactacataaccctttatttaacattaaaaaaaatgcaattttccatcttaaatggagaagataacagaaactactcattgtaaattttatattataaatttttccatatatatccccacaacaacacaccaccttgtgataacagaaagataaatacaaaact

SEQ ID NO: 180859 - DNA, 704 bp, Cannabis indica
attcagagctctgtcaagaacaaatttccaatgaaaaagtcaaggaatcaaaccaaaaacattaatgaataaattatttgaaaatattcatcatggtgtttcttacaagaaggatagctccttgaggttgcctatttcatctggaattttaccattgaacctgcagcctgctaggattctgatatattcaaacaaaacaaacccttaagaacaatgaataaatttcagttggtgggaacttgaatacatattgcttggtcaattgttcttacaaaatatttaagtttttcaagtcgcctaatcgaggagagaggggacctgtaagccctgggttaaacgacaagtccctgcaatgacaacaaaacctcaatgagcataactttcatagtgattaagattggtcaatagtaagagtgaacactaaaacatataataagaataaggatgaacttacaaggttcttaattcagtaaggcctccaatatcaccttcaagtctcccttttagtcccatggttgacaatcccctgcaaatatgagcagatcatagtaaagaagacatataatgaagttattgatcaatgttgtataaattttattctttgaaaaaaaaaagtgtggaaaataaattaaaaaaaataaaagaaatacaatttctaatattagtatggaatgaaaaattgtaatgaaaagaataattgattc

SEQ ID NO: 180860 - DNA, 492 bp, Cannabis indica
tgaacctcctttggcttggttggtgatggcatttccaccaatgccctgatcttcgcgggattggcttctattcctcgctgattaaccatgaacccaaggaatttcccagagccaactccaaagacgcatttcagtggatttaaacgcatcttataccgtcgtaatatatcaaacatggtctgtaagtgggcaatatgatccttcgcatgttgtgatttcacgagcatatcgtcaacatatacctccatggtttttccaatgagatctgcgaacatcatgttcactagcctttgataagtcgcacctgcgtttattaaaccaaaaggcattactttgtaacagtataatcctcgatcagtaatagtacgaacggtagtagtcgtcctcggttcgttacgtttcgttactaactaactacgggtacggtttagtttagttaatttaattaccttccgtaggtaagttagtcgactacctacctagtaaacgtaa

SEQ ID NO: 180861 - DNA, 807 bp, Cannabis indica
tatttttttttcattattaaaatcccttacatgtgctttcagaattggaaattcccatagtgatattttaaagactacataagctaatgattttttatgttccttacttttatattagcttagctatgaacacctcaactcaaagttttgagatactattgagtatgagctaattgtttccaacttgaagagagaaagaagaggcttgtcttccactgactagtagtgaagatgacaacaacaacaattcacatacaactttaattgcttcaaatggcagtactcaagatgcctcttcatatgttgttgattcagactcagattatggtcgtctgattcaagctctattctactcttcctaattaattactttgaggttggagatatgaaatccaatactcttgtcttgaaccatatatctgttttacagtgtttaattcgataaacagtttaaaaccatttctccaattcctcatccatcttttgaggctgtctcttcattaatgtctcctgatcgatatggggcaacatggaattggaggccttggtatgcaatgcaaggggaatgaacaatatgctattcataaccatttatttggttaaaaatgactcttattgtcaggttcttagcatcacagatggtcaggctgaggtatggtcttgttaaaccccattaatacttacttattaattgcttcataacaaaatgatatacttttctttttcttttgtttttgtattgtatgaacgatctgaataacataggtgaggttgtttccctatatgatgaaatcgtgtgttcgaagg

SEQ ID NO: 180862 - DNA, 738 bp, Cannabis indica
caagggatgtatcaatctgctcctcgatcagggggattggatggaggaattagaggagttgacttgggcatcaatgctaataactccctggttaattctttgggatttccaagtgaatatggtataaaagataataacatgagggaggacataaatgatgatattgatggtgatttactggtccttgaatcaaaaaggaaaagagttgctgaatccaaatcaaatgggccgaatgggggtactggtgaaattattgctaattcagtaaggacacaaaacttagttggggcgggttctgtgtcacaggcccgccaagaattatgaatgtgttaagctggaattgtcgtgggcttgggaaccaacgggcttttcaattccttaaagagattgttactcaaaagcaacccaattttgttttctgtgtgaaacaaaagtataaagctagagttgattttgtggccggggatcgggctttgaaggggtgtttacagttgaggcccaaggtaggagtggtggtcttgctttattttggaaaaatgaaaaagatggtaaaataattggttttctcaaaaccatattgattttatggtagaagttgatggcagcccaaagtggagacttacaggagtttatggtgaacctcaaaggcacaaaggatggatacttggaaccttcttaggtccctggtgaataactcgagagacccgtggtgtgtagttggggatttaaacaacgtcc

SEQ ID NO: 180863 - DNA, 548 bp, Cannabis indica
aattaatgggacatattgagtgtgtagttcttgactttaattaccacaaaaatccctactaacttaggcaaaccaaacttaactttcaactgctcaccaccttcaccttcgagctccctttatacatataaaataattttttaatgattattacctattaataattactataaatattaattttaaaaatattaaattataaaattttaatacaatgacaaatgataaaaaaaagttatactaaatttaattacttaattaaaaaaaatattaaaaaatatccctttttacattatattaaaaaatatatttatacaaataaatacttaagtaaaactcaactttcttttatcttttcttttgccgaaaatttttttatcttaatttttttttctaaccgaacaattcatcccctataatgtaaaaataaataatttttttattagatagaaaattaatcataaaaactcaaatttttaaatactatactaattcataaataatacctattaaaaatatatttcaataattaatttggccgagagacc

SEQ ID NO: 180864 - DNA, 797 bp, Cannabis indica
taagtagtttttgtagtttttttcgttttttgtagtttttattttcttaggttttatagtttttggttctagttatcatctcttcaatttgtaacaattgatgtatgtctggacacctatttgttagtttaatttaatgtttatacgacattggttctcttattggtttattgtatggatttaatggtgtacagtgaaattaaattaatttgttagacttctctcttttattctcttagacagatatataaagaaatttctaatttcaaaaataataataataataataataataataataataataataataataataataataataataatattgtattaataaaatctaaaaagaagtaatacctaaaatttaagtttttttttttaatttattttttaaatcaaaagattatatgtatagcctcgggacactatatataaatattaaaaggaaaaaaatagtatatttaatattattttttttctaaaaaaatatctaataatagtgggcaccttttgtgtgtcactatatcattaaaataaataataaagaaaaaaaaaaaaaaagaaaagaaaaagatatagtgacactttttgtgtgtggctgttacttttttagtctaacgaaatctgactctaaacgcctatagtgacgcgcattgagtgactgtaaaatggttaagtgacacgcgtgaagtgtcactaaaaattgtctttccagtcaccctcattagcgacacgcagtggagtgtcactaaataattttagagtcactcgatgtgtatctactaaaa

SEQ ID NO: 180865 - DNA, 869 bp, Cannabis indica
ctggcattattgactgaagaatcgccaggagacgccattcccgctctgataccaagctaaaacacaatactgagatataaaaggaaaataatgaagcagagtataaaaagagcagagtattgcagcaagatatatttggtatatatttctgtattgaattctcagtgtttttacagcaaataatcaggggtatatatagtacacgaaaaggaatattaatcctaacaatataatattctcttgtccaatgattggttgagtataaaaagggaatcccaagattttaggaattgtatgacagctcatgattgggaatcatctagaagttcaaaaatgacagcacaccaattcagggagtcatctggtgcggtagggtccattcacaattttaacagaaacaattattaattcatctgaaaaaaggcaaagtatgccaaaaaaaaagacatttatattttttttgaatggagaaagacattgattattatttattagtgcaaggctaaataattatttcatagccaagtgttgtatttcatattaaattaaattgtattatattatattaaattgatttatatattatatttttatataatattatatgaaattttaatttatatcaaattattatttataaaaattaggggaattactttatatattattttttaaattttttttttttaaattttaacggttttgtagtttactaaagttgattactatcgctagttgtcaatagggatttctatgtcctaattccgtaaaaaatagccaaaaaaaaactaatttaaagtagtaaaataaaataaaccctaaaaacttaaataactacatacaaataattacataaataataatttaat

SEQ ID NO: 180866 - DNA, 1090 bp, Cannabis indica
tcaaagctagggctgccgcctcctcctcctctgctgatggtgcttcacagcccgaaactgggggttccgttgattcgaatgttgagaataacgaggcatcttcttgatctgtctatctctagtgattctgagcttttattttacaatccaatgcatattaggttcttcttcttataagttctagggttttttttttgtttattttcattgattgttctttgtcagatattggttaaattggagttgaatttcaggagtttcccttgtgcagagctgttataatcaaaagtgttgttttgtgtttgacctttaattatgcttttgctataattacttgttctagattatattgaatttggaaatgatagaaatttaggaatatcatctttgaaccttagaatataatcaaattgattgtctgtcttgttgataagtactaacaaaatttgacctttaattatgcttttgctataattacttgttctagattatattgaatttggaaaaaatgctgctcatattagctgaaataatgaaatttaggagtatcttctttgaaatttagaatatgataacaaattgattgattgtgtcttgttgataagtactaacaaaatttgatgttcaagttcagctcctgatgatctcagaaactattggaattatccatggttttaaagtcctgctattaatatgcaactatttgcacaaaacttactatgtataactactatttcttagtccccatcaaattaaattcttgcataatatataaactatcataaaacgataatgcaactataaggcaactatttgcacttgcatacagttgttttgtagttttattatagttttgctacttgcatatgttatttcactataaaattaatatgcaactatttgcacaaaacttactatgtataactactatttcttagtccccatcaaattaaattcttgcataatatataaactatcataaaacgataatgcaactataaggcaactatttgcacttgcatacagttgttttgtagttttattatagttttgctacttgcatatgttatttcactataaaattaatatg

SEQ ID NO: 180867 - DNA, 598 bp, Cannabis indica
tatatatacatatatatattttggaattttttctcttctttttctatttgttcttttttttccccaattctttctctcactataaaaatcttatttttagtcacaacaaaacatgtgactaaaagtgaaaaggttgtgactaattataaataatcaattctatgttgtgactaaatgtatttttagtcacaataattttcgtgattaaaactaaattagtgacaacatatatctaaatactatattttagtcacaagtaacattttgttatgactaaaagtcacatttagtcacaaaaaaaattatgttgtgactaaaaattatgatttgaagtagcagtttttatcattgtatatatataataagtgtatattttttatatctcatttttttaatactttttctctttcttacaaaaaatttaagggcattcctatatttttttatcttttacattgattaataaaagtagtatattatatttttttttttgtatattttgttagtttatttcagagttaataatttattgaattatttacactatttaactaagatttgatatctttgttatttttcttgttgtatttattaatta

SEQ ID NO: 180868 - DNA, 987 bp, Cannabis indica
gagattcattgctcatagtatcctaatttagtcaagatctcattagacattatgggaggaaatcaacaaaggccaatcgtatgattatgatcaagttgaacttacaaaaatcatatgacactatagaatgggaatttattcaagaaatgctccatgctttctgatttctgaataactttatcaacttggtcatgaactgtttcaaaactccatgtatttctcttatgtacaatgggaatgcatggaatttttaaggtaaagcgaggcttgagttaaggagatctaatgtaacctatactttttgtaatgggtatggaatacatttcctgaattatgcaaggaattagggaaaagaaagtattcagcttcattggagatgtggtgagttgatgcttaactacttatgttttttttggatgacgtccttttattttcgtaaaggatatttcaagagcatttatttttttctacaaggccttcaactattctcgagtacatttggtttgcacctcaacaaagtaaaatttgcaatatattgaagaagagtagaagaacgagagatccagtgcatccttgatgcttcgggattcagcagaaagtcagttcctttcaaatatttatgaatccccatttgtgccaagagaatctcacctaaagaatgcagtatattagtgcaaatgttagtgagaattagacattggagtttgagaaatatgtcttttgcaagccgagcggttctaatcatctagctcatcactcctactggtgccattcttcaaaagattttatagaaaagtcaagaagattttacaggctcgggtagtatatctttggactctgtgtgtaggtcgaagagtgattatggtattggcttaaaaatatatgtttgaatagaatactgctgccatggtaatgggcagctgcagctaaagaagataatttatgagttaaaataggtaacacaaatgtgtatttaaaaaagatgag

SEQ ID NO: 180869 - DNA, 757 bp, Cannabis indica
gtgtctggatctaagacttagaccagaacccaaacccaaactcgaactcaaactaggacccagacacatacaaagacccaggcccacacacgggaaccaaaaccgaaacttgaactggaactagaccgggatcttagaacggtaccgggacctaaacccgaacccgaactcgaaactagacccagcctcagaccctaaccgagaccaaaactcagacctgaacctcgccccggacccaaatcaggacccgaacctggactcgaaccaaaacttgacctgaacccgtaccccgttacttgaaactggaaccgaaactagaagcggatcgggacccatgaataggaccaggaccaggacttggacttagtcccaaaactgtaaccggacctggacccagattcggacatagacccaccctgggattgggtccaaaacctgaacctaaacctaaaccgggacttgggacccgaacccaaacctgaactcagactcgaacattgaacaggactcggcacccagaactaggatggagacccaaaacctaggaccccacgtctcggtcccgaccacctagacccactaccacgagcgggaccgggggcgatgaattgaaactcaactacgacccgtcgattaggatccaaatcttgtcccacggatccgacgaaccggggcgttggacaagacccgactagtcgatgtcttgatctgggactcggacaaagacttgaatcagaatgtgaccaggaccttggaa

SEQ ID NO: 180870 - DNA, 518 bp, Cannabis indica
cttatgcggatcggattggatcaaaaatatgaaatctgcacttagtgcggattggatgttgtttgaccaaaaaagtgcggattggataggatgaacacccctatcttaaagtcatgataagtgttttctacacaggcggctgctactcaatatcaataaaattacagtaaattccggtgaaaatacttaagttttactctgaataacagataaatacttaagtcatatttttggcggtaaaaaatacatttattaaagttctggaacttctgtacgtacatgaccgttaagtgctacgtaaagtagcccacttgtcatacttctcattggttccaaatttattttattttttaatttttttgtattaaaatattatttaaatatgactttagtatttatctgctactcataataaaacttaagcattttcgctacaatttactcatataaatactatataccaataatattatgataacgagcaataatgatacgacaacgatgaggatgctacacct

SEQ ID NO: 180871 - DNA, 1184 bp, Cannabis indica
atttatctttacttagtggaactcataattaagacagagtattatttaaaattttaattgattaattaaaactaattaattgattctacaagacaacattatctctggtagtgtggggaccataagactatataatcaagcttttaatatatagttctagaatttactgagtaaatttcctatcttattaattcctcatgataaattctgaattatattcttaattacataagatgctctattcactaagaatagatacgatataaattatctattgtttcaatctaaataattattgaaaaaatagttttaatgaaatttaatttaaaattatcaataaaattagataattatttttttaaacataaatcttaatttaaatttaaattagacattaagtcaaataattaattatattttataacaaatttattagttatataatttaaaatatctaaattcatgtacttattttattatttaataaatttagttacatatattttcttatacataaacttaaatatttaaaatatgtaattgaattgtattagatttaattttattattattatttaaattaataatcaggtaatattaactaagagtgtttattggatcacatctaatggatttggacccaaccgatctgatctaattatttatttaatagtaaattttatcatctgatccaatccaatcgaattgagtcatccgatccgatccgatccaatctaatggatgtattgaattggatcggttccaaccattagatgcattaactggttttttattggattggattggattcttccaatctattttatctaccacttaagatgatttcattaaaaacgaaaaactacaacataaaaaatataatttaaaacctaataatccagcatacatgatagacattaatttagtccaacttaattctcatgatcctataataaaacggctaaaaaataaaacttattcaatacgcacagggccgaccctgagttgaaatgggtcataggcaaaaaagtttttgggcctttactataaagataaatggtatttttaaaaattattaaaaaataatgtacattttttaaatatatttttatttaggcccctaaaatgagtgggccctaggtgtcacgggctcaccttttcaggcagcggaacacccgtgcggc

SEQ ID NO: 180872 - DNA, 928 bp, Cannabis indica
ggcccctgctgcatatcgtcttcaacctttcctcccgacgccaccatttcatcctgtcttttcatgtctctcttctgcgagctgccttaggccccaatcagcaaccactcaccccttcctgcaggccttactgctgacctggaatggatgttggcacccgaatcactgctggccattcgcccaggtacccacaaggttaacccgcaagctctcatcaagtggaaaaaaccttcctgagtatgaggctacatgggaagactttgctgtcattcgagctcagtttccagatttccaccttgaggacaaggtgaaacttcaagccgggggtattgataggcctccacttacttttgtgtatgctaggaaaaggtctagaaagcctaaaggtggggaggcagtagggaataactctgcttctaatatgaaatttctgttatgggggaattgtttgggtgtggttgaggtgtatgttaagcctcttggagtctagctataaataagagttaattgtcttatgtgtggtttttgtgaaagaatttgtaacagaaagaggagagcccaggctctcgaattcctggggtgattatcaatacagaataccatttttcttttccttcttctcttctactcttacttttgtgctgctagtttaattaaattgataggaaatcctatcacgtcactagttagtgggaaaggaagatgtgaatgaaaaacgactagggaaggaatgaagaaactaatgaaacatactccccttctaaatactcaccataagcaggaggtttgcaattattgcctgggctttaaatggaacaccagtttccaaatctaggttctgtacatgcgggaaagaagagattctataattgccttcagttgcttcctttgaattcatatttctttcggttccagatgggatgagacc

SEQ ID NO: 180873 - DNA, 680 bp, Cannabis indica
atagtagctaggtaccaacaaaatacataacaaatatagacaaatttaattatttgtttactagataatttatcacacactcatgtatatatttaataatgtatgttatattcacacttgcagcgtctgcctgaaattatcttaaaaaaagatgcttttgcaaattaatagtttattctttaaaatgcaatgcatgcatgtgtttcaaacattgtatattttgaactttgctaaaaaaaaaaaaaaaaaaacaatatacatttaaaattatttctttttataaaattccgatcataagcttacaagcttactgctaggtatacttcactacttttttttttttcacatttctactctgttctaatataataataatagtaactctcttcttttttttcttttttttttttttaatattattattatttttttttaaggaaaaccgtttgtaggtaaaataaattagacctcgcggtcattactaataatgttcggcaggatcgattgacgggtcaaccatgccaataatattattctggaaagttacaaaatcttggaatagagaaaaaattacaactacaaaaaaccttagagaacatattacaatggtgaatatagttagcaataatccaactggaggtggttccatgcagcgccttgacctccgagtcactcttaac

SEQ ID NO: 180874 - DNA, 656 bp, Cannabis indica
ctggaccggagcatgctagagcatcaaccaaatctcagttgtcatcagggcttcctccaaatttttttgatgatagtgacttacagaaggcaaatacaagtaagacttctatttttattttttattttgaatccgtgactcatgaaaaccatgttactgctactatggttatagacctatagttgttgcttggtgaacaataattgcttaatttgacaattttctttgtagattttttggtttatgcttgataatgttgctgtattttgttaattaattagatttatgagatacaaatttcctattgggagtagagttggactggataggtttatattatatctaaaaaaatgctgtttaggattaatcattacagtttgggagatcattcatttgcagtaatatctttcagcaactgccaatagtttttgaatatatatgctgtaatcgataatatcctgaactgaaaatggttcttttaattttgtctcatgtgtgaaggcactcaacctgacaattctagagtatcaaccaaacctcagttgtcatcaggccttcctcccaacttttttgatgacagtgactcacaaatggcaattacaggtaaggtgttttgctctctctctccaaccccccccccccgaaccctagtctca

SEQ ID NO: 180875 - DNA, 410 bp, Cannabis indica
caaattgtataaaaaccattaaatttgtaatttgttaatataaaatttgccttattctataagtccaatatgtaaatgggcagggccttaaaccccatatatagtagttttatgaaaagtatcagaaatacttattactttttatatatcatacaaataaaaaaaatatttatacgaaaatatgctaagaatatgccaaatatatatcatatatctcatacattaatcaaacataataaagtaaaacttaaaatctaaatgctagaaacataaaaatataatgtttaattttaaaaattatactttatgaagaagaaataaaatatttgttcaataataacaaaggttacttccacattatttttagaacaaagtgaaattgcagggacaaccatatataaatatatata

SEQ ID NO: 180876 - DNA, 634 bp, Cannabis indica
atatagtattactaagtttttttttttaaaaaaaaataaaaaaataatgatctgaaatccgtacagtgataatggaaaacgctaacagaaattactaaaataaacaaccgagaggaaatagaaaataaaacaaattattaaaacaatgtgtagttcttaacgatctaaattaaatacataaattataatagtttattttattgagtattagtattaggcacgggtagtactaaatgtgagacgtaagacgataagaaagtcttaggcatcactacagaaaatctataaaaccagcaataataataataattaatcaaacattcaaacccgaactccaattgccacaaaacgacatcgtcatagggaggtccaaatccgaagctgcgggagccttattagtaccaccagcagagacggagatcttattccgaaggttagtcaacatagctaagtgattctccaactcttcatacgtcatatcctccaccggttcctcccaccacgcgcaactattattatctaaaatcgaggccaatctcgcttgtctcaccaattgcttcttctttttctcggcctcttccaactcagtcatagcttttacaaaagtactagtactagtagtagtagtagcagt

SEQ ID NO: 180877 - DNA, 576 bp, Cannabis indica
aaaaaaaacaaaaatgttctcatacgctgagaagaataaatttcaaaccatatggatctggctgaatatgtgttggtggggctttagttttctgtaggaaaaaaaattatcaatgaaactgtgataatcatcagtaataccaacaattttacaacaaaagggatatcacttacagctactaaagtatccaagccttccattaccggaagtggaaggtcctctttaacagctacagttaacagaaatttattgagaagaaacacaaatagaacatatatgactaaacattatattaaattaggatgcacgagaatctcgatttgtttctaaagtgttgagctagcgcactctcccatcgaccttttgaaaggcaagaatgtcaaactcttagaaagacctaatgttttgagcttgactataaatcttaaagaacacaatataggattatataaaattttcgattagataaatagaaaaatatatacttatactacaaggtttgttccttgtgacattcgaggcaataaggtacagaaaaagttcatgcttgatacggatttagtaacatcagcccaa

SEQ ID NO: 180878 - DNA, 610 bp, Cannabis indica
atattgatatacatattttatttcatttgcaaaaaaacataaaaaaaaaactcctttttagtagttccctttcatttctaaagttatgtgacttatgtcttgtattttcttttatgattttgatataccatatattttgctatatcatatattttgtaataataagataaacattgtcttgtctatatcatatttttgtactcatatcattattttgtttacaatttttgtaaagaccgcttatggttaatggttaataccttgaattatttaaggtttatgtatgagaatagttaataattatgaaatgtatattttagaaatatatttaatatcatttatgttattatgctatttaatgtaaattacccaatttctgtgtttgtgttcggaagccgtggaaagcgacgttgagcctttagagaattgtattatatggtttagaatatttttttcggggtatcattgttaggttttagcggtgttggtattttcggggtttggttaatgaccattttacccttgagatgttttaattacttttattagtggaggggcgaagaaggtctttttacaagacttatttggtcttatattagtttatatgtgg

SEQ ID NO: 180879 - DNA, 655 bp, Cannabis indica
gttaggtgttgtgtatcgctgtcactacttttgtaacggagttactaaccgataacgaaataggggtctacttagtggtgctgctgtacactcgcagtagtgacactatcactgtagatgtttaggggtcccgtgacacaaagtatgtaatcaagttaggtgtagtgtatcggagtctcaaattttgtaatgaaatcactaaccgatactgaaatagggtttaattagtggtgtcgatgtacaatcgcagtagtgacactatcactgtagatttttaggggtcccgtgacacaaagtatgtaatcaagttaggtgtagggtatttgagtcaccaggttcgcaacgaaatcaataaccgatatcgaaatagggttctacttagtggtgccgatgtacactcgcagtagtgacactatcactataggtgtttaggggtctcgtgacacaaagcctgttggaaattattttaccaagatcttcgatctactcacaagtatgttgattaacaccctaaatatgaactttctaaaacgatgaaataaacacatataaagtttaggaaaccatacattgggtgcagcggaataatatgactccttccgttcagatatctagcccttgattcctttctgtagcagagcattatcaatatctg

SEQ ID NO: 180880 - DNA, 1075 bp, Cannabis indica
agggtctattttatcatttaacaaaacagagaataattaataacttttacaaaacatagggtttaaaatggtatttactctaaaaaaatacacatttgcttatacaagtgtcttttatttattataaaaaaaaacaaacttataaatctttaaaattattaaaatttatatataaatttacaaattatatttaatttgatacacgtgcggagcacactccgcacgtgtgtctcccactaatattatttaaatgttataatttatgttatacacatttaataacattttagaatgtaatcatatattttttaattaggttttaactatgttatcttttagcttcatgttgcacttttgcacaaagaccatacacatttcatgatcccacgagatgcacactccatgttgcttaagttcaacttgttaccaaacattttaaaatattatttctctgcacatggaaaacataaggagtgagatgtgaagcccagtataaaaaatacaccatgtacagacactagctttgtaatgatcgcataagtatacatggaaattagcagataattaacaacttaatagtgatttaaattaatatttatgagtatatgcctattagcacaaaatgggacctattaacacaaataggtatttgagaaataatttctctattatggaattttattgaaatctaggtgaattatatatgctatatatgaattattatatttttttatattttatgcccgttaatagtaaaatgcaatgttttggtcattaatattagtgtcatatagatacagttgagtatcttgaagttagtggagcaaatgagtttgacatttagaatttcgagattgagtgggattatgagttttggccattttactcctagactctaaggttactctatggggaagaaaaatagatatcttggaaattttgccttaagcttgattttaaccttttgtttagtgggaattattggagataagcttatctttactaagttgaaatatgtggagaataaaacaaacaaataataaatataatactgaaatacaacaaaagaaataaa

SEQ ID NO: 180881 - DNA, 560 bp, Cannabis indica
cactcttatcacttttcacataacgtaaaaaaaatagagtttataaaaaagaagaaaatcagacaaaagggagggaggagagtattgcattttgcaaagaaaaaaaaatagagaaagaaaacagagagaaagagaaaaaaaaatcactgccattgttgttcttccaagtattcaaggtcttcaagggtaagaatgcatgcattcctctttccctcaccctctctttcttttactttgtatttgttcttttctctactcatttatggaatgccctcattctgtaaatgaaaaaggatgccctcatccatggaatgccctcattccaccaaaaaattggatgctctcatccatggaatacccttattccactaaatttaaatttatggaatgccctcattccattaaatttatggatgctctcatccatggaatacccttattccactaaatttaaatttatggaatgccctcattccattaaatttatggatgccctcatccaagggatgctctcattccacaaaatcaaaagatgccatcatctatggaatactcttatt

SEQ ID NO: 180882 - DNA, 906 bp, Cannabis indica
ggaggaaacaaagctgaggagacaaactcagggcggagcgattttggtaacacggtggttgttccacctcgagccatcaatgcccaagttttgacaaacttcatccatgacaaagcatccgcaatcttatcagaaaggctcataccaaccgcgattcctccacactcgaacgtgttaagttgaactgcaaatagaatttgatgagcgtcatcactttcatcatgacgagaaattaaaggacaaaaaatgtcgagttcttgagctattggattggacataacgtgggaaagtcgcccattcacttgagcttccacgaagggaacaccctcgtcgttgcaatggatgaattgtccatgcttttcgagtcttccagctaaagggtagtaatgggttaagatggctgataaggatctttttagaatgatggctggattaataatggtagtagtatttttctttgtgtaataaaacaccaaagggttatagaatttgggagatgattggtctaataatgagagtttgtaacgctcaagattcttaggagttggataagatggcttgataatctcattggagattgcttcaacttcaatattcatctttattttcacaatgagagatcaaaactagttaatattgtatcttaactagtttggcttagctcttcaatttgtgatatttgtgagtgcatgttctcttcatctcttatatttatagtcaaattttttcttttaaaaaaaaaaaaataaaaaactaacttttcatatcatgaaaaatcataaactaatattatattgatccccatgttacacaaaacttcaaatattaaatgttttcaataatttttaaatatcatttgtccaatcactaattccaatataatcatatattgtggagagcatgcat

SEQ ID NO: 180883 - DNA, 715 bp, Cannabis indica
caagagacagggacaagaggcctcacaaagctcctcaaagatttggctttgcaaacatcattcactatgctctaaacatagaacaatttgagcatgaacctagaagctttgctgaggctatgaagtcagttgacaagagaaaatggggaagagcaatggatgaagagatagaatctactaaagaaaaacaagacctggattttattttaaaacctgcagggagaagagtagttggttgcaaatgggttctaagggttaaggatggaattcatggctctgaagaagtaagatacaaagcaaggttagtggcaaaaggattctcacaaagagaaggagtggattacacagaaatcttctcaccagtagtgaaacacgcctctataagactaatcctagcactaacagcaatggatgaccttgaattggagcaaatggatgttaaaacaaccttcttgcatggtgaattggaagaggagattctaatgcagcaaactagaaggctatgtggaaaagggcaaagaagactatgtttgcttgctaaaaagatcactctatggcctaaaacagtcacctaggcaatagtataaaagatttgctgatttcatcaccaaatcaggcttcaagagagtgcctatgacatttgtgtgtatgtcaaaacatccaacaccaggagtacagtcttcttactcctatatgttgatgatatgctaatagc

SEQ ID NO: 180884 - DNA, 598 bp, Cannabis indica
agagtaaaattttaatgttaattttcatatatacatataaatttgacttataacaatataaaatctaattactcattcaaaattaaatgaaaatacaaattagttcgattgaatgttggatgtattggatttttagacacccatccaccatccgatctgatccaattatatatttaaaaataacatccaatctgatccgatcacaattggatatctaatgtttggcggtcaattgtaaatggaggatcgatttatgcacacccctaccagtaacgatattataccataaatttattacactttttaatttatttttatgttatttttattattttattagtatttaattataacaaaattataatatactaacattaatgatagaattattgttaaatttttaataaaaatattaattaaatattaaattttacattaaattttgttgttatgtattaaagcgtaatacgaaaaattaatataaaattactttttgtatcaaatatagcactatttttacatttttttattaaggtaaatagtctaaggtataatattgctactactggttaacttttgtagactttaagcttattaa

SEQ ID NO: 180885 - DNA, 624 bp, Cannabis indica
tatatatatatatatatatatgattaacccttctcaaaatattgttagagcatttcacatccaaaaaagagtgtcaaagtccaacatcaataacaattaataataataaaaaatatttctaaaaaatatttcttctcccttatttattggatgtaattttattaatattagtagatcttgtaattttgtagtccataatatagtaaattgggtttttgctcatcagagatttggtttattccactatcatctgttcttgcaaacttattttataatgacttgaaagtctaattttacccatctattataagtacgttttttttcaaaaaaaaaaaaaataataataataacaatttataataataaaaaaagatttttaaaaaatatatatttattgtgttggcacatgtaccaaattttacaatattgctcttctctctcttccacctcatctcatatgaacccacttatgacaaacacatcttgtatatatgcaacaataaaatggaaccaaatgtaaaaaaaaaaattcttttcaaccttaaatataagtagcatagctgctcctaacccatttttattattagttagtttgtaaatattctaattaaaaaataaaaaaaa

SEQ ID NO: 180886 - DNA, 666 bp, Cannabis indica
aaaaaaatcttagctatatataattaaatatgaccatgactaatcaattatatataggctggtgttaccctgatggagtgcttaatgtggttactggatttggacatactgctggtgctgccattagccatcatatggatattgacatggtatacattattattattattgttgtgaattaaagacataaaatagttaagttattaatcaataatagtttttggaatatataggtgagttttactgggtcaacagaagtgggacgtgagataatgaaagctgcagcatcaagcaatttgaaacatgtgtccctagaattaggaggcaagtcacctctcattgtttttgatgatgctgatgttgatttggcttctgacattgcactactcggctttacttttaacaaggttcatatcaagtaactttaagttttatattcaaattcatatttattgcaagtgatatatattcatatatcatacatttacgatttccttttctatgttttagggagaagtatgcgcggcaagtactcgtttgtatgttcaagaaggtatatatgatgaatttgagaaaaaattagttgaaaaggcaaaagctttggtaattggagacccttttgatcctcaagttcgttacggaccccaggtatatatatttatttct

SEQ ID NO: 180887 - DNA, 731 bp, Cannabis indica
gattaagacacgttactaagggtacctcgctaaggtgtcttgcctagtacataaacatcttgttttattcataggtcttccagcaatgacgtgagcaccagtgtactcagcaaatttaagaattgctctttgaccataaggccttgcaaactggacaatcatgtccttcaagctattacacttagttagtatattgtatattatatgctaagtgttctaacagccgatttgcctcgtcaatacctcattacatattgtgaggtagatgcctcgctatgtgttatcgatgtcttccttgcgattatgtcctatgacgcgaaatggtttctcgtcaatacgcgaatcaatagtttgtacatccttgtctcgctaaagattgtgcagtctaagagttttaaatgtactttattatttttgcatttaatgagttattctattttacatttaataatataattgtcattatatttgttggttcatattctctgagattgacacgtgtcaccttctgaagtaccagcctaatttcaggtataacaaaggatatttcaaactttaaaatatgtaatatttataatgtctgatcttatcatttatattaaaagataacatcaattctatctatatttaaaaatatatcttttcaaattttaagttaaaaaaaaaactagtaaaaacttaaaatttaaatcttttaattattaaaaaaatacaataaaaataagtattaa

SEQ ID NO: 180888 - DNA, 777 bp, Cannabis indica
tatttggattgatgactatatatatatattgggattggtcctttttccattcaagaatttctatatctttttatggattaatgacatttttgtgatttgtcttagactagatttgcacattgctcatatttatatatgactatgatccaaggattagaatttaaagcatgtgaaaatatatagagccaagattgggggccaatagtaaggcttcatatatagtaattttaatgattaacattcttttttagataatgctaactattaatgagtgatctaatataatttatttagattaatttaaaattttataaatattttatgtaataaaatataataatgaatcaaattataatctaatagttaataagacttataaaagtaaataattatccacctatattgaatagaaaaatattttacatcatttcaatgtctaaaataaatgattaaattgatggtagaagatagttagtggttgattatagtaaaattaaccatatgaatagtgttaaaaaaatgtataatggttgaaaatgatcatatataagtcaattaataataaaaaacacctaatttgtatatacattatttttaataaagctatcttatttatttagtatgatagacctataattatataattatatatattttatgaatatacaatatatgataaatctatgactatagtacactttttctacagcgtgcttcaatagactctatttcggtatacaaaagggttttttagtctaatttttcgttttattccag

SEQ ID NO: 180889 - DNA, 760 bp, Cannabis indica
caataaaagtgcatagcttgctcaatctactaaactctaatcacattaattacgaatagagtttaatttgaactaatttttaaattttgaataggtactactaatgacactccaaagtggacctccttgtgttactaatctttcaaatgatatgttttctaatgtatgatttttaccttttaatatcttatttatacttttcattcaaaaaaaaataacttcaagtactttaagggaaaaaatactttaagtactgattggtgcagtaacgtgcgaaaaagcaagaaataaaaaataaattgaacaataaaggacccatttttttcatcttataatgcatttctcggacccataagtactcagggttggttctagacataatctctataaacatgttactataatcaattggtgattggttacttgtaactaaacataacaagtacttagataataagtgtaaatagatttttggacaaatattttatacttcttcaagtttaattatttacaatactcaacactaaggttgtgtaaataaggagagttattcttgttcatttcttatactttgttcttatttctcttgatattgccctttattttacattattgtgtttgtaacttttttttcgtatctcttactattttcttacaagttatttgtaacttttactaatagtattgtgtacacattttattcaagttcttaatacttctaatattttgttaactgtaatgtaacttattatttattata

SEQ ID NO: 180890 - DNA, 1270 bp, Cannabis indica
gaagagatttgttgagtagtagcagcggtagcagtagagtttgaaggatcggtgttggttccagtggaagccattaatgacagaggtcaatggcgattgataccatgtagaagcttattaataggcagaaaacaaaaacaaaagaagagaaaataaagcagagcataaaggcagagccaaagaatgaaaatgccaagaaaagcttaaccaactggttagctttgagacctctttattatatactaagatgatacaaagtacacgtgactgaataagaaaataacaaccaaaactgaacttaactaatattaactaactaacagaaagtaacagaatgcttagctaacaatcatcaacaggtgcgagttgatgcaactaccaggatgcatttttcacactaattagaagttcgtttgctaagatattaactaggagtggatcgggatgagggttattcatattggcactacaacatatcaataaaacagaagtaaggtttttggttcatataaattcatacacaggttcagaaaaataaacaaataatcacatatgttataaaaatactaaatctaacatagtttattttccaaggtttccaacgaactgatacagtgtcccgtttaggcgagagtcaaagcatcatccattgaatagagttgtcaattcatctaaaatgtcaaacattctagcaaccttttattcgatcaagattggaattcagcgttgtcccgtttaggcgagagtcaaggcaattctatcttatgagcttctaccattgtttcgcactcttgtaagtcttatacagtcgccaccattagggtggtcataaaccatataaaaaacttataagaatacttatctttcgagattaaacggcgctaacttgctaatgaacgttcctccattagggaggattactcactaaaacaatagctatgtaaaaccaacaatggagatcgaatttctcttgattaaagctcattatttaaaaaatatgtattttgtttaatcatttatattccatatctcaataatgaaatattacaaattaaagtaaaaactttaattaaatttcaaaaatggaataattttgaaaaatatcttatttaagttgtttagaaaaatctaaatacccaacttaaatattcttcaatcaatgacttaattaaatattaccaattaagtagtaaccacttaatttagaagatattccattttaagttcccatatttataaaatatcaacttaaaaaatatctaaagaatct

SEQ ID NO: 180891 - DNA, 554 bp, Cannabis indica
atggtatcagagcaaaaacaaacaaaaaattttctaattactatccaaccctaacaaaaaataaatcgatagaagtagagcaaaaaacaaaaaagagccactaaaaatccaaaaaaattaagctacaaaataataccgatctaaaaagtaaaacaaaagagccaaaaaataaaaagagccacaaaaaaaaataccgatccaaaaagaagagccatataaacatgatataagacactgtcactaaacatgtcacatatcactataaaaaagctatatttatgtgggtaaattgctaacagtttcgtagttttgggagtttacccgcataaatttaagttgtgggagtttagtgaaaccaaaacgaaagtagagttttgccgccattacctatatttattatatctttaatatgtatagctttagcccactcatggaaacttttttatttttattttacttttttgaatcaccctcatgaggaactttaaaggagccatataaacatgatataagacactgtcactaaacatgtcacatatcactataaaaaaagc

SEQ ID NO: 180892 - DNA, 682 bp, Cannabis indica
cgtcgttcagtcgccgttaaaagatcatcgcagtaaaaaaatttgggtcagatttagttgatccaagatccattgagtaaaacgactttcaaaaatgtattctattcgtaaagatctttttagatctcgtcgatagtttctgcaagcttcgccgtcgactgtagacgaccactgtccacggtggaactccggttagctcggggacaagagtgtggctagagatgggggtgggttgaggtcagggtgtggctggaggaagaagacaaaatcaggtggtttggttggagaaagaaaaggacgtgggggtggtgggggtggactactggaggtagaagatgaaaagaaaaagaaaaaaaaaagaaaaaaaaaagagaaaaatatatattttaatatttcttaatttttaattattttttattgaaattattatttagaccaataatggttcaacacgtagaaattataagtaacttattaacggatccgttaaatttaggactaacggacttacaaaaagtgtgaccttgaggacgattgccgttatttttcaagttcggggactaatctgtcacaaagtgaatattttggggacttttaccgtaaatttccctatattatatatggagaatgtttagataattacattaaatatgtaaccatgatagttacttagttgttggat

SEQ ID NO: 180893 - DNA, 531 bp, Cannabis indica
gatacaaaatatatgaaaagaaatatttttccattttttataaagtaaatagccaatatttattataaaagaaattaaaagaataatttattgtggtacatattatcgattaaaaaaatgaaattttaaaaaaaaaaaattatataatttaatttagtttttttattgtctaaaaaacaaacaaacaagtaaatagaatcacacattttaattatcagtaaaaataaataaattaattattagttttaaaaaaataaaaaataaataaatgagatgactcattttaattatcattaataaaaactaaataaggacataattgtaactatttttaaacataatttaaattgttacacatgtcactcaattagaaagagagtgtaaaagagagtgcaaaagagagtttgcttagcactcctcttatattaaatttgtaacaaaactttagtttttgaatgtgttaaaaaaagatttagaaatgtactgacaaactagataaatattacagtttaacttattaactacttatgc

SEQ ID NO: 180894 - DNA, 560 bp, Cannabis indica
gcataggttgatatactagattgagatttacctttgccatgagtgcttattcttggtgcaaaataagcataatgctctaggtgcttattcaacctaatcgatggttactctaggtgtgcataacctaggcacaaggtgtcaacttgagcgtagttttgaactaaagtgttatgttgagacaacacaacacctaggtgctcttggataaggtttactcacacaaaattgtcagaaaacttaacagagccctagtgtgagctagttgtcaatctggccactggtaacttgaagaagtcaacataggtacccctaggtgtttcaacatccagatggattcatttaattttagaaagctattgtttcctcttatttgatgaaaatgaaggaaattcttaagaaacatcttcagaaaacatgttttaagcatccaaggtcagcctaggcactgggtctaagttaaacatgcctggattctctccttttcgcccataatttcttggcgaaatattcatggaaatcagttttttctaaggcagtataatttgcttagatttttcact

SEQ ID NO: 180895 - DNA, 1206 bp, Cannabis indica
ctcctgagaaggtattttatttccaatgatatatgtgatgtgtgtaaagcttaacttaattattctcagttattaacatcattagttagtctgtgttatgatttaatgataattcttgtttgggtatttaggtaacttgatttcacgttaatttttagtttgagatattccaaaatgtacttgttatctgctgtaatatggatgattatgaactctaagaatacaaaatgtgcaattgcattttacgttgattgatgaacaattttagttgaattcaggtcttttaatatgtgttcatctcatgccaaatgtgttgttgtgtcccttttccttgaaggtttttgagtattttgcttcgtgtcgtacttcggaaggagaaatacttatgaaacctgctgatcttatgcgagcagttgttcctgttttccctccatctgaatctcacctggtcagagatgggtatctgatgggggaaaagaagttctggagacatacggtgtgacccttcagaactttttatgctatttgatgtaaataatgatggtcatatttcttttaaagagtaagtttccatatcttagctttttttttttggtgttttctattttgactttaatacatacatctctacaggttacatttttttcgtaacactgcttagtctcccagaatcaagcttttcagtagcattcaaaatgtttgacatcgaacaataatgggtcagtctttactctttatttgtatttcttatatgaagatatcatataggtgttatttgaaggtagtgcatccaagaaaagattgttgtaaattagtctctccctacctacacccaccatgacagcagtaacgtagcaaataggagcagcttagagcttaattgttcttaaaaaaatattgttttgacttctgctatcgccatttgtcttctctggttctagaaatgatgagattatagctaaaccagaaccggctgaccttgctaggtttagattatggtggtatctagtacttttttgttgagtgtttatttgtatttagatgaaatgacatgatgctgttgtattgtttccatagaattcaaacgcatctaatcgtcctctgatgaatgaattattcacatggtgatagggagatagacaaggatgaattcaagaaagtgatggctttgatgcgagcacaaaaacagacaggggggctcgacca

SEQ ID NO: 180896 - DNA, 688 bp, Cannabis indica
cacaaaaagctcacatgctcgatgccaaaatctgccccaactcccatgacaagtggccttcgattgtctggttttggttagtgaaccagtacctgatcctcagctatatcgatcaatcgtaggcgcacttcaatatctactcattacacggcctgaaatctctttcagcgtcaacaaagtttgtcaattcatgcacaatcccctattgactcattggcttgctgttaaaaggatacttcggtatcttagtggaacaatatctcatggacttcacctcaagaaagctcctcttaatgaaattgtggcattttgtgatgcggattgggccacggatcctgatgatcgtcgatcaacctctggttttacaatcttttatggtcccaatctgattgcctggcagtgcaaaaagcaacataccatctctcgctctagcaccgaagctgagtatcgaagcttagctagtacagttgctgaaatcacttggattcactccttattctctgagttacacatttcacttcctcagccaccaataatatggtgtgacaatctcagcactgtccttctaacggccaatccagtacttcacgcacgcacaaaacacatagaacttgatcttacttgtgcgtgagaagatactgcagaactagtccaagtcaagcatgtcctgctcaagatcagcttgctg

SEQ ID NO: 180897 - DNA, 593 bp, Cannabis indica
ttacttccaaacacatcctaaatattaatttgtaggtgtgttacaattgagattatttatatttgacatcctaaaaactaaaaacgaggttaaataaagtgactaacccccagcaactttttcaaaaacattaacccagattcaatattgaatttagatttaaccaaaaaaccataatctgagtcttacttttttctgtttggggttgaacttgttagaagtattattaggtggaaaacttaaaaaaaaaaaagaaaaaaaaaactgaaatttaaattaatttttacaaaaatactgtcacacaaaaattttttttaaaaatattatatttttataaaataacagtaaaacacaaaacaggacaactaaagacaactaaaaataaggacagcataactaaaaactaacaatataacatcaatcaaaatataactacacagttataaaacttacaaaaaaaaaaagttcactaaattgaaattttgagtggtgtaattatctcaatgttggcgtgtgtggcccaaagcagaatcacatgggtgtttatgtaacgcgaacatgcctcttcttcaacagctgtcaccacgtgacac

SEQ ID NO: 180898 - DNA, 703 bp, Cannabis indica
ctagactattagtatttacgttgtatgagtgtagtcttatttgtgtatcgtttactggactacaaatgaacttgttaatttaccaaacgtattgttcgttcctactatattcatgtccaagttgatagcgatttgccttacttaaagttctatttccattacaaaagaaaataataaaagagaataaaaacaacctaaattgaataaaaaaaagtaattaacaatagaagaaaaaaaaaattggttaagagacattgaggaaaattagaaaagaagtattcctttgaaaaatcagccatataaagtgctaatgattaatagctacatatataataacctcacatcactatataaaaaataaatatcaactcttccacgtaacaaatccgacataaatgtacttgtcaaatgaaagatttcaaagagaaactattttcatttcatttctcaaaatccacaaactctgtttcgagcattctttccaagttataaaagaacctctaaaaatcatcataaatcagtacatctctccttatactccataataccaaaaagctttcaacccaacaacacatccttcttagtcatcatcttctggatcaaagtccttgatcttcacatctgcgtcttctccaaattgtatgcatgtgtcaatttgagccaacacatactttatactgtaaacaaaaataaacttgtgtta

SEQ ID NO: 180899 - DNA, 632 bp, Cannabis indica
tttgtactttattacttaaataaataaaaagtcttactagttacataaggtaaagtagtaaattttagtaacaataaactaaaacgaaataactaatttttttaaaaaaaaagtaaaaaacgtaaaaacgaaaatacgtattccaagtatgttaatttttatttttttgtttgcagtaaatcgtttaattttttttttgtttttttgacaatgaaccagaaatcgtaaattaagcacgggtattattattattatattttaatttaaatgttaaaatatatttatgtatacaaaagtacaatcttcaattattatttatttttgaaataaaaattagaagaattactccatataccattttttttaatttacgatttgagtttctaaagtggttgcaatactagttgcagtaaggggttctgtacgattttttgttgcaatttaggttgcagcgctagttgcaatatgagtttctatgcctaattaccgtaaaaatgcacaaaaaaaaaaaaaaactagttttgaagtgtaaaaatgaaaaaacccccaaaaagtattcatatattaaattaaaattagaccttgccatcattaatattttttagtatgtacatctaacatactataataat

SEQ ID NO: 180900 - DNA, 637 bp, Cannabis indica
aagtccccttgttactaataatgagacaagacaacaagaaaagaaaagaaacgaccccatgatgttattttaacaattaattcccacccaacaaggtatcaaccaaaacaaaattactttacttaaatggaaaaaaagaaaaaaaacatctgttacttcaatcttaagtttctcttctatttttttttacgacaaaatgtggcagtagtagtagtaaatgatattaataatcatgtgtgctgtaaataactagtcctcctcgtatcgtatgatttgaaattcagagttgagaagcaaactgtccaagaactaagaagacaagacagctggagtggcgggagataaaccctaagacagtaaataactataatgtatatatactgtcattattatattaatattaatatccattgccaactctttattattattataatagtattaataaaaacctttgccttttctctttctctctctagacgtgtgagtgtgagtgtgtgcacctcgatggttacgctcaagcctgagttaaatggctcacattttctctatttcttcttttcggttttttatggctttccatttgtctctgcaaattacccacttctatcccttgtaagctctctctctctctctc

SEQ ID NO: 180901 - DNA, 725 bp, Cannabis indica
gggtatatttggttcatttgattcgtgctcgagccggatgatgaaaaattatcatgtccggttctttcgggggatggatcgagaataattcacctatcctaataacaaaaaaacctgacttgaacgatcctgtattaagagctaaattggctaaagggatgggtcataattattatggagaacctgcatggcccaatgatcttttatatatttttccggtagtaattttaggtactattgcatgtaacgtaggtttagcggttctagaaccatcaatgattggcgaacctgcggatccatttgcaactcctttggagatattgcctgaatggtatttttttcccgtatttcaaatacttcgtacagtaccaaataaattattgggtgttcttttaatggtttcagtacctgcgggattattaacagtaccctttttggagaatgttaataaattccaaaacccatttcgtcgtccagtagcgacaaccgtctttttgattggtacggcagtagccctttggttgggtattggagcaacattacctattgataaatccctaactttaggtcttttttaaatcgattccatttttatttattttttatttattattattttttttttgaaataaaataaataaattacgacgtgtgtatctagggaatagtcgcttcaaagtgaattttccctagatacggttagtcaattctatttttgatatatt

SEQ ID NO: 180902 - DNA, 1030 bp, Cannabis indica
tatagggtctattttgtcatttaacaaaacacaggtccaatctgtaacttttgcaaaacacagggttcaaaatggtagatatttgttaaatttgtgtttgtaaatattcctacatgaaactgctataaatgcattaacgagcttttcggcttattaaaaaaaatgtttttgttttttttttaattacaaattttatcattatcgatcaaatgaattttctttttcccttttctttttaattcgaacatggtctccaattataatgggaattttaggttgtttaattaaacaatacatcaaataatttttgtcttaacattaaccaaaaataaaaataaagtaataagatattacataaacgagatgataaatagtagatatattattccttcagttttattttatcgaaatgattaatagctttacaaaataaaattgtatcgacttgggggtttgaatgtttgattcaaatgcccttaattttaacacccaggattacaaatatcgaagagtaacaaacacacgtgaaaattttaccgtggggacagttttgtcttttaacagtctttatttatttttagccgaaataatttagattcaaatattttctgtaacttgtaaataatttatagcaccaaaaaaataacaatggttactattattattacaaaatatacattgttcaacctcacaccgaagtggcatctcacaattatcaatattgacatgcaccaattatattattaatttacaattttttttgtggtatttaacactaaattagctgcacttaacatttagaaccttaaaagtgaacagttatattgatcttaatgctgaatcaaaatgagagcttaaattaaatattcgtgtattttcactccaataattatcaaaaacttggaaacgtgttttaataggacagacagacagtaacagattcacaaaaagtactctttaatttccaatacgatttttatccaaatcttagtataagcggacaccattttagagaacgtgttgtggtgca

SEQ ID NO: 180903 - DNA, 552 bp, Cannabis indica
ttagtatttagtgtaaattttacaaatagaaagtaatcctaaaatgtaaagaggaaattatatcctatgccttttttaagttagcctttctcatttttacctttgttttaaattctctcatttagaccttcttttcaatttcaatccccattataccccttccattcactatctttatttgtcctctaacctgatatttttcttaatttcatatgagagattcgcagccatctctgcctatagaaggctccatgaggtttaatgttatcatttgtaggctttgcaaccattttatcccccgaacattgatcaagctgagaagtggactattgatgttcttcgtgagttgttatggctcatggttcaaagaaaacatacatttgactcatctaaagccactaccaattattaatttgctaattcatttgttatgttaataacagagaagaagaaaaaactaaatggaagattagaagaaggagaaacaagatctaaagagaaagaataatacaaatttagaaaagggaaagagaaagttattgacctccaaat

SEQ ID NO: 180904 - DNA, 585 bp, Cannabis indica
attacaaggttttgcgtgtttgtctggccacgtaattacatagtaactgtgtaattagaggtaattgggaggtctcaattactctctccaattctcataccctcctacgagaattgaatgtaattacataccaaaaataaattaaaattattttaattaattaatatgatatttaattatttttaattgtgtattgactttcacttttcctatcaatcatcaaacacatcaatacattctcatatacaaccttaggtattctatatattccatctctcaatcaaaaacaaaaaaaaaaaagaactccaaacgaaacctatttacttgaaatacaacctacctataccactctgccaaaaaaaaaaaaaactactaattccatctcatatttttcattttggtctcctcctatacctatacaagttagtccctcatacttttttttctttttcttcatgtacacaattttatttattttctttatgtatgatgctatttattaatatttttttgtagtgtcattttatcttgtaaaagaaaaaaaacaaaatagatataaatatatgaaattagatttttttaatt

SEQ ID NO: 180905 - DNA, 792 bp, Cannabis indica
tgttaatcgccttgaacacttaagaatcattttcaaaataattatgatgtatgtattatgtgctttttgaatttgtcacatatggcaaacagaataatgacatggttgcttagtcagttgccacattagtgtcggggttggagttcggtctagacttcaggtctggtccgaggttcgggtgttgttcgaggtgtaggtctagtgacaggtctgggtaggagtcaaggttcaggtctgggtttggttctaggttcgggttagggtttgggattcgtgtccaagtttaggtctaggtcggggtcagggtctgggttccaatgttagggtcgaagtccaaaatatggagtaagaaaaaaaaatgtgaaaaaaattttgagagatttttttttcttcaaaatgttagaaatttcaattaaaaagtgaaaacagttttataaaacaagattttgaaaaaatattttctttttcaatttaaaaaaaataaaaaaaaagttataaaaaaaaatattaccaaacacaccttacgttttttaaaaatttaaattattttttttcaaataaattacaaatgtgacgttgacgtgtcaattgtctaaacagacatgttattatttgtttggcacatgtgacaaaatttgacatgactaatttacaatattgtgaatagttttaggatcatttttaacggtttgaaaaatttagagagaacaattatatataagtcatggttcagggacaaaaatactaacctccaaataaactgtagaataagaattatatattaccatgcta

SEQ ID NO: 180906 - DNA, 579 bp, Cannabis indica
gccatatcacccagatattatgaatacccattttccttcgggattcaaaaactcgcatgtctcgtcctatgacggaactacagatccgatctcgcatttgaataactttaacacgataatgcgagagagtaacgtgatgaacaatttacgctgtattttgctccccacctcgcttgtcggagcagtgagtagctggtttaacaagttcactcgtcattcaataatttcctgggagcagctgtctagggatttcaagaagcaatttcaagccgctagggataggcgacccaaagcggcctcgctaaccaatataaagcagcagcctaacgaaacacttaaggcgtacttaagccgttttagcacggctgtcgctagggttagaaacttggatgacagcacgcaacttatagcccttcaggcggggatctccactgatccattaaccgccgagggcgagttgtgggatgattttcaaggatgttcggtaagaaacatcattgagttcaatgagagggctcaagtgttgttccgaaggagaagccgaaggaatgaactgtgaaaacaagctcaagaggtaaa

SEQ ID NO: 180907 - DNA, 590 bp, Cannabis indica
gtaataactgtaaaataagcatgagacagaatatgtaagcaatccaagaaaaaaaatagataaacaaaccttagctttccctctggcagcttatcagcatcatatttagcagttctaagctcggccatgtcaccaagtgcaaccttgaaaatttcacagtccacaaccatgagaaaatggaaaagatggacaaatatgatggtcaaacaggaactaaaaacataggaaaattatgtaatatataatgtgatgtaaaatttgtttgctcccacttaaaaaacttaaatatgatagatcttatgatatattgtagtctaatcctaatatacatagaaaggcaacctcacacaaaagcagcacaccagatgatgtactgtgggaagcgtagcaataattcgcactttttagagaacatgtacagcaaagtaaaccccctttccgaacatgtaaccagttacaggtgcttcgggtggagcaatgcgcaaacctagaatgtcaaaatacatgttctaattagaaacttttcagcaggtaatcaaaatacaccaggcgtagccataccgacacaagagacagcaaaacagagtaca

SEQ ID NO: 180908 - DNA, 595 bp, Cannabis indica
atttttggagcttggggactaatctgtatcaccgtgaactttttggagacttttgccgcaaatttcccttattatttttattattttgaagaaagtgatattgtattgatatatggcgaaacccactaatacacatgcgaatcaaacacatgattaaaaactgattatggccaaagacaaacagttagccaaggccaattttgctaatgaatgagccatgttacacacaatgcagattgaaatcaaaattagccataaattaattaggaaaaaattaaagcttttgcagattgaaatcacatcttgtttattgtacattaatataaaaaattaaattaattttcacaattttttcttgtttaatttgttttatttttaatcatggtttatcttttatattttttttgttttcttttcaactatgaatgtttccatacatttccaaaaatagaaaatcttttgtaaaggacacgggatatcttggtttcgctatggtggtgatgatgaacatcttgaaaatgtcatgaacaaagaattgatttttcttagtattattaggcaaaatacagtacaatatattaataaaatgtttaaa

SEQ ID NO: 180909 - DNA, 625 bp, Cannabis indica
aagtcttcaatggcgaagattgttaagggaagcaaagattgggaccttcaagagagctcatccatgtcttccagacagttgaggacacccaaaagagacgtcttaaaacgccgccacaaacatgatgaataaatagattcagatttcataaaaaggatttcatggctttctcccaatttaaataaatagagttacacttaaaaaaaaaaaaaagataaaaatataaaaaaatatcaatgtaacaaaaatatcaataaataattcttaatactatattatattaaaattattttcgagtacatataatatttatagatgtactataatttgaaataaaattattaattctacataaataaatttataaaatatatgtatatatttttttaagatgtaattattattatagagatatatttcattaatacggaactaaaaaatatataactaattataatatatatatatttttaatttgtactaattttttaattttttttactccttgtcatattatattaaaaaaaatatatctgtaaaataaaagtaaaatataatgttaaaatattaaagaaaaataaataaaacagaaaaattataatgaaatttttaattagaaaaaaaa

SEQ ID NO: 180910 - DNA, 687 bp, Cannabis indica
ttttgtaatggactatatatcatcactatattatattgtatacatatatattacactttagtaccgcagaagccgcaaacagagagattaaactcacatgcctaaaagaaacttttaatacaatcatacaataaatataaatttatgcatatagacttcaattcacagattgctaccttgctcatgcagtataatcccataataaggaaatgacgcacacatgagtaaataatatttttaataaaaatagttaaattcacttatcacatcaatgtgtgttatagttatgtatataatttatgtgcatatatcattatagtacatatacatatatataattttatatatattttgaaaaacaaggtgcatgagcatatctggttttgatactatagttataattcaaaatttttatgtgacaatatatatacaaatataattatttaggaaattttatgtatttttttgtaaaattttaaataatttatttttttttttttttttttttattgaataagcatacatcatttggaactcctaatttatagtattataaactttttgtaagtctaaattttaaataatttaagatgctaaaaaaagatttcaaaacaatcaattttacatgtacatgtaaaacaagatttaaacaaaaagatcactggaggataaattgaaagggatgag

SEQ ID NO: 180911 - DNA, 872 bp, Cannabis indica
ccaaatataagcctcacgagcttttcccttcaaggaccgtttaacaccatgagtactgcaacggtacttacagaattcgtaaacggcaacatccttcgtcgttaaaacaacgttaatagctcttagaccattgtctttaccatccgcaaggaccaatagatgagaagtcttacgaccaataggccaatagaccgttaaaaccacaaaagacttgcttcccaatgacaagattagatgaacctcccttgtacatctccgtcgttttccaccacgacaccaccgaaggcggcgtagcacggcgagagttcaacaaatggatgtaatcaacaattacagtagttgttgcatatcgtaccggagaaactcaaatcgttggagagtcggactggcggtgagtcaattcaaagtctttttaaattatgaatctataaatgaggtgactaattttcttaattttcttctcgggaagattttgaattatgcaattattgggtacatctgttataaataataatatataagatgtgcaaatcttttcatttcatttaatactatgaattgtaattactatctcttttcttaattttctctctatcttgtttctcaaaattagattattttatgctactaaaagaaaaagaaaaaactatattattttataatataaatcaaaaaatttctaaccatttagtttttaaataatagataagatagacgacactacacaactaactccaatcaattatttttttatttaagaaaaagacggaatatgcataagacttacctcatcccaactaaaacaaacaaaattgttcacaaaaccaaaattaattacttctcttgtttgtctctttgttctattgttcaat

SEQ ID NO: 180912 - DNA, 849 bp, Cannabis indica
gaagacagttagttagttaacatagttaatgcgtcccagtataattgtcaatatagacgtaaattgaaaattcgactgcaattgtgtgtgaaagtgacattaattttgtaggcacttgaagtgtgcttgtaaaactcaaagtatttttccagacatgttgaacgcgtctgcaatagaaataatacagagaagtttgtcaaatctccatggcacaaaataaccctaacattgtagttgtcgctgttgtcgttgcgtctccaccgccgtcgtcactgcttcttcaccgtcattgttgctgcatccaattatcctctagtacaatcttttcttctccgtcgccattgttgtttactcctaatttgttgattgccattaaattttggattggagcttctagaaaggtttctaattcaatccttatcttatctgagtttattttcagtatttgaacattcgattttttcattttgtagaatattacacttcctcataagatttttacttgagagaatttggagaaaatggctacgaatctatcagaaatgcatgaacctagtattgatacctctcataagctcagctacgatggtcagaagctatggattatgttggaggtataagaaaatgttgtgctttattatgagcttttatgtttatatggtaaattttccaggtgagttatctatgtttctaagattttcttttgtctgtggatcctaaagactcacaagatcaattttttggttaagctttccaatgtcttaatttcactttcacaagcctaaagcttgagctttattccaatttatgtataaatttcttgcctgaatgattgaaccaactcagtga

SEQ ID NO: 180913 - DNA, 694 bp, Cannabis indica
gtttaatttctgtaaaaagaacaacatcttgagatcattttttatttattttagtgttttatttttttttttttaaaaaaaagaaacacacatttaaagtttttttatagcattcctcatgatttttttttccatatttgtaagctagttttttgaaaaaatgtacatatttagtgtaattaagttttatgtccatatatatatatatataaaagttatctttattttttcatttttgtatataaccctaataataataagggaagttactattattatatttcgtttttttttttttggaatgacattgaatttaaaatttgattgcatagtgattttataaatacatcctaaacacatgtcatttatttacaaaaatactatgtttgttttgtaatgagggaagttaggagacatagtttgaactttggagctatagatttaataaggttcataaaactttaattcaaaattatcactaataataattgatttgattttttattttgtggtgttgcattacataatacatatacgtgcatttgatgaaatgatgaatattatatactcttaaaataaattgcaataagcttcaacaattttactataaatgatgattaattagatgtgagtttttataaaaagaaagaattaaattgttgacattaaaaagaattaaattgttgacattaaa

SEQ ID NO: 180914 - DNA, 648 bp, Cannabis indica
tgttactctgtactctgctcaatctccgattaatgccagagcaactctgctcgattcaggaaactttgttctacgagaatcgagtaatcatctatggcaaagctttgattatcctactgatacccttttgcctaaaatgaagctcggatttgaccggagaactgggctcaatcggactctgacttcttggaggactgatgattttcctgctttgggttcattcactcttgctatagactcagaccaaatgatcgtgtggtggagaggaaacaactattgggaaagtgggccatggggagatgggtgttttgattcgctaaaagacgagttctgtaaccatttcaagtacaaatttagctatacttcaaatgaggaagagacttacatgaattactcagttagtaaggaaatcaccattttcccaagacttagtttgagcccagatggtgaaatcaagggatatgggatgaatctcatgtttacacaagtttcatgcttgagttcttcatcttcttcttctttgagatttggttgcgtggagcagaagctaccttcctgcagaagcagtagaattgataataataagtttgtatccaaagtaggagtccatgtctcgaactgggttcaagttcaatgaacaaaagataa

SEQ ID NO: 180915 - DNA, 584 bp, Cannabis indica
tagggtacataaaagtaaatgtagaacttggtatatgttaatttatctccttcttaatttttaataacattttactttgcataactttttcacttttatttttataaaaaatattaaggaaaaaaactattttcacttttgattcggattttctttttattttattttttttacttttacttattaattttacttgaaaaattctaatgtcccttcatactattatttattattcttctaacactgaaaaaaatacttgttttctttttctttaaattaacaattaagcctaaatatacattaaaaataataaaataaaaactaaaaaaaatatatttatcaattgtactaaaaactaaaaaatatttattgtcaaatccatggaaattgcgtgagatcgaaaaaaattcttttttaatttaagttattaaaattctaacctaattcaaaaaataatgctatttttggtaacaaaataaaataaagtatttaatagtaaatatgacaattgacaagtaacatatatttttaatggtattcggagaaattattataaaaatatttataattatatcgattctcat

SEQ ID NO: 180916 - DNA, 610 bp, Cannabis indica
gtttcaggagtaattactcataacggtaatgaccgtttttcttactcgatcataatcgagtcacaacgataataatcgtttcatatcatttccctcaatcataatcgagtcacaacgataataatcatttcatattattcacctcgatcgttatcgagtcacaacaatgataatcgtttcctattatttccctggatcataatccactcacaacgatgataatcgtttcctattatttctctcgatcataatcgagtcacaacgatgataatcgtttcctattatctccctcgatcataatcgtggcactatcgaccataactgattcgtatttattcacttagctgctcgatcataatcgagtcataacaatacatattattaatctcgatcttaatcgtggcactatcgaccataactgattcgtatttatttcacttagtctggcgtcaaactttactttaccttccagtccacgatattaagtacatgcatgccagccgtaacgtgaaaaagtaaaaacgacgtttcgaaggaatcccgggttccgttacttgtctacgacaacaactaattctaataactaaccgtaaacctaaaaactaaccgt

SEQ ID NO: 180917 - DNA, 738 bp, Cannabis indica
tgagattgtgtctgatgatgaagaagaagagagtgacaatgaagtactttacaaaagactgtttctctttgattgattgattttgtttggtaaaaactctgttattcattttcagctcaagattttgtttctattatcttcttatctgttttggttttgtcatttttgctagcaaagttctcattctgtttattcatatatgtatgtagtaatattgcttagtaatatattacatagataccatgtgtgtatagattttaggttaaatactcagtcttttataaaagttacagattcaattttttattttgttaaatgataattctgattctttgtttttcagaatggtataaaaatgatcctaaacttgattttatcaattttttttttaatataaccaacttgaaaatagtttctagcacgaataaatgcaaagagtgtaacaattcttgtaataacacttctaaggtaggttattattaattatttaatttgatgaaaattgagttttgcatctattttatactattttgaaaaatacaaagtttaattgataatttgttggagattatatcgaataatgacgatgtcaaaaaggaaatgaaagcatggaagcttgtgaaaaacataataagctttcaatattctgcaacttttggtacatagttttcatataaaacattttgtgtatgtgatttcttatttttgactcatgtctcaaatgtttgactgttgtat

SEQ ID NO: 180918 - DNA, 674 bp, Cannabis indica
aaatgttagctaccaaagataattgtagctaaaaatataaatttgctactaaaatatttggtaggaaactcatatagtatttttttattagaacttgctacaaaatcattttgctacgaaaatttagtaactaatattaattaactgctaccaactacatttggtagctaaacttttgttgctaaaaagttggtttcttgtagtgcttctcactccaggatcacgctaattttgtgtgttgttctcctggaacaagtggtctgcataaatcgcgagttggaaggcctccgggacccattagctcttttccggcaagatgttgggtggtctcttcaggatgagtatccacattttctctgttttcagccatggaaaaagttttttttaattaggagggtttttctgagtttttttttacgtaaggctctcaatgaaagcaccaaactgttaacgcaaattttcgttaactaaatttaagcctatttcgtgatggatttgcacagaattaatagtagtaaaaggaaaagaaataacacacgcttttttacgtggttatgcagttaaaattctgcatagtccacgagtctatcttattagatttttgatacaaaactagggatttttccctaaaggattttccatcccttttacagtgtatgctgctcctatttata

SEQ ID NO: 180919 - DNA, 557 bp, Cannabis indica
atcttattcggcggttacactgccacatttcaatggccctacagaaaatctaaaaggtcttaatagaaaaaaaaaaaaaaaaatccaatatagattttaatatctactaattttggcttttcttttattttctctttgttgtgttattagtttttctttttttcttaaaaaggagattgactatttgactttgagtttttgtagttgtacacctaatttctttcttccataaattgtcctcaatttctttaggcgcagattcctaaaaaaaatgtataaattttgtcaatttgatccttaaacatttttttttaattttcttttttggcaaattatagtattttctgtaagaaattttacttggtagattttaattgagaaggttgaaactaagtttttaacaaaaaaattagattaccaaaaacaaaaataaataaacttaaagatggaactcacataaacataaaccttctactaaaaccataccaaatataaatttggttttacattcctatttccactctccaaatatacccatatattttagggatagccct

SEQ ID NO: 180920 - DNA, 610 bp, Cannabis indica
taatatggagattagggatgaaggtcctatggtggtctgatgtaggtccaatgctttgctgttatgaaatgagcaaaggttgaagacgtagttcgatgaggcccaatgtagatccgatagtggcccaatgctacctatttttcttatttttttcatgttattatacataaaaatgggtatcatcggaactatgtcttcaacctttactaatttcaacaacagataagcatcataccaccatcggaccatgtcctacatttataggtagcatcggaccaccatcggtcttcaactttgctcatttcaataacagaaaggcattgggcctgcatcagactacatcagactttcatccctaacctccagattacactactatcgtacccactatcggaccactatcataccttaccatatacaaaaaaaatcacaaaaaacctaaattttacccaaactcgatttttaaccaaacaataaacaaaaaagcaaagaaaccacagggggaatggaaaatttaggtggcgtttagttggaggtaatgaaatggaatggaaaggaaacaattttcattctattcctttgtttggttgcattttaaagtattggaatg

SEQ ID NO: 180921 - DNA, 551 bp, Cannabis indica
atttaaagaatgacaagttggtgcctccttatcttagtattttatattctaaaatatgtaactggatctatgaaaataggacaaaaatagggatgtaattgtggcatttcccgatgttgatccatcattattatcgattccacaagaaaaatattcccactatgaaaaccaagtgtccagaagatcaatgctaaaaccaattactgaatcatttgaccaacctcatctttggtattctacttctgaagtaatacgtgctttagaactttttcttaaaagtggagatgaattatctggaagtaacacctacaggtaacgtgcttctagtctctctctctctctattttctttttttttaactaggcaatagctcttgtgtctgtctcttgatcttgtaacttttgtgttatttcactgagctcaggtacgtatcttgttgatctgactagacaagtctttagacaaaatatgcaaaccagcttgttttagaaagcaatagaagcatatcaatcaaatatgttacaaggagtgactcactatacgccactaag

SEQ ID NO: 180922 - DNA, 513 bp, Cannabis indica
cacaaatgacacttctttataaaatgtcagacactctagtactctttagcattttattataaaaataggtaatcgtcttacttaaattttatttttgtacttttttcttacttggttaattcttcctattattattatgagcattgcttttagatatcagtggtgtttagcacattcttgacatgtcgcgttgcgattggctaacgatattcccttaaagctattatattaaattatatggacccgatacttagttggaccaatagccatattgacacataagagagtggtaggcaccattgatgcccttcaccgtttctctattattatttattaattttttttttttttttttgaggaaaccaattctcccctgattgtttttgagtttgtactctgttattggctattgccgttgaatgaaaaatttcatttcccttaagaaaagattaaaaaaaaaaagtattttgaatgagagaagttattggaggtgctttaataaatgtatatgtt

SEQ ID NO: 180923 - DNA, 981 bp, Cannabis indica
gtttgaaaatattgaatcatttataaagaaatgtctttaattaagtaggctcttagttggattaaggatcagtcttggccaaaggtggagtttgaatctaactgcctggtagtcattgaggattgtcgcaagatactttgttctctaaacaatgtttctttgttttttcattaaatgatatggtgataattggtttgctatagcgtcatgttcttttctagattgagttttcaataagagtgatgttcctattgagttacagtcattgactgatttagcaaattaataaaaattccaatttgcattcaaaaatttataaagaacatgggtcactttcactaatcaatctccatatcacgagccttaactctagcgagcattatttaatccaaatagtaacccaaaaaaagaaaaaatacattataaagaacatggatgacttcactaattactaattagcttttagatggaaccccacgacacctgctatatgaagttggatgctattgattctgattgctaaggtcctttatttcttcaaaaatctttttcttacttttatttctcttattagggtcattacagctctagactaaaactattactgtaatatataccatgttaagtgtaagcaaaaatatcccatcattgcacgtttatttcttttagtaaaagttgattcatttactgctgttttctctttttcaagtgtaatgttgttgagtattactgacctattgtcttcaactttcacttgtagaaagccataagtgttactccacaaatggcacatcagctgatacaggtaaaattcccacattcatttaacccaccaagatttaattatttatttgttcaatattttcccttcaaacttgactctggtctggtggttcactctaatcctacactgatgaacttttgaattttgagatcagaaaatattgaatttgtggtggcgtccatatgaggctgatgcac

SEQ ID NO: 180924 - DNA, 662 bp, Cannabis indica
tatatcactctgcgtgtcatgtttattttttagaattctaagcattgatttatatttatatacattaatgtttataattttgatattgtattttattgaaaaaaaaacttattaaattataataattcatactaaaatagataataaatatttattctttaataaacattaaattataatatcaatattatatggtagtttgtgtaataataaaaaaataattgtttatattatttagtgatgtaataaaaaataattgtttgcaacgcgtggaccgttagccaggtgagatggtgctttatcatgaaccctcagagggtcacatgcttgtcaactctactccccaggttggcagcgtgcggtgctttagacttcagccacttgaagctcctaaccatcttgtaggaatgggaccacgtccctacaagggtggtcggagtgagcaccatccatatgactagggagtacggcccacgctagatgcaacccaactactttgccccacttggttacaggcccacgtgactggacccggcgataggattgtataaagtaatcaatataaacatattaaaaaagttatgtttcgtccatgtgggagggatgggatttcttcttccttaaaccaaatcaaaacttgttcttctcagttagtgtaaaaa

SEQ ID NO: 180925 - DNA, 528 bp, Cannabis indica
gaaggtacagggatggcatgagacaacattctccaaacaaaaagtttaacctttggggggtaacagaggaccaaatttttgtccaaaactttttagaaccaaagaaagaggaggaagaggggagatcttgatgagagaaagccatatgataatttgatttaacaataacaatccaaaacttaccttttcccaaatcaaatcatcatgaccataacatcctgaaacagggacctcaagaatatcattaatcattgcattatcaaaacaagattgcaatttcccaacatcccaagttcccgaatccatgacaaagtaggacaataaacaagaagaaggaggaggatcattattgataaaaaacttgtgtctatgattagaaagtcaatgatcatccaaagttctaatactgccctcattacccactttccaaataagccccgaagccatcaagtcctttccccataaaactgcctctccaagaataagagggattatgaccagggatagcctcaagaatagaagattgtg

SEQ ID NO: 180926 - DNA, 695 bp, Cannabis indica
tctttttttcgcggatgacaaccttctttttaatgctgcttctcttgcgtgatcttcactacaaaaatttactgatgactatagccttgtgtccgaacaacgggtcaattttgctaaatcctccttttatttctctcccaacatggatgagcatactaaaagatccatcaccattattcttaatattcctatccttgaggctatagaaaagtacgttggtctgcctcagtcctttaggcgctccaagaaagatgctttcaatcacctttctgaccgggtttgggctcatttaaacaaatggaatgcgactttcttttggaaaggcaggaaagagatcttactgaaaatctatggttcatgctattctgtcctatgccatggcttgtttcaaacttccttgtcgtttccacaaaaaccttgaatctcttatggctaactttttgtggaaaggcaccactcaaactgggaaaactcattgggtggcttggcgaactctatgccactccaaatttcacggtcaccttggctttcggtctataaaagcctttaatcaagctatgttggccaagcaggcctggctcatcattcaatccccttaatatttggtggcttctttgcttaaagctcgttatttcccccatgccaccttccttaatgttggtaagggtcgacgacctttgctagtttggaatagt

SEQ ID NO: 180927 - DNA, 771 bp, Cannabis indica
atggatagttaaaaagaatgtcaagggggtcttatcattaacaataattaattaaaaaacttgttttttttttaaaaatatgtttttttatgttgacaccaacactaattaaattttagcatcaatctaatttctcttccaccttatttcattagggttcacttataataagccctcatgtggcatttttgatggttaatgctctaagaatatctctaatagaatactaaaataagtgttatattttaatacttctaaaaaaaattagttattcaatggtgtgttaaatttaacaaaagctaaaaattgtgtcaatagcacacaacaaatacaattttttttaattacaaatttattattgatcattaataataaattttaatatacattttttaattgtaatattactcttagttatttttaaaataattaatttatttgtaatttttttgagagaatttattagtaattattaataatattttactttttgtcacccaacataaaatactatttgctccaaggcatggtagcaaatatacaatttatttatttttctaaatttagcacaatatttacttcttatattttgaaatgttctaaactaatatattatacattatatgaacatttctaatgaagtgttataaatgtagtatatatgcattttttaacctatgctcattaaattgaacttcaatggtagtgtataatgtggcctaaatttgacatatgctaaaaattgtgctaaatttcgcacaaaatatagca

SEQ ID NO: 180928 - DNA, 560 bp, Cannabis indica
gcagaatgctgcttgcttgtacctagacatagcttatcagttggaaagtaacaaatggtatcacggaagataataacattaatgagcaaacaaagagttcttacatttgaagagagacgtagatttcagccaagtctctccaggcatcatgatcggccataaatctgtaggacaagaaaaggtgactgagttaacatgttttccctgtcataagcaaacttctcaacaacagaaaaaaaaaaaaaaaacctatagtttcttacgtttcaaggtatttatttagacaatcaattgcccccgaaaccatcgccttgtgcctttgccatggctaccctcctcttgaggattccctacgtagaaaaaatagtaaaagttaagataccatccaatatcattctaaagttctttcataaaacaatgaaaaagagaatccagtattacaaattgatttcatcaattcaaactagcaaaggcacaaaattaacttgatcagaggattatcttctaaaggacttgagtaagcttttcttgcttctgcccaggagccttttgtcttcaag

SEQ ID NO: 180929 - DNA, 709 bp, Cannabis indica
aaaggatcttctttgcatgtatacattttccatgttggtattttgaacttgggcattaggtcatgagaattgatctccagtgagaatggtgatcctctagtctgatcaagctcgagatttgtgagttttgggtcagtcaggccttgtatgaggctcttaagatgatctatttatgttgtactaatggatcaacttgacctgcttgtggatcgacatgtgcctcattaggatgtctttgaacttaaacagggacatagttgtatgcattattcggctagacggtaggggaacattttatttgtacaattctcttctacgattcagaatatttatgaggtcgtgcacggtagccagtcggtcaaatacagatgtgctgatgggcccctaagtctgaccattttgtgcaaggggttggtctgatatctctgtctgagtgagggtatcaagctaaccattccttcctaagggacggtttggtgaaatctacccgtctaccacttaacccacaatttgaacctttagccttggattggacagtccaccgatgtgagtttgtggggtgtgatcagctaaatacttttctaatccattttgtgaccccgtaggaatgttagcagtagtcactagccgctggtcggtgatctgataagctcttcagattagtgcggtggcttgcctggaacagttgtcaatggctgcatgctaggct

SEQ ID NO: 180930 - DNA, 593 bp, Cannabis indica
aaaaaataataaaaaaaagagtaaaaatagaattaagtggccagccccttatatgggtccatcagtagttcgattttgtaattttctcaatcatttatctattttttacaaatacgattttctgtactttcaatcctataaatgccaaaactaaatattaaataattaaattaattatcaaataaaatcgtcattcatattatttattaattagactctataaagtttcttaattaacaaataaaccctaaaattctatttcttcacaatcaagccatatcttagtgaaaattcataaactagacaaaatctaactttagaattataattgattaattaaaatcaattaattgggtcttacaagcagtttgtctcaactagtatgaggaccatgagcttatataactgaacttccaataagcagatctagaatttaccaagtaaattctctaacttattaattcctctttgcaccactatagatttagaattacactctcaattatatagaacgctctatatgttccacgatatagatacactatgagattatccatttgttattatcccaaatgatcctctatagatgattt

SEQ ID NO: 180931 - DNA, 570 bp, Cannabis indica
ggggaagccggggagaggtggcttttgctgcagcgactgtgatgcagcaggagctgactccaattgtggcggaactgctggccattcaagggggactacaggcaggtattcaaaggggcttgaggcggtttacacttgaaacagattgtcttggagcggttcaattgattaaagacacgaaagaaggatgtcgggacattgacgggctgttattttaaattaaagaactgcttttgcacccctctgttatgggtttgtcttttatttttagagaggccaattatgtggctcacattttagccaatcaagctttgttatccaaagttagcgctatgtggattggggtttctcccccttgtgttcgtcatgctcttcgagctgaggagccatttcctttgtaatcgtttggatttataaatgaattccttcttcaaaaaaaaaaaggccttttataataatttaaaaataaactgaaagactatataatccctcaattattttttagggattacagacttcctaaatatactgtagactattagattatagaggagtgctaagcaaactctc

SEQ ID NO: 180932 - DNA, 647 bp, Cannabis indica
tgactaaatgtgtttttagttgtaactaaacttttaactaatgtgattaaaatattgttatcaaagataatttttatttgtagtgatagtttcagaattaagttgtaatagatcacactaaaaaatcattatttttagtcactttaaaatgttgactaaatgtaaaaaaatattgtgagtaaacttatgttattattacttaaaaaaaaagaaaaaaattatattgttaattaattaaaaaatttgtagctaaaagtataactcacaaaaattataatttattttttgactaagatcaaaatagtgatgatgatatttaagtactaattttttagtctataaaaaaattaaattgggattgaatgattgtcactaaaaagtaactattttgtagtgtgtcatattgagtttgaagtttagtatagtttgattttattataaaccttctaattaatatttaaacatgtatattaattatcagtttttctgttttttttcaatgatcatcttaattcggtcaatataatttcacatttatgcttaatttatatacttatttatgagatagagatatattaatttgatcaaaatttgaattcttgcagtttgttaaaaattcaatgccagaaaatttttgtgttgggcac

SEQ ID NO: 180933 - DNA, 601 bp, Cannabis indica
ggatcgtttgggcctttgaagcttacctttatctttcctatccctagttttcctatttgagcttagcccgttcaatcattttcactcactttatgagactaactttgaattccacttaaaattttctatccttgtcccttgaattataccataagcttagaaataagttcgagggtgatgaattgtgtgtggatgaaattattattcaaagtgggtgattgattgtaaaaatatttttcaacctcactaatgttatttacgttctcaaaaaatgatgattaaaagaaatagaagaaaaaaagaaaaagaaaaaaagtagatgaataaataaattagatgttgcaactaagagttgtaaaattactcaatcattgaaatttttagggtcgacaattcgagatatgtaatatattgtgggtggttgatggtttatagtgtgcttatagtataatatagcctaaattaacttttctatctacctattacctaacgccaatacattgcaaaccttaaaacgtcctttttattttcgtaacaagaattgttgtacattagtagattgaggtaagtaatgcaagcatattgatcattggagttgtgg

SEQ ID NO: 180934 - DNA, 550 bp, Cannabis indica
tacaaactaatcaaatgataattacaacaaaacaacgcctaagataagggccatagacgataagacatgaatgaatagaccagaattaggccgttggccatttagagccgttgccgatgatgaagttcctctagttccagttccaaatcctcttccaccgccgccactaacaccaccgcttggaaatccactacctctcccgccggttccaaatcctgtacgaccattactgccagtactgccaccagctctaccgccgccacttgtacctctactaccgccacttgcgccacctcctttactgccggtgccagtgccaccaccacctttaccaccaccgctactgccaccaccacctctaccgccacttgagccaccgctactgccaccaccacctctactgccaccgcttgaaccaccagtactgccaccgccgccgccgcccccacgccttactgtacgccttaacgcttactgataatcatgatcatggttgggtagtttaacgtaatgatatattttgttgttacgttgatgatgatcatgctca

SEQ ID NO: 180935 - DNA, 517 bp, Cannabis indica
agcttggtttcagtggaggcataaaataggaatttcattagcattgaattttgatttttaaaaaatttcaactaaataatgtgtatttttcttcatacacatattttaagcaataaaacaagaatatgataatgggtcggaaagaatgctcataattagggaaacttacaaaaatactgtttttttccctaagttttacaataatactgccacacggcaataatttcttttttactgtccaagccccttttttttttctttcatactgtccagacctaaaatatttacttttatactgttaacagtaataaagcacaaacggcacctccttcgtggttggggacggacaaatcaacaccagaatcatagaaacaccaggaaaaaaaccataaaatctggcaaagagaaaaaaatactaaatcaacaacaatcctataaaaaaaacataagaaaacactactaaaacaacacaagaaaactacagaatatataaaaaaaaaaaaaaacaaagcataag

SEQ ID NO: 180936 - DNA, 794 bp, Cannabis indica
tcaattcttgtgtttgtgcagttgtgtaaaaagctttcaaatgatttgggtgttccctcaaaccaggagatcttgaccacaggagtctaaaggtcatttgattagaagaagaaagtatataaatataaccatatgatataaaagtaaatctcatgtatatgtttttttctttattctaaaatcgtaaaacaaaatatgtatgtgagacttacattattaagaggaattatttcatttttttttccctttctttttggaaatgtggaattagttcattctggtcgcattctacagctaatatgtcttacaccaatgtaaagaaattaaagttatatataaatacacaatgagataacatatacaaaataaaatactctaaaatgagatagtagtagacaaagatattagttggaagaactcatttagatataatctcctcaataagaatcgatgatgaaatttgaatggataaataaggtgtaagttttattttagaacttgtgttttactaaagtaatatattaaattttgtataatctaaaatggtacaaacaagatcttaaattgaattaaattggttacattttttctaggaataattacatctttatgttcatagatgatttttttatatttttacggttttctaaaaaataacacgaaaacaatataaaatcaacaagaaaactacatgaatataatataaaataataacaaaaaataacgtaacagataacaaaaaatcaacagcaaattacaagattacaacataagaagaccgtattttgtaaaat

SEQ ID NO: 180937 - DNA, 717 bp, Cannabis indica
cttaaatgacacacaattacataaaaaaaatgcttaaagtgatatcaaataactctttactcaagagttatcagtgatcctctctctccctatctctttcttattttctctgaaggtctttctcgcttattgcaatatgaggaaaagattggtcgcgcatatcaccaacaatttctcaccttcttttttgcggatgatagcttgttgttttgtgaagccactaaaagatcttgtggagaaatcaaacgtgctctagacatctatcattgtgcgtcgagacaactgttgaatatagacaagtcagtcatgtcctttttacctaacacatctatggcagtcaagaactcttttcaacaaaatttgggtatgcccatttgcgagtgtcataaatcttatttgggcctttctgcacattcagagcgagacaaaaaacaattattgagcaatatcaaggaaagaatctggaagcttacgcactcttggaataataaactttttttaattggtggaaaagaggttcttctaaaagtggttgttcaattgagtccaacttatgcaatgagatgttttcgattatcttcaaaatttcgcaaccagtaagagtttatggtggcaaaatttggtggggatcaaaatatgacaaaatgaaaatccatttgaaaaaatagaaattttaaagttcaacaaagaatggaaggtggtatgggattactgctc

SEQ ID NO: 180938 - DNA, 663 bp, Cannabis indica
catcagtgctaatgcagtatccacatcagccaagagccctcttccacagcatgccatatatcttttttgagacgcactagagacaattttgcgacctaacatctgctttgcccttgggtcggtctagaacctccataattatatagggacgacttccggtacttgacaataaatattccggcacagaacactatcgtagatgacaataatctaaaaaatcctattaaagtatatatctttaaactgagtcgaatatgtctattccatgttagacttgcttttccattccaaatcaaagatcacgagtacacatgcatgatgttttcaacaagctaaagtagcacgaccatcatcgccagctatgcagaaaggaaaaaaaaaggttcagcaatgattgaaagccccgaccattcacgtaccatgaaaaatacaaagtaaaaaactctaaaagttcttgttcagttaaaaagttatgatgacaactaacaactaataataaaccaacataccatggaatcatcaaaatattcatagtcatcaacataagaaaacaatatatctgattagaaggttaaagcaatgacaacagaacttttgttagtaatacatataataaaataaaaagcttaacccaattaaaactattacattcccatctttgga

SEQ ID NO: 180939 - DNA, 509 bp, Cannabis indica
gaaaggcttgtcctcatcaattgttccaatctcacccaacccaacactgtaactccttcccatcattccataacccgtgttcatcatcatcaccggtacatgtctcaccataattctttgcgttggcagattaatgtgatcaaactctacattaatatcattattaatggctgatttttttacctcaatattagatgatgacgacattatttttctcaaatgctgatctctcatatttttgttgtcgtttttggttgacgaataaggaacagcagtagtagtacataattctacagcaacagcaacagactcagtacaaccattcatgatcttcatgactctgtttaaaaccctaatgggtgtcatcatataacgcttcaccttgctttccttcctcattctgcagcttcctctgctcatcatcatcacctatatatactccctcttgttcaaaatgtatatagtgatgatatatacatatgttacatgtatacatatatatagttggg

SEQ ID NO: 180940 - DNA, 673 bp, Cannabis indica
taagtaagcataatttaacacaagagacagccatgttcccaacaagatatgctaggaaaaaaaacaattagttttggttttgtgttgccacggtttttctccgcaataagtgaggctctctaataaatttgggaggagaaagtctaagacatatgacatctgtttctctttcaacaaaaacaaaaaaaaaagacatgacaataagcctagttagtagaggtatttcatgaaaactctttgcgatgaaatattgtaatagaccccggaatcagtagaatatatgtaaaagggtatacatggatcattgcggtgagaggtattaaatagtatatatagagctttgctctaaggagagtcaaggcctatcacataccccgttgttctagtgtgctctattcgcattgatcattcaataacaattctaaaatctacctagttctgtatttccattgtcttcttccttcagtttccttcttttttgcctattatcattgcttttggtttgagtatccttacttggggtctatcatattgattatatctaaagatcatgcaaaagaactttcatgtcgaagtatgctacatccacaagataggttgagttatttgattccaatagcatgttattcatgtttaaattgagaatgaaaagaagaatatgataaccttaaaa

SEQ ID NO: 180941 - DNA, 685 bp, Cannabis indica
aaatatatgtaaaaaaattgttttgaagtttaaaaataaaaaagcccctaataattaatacaatatattgctttattcaaacataatgtcatttattatttaatacaatacagccttggcctaccaaacaagctctaaatctgatattgtaatgtacaattagggttttttttgggggggataagttttctatagatttacgtttctatctatgtgttgtttacaacaatttgtaatatttagtattttcatctactgtacattattatatatcttaggggtctttcttttttctagatataacaatgtataatattatatagagagagatttatctctctctttttttctcctttttctttttttattttcttttgaaagggactttctttcttcttttaaatttcttaattttactataaatttctcaattatcaatattttcttttaacctttgacaatgacatggttttggaatcataggatatatttttttaattgatttatcaattgtcatttcctaaaatatctattttatgtgaaggactataacttatattttgttttaaaaaagttatataaaaaatatttaaatttgaaattttgatatataatttttttattcattagatgtcatttaacaaaataaaatttgtagctattacataaacgtgacattgaagca

SEQ ID NO: 180942 - DNA, 713 bp, Cannabis indica
  modified_base (709)..(709): a, c, t, g, unknown or other
aaaaaagccacgtgttgagagtttattgatacacatatataattgtaattaaaaattatagaacatataattatttaaaataaaaaattattttaaatttaaaataataataaaaaatctgatttacgaaataaaataaaaacaaaaaaaatctcaatcgttctctccctcccctgctcgtctcttctccttctttcttccttcttcttattctacccaaatttttgaaaaatcaacacgagaacaacaatcaactaagtgcttattatgctaaaaaataaatccatctaattagccctctatttcatcttcttttcccaaccaaacaaaagccatatctattaaaaaaaaattagtaaattcattacaaaaaaaaaaaaatagatctgtttctttcaaaaaaaagaaacaacccatcagccatgttcatcggatgtgaaggagagaactttgccagagagagaggaaacaaccagatctaggctctgaggcgccatgaacgtcaagatctaggagagagaagcggatcgaagctcgagatccaggctttaggaggtttcaaagtacgagggagtcgttcatcggcttgggtgttcgacgctctcttgaccagatctgagggaggttgacatcggagtagggtcatttcaagtgaacaaatatactagatctgaggaggagggggagaagtgattgaagaaaaaaaatntttt

SEQ ID NO: 180943 - DNA, 622 bp, Cannabis indica
agtttagggttttttactttaaatttttacttttactacttacaaaacgtagttttttttttttttttttttgattttacggaattccacatagaaacccctgtagcacctaacgaagcaacctaaatcgcaaccaaaatccatatagcaacctacatagaaaccaccgaagaaactaccgaagcaacccaaaccgtaattttttttttaaaaaaagttaaaaaatagtatgtgggggtaattccccttttctatattattaagattgtgttaatttggttgtgcgtggtggccaaattttggtcggcattgatggtaggattgtagtaataaggtaaaaatttaaactttaatagtatctatgtatgtattttgtgttgtattgaatatatattatgtgcagggccggccctgaaatgtagtgggctatagggtaaaaattattttttgggcccttatttagaaaaaaaatggtatttttcaaaatcagcaaaaaaattgtataattttaaaagggcaaaatttttttttgggcccctgaactgggtgggccctaggcacaggccaagcccacctatgcccaaggtcggccctgattatgtgtacatgtattgtgaatgag

SEQ ID NO: 180944 - DNA, 1262 bp, Cannabis indica
gtccaagtgtagaaggccccggagcaagaaacttcttccacttggcctaaagaaagccacttttgagcatcctcaatgtctttggtcaagatttgtttgccaccattcctatcttggaaattaaacatcgcattaaaatctccaagaattagccaaggcctatttaacatacccaacgcagccaacttctcaaataacaacttcctctcagcggggcaattgcttccatacaccgcagtgaaatagaactcctctatcaagccaactatcttcactttgctatggataaattgctcattatccaacaacacctcaacatgcacaaacttcgcttgccaaatcaaaattattcttttactacttgcaatgctcgaaaaaaattcccaattaggaaaactcatagctatcatgtctcccaccttatcatggtttattttagtttcaaaaagggctccaagcccaaccttattttctctacaaatttctagcactgatctctgcttatcccttttattcaagcctcttacattccaacccattatgttgcagacttccatggattaacagtagtggaagtaaccaagttctcaacaacctgttcagaaagaaccacatatccattgcttgctgtagccttctcatcatttatagcaactgttttgatcctctcttgcaaggagtaagccaaacctctttggactagtgtcaacactaatcggctgttcatttctcccttgccgtgagtcttctctgcttgacagcctccttctcccactaactcacctcctaattcagatcctaccttcacagtatcagttttttcagcaaccagagccttacttctctgctctgcaattcccttcttcttccaaacaacacccttctctttgttacagtttgctattgtatgtccaagtaagtcacaagctccacactttgaaggaagccactcgtattacacactctgttcagccagttgtttcctttcatttatatatgctatagtttttggtggatgattagaaatctccatatccaccaagaccctagcatacttgatcatagttctgctctgcgtaaccttgttgaaattccgtattttaatattcccagtttgattatttaattaaatgattaattaaatgcggaataataaaactggtactgaaaacagttttctgtagttacagaatgcaactctgtaactccagagaaacccagaaaaacaaacagtgcataaaagtaaaaacacacaagatttt

SEQ ID NO: 180945 - DNA, 654 bp, Cannabis indica
aatataaattttaatttttcggggcctccaaatttctggggcctagggcctgggccccggctgtccactctctggctggccatgtcgctaaaaaaaacccataaaataattgttcgtatttatataaaaaaaataacaaaattagtccttaaaaatattaaaaatactgcaaatccgtatttttgtaattattttatagatattaataaaataattctaaaaataacttagttacttaagatttataaacatataaatttgaatatctttgatgctaatcaaataatttagtacaaatattataagtattataatttaaatacttttattactaaaagaacaatttgggtatgtacttaagtactacaaacttaatattttatgtacttttgttgtaaatatttcttatttagttttatgatataaccatctatgaaatagtaaatcttgttaaaataaaaatatcctgaagttaatttttttgtgaaataatttaatttttttaactcatatcctatattattaaaaatattatattataattatagatatacaaaaattaatatgctcaaaacattagaaatatatataatacaaaatgtttgaaatttattttcaacgttataaattatttataatttccaaaaaaattta

SEQ ID NO: 180946 - DNA, 554 bp, Cannabis indica
gtggagaaacttcgataccaaagagtagcgttgaggaaattggagttgctggagatgatagtgctgaacaaatatgtacccaagaaacaaattattcagtttcgggtggaagtggttctcgaatttcaggggaggttgagaaatgttgtttagatcccattgctagtagaaaaaatgagagtggctttgatggggttaaaaaccagagactctttgctctgatgatataaaggagagggagatacaagacgatagtgcttcttcaagaaatgagtattctgagggtgaggattccatgtacaactatggtacagatgatgaggataaatctggatacaattaccagaggaacgagctttataggcaggaagcaaaaatgaagaatgaaaatccattgcaaattaactcatctgtagcctttggttctgatgattgggatgattttgtgcaagaaagtggggaaactcagaagacttcagatctttttcaccatgagtgcttcacaaaacctggcagaaaacaataatgaaaccaaaagggaacttttggattat

SEQ ID NO: 180947 - DNA, 1194 bp, Cannabis indica
tactatactactattttgttggtaaataatttttgtacttaatatttgcatcttaacatattcaatgccataacgaaggggtactcaataattggttagtaattcttttattttttttatttttaatatttttatttttgtaaataattttttgtactattattgctatgtggtaccttaaagtacttaatactataccgattcacatacacaataattagttagcagttttctaaatcatattaaatcaaaatttgtggtaattgatattgagatacaccaataacgatatattacctttagtggtgtttgacaccttaatgtgcctcttaacatttttgttattattatgtacatatcttaattaactttgattacaattttatttttttgttattattatatataagtttgtaagaacatcatctgtatatgtaaaaagttgtattatatttaaaaaaaaaataacttgtaatatatttgcatcactttttagtattatgctccaaagtttatttgcaaaacttgatgtaattttttttttttgttatgaatggttgttaatttttgtttttataatttttttctacaacaactatttttggtattttatgtttaattttttgtacaatattttttttctggtcaattatttttattattgctaatagaatattattatttgccactttaagatgcctaatactatacaaatatatgacaataattattagttagcagttcccatattataaataaaaaaatttgagactcgatttgaaatacaccaataacgatatgccgtaatttatggtgtttaccacctcccttagaattttctttatcatctccaatagataatgtataatttaagctaaaaaagatgagccaatattaattttgactcaaattttataataatgctccaatgtatttaggttgaaattattccttttttttaattagaaatatggtaaaaaaatgtcaataaaaccattaaattttgattaaaagtatataaatattctattaaatatacaaataaaatctaaaaaaatgattaattaaagtaattagtggcaaaagagtaaataaaaaatgtaaatatttattgtgtctaaattttggtccattttatatttgtggcaaatttgacacaatttttagtaatatgtacatatccatgacacaata

SEQ ID NO: 180948 - DNA, 521 bp, Cannabis indica
gtcaaagggaggatccctcctgtggttcccattattttttcttaattttcaattaacttttagttctataaaaaaatataatatggtttcggtcatgacatgacaaatttacgtagcattgagcattctataatattttcattaatagagttacatatagagtaccatgttcatggaatagcctattaaaaaagtttttttggttgtttgataaataaagcaaatggttctattgcttgtccttcgtgatgtgccatagtttctttttcctttgtttttattcacattttgaatcatgtccttaaaataattctggatttcctgttgacaagaaaaaaaaaaaaaagtaaaaggaacaaaaataatataaaaatacagtagatttttggggttggcatgtttctatatatatatgtatgtttctatattgtcttaaaatagtgtgatgaaacttattgatgaaataatgcaataaactaagctctatgtactctcgacatacaaagtaaattcataattat

SEQ ID NO: 180949 - DNA, 692 bp, Cannabis indica
atactctacattgtacttaattagttaggactaaggattgttatattcaacctaggcatgttctaattatagctcaaaacatcctttgaatataaaaatcatctgaaaatatcattaatattggctttctgttgccatagaaaataattggcttataaattaagttatactatgtataacacatctagttctatattttcaacttttgagttaattgtcattgaagcaaacgtttcaaagatgaataacatgtgattttgattattgagtttttaaaacgtatttgatcaaggttttgtgctggttgtcaagtcggtttaagggtgggtcagtaggagctcacgcccaagtctaaaaacccctttaacaaaaatctcaaatttatttttgaaaaataatatattttatattttgtgttttaattattatttattttttaaaatattacatttaatatcttattaagttaaatggcttccatttagcttgagacggcccgtcggtagtccaaagaaaaattgttcaatggatatcgtaaaatggcgatttgataatcaaatttaagtgaagattgattgacattaatgtctaatgaacacctttaaggtaaatttaaggtaagtcttatcaatgaaagctttaatggattggtgatttatgagaatctgagtattacctttatgttactttgc

SEQ ID NO: 180950 - DNA, 556 bp, Cannabis indica
tttttttaaatatttgtttattttaatgacattttcatccatttttaattagccattaaaaaaaagccaatgctttacaaggcaaccaaacaatcacttcggtttattcaacaaaaaaaaaaaaaaaaaaaaaaaaaagaagaaaaaaaaacatttctttcaattaccacctttagaaaattgctatttgtgttgttcattctcaatccggctgggacctatcagaactgatataataggagtcacgatctactaaacacaaccaattgccacacattcccaagtaattaaattggagagcaaatctactaattttccgtcccacaaagttaccaaattaaaggacatgctctttaaattgaaatatgcatcacaatttcttttggaaaaagaagcaatatcattatagattaattattaagaaaaaactacaagtgtaattgtattgattttggtgtaagttgtttcatatacataagattaaccctacatttctgcggcaaaggatttaccacaaccacaagtttgtgtagcatttggattcttgaaagagaat

SEQ ID NO: 180951 - DNA, 600 bp, Cannabis indica
atactatcttcaatgtattacttgtaattattgtggatttgggctgcttaagaaaaattaatggatcactttaatccacctaatcatatgccctcattacaactacaaagccttctttttattgcaatttactggcagaattaagcaattaagcaacatcgcctatgccaatctaaaacaacgcaaatagaataataaaattagcagtaggatattcattttgtgaaattaaaatataaagaagaatgtgatttcagaagtccttatatacccttaataacatgtaggaatcgctgctaagttaaactagaaaaacagagtataattgaaaaagagaaggaaacatatagtttatttgctggcaatgtagtcaatacgtatagggaactcaagaaagaaaacagcatataagccaccccatcaccagaatacgcatataatttctatattggaaaggaatcgcaaagtttaaagaactagtacattgcctgctgaggtctccactatgtcagagattgctccacagattgcagacctaaaaccgtttccaattccactgcacgattgcagagtccctctgaagattcagtcccagacgag

SEQ ID NO: 180952 - DNA, 628 bp, Cannabis indica
attagtgcactataatttcttttctcataaatggtatatttagcttaattcatcacggagaagcaggaaaaaatgtatgaagttaccatattaagtcctctttgaaatacctgctcagattttctgtcatatactggtcacgcagatttgtgggtgtctgactccaccgtgtggtgcactgagagttttgctagttaatttgaatcttttagagcattattttttctgcattttaagatcgtttgagatcctcagatataaaagctatggcactaaggaaatgcatactgtatgtacaactttctgacaaccatactcttgttatatataaaagtagatgtagatcaggatgcttctttacattcacattggcatttattactataggaaagaaaagagctgctcacttccttagtgtgttaattgatcagttatttctctgggccctcagattctgaattggatttaaaattatgttacttattttagtgacatgagcttacctacagaagcaaagcttacacttttagaaaataaagctgcatgctgccaggatgtaacagcatgtgttgcctaaggagtattttatttcaaaagataacacttagccaattcacagtcttttttt

SEQ ID NO: 180953 - DNA, 566 bp, Cannabis indica
caagggagagttgataagatttcggcactttaaagtggaaatattcttaggagaagtgctttatcagaaatgacctgaagcaatcacaatttatcagcttcctcgtaatgcacagcatgatcttgctaatgccttcagcattaacaccaaaagaagctacagaacccgtaggagtaacatagcgcattcactcatttgactaatagcgttaacaaaaaaaaagatgacatttactacagtctatgcaaacaatgccaaacaattttcaccgagaattaagcaaaaaaaaaaaaatccttgatttgtaaaagaaacacaaaatgaggggaatcactaaaatagccaactatgtttttctatgctattttttcttttagcgttttacaagtaaaaaaatttaaattattaataaagtgatttggtaaaacatatttttttattattattatcatttactatttttccttcggagatcttttctcgagaagatgagatatataagttccataaatttttattattattttatggaaatatagtttcataattaatacacaaagaagtct

SEQ ID NO: 180954 - DNA, 716 bp, Cannabis indica
cttacatggctactctatttttccttttttatcatattgtataggtgataatatcgtatcgtgtcaaaaaaaaaaatgatgtcacctgtctggtttaggtggtggtgaaacaaagagctatgtgttgatggtatattttttgagtggtcgtatgtgtatggagagggtaggaattaagtagatcatagtactagtagtaataattgtgtcattttgcagccttaaaaattcaaaaagttgcactaataaaagcgccggaaagaggaaaatctcacttccaaaaataataaaatgtctgccaacattgtcgaatgaattaataatatatggtcatacaacaaacaaagctgcctaaagtagtctaccaaaatacaaaaagaagaaaacgattataattttacatctatctacctaatatctatcccactaatctatctacactgtacccaccagctacaaaaataccattagtctaaaatatattattaacactacttttattatctactaatcacatcaaaagtagacaattttctttgtcaattcagctcataaaataaagaacgaatcactaggtaattacttgaactaaaagaactcaaaactatattgaaaaaagagaaagggcttcttgtaatatataagtagctacctttaatgcacaaagaatattcggttcatcaattcaataaaaatgttgccagacatgataataa

SEQ ID NO: 180955 - DNA, 637 bp, Cannabis indica
aaccctataatatttggagactaaaaaactatagcaattgttgttatgtaggtaacaagaagagactcgaatcttagacctattggaagcaaagtacatgcctgaccatttaagctacccagggacggacccattaaattgatgtgggggctataggccccactaacaaaaatattgtcttttaaaaaaattaaatgtaaattttctaatttaataattataagctaaaatagtagaaaagtccccacaaaattaaataaatttagtaagagttattataatgtagctataaatattttttatgataaataagcccccacaaaaaaaaattatgggtccgtcactgaagctaccctctcgggtaatttcatggattctatctatagtagttttctgaaactagaattctcgtctaacccataatatttggagactaagaaactatagcaattgttgttatgtaggtaccaagaagagactcgaattttagacctattgggagcaaactacatgcctgaccatttaaactacccttttcgggtgatacaatctatagtagttggctataaggaagatggtaatgcataaaaaatcattcatacactacacaaaaatcttcatcagataagtttaaaat

SEQ ID NO: 180956 - DNA, 525 bp, Cannabis indica
agtttttttttttttgcattttttacaaaattatacataaaaactcatattgcaattagcgctgcaacttaaattgcaacaaagaatcgtatataaacccctattgcaattagcgttgcaaccattttagaaacttaaaccgtaaattaaaaaaaaaaaagttaaaaaaaataaatatatggaatagttctccaattataaattcttctacaccatcatcatatatgcaagtcttgcttcagcgtcaaataagttcttagttagaatttcttattgttttatcatttttaagagcttttaattagtaatttttcataatattattaaattaaaatatgtaaaatttaatatttaattatatcaataatcatataatattttgtaatactactattagtgtcttttaattagtatttctctacgggcttgtacaattaagttttttttttttttctactatcctatatatatatgtccaacaccacaaaatatatgtcatatggccgcattaagttaagtactata

SEQ ID NO: 180957 - DNA, 641 bp, Cannabis indica
gtcggaggaatttggacaccgaaattcatgtgagtatttaatgctattaagaacacttggataaaactgtgagtactcacttagagtagcaagtattattaggttatttttagtattatttttaagttaattttagttatgttttaatttagttctactcttgtttggagcaattttatgttttttatcttttattttttacagatttaaaaatagaaaaaagattagaaaatatcaaaataaataagaatggaaaaaaagataaaaagatctcaaaaaaaaagatgaaactataaaaatagagaaaaattgtgcaaaaaaaaaaaaagctgaaacttcaagcgtaaatttgactatgatatgatcagattttagaaaaaaatcaaaacataaaagttctagatctctcttttatcttacaggagcatcttgaattaatcgtccaattctgagcaatatcgagagagttatggccaatttttttttgataaagcgctcaagtaagttcctttttcttgatctttaatgttacattgggaacaatatgtcagtttagtttaaggggtgaacttaaatttttaatttttttttaagtctttcaaatttttttaatttttcttagtttttagattttattgttt

SEQ ID NO: 180958 - DNA, 839 bp, Cannabis indica
aataacttacttgaaaaaggggatgaaaataaaataattgtgcataattatattatttgctttattatccaaaaataattatattatgatataattatacatattatcaacctagtttatgatcatatttaaaaaaaaaaaacttaaaaagaagagttaaactagaaataaaaaagatatgctctaatttaatgtaatttaaaatctaactatacattaatagtgtgtaatctaacactatacacactaatttagtgtataaattggcgtatttttgaatgaaatagtgtgaagattttacaccaatttagtaaaatagtgcacccgagatactcgtagaccatctccgatgattacacaaatttggtgaattttttttttttattttagtgcaacaacttcaatgattcacactaaataaatattttttatatttttttgcaatgtctattttatattatttatatataaataactcaaaataactaatttatgttataattatatcatgatggctactagtaagaatttaagatcttaaaataatttaataaaataaaatatttttttgtaagataaataaaatatttatttaatcaattaaacattacacattacattttttttaaaagagataaaataaaatcacacttaatgtttattaattatattttacttaatatttatttttatttattgttgttctttttagttttctaattatgttgttttattttatttatatttgtattttgattgtatttgttgttttttaatttttttagtgtttttaaatctaagtataaattttttattttgtatgactaaattgttacaaa

SEQ ID NO: 180959 - DNA, 828 bp, Cannabis indica
aaaatatatattatattttaaattgagtctcagttacctgatctggaaggatgtcgaccggtcctacaacgtctagggtaagggtgttgtttgccaccaagaactggccttttgagatcggacattaggtcaggacttccgagatcgttgtacacatcatagtcgtaaattctttcatgcttcttacgttgtccttcaccatttcctcttaggctctttagatcctcttctctcagcttctttaatccacttggagtattcgatggcaagaatgactacatagttacacaaaatcattttaaaattttataccaaaaagagtgtagtcgtatatacacatggccaggcgcaaggcccctctgcctgagaggcctcataacctctcttttttacgatttttttttttggataattacataatacattatttacgttcaaagtattttttttttttttacattatttttacggttttctataaaaacaataagaaaactacataaaagtaacaagaaaataacattaaaacaacaacaaaaaatcatacaaataataaaaaattaacaacaaattaacaagagtacaacataaaaatacatcaaaatgtgttttaagggatgagacaacaattttagagtcatgtacgtaccttattagtgaaaaagactcgtttttgaggattctgactcttggaatgaatccaagattcgcaattgatggtaacgggggccattaagcaatcccctcgccgtcaatcttaatgtccttgaggaacatctctttgtgatgctcattctctacaagaattgcccccaagctctccaaatt

SEQ ID NO: 180960 - DNA, 803 bp, Cannabis indica
aatttttgttttttaatttgattttttaagatggaaaatggttgtttcgaaggatgcaattgcgctaattgtgagaatacttttggcaaaaaatcatcaccaacaatggaaggttagccatgccattattaatcactaaatatatacatttctttccaattcaaaaatatatatatcttttatatattaaatgtggctatctaataaaaaattttggacttaacaattttttttaaaaattttacctttaaataagttaacgttaaaactagtaccatgaaataaatacaaaaaagtatttttatataaaaaaataaaattaaatatttaaatttaatttatttattaaaatatgacttagataattattaaaaagtatcaatagattattatataattattttttaattagttatataaatcttaatttaaatttaaataagacgttaatttaattaattaataatacttaataataaatttattagttatattggttaaaatatctaaacttatttatttattttattatttaataaaattagttagatatatattttttataaataaatataaaattaaattaaattttatatatttataaaatattattaaattgtattagatttaattttttttattattattatttaaattaataattaagtaataataattgtaatgtattgtatattactaatacttaatatttatatatatttacattgttatatatgtaaaataaatatgatttataattattgaaacttaaaaaataaaaataaaaatacattgatacactt

SEQ ID NO: 180961 - DNA, 597 bp, Cannabis indica
caacatccgctgcgaattatttactaatatatatatatatatgtatatatatatataagagagagatatcaagtggtgacatatcactctaaaatctctctaaatactctttctatttttcccttattctttcaatttattagtttttattaggtttataaaattatttcaaacttattatctatattttagtttttttaaataaaatatagatttttattattttataaaaaaatatagatttttattatttttaaaaatctgaatattattataataattatattttaaaaacgtcaagtatacttaattctcattcacaatttgttttaattaaataatcaaacaaataaaattctacattgattttttttttcactctcacctatatattagggctgtacatcggtcggtttagtcggtttatactatatattttccaacccgacataaagatcgggttataaaattctgcatgcaaactgcccaatttaaaaaaaaaaaattctggacccgaccgacgggttgggcgggttgggcgggttaacccgcccaaaccgaattaggatttttttttttttttttttttagtattct

SEQ ID NO: 180962 - DNA, 609 bp, Cannabis indica
caatcacatgtatttttctctacaaagtatatctaagtaaaactcggcacaaagttgagttttgtccattatattggagtattttataattatctaaaacacaaactatttcaaaactaaattaaaaaaaatacatttcatcactttgatcacaatatatgctcttgaaaaaagagtaatgtcgttttcttttttcttttcttaaaataaaataaaagaagaagagtaatgtccattgattggcatttctaatcaagaaaattaacaataattgttgagaaattactacacgtaccataataaacaaccacaaatcatactcatattaactaagatcaaacatttaattttaaagaattaacacatacctctagtcttgacagtgatcaccaatggccatattaattacccttttatttataaggataacctttaacaattaaaggaaaaaaaaatgaaagacaaaaataaagagtgttgattacacttctttgatctacacataaaaatagagaaatagagcttgcgtgttctatttttctattatagccacacttattcaacattaatcaccgattaagaacacaattattttttctaaaaaattat

SEQ ID NO: 180963 - DNA, 743 bp, Cannabis indica
cttttgaaaaataataaagtgttagcctatccatacaaacataaaaacaaaaaaaaagtgatatcatatggctttattcttattgaactacagttgttttgttgcagcttaagagattggattggcacgagtgttaggatcttcctttgattctatgattatcatgaacacatatcctagtgtccacagaagaatgtattgaaagggcacccaagatgaacaagccaataaactcatgatgcttcctacatactgaggatcttgtatatacccaaatgggaattctgtcacccatggaatcttcttcccaaatcttactccatagtaagtcccagattcaccaagtaattgatacaccctgaaaaaagtaagataaactaaacaaccaaaccaaatatataacacatgattattgtttaaatcccaaaattgactcttggtgttaaaccccaatatatatcccaaaaatcaagtctttaataaatagagaggatccccacatgtctaattgatagggacaacaacccattaattttctagtgttgaacaattaatggtgactttgaattaacttgttaatgattcaatgaaagaatcaaacaagatcagacatgaattgaacaagtatcagcatactgatgtgtgtcacaacaaagttcaagacatcattaaagctagcagctttcactaattaacaatctaatctcacaaccccaattaagacttttcttaaaagaacaaag

SEQ ID NO: 180964 - DNA, 771 bp, Cannabis indica
agaaaaaataagtaggaaaatgtataaatgtaaagtttggacaaaagttagtattatgtgtaacttttttttttttttttgaatttcaatttgtataaaaatagattttttttttacttaattttttttttttaattaggggaaaaattacaaaaaaatactactaattaatctcatctagggaaaagcctcatacccacttgatcattagaccaccgcaacaacttttctactttatacttttaaaatacattattaaaattagggataattgcggcaaaagtccccaaaaacttgaggttgatgccgattagtcctcaacttcaaaaattggcggtgaaaatacctaaggtcccaatttttgtttgtctgttggtcctttttctaacggatccgttaaattcaaatgaaatgccacgtgtcaaatttttattggtccaaataataattttaattaaaaaaaatttaaataaaataaaaaactaaaaaaaaacattttaaaatcataaatttatttttttttctttttttttctttattcatcttcttcatgaacccagtcagccacgagggttcgatcggaacaccaccacgagatctttgagacctggagaaaccattcataaactcatcttgagactaatgatagtcataaaattattttttttttctttttttctttttcttttttcttttctccttattcaccctcactgcccataaaccacccatatcaaaaactcaccacccacatccaccatctacaacagt

SEQ ID NO: 180965 - DNA, 731 bp, Cannabis indica
ttttcttcaagttattgtgtctctattccactaccacttctattgcttattttttcccatgaattaattatttatgccattgtataaagagtactaggttttttttaacacttgctcttctattttatttaggttgtttcactttttattcacgccctcttaatgagaaaaagaaatggtgaatttataactgttcacatttatttattacataaaaatgtatatacatgtaagagagaatctttaatagaatgttaaataagtggtccaatgctatactttgatatttttataaaaaagaaaattctacagttatatattgaaatttgtgttaaatttaataaatactaaaatttagaccaaatttgggacaaaatataatattgtgcaaaatttagaaaacaattaatgtatttttttaatttacattatcatttagcattaatgatttaatttaatatattttttaattgtaaaattgtcattattctttaaaatatatatatttaatttatagattatcaataattaataataattactttttaagtcaatttgtatcttaatttgttattatgtattagagtataattataaaaaaaatatatactaaaatgtagcatttataattttttttttgttgtctaaattaaactataattttaccctactgtactagagatggtaagaaacgaatgaaatagagcatatactcaaatacttgtttttta

SEQ ID NO: 180966 - DNA, 611 bp, Cannabis indica
aacatcttgttaatatcatccagggcctccttggtaatcatagtaggctcaaacaagtcagaacctcttggctttcccgataacttaggcatttgcttaattgggggttcatttatcaagtcttcatcaggaagaattgaaaagccaccaaagtcattcattgatttaggagttttgtcctgttttattgatctccttgtcctcacaaaatccatgggcttcccaaacatgttattgatatcatccatggcctccttcaagttgattgtggggtcaaccaagccatggtgacaggcattttccacctctggttcatccaaaatagcagaaccaacaaaccgacaaacaactgtatcctctctaaaccttggtcgatgtgagtcttctacatccatatcatcagaaccttctgattggagatcctttggagttggaaacacaaatacgtttgcacatgaagcagatccattatcttctctagaattgcaaaaattattccgatccaaattatcttcacgcggatatttcatcatcatcatcatcaataaaaactaactgaaaaggttcctgatgaaagattgaaattttcgtttctactactgttttctccc

SEQ ID NO: 180967 - DNA, 574 bp, Cannabis indica
cgtacttatcttaaattgtaccaatagtatacttatctttatcttaggtgctttttaggatttctctttcaaaagaatatatataatgtcaaacaagcctctcacacttcactaaaccagttaatttcttttgctggacaataatccagataattatggagttacaaaatataaacaaacaagaaatcataaaagtattacaacgaatttttttgtctgtatgtatatttcattgagaaggataatttttgtatagtaaatgctaagtagccattacaaaaggtacttgctttttcactaacatgtcttccatatgacacggccaatatatattttatatacactataaaattttttatttttagtcacaacaaaatttttgactaaaagtaaaaaagttgtaactaattataaatcatcattcttatgttgtgattaaaaggttcatgactaaaggtattaatcacaaaaattacaatttattgtaactaaaactaaattagtgacaataaaacttttgactaaaagtgaaaaagttgtgactaatttaaatcatcattcttatgttgtgact

SEQ ID NO: 180968 - DNA, 673 bp, Cannabis indica
aaagaaataactgccatatgagaattctataaataggcgaaaataccactaagggacgacaagatgatcaagagaagaccctgaggaaaactcatcctttattcttgaattctatactctataacacaaaacacctagaaataaaaagactcgtgaattatgtagatttaactacaaaaactacgtaaatatcttgtgttaattattttattatttattattcatttaaagctttattaacgttagttttttatttcataaagaagatcttatttattattaacgaaattctgaagtaacagttagcaatactctctaaaatttatttaattaaattatatgtggctcgatacttaattgcatcaataacgatattgacacgtcaggaaggtgctagacaccactaataccccttttagtatttctctttaaaaaaatctctccaatattattcttaattttgtgctaaatttgacacaaaatataatattgtgctaaatttaatacacaataactatatatttcttaattataattttaccatttgatttttaattataagctttaatacatatttttttcactacataatgttatgaattattttttaaatatttaattatttatattataattaataacatttatttttgttattatttgtatttaaatg

SEQ ID NO: 180969 - DNA, 657 bp, Cannabis indica
gttacactgcggtcgcggtagtaaacgggctatatgtcgtatccacagggaggtaaattaccactaaagattagtataaatagaaaatgatagaaatgtgaatgaagtaaaaataataaaatgatgagtgagaaagttgatcagataaagagtttggtaaggtagaaatgtagttatgcaaatcctattctaataccgatattaattcaaaacacagttgtaattctacaccattaattacaactggaagatatatatattatgagcacaaattaaataatcttgaataaattgaatctcacctctaacttaacaacatatcatattatatatcataaatcgacaaaataccactattggcagaatgcagtaaacgacataaaatataataaatataccaaaatattaatagcctaacttacataagaaaagcatgactgaacttatataaaagatactattaactttggaagaaaaattagaagatgaagaacaatttaataaatgagatatggagatgaagcacaaaagaatcaatatcaataattagaaataagaagtacaatagctacactctaacctcaccaatattactattttattcactcatttttgtcactaaaataagtaaaataaaaataaataaaagaaaaagta

SEQ ID NO: 180970 - DNA, 698 bp, Cannabis indica
gtataccatcttttgttaggatggtatgtcctttctgctcaacacaacaaatctgcaccaacactagtggagatcttgtacttctacgagattaaatccaaacccatgaggggtcataaggaaaacatgggtttttacaggctcgagtgccattccaagagtgtagcataccccattagttccacaaagtatacacatgacttctgagactactgaaactacacttctggcttcatactgaagagattcaccatactcagcatggactttaatactacaagtaagtgtttcttcttttcctggatttcacctctcattttctcctttggttatatactaatgtgtctttcatctttcctaggttgccttccccaatcgcctctgacttcggagctataaaggagaatcaacttctacaagtctttaccatctagggaattacatgtagctcaactagtgaccatagagaaccttgaaaaggttggtctcatcgctcctcatcaaaaaattgatcaaatgtcgaagaaggagaccatttaggaatgactctaacgggatcctgacgaggtgaaagaggatattatggccattactactgaagagcccttaaaacttttaaaggtcgatgacagtggctcgttgattggagagagaattctagagacttgagtgagtttgaaagagctcactatccactt

SEQ ID NO: 180971 - DNA, 1241 bp, Cannabis indica
ctcccttaacagtttgtcacgttccttttacccaaaattattcccggtgtaggcctataggatttgacgatcgtcttcttagatttaggatgccctccactcggtggggtgatcatgccaaggccttttatttttccaacttaggtcattttctaggacggtcccggatgggttccagacctcctgcacccattcccctggatcactcagcttatctgtcttttagctggtttctcccctcggacagctttcttggggatgatgaagccagtattgtagtgcaagactttgttagggctgagttagatagtcagggtaggacttgttttaccgctttattttcatgtgcctactttcttatggcctttctgacacttagtttgtttgtctttttgaagtagcccagccaatggaggatcttttggcgactcttgcccaaacatatagcccggactctgctcttcctccggcacccgcccagacaatgaccccggggaggtcttcttccagtgtcccgttaggccaaatcgtcttgatcgatgaagacagggaggtcaaggaggacggaggaggaaggtgagatcgtagccctgctagattgaaagtgcaagggcaagatggtggaggctgagtcttccacaaaacctaggagggtggacactccagccgtcagctctgattcagggattccgcctgaagtcgaggaatacactgtacctcctagcatcatctttactcctgtccccgcggatgaggagaggcagcaacttcagattgccaagcataactatgccatggccgagtacacatgggggatgccgaggtggaagccctgaaaaaggtcttacgggaggctcagcaaagttccttacgcgaggaggcctttaggagcgcttgggacctgaacatggaccctctgacggactgcttcaactgcttcgtctgtcctacccttgctcccttcgcttccgagttgacgagccattttgtctctaacctgacccaactctcggccaaaagatacgcagcctgcgtgtaacaccctaactagcctaggcgtgttatgtgatttttaaacgtactgtgcagctcgttgctaatcaacgaggtttatgaaaatcgtgattaattaaaatttttctttttaattaaacttataatattttatacaaaatactcgggatcacgattacaaaatacttaacataagttaattagttctttaacaaataactgtcacc

SEQ ID NO: 180972 - DNA, 637 bp, Cannabis indica
gtctaattaataaataagttaaatgacaattttatttgataattaattataatcattaaatagatagatttgacatttatagagttagaattaaaatatggtatctgtgaaagaaaaagataagttcttaaataaaatggtaaaattaaaaccttgtagggcccactaagggttcgaccatagggttgaattaagagccattattttatcttttttaattctatataattctaaacctaaccctagaagaaatcctataaatagaataagatgctgttaatttcttaacctattattagaatattttgtcagacaacttaaaaaataaagagagagcctctattttattttcgaatccttcctctgatatttttgaaacccctatagtgaattgaggaattgcccacacaattcaagtcaatactcaggcctttgtggaagattgtgtagaattccaacaattgaagaagatttaggttcagatcttgattatactctacgacagaaaggatcaagggttagagatctgaacggaaggagacattatattccactgccaccaatatgagattttttttatacctttatgtgtgttaaaattcattgtttttagaaaaatttcatatttaggatgtta

SEQ ID NO: 180973 - DNA, 630 bp, Cannabis indica
aaataagattgaaaaaaaatgaaacagagagggaaaaacagttgctaaatcgtgggctaagaggaagttgaaaattcgtggatgaaccaaaaataagagggaaaaacgtgataaattatgggtggttaatggaggttacttgaattcaaaatgaacttagagaacagaaatgaagaatagaaaatgaaatgaaaacaaaataaaaaaagagagggaagagagtatgatttgattgatgatgcatggggatagaacacgtgtatgcatagtatgatgagtaagtggtaaatgtgtaataaaaataagtttgtaagtataaatgtagtaataggcgtgtgagggtaattatgtaataaagtgagtaaaaatgatttttcatgtaaaaatttctatgatatattcaatattgttgtatataattaatgatctaatatatttatccgtttttattacaatatattattatgtaatcctaaaaaaattatataacttaatttaattagtatatatttgtaaaataagttagaatgtagtaaatataattttataatttttgttagctaaattattatatttaattattttgtctaattttttaaaaatttgtcatcataaccttaataatcctat

SEQ ID NO: 180974 - DNA, 706 bp, Cannabis indica
atagggactttaatttcattaatgattatataataataaaacacatttatgttttcaatcaatctttgatagtagattctcttagccttaattattatttttattgtgttcaattattctattcctttttatataataggtcatatggatgaacttttattctatgttagatctatatattggaacccactcatgactcatgtgatggtatagattatgggacccactcatcaaattatgattcatgatttcacaagtaaattttagtttgatttagacattgttaattcatcttaattaaattttactttctatttttggaaattaaatatggtataaaatactaattattaaaagttatagggacacccctctaatagggtatttcggtagacccctcaatgtttagatatctaataaaatttttagtctaactttttctatgatcatttatgtaatagttatttaagattacttgtaaattttacaaaaaaattaaagtaatttactaatattaaaaataaaattaacatatttgttacacgtgcaactctttttttattacgcttagtaagtaactattaatattactttgtacattgtaactattcaaaattaagtcgttttaattacatcatatttcgtagctaatttattcgtgtcttacatgttatgttttcgtcgcttgtcgtgtcgtgtcatgtct

SEQ ID NO: 180975 - DNA, 675 bp, Cannabis indica
acagaatattgtaaactaaaaataaaactacaagtcaataacatcgtcatcatcatcgttgtcctgagagggaggggaagcctttgaagaagacccaaccccaggaggccaaaatagtggaactagtgaaatcgaaattatcgggggcatgttgaagctaggagtgatgttggctagatgcctgaactgctcctgaaacgtgttcaggaattgattctaagtctgcatgatttgttgttgccactcattccgtactttttgatcttccacactttgcttcagggcctcatttcctcctggttaacagtaggttcactactacaaaaactagattttgcgtcggttctgacgtcggcaaaatttaaaaaccgatgctattaaagaacccataaattttacgtcggttatgaactgacgcaagaatagcgtcagttgtaagactatttgcgtccgttctacactgatgctaaccttgcgtcagttcacaactgacgcaaaaaatcctacgtaaaaaattaaatcaacagatgggccaaggccatttcaaaaaccctaaatatatataaccttctactttcagccgccccatatacgattttctacaaaccctaaattcgtaactattatgaatatggtggccacgtaatagatgtgtacgactttttctaaccgacg

SEQ ID NO: 180976 - DNA, 548 bp, Cannabis indica
aaaaacactctcaaattactttaaccaaaacagtaatactttgaataattattacctttacctctctttttcaatacttattaaatttgttttcctcttaagaaaaaaacccttcattttttatattaaacagcattattttttattttagacttaattaaagatatttttataattttaaaatacaatttattaattatttttataatttaaaatcaatttttattattttaaatcatatataagcaataaattacaacaacgtgacacatgttacttaacagaagtggtcattggtcagatttgagagatcttttacccgttcaatcttacagattaacaaatctaactaaacaaaaaattagtattcatcgtctaaactaaattccaaataatgattttaatagtcaattttttttttaaacgtctattaatcaaaacggagatctactaatggtaaatgcaaaatactgactcgggatgaaacctctactaatcgatccaaatccttagtttcaactttcaatagggacattcaatattaaatg

SEQ ID NO: 180977 - DNA, 762 bp, Cannabis indica
tcctcggtcaagcttgaaagaagtgtctggaggccttccctctcatctttcagagacttaacatccttgcccagagccttattgtccgcctcgagctgggcagcagacggcatatcgttgatctccttcctcaattcttcaacaagttttttggtaactgggagctgtttattaaccttgcctagttgaaagctcttatgctcgatccttcttagtttcctccacctccttttttaatttgatggtggtcgttgtagctttcaaggctgcagacttggctcgggagtacatgtatgccacctttatgttaagctgcacaataaagcaaaattaaaacatgcatggataaaagaatgtgaaagaaaaccaaaggaaaattactaattcaagtggattccttcagcaaactgcccataagaatctacacagacatgtcctcctctttggctagctagtcgttcacttcgggaagcactcgatcttgatagatttaaagcatctccttccccttcttagtctcttagttcagtagggtagaatgttggaaattattttaccaggatctagatttactaacaagtatgttggattaacaacctaatatgaattctaaaacaatgaaaataaacacgtataaagttagaaaaccttacagtgggtgcagcggaataatatgactcctccgttcagatctctagccccttgattcctttctgtagcagagcatcaccaagatctgaacctggatcttcttttctcctt

SEQ ID NO: 180978 - DNA, 713 bp, Cannabis indica
agagagagagagtggagagaaccagcatcgcggttttctgatgcttgcaatcctggtgggtggaaatctcgttcgttgattgtgggtagaacgcttcattggggttgggtggacgtaccgccggagatgaaacctgtgggaagagaaagatgagtcgaccagatttatttttaagtttatttattttttatttttttattcattcagtttttgtttttaatgttaataacttaatatatgttaattttagttttgttataaatagtattaattatgtggatgtccaaatcttttatttattaccattaatgtaatcaacattccctttttcttagtttccctttctcttagtttcttaatatttgactcttgtatgtgtataaataggagatcacctattggaataaaacactcagaaaattctcatctcttctctattttctttctctaaattataatattacataatactaatatttcataatacgttatcagcacgagcctctaaccaaggtatgacaatgtttttgttatgtgatctcgaattgcttcaaagtcatgatacactaaatatatatatatatatatatatactcatctgactgaaacacattcgagttagccattttttttatgaattaatatttatacaatatatgtctatgcttatatatatctatatagatgcttatatattatatatgtgtgtttga

SEQ ID NO: 180979 - DNA, 705 bp, Cannabis indica
aaacaaaaagttgggtttttattttcactatatgtttaaaaaaaaaaaaaaaaaaattaataaatatttgatatggaaaaaaaaaaaaatatgttcccgtttcataatattttattcattaattttttttttttgaaatattaattttttgttttttaggtaaaaaaaaataaaaatatttttcaaaaacatggtttataaaattattttcacatttcaattttttttattgataattttaaaataaaaaaaaatatattactttcgaaattttttaaacagtttttttttaattaatattttaaattctgatcccaacttgcactttgcggctacagttccagactcaaacttagatccgacttaaataaaatcaaaaaataaaaataaaaataaaagttatagaacacatttttgtttctatttttaaaattaaaaaacaaaaatggttgtagaacaaatttttattttttaaaacacaaattttactttcatttttatgattaaaaaattaaaaacataaaagtagctatcaaagaccctcttaatttagaaaaaaatttgatgtcttttttttattattatttctttagtagcatctccaatcgtgttctctaaacatattccttagctaaaatatagagtgagcttaaaaaaaaattaatagcgagtactctaaatgtagggtgctcctacttttttact

SEQ ID NO: 180980 - DNA, 973 bp, Cannabis indica
atgattatgatgattcttgtgtctattggatgtggtgaatgccaataatggtggttgaagtagtggtgtttaaaccttgaagatgtgattggttttcaatgtacatgatatctctagttcttctctgagggcatatttatgtattgcgatggtttcttttatatatttatgggacttttatatggagtcaaatttcattactactgttttttagtacagtacatgtttttttgccctgtcatggaaaatttcatttgagatgcttatttctttgttttgcattgtaaccgtttacatctgtaacgctctctctctctccacataatatttaaaccattgtgagtgctcttgtggctttgaatgaaaattctttggtataactgtttactggtattactggtatgctatactcttcttatgatgtaaaagttgtttgcattttgctccactaaaatatcaagcataggcaatggcaacactttatttttgtgaactgaaaatagctactctgtgattgggtttttttttttttttttaatattctagtcagcttcttgtaaatttgtaatctcagcttaaccaattagctacgagatctgaaggctctctttgatttggcaaatattcatatttgtttgtagatgttattttataatgatactacctgttacacacatcggttattgaagtctgtaattggcatatttctaatggctttagtatttattgtcttagttacatcaaagtaggtaaatgcctgtcatggttttaaatttgattatgtaaatgcctgatgatgacattttgtttcaatgagtttgtgtatttgatattccatctttccgctcctgctattgcagatattcaccatattccaccagacgtcctgtgtatgatgtttgcgtacatatgtgtgcggatatcattactcatcaatgttattattattattgttgttgttgttgttgttgtg

SEQ ID NO: 180981 - DNA, 626 bp, Cannabis indica
aaatgcagtaggtttttgaaaaggaaatcagacattgaaaaagggaatattcccttgtgatccgcacaaagggagaaggactattctttccttggtttatgacagttggggtgttgggtgtaggggtaatataggcatttcggctgccagctaatttcctacacttaatacatgtttggcgtcactaaattttttttttgtttttaaaaacaaaaatattattttttgaaaacaattaggcttgtttggccttgttttttgaaaacagtgtttagaaaataatgttacaaaaaataagaattttgaaaacaacaaaatatttttttctcttttaaaaacaattcacttttagtcaatactgtttttaaaaaatactaaccaaacacgacttgtgttttgaaaacatcaaaaactattttttgttcttatttttaaaacatttttttaaaacaaaataaaaaagtaatacataatatgctcttaaatttggtaagagaatggtagtaaccactcgaaattttaattgaagaatgatgtgtaacaaaacttaaaaattagagtagttatttttttttttttttttccagaaagcaaccctttatagatgcaatttgtcatatttgaac

SEQ ID NO: 180982 - DNA, 665 bp, Cannabis indica
gttattactattattgacttatcaggtcagtaaaatttgagtttctagcttttttgatgtttttcttattttttttaattatttttttacatttttaaaattaattttgagtgacgacgtgatctgaaattatttttaaaattttagaagagaagaaaaataaaaaagtgggaaagaaggagagaaaaaaagtagtgtaagagaaagaaaaagaaaaaaaaatataaattaaagtattgaaacatactaaaataaataaaaattttattcaccaactcattttttacaatttcatcaaaaagaaattccaaaaaaaaaaaatatatatatatatttactttaatgaacctgttagtgaaattgattaaacaatagaattgacaccaatatatatatctttcattattgaattgaattaagaaagctgaattataatcctaaggtacaatgaaattaaagtaaaatagattcggtagatttgcctttcttctttttttaacccatttattcatgatgatgactttatttaactaaaagcctcaaagtcacaatgtgtgaaaatactttgaaggactttgttatctccagctgtttattttggtctacttctttccctctaccagtagctttgtcttctcatctaacgacaacggaatatcgtccca

SEQ ID NO: 180983 - DNA, 613 bp, Cannabis indica
agtttctaattattgggcctactatagaacttggatgatcgaagaagaatgtggttttgagattaaggatgacgttgaggaagcggttctggtagatgatcgttggtgtttggtggggaggtttttgaatgcgagatcgatagattttgaagctatgaaacacacgttggtggggttatggaaaccaggcaaaggattgtttgtcaaggaattggggccgaaccttttcttatttcagttttatcatgagatcgacattaagcgggttattaatggcagcccttggactttcaataggctaccattgatatttggtagagttccacgaggtggagatccgaaggctgtaaagcttaatcaacttgatatgtgggtacagattcatggcctttctacgggatttatgacggagaaaattgtctctacagctgcaaactacattggctcctttgttgaatcggatcctaagaataatggtctttggcgggattatctccgagtcagagtgacggtgaacattgatgtcccattgaaaagacgaatgaagcttaagaaaacgggtggtgagtggttttatgctaattttaaatacgaatttgctccgcgtttttgc

SEQ ID NO: 180984 - DNA, 623 bp, Cannabis indica
caaacataaatcattctccacaagacaaatgaaaaacacatcaagtttagcactgtgattcttaattcataagtataattcttttgtaccacaaacaaaccaaagtgtgcccacctaaaacagaataaaaagcacgtataatttcaattaaaaaaccattttttagtgaataacatgtataaatatacatattactcgataattaagtaggaaaaaagaataaagaaatccgttaactaaacaatagcaaaatgcaaaaaaaaaaaattaaaggagctaagatcttccaagtcacatataacaagtaaccgaatgtaccaacttgatcaatgtgttttcgttaccttccatagcccaaaaaaacaagtacgactctaggttatcagcaaaatttgatctgttacaaaagttctttctttactttttggctactgctgcatatatgagggtttgtgtgagcttatatttagctagaactgataagtgatataactactaaaaaaaatataaaagaaatccttaacagaaaatggtcaaaatattttcagacaaaatcatcaagacaaaatgttataaatatatataaattaaaatataaatatatatatatacattacctttga

SEQ ID NO: 180985 - DNA, 756 bp, Cannabis indica
atctcttagttttttggctacccgcaacatcagagtcaaaatacctaatgatctccaaattttcaaacttttgacaagtgagcatataatcatttgttctttataagtacctcatgaatcgttcggctgccttccaatgatctatacctaggtcacttaagtatctacccaacataatcactatacgccaaaactagatgtgtgcatacctgagcatacataagacttccaataaccgaagcataaggattcacttcactctttaaattttgctattggggaaatatttgacactaaacttgtcgccttttgcaacaagagttagattaatttactcccactaaacttgtgacatacacatccatcaacaacgttgactttaaatccgcgtatgagacaacgattagataaaatgtgataccattgatggaaagctttcttgagaccatagatattgaatcttgagtttacaactatagactttggattacttgacaccaaattttttggttgcatcatatatatagtttcctcaatgtcgtcaatgagaaaactgtcttaatgtacatccatctggtgtagctctaagtcaagataagctaaaagtgagatattctaaaagaatctttcgatgacgctggagagaaagtttctttataaatcaaatgtcttcatccttttgtataaaaatccttggtgacttataacaagatcctaaatgtcgttgtccttcatgaatttcatctcatcattcat

SEQ ID NO: 180986 - DNA, 1108 bp, Cannabis indica
gaaatctctctttttcacagccatcatatcttattgtgatattctcttatgaccagctttgttggatgatctgttccatcatgtatgtgtcttgccttcacacatgcatgtttcagatttgtctcacccacctagatagaggatgtaattggaattacataatgctgaacaatcaatgatgcctttgtaacgttttgtgtgtgtaggtgtttttttttttctcactaaatcgttttccgtcctatttcagaaataaaacttgttgatgttccagaaatgaattacacaactgcggatgagccatatcctcgaggtgaaatctgtgtcaggggtccaattattttccgtggctatcacaaagatgaagagcagacgtaacgatgttacttgtcttttcattctctgttgtctattaacttttgaatttggctgacaagattattcgtctgaacaggagagaagttattgatgaagatgggtggcttcatactggagacattggattgtggtttttcaggaggtcgtctaaaaattattgataggtgagatcttataatcctcagtaatgtgtgctccaatgattggttgttttgacaaaatatacaataagaagtgttacacactagagatctggattttgtgtattatccaaacttgtgggagcctttgtcatttcatagtggcataaaggactttctaaaactgttaaagtttatttaaaaacaaaaaccactccacctttccaaatcaccactccaccaccctttgaaagcaaaataaagttttttatacatggagttacaaacttaggctcaaatgaagtttggttacagaacttttcagactcaatctgatgtgaatctgattatataacttctcaggggttcttgtgattcaagcatttgtctaattattattttttttttaaaaaaatgaaaaatatatagcttaaatacaagcattgcaccacttattatgctgtttaccattttaggaaaaagaacattttcaagctggcacagggagagtatattgctccagaaaaaattgagaacgtatatgcaaagtgctaaattcgttgcccaatgctttgtgcatggtaagttgt

SEQ ID NO: 180987 - DNA, 531 bp, Cannabis indica
aatgccatgatacaattcaccagagtttcggcaagctaagattactcctagcatggttacttcatctggttttagctttctcaatttgatctgactgaagacttctaacgcttcatgatcatgatgacattcaacatatgcatgaaccagagcattccaagaagcaatatttttgtcttgtaattggaaaaacacatttctagcaaactctactgatccacattttgagtacatgttaatcaaagtagttccaacaggcgcagtgatctctattccactagctattatatagccatgaaccattttgaccaaatcaatttctttaccgtaaccagaagccaaaatcaaactaatcaaggataccctatcaaatgcaatattatttgatctcatttcgctaaacaaaatgaaagctctcatgtattcaccaaccgaagcataaccagaaatcatagtattccatgaaaccaaatctttatcaaccattgctttaaacaaacgtgatgcctcaatcatacacttaaacttgga

SEQ ID NO: 180988 - DNA, 865 bp, Cannabis indica
aaaatattttctcattccatgtgttcatgagtttccaaatcttctctttgatattgctgaataattccttcttatctcgcccagagtaggatggcaacccaaggtatttttcatgacaatcacaaataggcatggagaggtgtctatgaaaaaacacttgagcagctaaggttgtgttgggagaaaaggacatcacagatttgtccaaatttaaagtctgacccgaggctttatggtatatatccagcacacgcttaatggctaagcaagaactttcatcagcttggcaaaacaataaactgtcatctgcaaagaacaaatgagagattggtggagcattccttgtcaatttgaaacccctcagatggccggtttgttgttcatgatgaagcaatcttgaaaaaccctcagaacagatcaaaaacaaatatggcgatagtggacaaccttgcctaagtcctcgagtaggagtcagctctcctttaacttccccattgataagaaaagagaaagtatttgttgtaagacagctcattactaaggatatccatctctcagcaaaccccatttgcctcattaccgcttcaagaaaacaccattccactcgatcaaacgccttactcatatcaagcttgaaagtggcaataccattacgaccagcagttttatttttaatggcatgtaccagctcaaaagccacaagaatattatcagtaataaggcgatttggtaggaaagcgctttgttcttcagaaatcaccaatggaaggatcggtttgaatcttgctacaagaacctagtgacaagcttggagatgacgttgcagagactaattggcctgaaatctttcatgcgttgaggcttc

SEQ ID NO: 180989 - DNA, 538 bp, Cannabis indica
taccactttcaacttttcaaaattcactaatattgtttctttcatttgctctagattttaatagctatatagattaagtagtttcaaagtcaataaagtgttaaaaaaaaagaatatcaatcttgtttttttattttcttttttattttgtagtgattatatgtgtagtggtggagcctaagttggatatctttgtcacacctaaacatttttcattttaactttatgtatagattaattagttgttatatatgtttttacttacccactttgagagttgttcatttcaatttttgttcctacaactataattcaataataacaaaataaataataataaaaaaaaggttgtttctatcatttttacaaatataaaaaaattaattcatttattttatttataaatatgcaatttttataactaataccaaatatatactaaacaaaaagaagattgtaacccaaacaaactaatataaatatttataaaagatcctactaaatataattttagttttaggattttcccacaaagtac

SEQ ID NO: 180990 - DNA, 613 bp, Cannabis indica
agttttcttttttattttaatcagtatatatcgatgacaatgaagtaatcccttgcattgttattttacatacttttcaagtttgagatttttaacaacttcaaaacttaaagtatttaattgaactgaatataatgattaatattcaagaagaggaggaacaaaatttaattgggtttcaatcgtaccattatatatataacacaataatatatatacaacatgatgcaatctgtgttatttccaaagctatatttagaattttcttccttgaaactatgatttatatattattgtctgtgctctaaatttgttgtaaatttctcgtgtcaatttttgtcacacctcaaatataatgataacttataaattattaccgcttgtaatttaaaatatttatttttttaaaaaaataatcattaaactaaattaacataaaaaattaagtaaaattaaactaaaaatttttaaatcattttttaaattaattaaatacttggcactaatatgataatagtttaactaatggtataattatagtaagtggtgccaaattataagactatattagtatatgtcttcacttcaaaaattatagcaaaatagtctttgt

SEQ ID NO: 180991 - DNA, 765 bp, Cannabis indica
ttataattaatggaatactagctagggtttcatatgatcatacctaataaatataaatatataatagacaataaatatgaattgggtccccatggcctccttagtggctatctagttgttatgatttcttattatttgatctaatatttataataatatgaacaatatatatatgatcaaataatattgttgctccatgtgaaagctttgaagttacttagaaaatgctattcttcgtgaccaaggttttagtctctattattagtcacatatatagttgtggcccatattatatatgtatatggtttgtctattcacataaatttaatagtgccaattcaatatattattgtactatgcatataattaatatacattattatattatataagaaacgtcatagaggggttttggatggagactataacatatggataacgttggtctttgtgatctgtatacactctaattaatccaacttttgtttttcaagttacatgagttacaattttcatattgttaagaaaatttgtgtcctttttttttaataaataaaaattttgttaattggcaaatcaaataatagtttataattagcaaatcaaataatagtttattacataataatatattacaaagagtagaatcgacaagacaagatatataaacaaataagcaaaccatgttgttacaaaattgaaaataaaaaccttaatagtacattcaactagaatactaataagctgctagccatgaccgatcct

SEQ ID NO: 180992 - DNA, 1145 bp, Cannabis indica
aagaactttgcaaaataaaaaacaaaataaaaatgaacaatgaaatggaatagtggagaaggacgacggttgataggttgataggacttgattgatggatgctacggttcacttttccaatatttaataaatttaaatttcaaaaaaagtaaccggtacccatttatttaaccctacatacccctacatcaacccctacatgaaccccagcctttggatcaaagtaactgcccatccgacggttacagtacatcacggattacaatccgtgtccgtacagtaacgggacaaaatccggtccctatatatgtatctctaagaaaccctaaagaaagattatataagagctaatatgatttttttttaaatttatttttataaattttcataatgataattaaaattttattatatttctctccttcaatcatgagctttaaatttttattatgttaactattttgtaataaattacatacatttatattaattttagtgatgtcttttgattttttttaataatttacactatataattaatgtattgaagataatattttagtatttttttttattaatttttaattcatttaactttctaaaaaaacatcacatacatttatattaactttaatgatatattttaattgttttttataatttataccatataattaatgtattaaaaatgatatatgtaatattctttaaattaatttttaattatttaactttctaaaatagtatcaatttaagaagttttttattattattaataaacttaattttaaattattaatatttaattttaaatagtcttctaatctgtctatttatctatatatttttatatctacaatataaatttaaaaaaaaaataagtgtggtgacttgatctctttttaattttctactttatctaatttacaattttttttatttaataatattaaggaaaaaaaatataacaacctgattaaatatatactcagatcttactacttattcatttatacacttaactaaatcaaatatcacccatacatattccacttctacctaaatcaataagatatttattgactactatttatatttctttgtccattgaattcctacaattttttctttctcctaattattta

SEQ ID NO: 180993 - DNA, 511 bp, Cannabis indica
ctgcactttggaacaagctctagaatagtagagtcatggagatgcacaatgtgttgtggtggagtatcatttctaatgtcctttcgctttgagccattattaataagagattctttgtggatgatgttaattttttaatctttgggttggaggaggaatccacagagcatttattccttaagtgtaactttgctttctacctttggagatatatcctgtgagatatatattgtgactaattttggcgtccgtatgtgaaatttggtcaaattcatctaaaagttttaaaaataagagtatcaatgtgaatgaagtcttcatgtacacttctcttgtggcagatacgacttggcacattaggaatgaaaaggttcacaataattgtttgataaatgtaaatcattgtaatgattatacccactattcttatgcagatctaaaaaggtctctccttccccctatttggttggtccagaaggaggattggtagccccctcctcaagattattgg

SEQ ID NO: 180994 - DNA, 645 bp, Cannabis indica
atacttttcttttctttaatctacacatttaaattttaattctataaaatttttgaataatactaaaaaaaaatattaagtttttttgttttttttgtgttttacaaatttatatacaagatttataaaattcttactgtttcgttattaatttattttttaaatgtttaaataaattatgcaattaaattttattttgaaaaattaatttgtagcaaaatcaattagtattctacagcattgcatttgagctattaagtaataaagtcactaatttttttttatctttacaaataaattttacagttgtctttatccatcttccattatattaatggaaaatagtttcggcctcccgttaattaattaccgttaatatcccttaggttattcgaatttattacatttagttatatcctttagttataatctcttacatagatatatatatatttattatattttatatttagttataatatataaatatattataatgattatacttttcttttctttaatctacacatttaaattttaattctataaaaattttttgaataatctaaaaaaaaaatattaagttttttgtttttttttttaacaaattttatatacaagatttataaaattctaactgtttcg

SEQ ID NO: 180995 - DNA, 791 bp, Cannabis indica
aaacaccttcagggcaagacaatgaacaagaagtgtcctcagaaggatcctccacatcattcttatccgcattctcaatcttctcagaatcccaagggaaatctctaataactccagggtgccgacggatgattttatggggtctagagcatagagatgcagaagactcaaaaaatttccgctttttgaagggagtaactctctcatttgtttcagaagtaggcttaacaccaatgtctcctcccaattgtttgatctcatataaatcaagattcccaaaatgtttaagctcatgcaacaacgtttcctgggcttgaaagaaggaagcaagagcttttttctcatccaatcccgaatccacatcttggccctcaattgattctttagataggccatcgggtcccaacgcctcaagagagtcatggcccacgttggaaagataagaacccccacttaatttattaatgttacccttcatttggataagcccacggttaggattttcaggcccatcttttaatattacactcctttttaaaacattaattggaattgtaggccccactgaagttgggatgtcattattagtgtcctgaagcccacttccaaccggcccaataaacctgtgtgagcagccctctccatgagatttattaattgtaaaccctgaagcccaatagttaaaacggccccatttccccatttgtttgatcttcaaactcggcccacgcaaaacgagagaccgagccaactcctctgcacgtgcatcacgtcgatgcgtctctttgccg

SEQ ID NO: 180996 - DNA, 763 bp, Cannabis indica
tacggtttcaacggtttggactatcaccaaataattaaactatcacaaatacaataaagcttgagcaacacttgtcaaaaatatcataagacttgaaaatacacatgaaaaaaaaatttaagtttcaacaatataataattagtgggcttgaattggactttaacatattggacctaaataaatataaaaattagtatttttataatatgcggtgcgatgtggtttgaaccgcatattaacattttaaaaccacaaaccgcactgcatcgtgcggttcaagaaaaattaaaactgggaccgcaccacaaagaattttcaaacatgttttttttgtggtgcaggcggttcgagcgatttaatgaacacccatacaaaatggactctatattttttaaaatggtaagaatatgaccctaagctcaatttttaacaattttattttttaatataactaactttaagataatttatgacacaaataaatacataaaatataaccacttttttcatacatctatagatcagattattattaaattttatttaggacagtcatttaatatatcatttttattattatttttttaaatttaaccgtttgtagttactctaatgattgtctgatatatacattgtttcttttatataatatcagtaatatatacattaaaaaacatatttcatattttttttttaaaaaaaaactaattaatttgtaatattaatattttttacttaattattaatattacattcaattaa

SEQ ID NO: 180997 - DNA, 534 bp, Cannabis indica
tcataataagaatatggagaagttgtggagttccgacctgggtccattgatttatcaataccattaatgggactaatgataaaagagatgatccaatgaatatttatgttatgattaccaacactctttttatgtatataatatgattccaatcaacatttaacgccaaagattggtagtaaataaaaaattatttgaacttgcgtttaatggttatgactgcactaccccaatttcccaaatcacttagattgcactgttagcttttcaatctttttttgactttttgattttaaatctcaatcctgtctttctaattaaatttgttgtaaaatataatcattattaattaaaaaaaaaggttgtgttagtgcaaatctacatcacatgtaataatgtgttagctccattccatgactcacatgacaactttaatcactgtgagttaaaaaataaaataaataaactttaataaattactaaaaaaaagaagaaattttcaacttcagctagatactattaaatagagtcagg

SEQ ID NO: 180998 - DNA, 678 bp, Cannabis indica
gagagaaaaaaaaaatttaaatactattttaatgtggatattacaattttatacttaaaggttatgaaaataatcacaaacaaacttattacaataattagaagaaataaaaaaggacaaaatatataacaaatatattaaatgtgggagatgataaagtcataatatcttaaatatataaaaagtatctattatttataatcatcaaacggaaatgtgtatatcaaaatagagaacttctctaatagcaatgtcgactttaaatagaaggaagactcattattattcaagtaggcgactcaggaactaaatttagaatctagctagcgtgataggaaatttttcaaggtgcttttagcggtgagacaattaactgaaatgtcataagtccaaatccgaatagaaagagaacaaaattcatgttctcaagattttggacaattaatagtagattcaagaatgagtgcaccaaaacttcaatgaactagagcaatctcatttcttataaagctcatagctgatcagattgaaaaagaaaatagcaatacttaaatcatgtaaatctttatagaataataatctatataaatataaaattattttaattttttaaaggaagcatttatcaaacactaaaaaattacacaaaagaagcttcagccgtatctataagccaag

SEQ ID NO: 180999 - DNA, 1445 bp, Cannabis indica
cattggattatgctaatcatgaaatgtgttacttcggtctcatacactttttgtaatgactgcaaaaatttggatatggaatattaagtgctttggaaattaattaataataataagaagaatattattatcattggtagttatatgtgaatgttaatattaaatataaaaagtattatttttgtgattctagctcggtggcgatggaaaatacaacgaggtgttattctagtcacatcggtaaacatagaacctttagttttaatggattattgtatgttggacttgagtgttgtgtttaggtggggtaatggttttggaccatttgacccctaagccgctcattgatttacgttttgatgcaagggtaatgttgtcgagtgaatttcgcaacaccaaaatgtattatttaattaatataaaaagagaattttcagggaagtgacaagtgcgagtattcgacctagaatggcgagtactcgactgggaatgcaagaacaatcaacaaggctggaaaaatatcaataagacaaagaattatagtggttcagtcagattgtgatctgcttagtccactgtagcaaaggattcgtaggtgccattttcatggtggatcacccctttatatacaaagtaggtgtccaatcggttacataaggatcacattcattgttaatccattatttacatattgaattgcaataattaaacccaaacaacgttaacattaataaatgtgtgacagttactaagttcatcaacgtatgcgtcttccgcatctgcgagttgactgttcatgttccgtttgttgagctcgcaggatcgccagtacgtttggaacgtctgcgtccttaggtaatcgccccttgtagatatcgcatgttggagctagtaaaatctggacatgcgaatttatattggtctgtcagggctattgggtcgttgggaccaaactgcatcatagggagttggtctctatacttgtcgcggaaatatagaggggacactcgcacatgttctgacacatgcgagttggatctaccctgcatgatgagaattacggttacgcggtgcgacttaagtcgcacttgcagtatctcgctggttttatcctgagcgaggtctaaacttcgagaagtctctcacggacattcagccttcattggaaatctgaatacacgtgtcctttaaagaggagtctggtctcgagtttctaggtgagagaaatctcactataacacatgcccctagtttcgcgatgtgacaagagcggtcactgagggaaactattactcgagagacaggtgaaaggttgtcacgaggaggtgaccttttggttgtcccatcgagggtttcgaaaaatgacggctgtaattattaatttttattatctctagggtgccacgtcacaaaactcttcggttttcgtgtaggcgtggccatag

SEQ ID NO: 181000 - DNA, 651 bp, Cannabis indica
ctaaacttacctttggcgtattctctaattaggaattatagaaacaaaaaaaaataaaaacattgacatatacttatcagtaaaaaaataatgtttaaattcaagttcttcctaatttaattttaattataataaacatttagttattataaattactttttgcgactaatattatatattaccagaaatagaagaaaacttggcattgctaataacaatgctcagcatagcatattgatacttagagcatgtttggttttgttttttattttttatttttaaaaaagtatttttagaaataagaacaaaaaatagtttttgaagtttttcaaaacacaatttagttagtgttttcctaaaaaaaatattgaccaaaagtaatatgttttttaaaatagaaaacaacattttgctattttcaaaaatcttattttttgtaactttgttttctgaaaactattttcaaaaaataaggccaaacaaacctagttgttttcaaaaaataattttttgtttttaaaaacgtaaaaataattttttagttatgatgccaaacatccacttagtttttcgaatttataattcattggactttattcatttgtgtaattgtatatacatttgttttttttttaacaatttaataacaa

SEQ ID NO: 181001 - DNA, 632 bp, Cannabis indica
cctgggacctgacaattttttcccgtcacatgactttcttctcgaggaggccactcgctcaaagttaaccaagagatggttcccttctatgaaaggggagccttcgcttctttgttcatcttcttcaggttttagttcttggacgaggttgagctccgggagtgatgtctgcgaacaccttagacttaggcattttccttaccttggtccttgccatccttccatttatccaattatgcaacctgatgggctaaacttttgtgaagtttgcagagatgcgtaagaagggattcgggcgtatttttctatttttttttttttcaataattttggctgaatacgtatcttatctctgaattcatgcttggatttagcctttgaaagaagaattgaagcgcacttcactgagggggacttaatcgaaaatgtttcctgtttttggatgcatgtgcgtgttaaggctagtcaactttggacataaggagttgtaattgtcagcaaccagacaactgtcagcgattagatacactataccccccaaatgagctagcaattttgcactcaaattctcgatcattttcttggagtctaacatgtgtcctcttcaagtttccgaggagtagagttgagtg

SEQ ID NO: 181002 - DNA, 1234 bp, Cannabis indica
agaggactggattggacatgtgatctctctctctattgtttgcttgttttattttttattttttttatattaaaaagggactattattttatttaaatatattacttttaccattttaaatatattacatattacttttataaagttatattaaaatttacaatttatactatttgtatccaacacaaaacataatacaaagatgattcaatcaattgtaatcaagactgaattattggaaggccaaatttcttttttctttcttcttattttattttatttatttatttttgaaggaaaatgagatattctcattagaaggcaaaagccaaaaaaatatgagtcaaaaggactcaaacaaagtctggaatcgctggccaccaaaccatagctatgtctaaggaaagaaccacccttagcaagactatgtgcaactgaaaaaccgttttttcgcatatgtcaattcaatagattttcctaaaaacattaaggaaaagtacaactatttgtaataatagattggaaacttattaccgcagaatacaaatttgcagtaatagaacaattaatggtacagataaaaacttgacacaagagaattatagtgatatttatgttctttcaaaaactcctagactaggggtcacgcccaaaaaataaaattaattagtaaagcattaaagattataaaagcaattgacttaaataaaattagactccctttaatgatttaacgcaaccatttgtaatctaccttgccaatacaatctctaaaactcaccaagtaataaaatttcttcagctattgatacatgctcacattctcccgaaatgagttttttgacagatttcccaccaggctatgtgcaactgaatcaaatattaagttgattgatatttaattagtatttaagataaatatgttgaaaaataactttatattttagggaaacaatacactccttaagaataatttaaaaaattatcttattttataatattaggggtgttcattaaatcgctcatactgctcgcaccgcactgtaccgtaaaaaatagggtgaaattttttacggtgcggtcgtggtttgaattttttctaaaccgcgcggtgtagtgcggttttgaattgttattatgcggttcaaaccgcaccgcaccgcacattataaaaataccaatttttatatttatttaggttccaatatgtaaatgttcaactcaaagctcacta

SEQ ID NO: 181003 - DNA, 708 bp, Cannabis indica
atggtcataccacacctcacatcgaaccacaactaaacacactcctttctcgcttatttttgaagtgaagccatgattctcgtcaaaattaatattgcttctcattgcacataatattacaaacaacatcgtaatcatttgttgctagaagaatctcttgacttacttgatgagagaagggaagaatcacaaataaggaacgtgacttgctaacaaatggtcaaaagatatttcgatacccaagtacacagtaaagagtttgagataggggatctagtacttagaagagtttttctcacaacaaaggacccatctacaggagtacttggaccaaattgggaaggaccttacaaaatatcctccataattcgtctaaggatgtacaagctcgctagattaaatggggatttgtgccaatagcatggaatgaccaacatttgaggaaatactatcagtgaaggtagtcgcaaattttctcaaaattgaacaattttatggttttttagttttaagtgccatttcaaaagcatgatatttaaatttttttttagacattattttttttaataaatgtttgcactttttttcaaaaatgtttcttttataatgttaagtcatcacccaaagaagttacaaaagtaacccaatgcatttataacttagggggcatatagggtatacgccataactatactactaccactccac

SEQ ID NO: 181004 - DNA, 931 bp, Cannabis indica
aaataaaagatgaagagaaagtatgaacaaatggatataatttgatggtccaaattgaatttttgaaatcaaaaaggaaaatttgacatgaaaaaaaaaataagaaagaaaaaaaaaataatgtatataacaaacatatgtatggttatgatggttagattgagatgtatggagagagtgtgtgatgagtaaatggagaaaaaattctgtaataaaacaatataataacacaacttaatataatttgttgcaaaaataataaaacaaaagaattacaccatgtaacaaaaattaagaacaatgtgaaagcatccatattgacatattgtattaagggcttttttcataaatgtacaacaaaaacaacataattacaaaaaatgtgcaaaaaaaaattattttaaaaacttatatattttgaaaacttattacatgaaaccatacattttaatcattaaataataaactatgtttattaaaactcaaaataaacaatttcgtaaaattaattaaacagttttataaaaataaacaagttaatttttttattaaaagataaatgtttattatctattttagtatgaattattataatttaataagatttttttaataaaatacaatatcaaaattataaacattaatgtatataaatataaatcaatacttaaaattactaaaaataaacatgacacatagagtgatataataaacatatctgaatattattattttgtttattaaattagtatgtttaataaatagaaaacaaaataaacatatatatacaaagtattttatattattagtatgtttattataattgtaaacataaaaatagacatagacaatttatactatactaaaataagtatattttttttttctattgtttcttgtgacagtcagtagtcccgtgatccgtaagggg

SEQ ID NO: 181005 - DNA, 747 bp, Cannabis indica
ttatgtgttctttttaatgttttttagttaatattttaaaaatcaagtgtcaaactgatatccaattaaaaaactgatctaatccactacaacttgggtttttaaatccaagtactttgaggggctgtgtttccaagacattattagagagtggaaatgtattttattattggcaaatatgtttttgggttgtgaggatggagttttgggtagttaatcaacaatattgttaagtaaatctatgagtaatgttgacatggtttgtaaccacagttttcctccaccataagtgagggctctcaatctatttgagtgagggtcagtcacaattctaacccctgactcttttttaaaataaaaaaattattaattggattggattgaattttgaagcatacttggattgaatcagatgataattttccaaatccaaataataatcggattggattggattagaagaaaaatattggattggattggatgcccactcctagttcaaagaactaaccaccaactaatcagtaagttaatgttactcaaacaatccttaaccaaaagcaggcagcaggacaacaatataggtagctataaaaaaataatagtaagaaaaaaaatccgaagtgacaacaaaatttaaaaaaataaaaaaataggtaataaacgtcactgcgacatctttagtacaaggaatttcaacttactactccttttactagccacatccagatctgcatcatcaaaaac

SEQ ID NO: 181006 - DNA, 1188 bp, Cannabis indica
catcatcagactgctcacgtgcttaggcaaatacatctccaaagtatgtgatgctaagctctcaaatgagctgaaattctattattgttattgtcttcttttggctttggcttttaaggtgtttaattgctccttgttgatattaaaaatggcaactttttgtctcattatttttgctattattaatgttttgttgttgaccatcaagattattattattatgatcagctggcttacatgactgatccaatattgggttttgatcatgatcaggtttaagtagagttcgatctaaaaatggtgggatggtaatttcaagaccacgagcgattctagaccatgattcaataaagtgaaaagctgaaattccatctacaataaaatggtgaatagcaatgcccactgatactccaccacacttgaaataagttacctaaaaacaaattaaaaaagataaatcaaatcttatcactactatatttatatatgtatatgtatttaaaaagttttctttttcttttttttttggaattttcaagacatatatccccaaactttgacatatgtgttttatattgtgctttccaaactttcctctatgttaaataattactaaattagtgaaaacttttaatcacactaaattgtgatttattttattaatatatattttcagtcaacaatatatataagaatattaatttataaataggagaatttaaaaaaaaaatacttttctttttatacgtttgtaaagttttaaaatcacaaaaatatattttatttagcaaaaagtaactaaaaaataacaagaaattaatctgaaaccaaaaaacaacctcataacactcataacaattacaatacaactataattataaataaaaagttcaaagaataattaaaaaaaaaaaaaaaaattgtgcgtaaacattttcttggtaatttttttgcaaacgttaattagtctattatgtaaattttttttataaatagtgttacaaggtttttacttttaatcataacgaatttgtaattaaaagtaagattttgtgtactcattggtaaatctcaatggattaagtattacaatctcaaaacattctgaaaaattaaagataatattagtagttggtatatgtcaaaattcacctgaggtaacctaatttagcctataattaatttaag

SEQ ID NO: 181007 - DNA, 659 bp, Cannabis indica
ttgaatttactaaatagaagatgtaaaaccaattgagtatgaagggtttttcgtttgaaatacataatgggtcgttccattgtctatacaattgttttgctctaggtatgacatttgtgagtaaaattgtgtgcatataaatatagatatttaccattagcaatggcctcaccactgaatcaatcactaaatcaagtttataagtccataactacaaaatttagtgcatcaccaataaatgactaagaccaaatccatttctaaaatcctattccctgccactaactcctgttacggctcagctaagaattacagtctagacgaccatgtatgtccaatgaacttagggactccttcatcaatttgcatgaaatctcctccatctccctctcggtccaggagataccggtctcaggcgatagaaccttgctgcaattgtgtcatgttgcaaagcactcttaactcagtgaatgcttcaaaaaacaaatgtgttgacctggtagatgaggctcgaaagaggattatcgagcttgcttcgaccatgtactgacaaaacaagctccagggtgaaggaagtgaccaggtgaagatggtggaagcatttctggaagctgtcaatgactacctcaaaggtgaagcgagagtccctgaggtaattc

SEQ ID NO: 181008 - DNA, 778 bp, Cannabis indica
cccctctaccagagaatccatgaattccgggcacccgcagtagcagcagggatgggaaagacaaataaccagccaactatatatgcctaaaagcctgccttccttatagaatgggctcctccttagaattaacgagatctagagtcttggatgaatcctcttgaaacgggtcgccctagaagactcgatggcttaacagcccagtgaataacccgattcagagagataacccggtctttagacactcgccctacttctaaggatagatagaaaaagttgggaagtaccagatgcggaagcagttccagtcccagctgctgaggtggcgtagtgacaggtgggagcaataacaacagaagcagcggaagatcctgcagtagtatattcggttgtttgcggtggaatagattcaagcgtccgggccagtagatccagagcaaataggcgttgacttagttgcttttgcagttgattctaatcccgatgttgatccgacgcaacttaccggtgatagtcgcagcaccaagagctttcaagggaggcagacatgtatagatagtagagtggcataccttctggatcgaggggtcccacccggtaaacaccatacaggacaaaaataccgtgcgggggggaggaggccccgttctcactcaaggctcaaagcatttacttttctagttagagaccaaacgtcttgggggctaaacgtggggatccgctcaagggacctctacaggttttaggtaaatatctcatgcgtttcccccggactggg

SEQ ID NO: 181009 - DNA, 923 bp, Cannabis indica
gtcgttttgtacttttttggtttgtttttgggtgttgatgtggatggatggattggatcaattgaaatccaaaatttgtgagattatcgtctcgagagaaattgggtttttatgtaattattattactttattaaagtaggtgtggaaaaattatgatatgggaccactcacttattaaaatgttataatttggagaagaaaatgaatgattttatgattaagattgggataaaaaataaaagtgtggtgcagtgtcactaggataagatgggtttttttaacaaagatgaaaaataaatgggaaaatagataagtacttagtttatttatttttgactattgttaagttcttaattattaattgtgaattaaagagaactaatttgtcttaaagttatacaacccaatacataataaatttgaataaaccatctgtgttattattattattttgcttagttattttttttacttagttattttttctcattctaaatgttaattcttaaacgatactactattttctagtttattttgttagacatttatatgtataatataaaatatatgtatgtgtatataacatgcggaataaataaacatatacactatatgaatataaggatcgaaatacctccagccattgattctttgagcattaatcccacataagcttgatctgcaaaagaaaccgattgatgtgggtaatcgggcttcctcgctctctcaactctctttagatggattttgctgttatgaacagaatgagtgaggagctcggggaccgagaccctatatttataggtgagatactccatcagtatctgtgccacattaattgtcagaatattttgacaattaattcaggaaatcaaatcaggtaatgaatatagaaatctgaccatatatagaatattacat

SEQ ID NO: 181010 - DNA, 917 bp, Cannabis indica
gcataataatgcaaagttcagttataatatttgaaaagaggaatgttggagcccacaaagtaagatttaaggtatgattcaaaacgtaaggattgtgcaaaggagaagtaacttttatgctttggaagaaaaaaaaaaagaaaaaaaaaaaggaaaatcttccctaagaaatatcaaaagagcacaactttttatgctttgtgatacattatgtaaaagaataacttttctttctttgattatcgtaacccaacattctcatctttggaaagtattggaaagttatggcatataagggttcaaaataaataaactaaagtaaaagtttaaagatggaacttaaataaaggaaaaggattaagaaaatcataaataagcatctcttctttaaaccttaaagatgtttctactttagaatcataaaaagatcattatcttcacagctttaaattaaaatccctaaagcataagaagggaatttgtcgcttatggcttttcaaaagatgaagggtgttttcggaattatcactctttcaactctaattatttatttagatatttatattctctaatacttttcatgcttctctttaatttgttacttggttttttttcctatattattatttatatcttaaaaaggaagaagcctcttaattgttagaccacttttcttttcactgtttttcctttttacatgaggattgtattttttttttttcttgtttttatccacaatctcagacacttttcttataaacacacacacacacactattactatatccacttaattagttttactcaattatttgctcaatatgaaactgccaacacacgattggcataaatagtcatgatcccatacaattggttcttttctatttaattaagttttattaatagtaactttggtc

SEQ ID NO: 181011 - DNA, 565 bp, Cannabis indica
taacaaaaatcaatcatatgaattattataattgattttaattccttttttttttttacaaaatgtcagataaccacatatacaaaataccgaatctgaaaaaccttctgatgtaacgaatcttacgataacctatatttgttaaccaagcaaaccaataataaaatataactaaataaagatatcctataaccatgaataattttaattaagaattaaataacacctagtatgataacgagatttccctctatctgtcttttaaacaacttaaaataaaaaactaaaaagaaataataatgataatatggatggaatcatgtgaattggatgatgttatattattaattataactaatatatcatccaaagtctctttctcaaattatttattaattgccaatctatatttggtctatcatcatcacatgtcccccaaaccaaaaacttaacaaaacaagttggttccacccaactgtgttagaaattttttttcttcaaattagttaattttaattaatattattggtttggaaggtataacacataataacatacggcttga

SEQ ID NO: 181012 - DNA, 968 bp, Cannabis indica
ttaacgattaggtttgatctcccgttaacaaataaacccaataattaaacccaaaaaattaaacaatcttttaaatattaataatctctttttaaattaaaaaaattatcttagccacatatctctctaacaaacctatcttgggggaatattaataattttttttatttatttttgaaaaaagaaaaatatagataaataattaataacagaaggacgaccccaaccaaactacaaacatatgaattcttgacttttctcgatccttgatggatgtataatacataatacataatgtacatttaaaatatgtatataataataatctgatcgaggtatgtatatatcgagtacaagtcctattgggttttaatttttttatgttattaattaccgtttatgtttatgttaagattataagattaattaatttgtgatttctttctatacacataataataatctcacctaataactaataatattttttctttaatttttaatttaaaatatgcatatcatgtattaaacggtaataattatgataaataatttagcataaagaagtgtaaagtcctattgtgattctcaaatatatgtaagagaatttaattcaaaaaaaaaaataatataaataattacagaaggggcaactcattgctatcggggaagaagaagattgattgtgttggcttagagatttttgggcttgggcttaaaaaaataaaaagaagatgaaatgggctgtaattagtatttaccttatatgtttgtgcttatttttagttttatttttaattttaccaccaagaggagaaggttgaaaaatattagaatatgaaaatattattggtgcttattagtaatttgcaaagaatgtgaaagtctataaatatatagttgtgtagctattattagatatgaaatgagataatagaacttttttcaattagaagattaatgtacat

SEQ ID NO: 181013 - DNA, 1028 bp, Cannabis indica
atattttgcctagtagcaaagtacacgcgctcttgggagtctgtcagctccgtgtactgggtgtattgtggagtgtacccccttttttggcatttctcctccgtccgagtactaccttttgaggatcgtttactcctcgagtcctgagaagggcccgccaggctagcggttggagcagagtgcgagggagcttgtccatttatccctgagggaattccaaaatgagatgatgctggtgccaaggcctggccctggctatacccgggagtagcagagaactgtatgccactcatttgtggagttgcggtcggggcagtacccgagggcgatactccgggcatataccctgctatcccggtgggatagtagcctccataagccacgatttgggcttcttcgaggttgatatatttttggactctcttctggaagtcctggaggctagcagccccttcttgctgcaactcattccagaaaggagtcccagtacggattcctgcttggagaagtgcaagctgttgtccgtcatcaaccttcttggttttcgaggcttcctctcggaacctcttgatgtaattcttcaaggtctcggtgggcagttgcttgatattagtcaaggcactgacctccaggttgacctttcttgcggcgacaaactgtctccggaagttggtctgtagcttgttccaacagcccacggatcctggttccagttttttgaaccattcctccgcggacccacttagagtgagtgggaagcacagacacttggcgtcattgctgaccctcatgaccgtcatgacacggttgaaccgtgacaggtggtcgctgggatcggagttcccggtatatgctgccatttcgggcatcttgaagtttttagggagctccgcctccaggatgtgcttggcacatggctctcgatcctcgctgtccgaatcggagtcgtctcccttctgcctccgggagactcgggcaatgtcttttcggagtatggcgagttccgccataattccttcattcaacgt

SEQ ID NO: 181014 - DNA, 531 bp, Cannabis indica
atgagtacattactctattttccacttttccacatctaaagaggcccacaagagatattgtgatttaatttgttttgcaattacattccttttctttgatgcaataattgagattaatataaaatgaataatacacattcaaatgttttaaaatgaattcttattaaaaaaaatacactaaaaaaaatgataattatcattaaacagcctgtgattgacaatgacccaactgttactacaactatgttttccacaataaatctctaatattattatttatttgtaaattagtacatatatatatatagtaaatatgaatttgacaactttcttgatccttgaaaaattctacgccgtccgcaaatataagaatatatatatagaatcaagtgccttaataaaccctatataaaggggtacataaccctagcacaactacctcacaacaccaaacaataataataataattttctttcttgtcttggcgatcttcttttattcaacctttctctctctaacattgaaaaaga

SEQ ID NO: 181015 - DNA, 646 bp, Cannabis indica
aattgtttcttgctctctttagattattgttgaatagggactggaatatcttggttgaatcacaagaagtttgtctgacatgaaaattaaatttagtttagaacagaaaatgtgtccgtccaatggaaagagtatctgtggtctggtcaattatgaattattcttaagtttcttttgaagttaatataaaatccttcattttttttttctatgacttttaagatttcaattgtcattcttatttaagataggcatatgcaggggcggatgcacgttatgcaaccacaggggccatgcccccccactttctctaatatatatatatatatatatatatatatatatatttatttaaatatttacttttacaaattatgcatgcaatttaaatcatgtccattaaataaatgtatttaaacaactgcacgcagatgaaattccagtcggctagaaattatgaaaattttcatgttttctgaataatgtagacattttagagctaacagagaaggtattatttaaaaggaacattaatagtttagtacagaaattctcatagcgtgtaacctgtttttgttcactttgctatcgtccatgctactgcttcataaactttaattaagttactattctattatcctaaatc

SEQ ID NO: 181016 - DNA, 745 bp, Cannabis indica
gtcactttgaaaggcctgttttatttcatgtttattaatttgtaggattactactcgtttgatgtgcaaatttattttgttacaatttatatgatttctatcttttcaggttgacacattggtgtgtttattgttaaattggtaatattgtagattgatcctgtattgataaactgatttaagtgcttgcataactgtctgaatcggcaaaatgtaggtgtaaaaagaggaattgattattagtttgtttgtagtttcatatatggggatcgtgttgcttttctctttcattctcttttgcatctgatttataaaccttttgtactttgctcattgttctccaatattatctgcatagaggatttgaacaacaatggttgtcaataacatatctcaaaggcaacattttttggcaatggccttgttgctattgtggctggtttgcttgggaatctacttgttgactcattatcttttggacctgttgcaccgttttatgttgcgtcgtgctttcttgctatcggtatggcagttatattatcttcttggtcagagaactatggggatccttctgagagcaaggacttgcttacccaccaactaattaaatggcttctcaattactgaattactgtgaaatgactttatcaatgtattgaaataatgggacgaaacaacacttcaagcttcaaaattgtaaatatatatttatatatatataaaatcttaatggaaaaaattctac

SEQ ID NO: 181017 - DNA, 766 bp, Cannabis indica
  modified_base (78)..(78): a, c, t, g, unknown or other
gatagggaaaaagatgagagtcgaagcgatgcgctcagaagagagcagagtccgagcaggagaggtagatgaaagacncggggtttttggcctaccatggtagccaagaggttctgggctgagaaggtccctccagattgggaggcccccagattgggacggtcccgtcggggaccaacccccccagaattacccttgccctcaccaacggccgatgaaatcttgaggagggcgctaagcagggtcccaatggcgtcgtcagtggccgaatcatgctgagacaacatgccaaagtctgactgagtagcttcctcaagcctcgccaccctgctcttcttcgctttgcttttgcacttaggggacttcgacataagcctcttccgtcgggtagcgttttgggcctcgatctcctcagcggtcatttcggatagcctcatttttggaagatgacgggggtaggtctctgcaaggcgggaatgatcctcagaacactctattaaaatcggcgtaggtgtttgatttaagtgttttagagcgcattttaagaaatcaggccaaataaagtaagaaggataaggagtggggatacctagggggatcctgagttcgcgaggccaggaggaggattcgattaagtcttcacgagaaagaaggaactttattgatcgaagcttggggtcgagggctgtgactttgcggaccttctcagaaaaaatatccccgataacgttctcctcgttgtcagcaatagttgcacaaaagtacc

SEQ ID NO: 181018 - DNA, 701 bp, Cannabis indica
gattggctctagttgatctttaatctcttcatccactggttgtatcatttcaggcccatcatatttcttaccgctcctcagggtgattgtcttgcagttttccttaggattaacttcagttgtactaggcaaatttccttgaggacgggttgctacctgagttgctagttgccccaattgagtctgcaaatctttaatggaagatctagtttcagtcatgaattgtaacaataaatctgtctgcaaactagaatttccactagagctttgttgctgagtatactgttggttctgaggctggttctgatttctttgctgatagaactcactgttccttcggttacctccttggttgaacccatagttgttgttattctgagaataatttccaatggcttttgtcttcatccacttggtcgaaatacatccacatctgcctgacactcaaaaagtagatgggaccgtccacatatctcacagaccacttgagcttgcttggcttgcactgcgatcagctttgttagggcctcaacctgagctgtcagctttgtaatggcatcaacctctaacacaccagctaccttcttagattgactcctttcagttggccactgctggttgtttagtagccatctcctccaatagatcatacgcctcattagcactctttctcataaaggctccgccagctgctgcatcta

SEQ ID NO: 181019 - DNA, 518 bp, Cannabis indica
aaaatcaagctatgagcttctgctggaaaacgaacatagctgatcaataaaacggttataattgatcaaagaaggcacaacaagaatccacggataatgtttggggcaaaatgaaaataggaatgggatttcagaggtggaagaggcggttgtggtttatgagcatggtgagaatggcagaagaagaagaagaagaagaagggttctgtcagattcgagaagaaagagaaagtgaaaggaaaagaaaaagaagaaaaaaaggaaaaaaagtatttttttttaatttatataaattgttttttttttaattttttttaatatttataattatttttaaaattaaaattacgtggaccgctaaaaatttgccacatgtacaagtgcgtacacgtggacagtccaccttggcacttaactgtaatttttggacggaggtgtgcagagcaaaacggaaccaaggtttagatagttaaaccgccaaaaattcaatttttgtggttaagtgttacaaaccgtaa

SEQ ID NO: 181020 - DNA, 982 bp, Cannabis indica
gaacgttgttttaggtttatatcaaaacatgtttctttgttggaatttattaaagtgtactgtaaaatctcccagtgaagtttttatctatttatttttatttttcctgaaaatgatgaagtttttatctattagtcagtcatggtcgctcctattttagctgcagttagttttgttttttggggaacctaggcagtaatatgggaggacctactatcaagctttttaaaaaatgtgaaaaagaaacttatattacttgtcgaaaaaggaaattacaattgagtacaatttatctttggctgaagcataagtacaaactaaagcaaagaggaggaacaaatagaaacacaacacaaagagaatatttacagaatagggaaaatacctaattttttttcaccattgaagcccaaatagaatctagcagattaatttttcctgcaccaaagacatgtccaacggttctcttaaaatacagatacagctagttcttttcaagaagatgactatacagttgctattagcacatagttccagatggcagatttgccaagaccagtagtattcttagttgctagtttactgggtgagtttgctagatttgtggcataagaataggggaaaaaaaccactaatctgtctaatcttcaatttttgaaacaaaattccagcttgttaatgtaaaataatctttatatcttcttgtagttgggctttcacaagtttgctttgattttaactgactgacttgttaaaagttattataagtcttgcaataagttatattaacatgtatcttttatgtagagcattctgcaaccctgctgatgttgaggcatttactgaggagaagaaacaaactcttttggtcaaacgtcatggaaagggtgctgattttgttcgtgcagtgcaggagatcgttgatagttatgataagttgaagaaacaagacaaatctgatgatgtcaactctgaaggagtt

SEQ ID NO: 181021 - DNA, 577 bp, Cannabis indica
attatttttttaaaaggaaaagtaaaagtcttttttttttttttttttttttgtaaatgggaaaagtaaaagtctttagtggaggtcaccttcattattcttgcaatatttatttggcctaaaattaaattttccaacccaaaatacatattaacaaccagaatataatcaattgaaaatataaacaactagaatataatcaattcatagtattaattaatatattgttaagtctcaatcaaatagttgtaagagcataacaataaaatgctgaaaaagataatgtattattatgttttagcacatttttttaaagaaaatattactttagtggtgtgaaaaggacatattaaaatttgtatcaaatttaatccgatataatatatgaaaattacatattttattgatttttatacaaatatataatttattttagaagaagaaataaaaagttaaaattactgaaaaaaataatataagataattgattatgttgttagttactattcagcttaccctaaacctatttcttatatttttacactttttttaaaaaaaaaaaaaaactctaacaaat

SEQ ID NO: 181022 - DNA, 637 bp, Cannabis indica
ggacttcgtcagtttttggactcatttgctggaacagaacagtccactgcaggtgctactgttcctgttggtctttctcctgattcatcaaatgggttgggaaatgagaagcaggagtcaaagcctagggcagatgtgaagcttagtcatttggcttctggaatggactcaacatcttcaatgcaagcaacagacacaaggcttgccgatcttctagatagcacactttggaataggaaacttgctccttcatctgagcggatagtttatgctttagtgcaacagatatttcatggaataagagaatattttttagcctctgctgaattgaaggtttgcttcataaataatttttttttatatagatttcagtcacgcacataacatttattcaattatcaaaaccaaatcattggggtgcttcataaataattattgtttgttatattatccctgcctacagtcttttaaactttttatattcatatattttggtctttgtacttccatgttttccaatttgctttttgttttctgaaaacagtttatcgtattatcaaatcggtaacagctgaatccatctgagataaaaatgtttaatgtcacttgggctagcttaagtggtgtgagaaggaga

SEQ ID NO: 181023 - DNA, 853 bp, Cannabis indica
cactcttggttcaggttgattttaagcatttatcccctgtgttaccctggtcgagactgcatcacgttctaactcaacgttttgacgctgcgcctcttctagacggcatctcaggcaacagttttctgtttcataagtaccttctcccatatactgggcacctcaacgattgagctcttcatccctcgtcttagggttctagccactcccacgttgagttctcctcgagcgtgttgtccgggtactaggaccaacgtcaggttgggttctctgataacgtgtggtccgtttacaagggccacccttaagttgagtcctcctggaataggtggttcgtatggaccgtgggttggcagttcttttggagcccatgggatctttcccagaaggatgatcagtttcctcatgtggggtgttaacattatccaaattttcagccatcaaggaggtggtttttcttcaaaagaagggagggtttttctaagcttttacacagagttctgattgttttttagggcctctcccgtatgagctttttttcgtccccctgttatcttacttgccactatttataattacatagtggacagttaattacaaagttgattgtaatatgtttacaacaatcatccctaaaatcatgggacttgattacatatcacgtagtgtaaatgcggttatgatttgaaaatcatatagctgtgatttttctgcttttaccgggtcaaaatgattgtgttttcaacatgtctttaattattgtatctggagatgcctcgacagaagcttgtatccagtgatctcatagcgagcttgggccttttttccttccgaggtcgatgatgcatgtctt

SEQ ID NO: 181024 - DNA, 642 bp, Cannabis indica
gcacagtatggatgatttgatattgtgaaattgttatatttatgaattatgttatcttagggttttttttttttggggggggggggggggggggggggggttagtgtcctacatagctcttcttactgggcgttagcttacgggtactctgtgtgcaggtaaagataaaactaaatagtgaggatggtcgagctcaaggcgtggattgcatgttagggatttatcacgatgttttggttaaaaaatatttcattaaagattacgactcgattacttttgtaaaagttaatgtttgaaattttataaatgaatcaagtgttaatgagatctcatactttgattatattcaataaattagtttattgtctttgttataaatagttttcaatagactagcgagtgtgacgtctcagaaaatcgggccttacaatgaggacatcatctataaaagtgggtatattttaaagaatatagaaatgaaggtaaaaattaaaacatgtaaagtaaagtgggtatacaatgtaatttcttcattttttttaatcatatccaaacggtgaaaataagtcaaaagtaaaaaagcttacgaaacgggaaaagtaatacgtgcttatatgtatatttgttttgtagaaaatacaa

SEQ ID NO: 181025 - DNA, 732 bp, Cannabis indica
atgcattcagactcttatgttttgcctcttctttaatggctctcttcatagttttttcccttctcaaagaggtcttgacaaggagaccccatgccctctcttttatctgtgctaggaatggaatacctatctagaatacttgttcatattgctcttaggagacatttcaagttttatcacgtttgaaggcttgagtttaacacacttgtgctttgcgaataacctactcctattatgtcatggcgatgtgaaatctattatgttgttactaagaagttataaaaggttttcaataacctctgggttgtaggaaaatacaaacaagacatctatatattgtacaagaatgaatgatcagatgtccagcagatattagatgcttctggtttgaagcaaagtaaactccctttcacttatctaagagttccaatctgcttaaaaagaatttcacgtgcagactgtaaggtgctacaaagaaaatggtagcaagacttcacatatggagttatagaaacttgttatacgtatgatcgatggattgttctggtgaactcaattctagtagcaatacacacttattaggcacaagttatgattctttcagaaaaaaaaggttctcaaggccatagacagaatttgtcaaacctttctttggtctggtgtagctgatcatgataagtcaaggttaattgcttggaaaaatgtgtgtaaactaaaaaacaaaataagtgg

SEQ ID NO: 181026 - DNA, 639 bp, Cannabis indica
attaacttaactgagaaaatattgttattgggattggtgtctataatcaagtgatatctcaactattagtaaaaaaaaacaaaatgaaaaagtattgttattaggcattgtgcccaacaacatcatctaaggtagcattttataaatgaataataattttctataataattattaaattaaaatatataaaatttaatagtacttgtcagcattttgtactaaaaaaaaagtataataaaaataaactataattcacaattatcttgttagggttaataatcaagctagcgtatagcttttctttattaatgtacttaaccctatctttatagtgatgcaagttcacatagtttaaatgctcataaatttggtaataaagtggattgtgtcatttaatgtagataacttgcattctaatttaaattattcaaataataattctttacaagtgggtcttcctcctttggtgacaatactttacttgattgtctttctcaattgggtatataacttccgattgcttaaagtgtttaacgacaatgttattggtcttaaattagccttatccttaccaaaacttcaaaaggacaagaaaaacgacaatatatgcaattaaaaccaaaaaaaaactaaaaacg

SEQ ID NO: 181027 - DNA, 683 bp, Cannabis indica
agcaagtatcttcaagattggggttgtgagctaaccgagaacttcaagaaacgaatctccatcagcataaaaagctctcacccgcttgaagcaccatattgacaatgataccaatcatgaatttcactgggagcaagtaaattattttgaaattttagcacaacaagagatattttggaaacaaagagctaaatcgtattggcttcacgttggtgataaaaatagtaaatatttccatgcctatgcaagttctaggaagcaaaataaccaaacttatcagcctattgactccaatgatgtttggcaaaactgagatttagggctttctcatgttatcattgattattttttgatatatttacaaccagatgttctttttaggaatttgttaccaatggacagttatgggaccgatcattcctactcgtggtatccgctagggtgatcatttgtctacttatcttttcatcatctgtgtagagggcttctcttctcttattcaaaagactgaagttaaccgtgccttacatgggtattgtgttgtttatgggcccccctctattactcatatgctcttcgccgatgcaactatctctttgtcaaggcactctggggctgttctagtgtggttatttgcttcgggtgtctgaggtgcttcaggtcaaagataattattgccaagt

SEQ ID NO: 181028 - DNA, 663 bp, Cannabis indica
atacctgctgttctaccctgctctcattttgttgcagcaaacgaaacgcattgttgcagctctctgctatttctttcgagtttcctggttgttttgtgttctttggaatcacccactcttgatgtgacttggttactgccttttctttccctttctttttttctgttgctgcttgtgtttctcctgctggtgctgctgtttctcgaccctttgcttcataattttatcatgccggcagttcgcttttatgtgtccaaatttagagcattgggcacacatagcaggtagccattcatattcaactttctggtcttggagctgcccaaattcattgaaataaggaataaaccgaggtggttcatccatgatttccatttcaactaagactccagcatactgtgaccaagtttggtcattagtgtgttgatccaccataattggcttccctatagtgataacaagagcacttgagcttttggtaccccagtattgcagccctaaatcttgaagcctgatccacaacggaacagtacgaaccaagttcatagcatttaaatctacagaccaggggcgaacgatcacaggttttcgatcaaactgcacaatcctgcctccacacttgatcacgggtagcctcatcattgaaacctcaccattatcatt

SEQ ID NO: 181029 - DNA, 960 bp, Cannabis indica
gaaatagaaaataaaaggaaaaagaagaagaaaaagtagaggggaaatagatggatgattgattgatagaggtcatagactactgacgtgtagtgatgcatggaatgtgtgtgcaagtggtaaaattgtaataaaataaagttgaagagtaaaaatgtaggcttaaccgtgtggtggtatttagtaataaagtatgtattttgtattttggtgtaaattttttaaaaataactaacacctaaatataacaatacatcacaaattaataccctaataaagtcctatctttaaaaacctctctaaacatatataggaaattttaatagtaacatcaaatatataactataaccgttacttttatatttttagcctttacatcattattaaatagttaaattaaataaaaataaataataaataacttgtaaccatatagtaacctaatactttatttccttatatagtcttaattaagaataattttattttaaaattaaattatttataattattaattaatattttacaatttgttacttaacaaagatcttttagcaattcatttttttttacttaaattattaaaatatttgtaacaaaactccttataattagaaattataacacattaccttaaatttgaaattattacaaatataatcttataattttaaaattattatatataaaaccttaatttaaaattattacacttaaatatttagtttttagtttttatttaaaattaaatacaaactagttaaaaatctaataaaaattaagaaagtaattataaaactaatttataatttaagattggcctaatacagatcgcacgagtgtaattgaatggcaaacttattaattaaattgtgtgcattgtctgtgtaagtcgtatcctattgtagtaattcacaacctaagccctatataagtgatttgtgagatttttggaaacc

SEQ ID NO: 181030 - DNA, 1284 bp, Cannabis indica
aaagaaggaacaaaaaataaaaagtgtagagaagaagaagggagaacaaaaaataacaagagacaatttaccagaaaacaaagtccctatcatatttcgtataacaacttctcaaatgctttcaagtgatcaggttgaagaccaattgcaattgacaagcttccatcgtttgttgggctaggtaaagtaaaagctaagccctcacaaaaaatcccacctggtcccatgaaaattggtcgaccccaaccgaaatcagcatcatggataggcaatctgacccaactagtaattccaagatttgggcacttaaaagtatgagctccccggacaagagctgaaagattaggctgaacttctaagaaatcaagcgcggaccttaagtactcgttgtccatccttaccaaagcatcgtgaattcgactagcagcataccaagttggctttgacataagatcaccagccacagcgagcggtgtggatgtgaaaatcacattgccaaagtaaccaggtgggagtggtggttgcagcctagaccttccatcagtagcaatgtacagttttgtatcttgatcgtcgggcaatcctctagccttgcatacacatctccacacatgtcctgataacatctcgtacgagctgtagttgactgtgttcccgatcttccttgctctccctttcaacatggctcttgttctttagtcaatttgtacataccaactgcatgtgtggtgttttcgggtgtggattgaggagagtttgtggtggtggtggttttcatggctggtgggggtttgtactcaatgtgatcaaatgtagctttaggtgggtcacgagcacgaagtagtgtcctatctataaagggtggaattgtaaggtcaagaccacgagccatatcagaccaagtattcacaaaatggagacctgaaaaaccatctgcagcatggtgttgcataccaacaccaagtgatacacccccacatctaaagtatgtaacctgcaaataatacaattttacaatcctcaaaatctaacatggaattcattcagataagaatagcattcaaattggcctataaactataaatataagccaataaagaagtggtccacacacagggcatgaaaaaatctaacaggtatatatttttcaagaggacccaacgaaataaatagttaatacattacagtaataaattaactcaaattaatttcattagtaaatgacttttcatattaaaaagttagtagaaatttagtaagagtactttttactaaatagctttc

SEQ ID NO: 181031 - DNA, 531 bp, Cannabis indica
gcacctaagaagtaatcaaacctctcacccatccaagactagtgatgttgagaagctaaaaaacttaaaagaatacccaaaactaaagtggtatcacgagcattgaacgtatcacgaaccaaatcaacatcccaagtatcattctctttttaatttaattaaaaaagtcataattaaatatatccaatcctcactcataattaggcttagggtcgttcatcgaaactgaaaaattgcagtttaaatttggaccgcgacaatttaaaccattgtagaccataattgggaaaaccgttttttggtggtctggttaatccgaaccgtatactgcgtaatggttcggttgtgttcgtaataaatagttaatagttaattttgaacttttttgtaagttaagttttttattgtatgaattttaaatttttatgttatgtttgacttttgagaatgtttttataatattatttatatgttatagatctattacttatcatgttaaatatatattttgaaaaataaaattaaaaaatt

SEQ ID NO: 181032 - DNA, 704 bp, Cannabis indica
acaaactgagtcaaccacaagtcaaaaccttaaaagacttcgtctccagtctgcaaaacccttactctgggttttatcttcttttatttttctcttttttacaccttgagacaatcaataaacttctcgatccaattttagaccccttccaaaagattacaagacttttcgtctacaaaataccggaaaaattaaaaaaaaaaaaaaaaaaaaacaaaaaaaaaaaacaaaacccaaatcagaaataccgtgaagcttgataatatcagagctcaagatctgcagaagaaaaaaataataaaaataaaaaataaagaagagcttgataagagttgttctaaaccatttgttttatttttgttttcttcacactattatttttttagtattatcattatttttaagttttcctgtacaaatatttaaataaaccaattatttccgacatgtcacgaacatttattcaaagccaaagaatctgcataatattttaagaaactatttgtgttttctttttgtgcaaaaaagaaaaaaaaacttagataagcatgattacttgagaaattatcaaaaccattataataatattattatatataaatttggagtttatagggtggaatttgaggctgagttgtgttatattagaattaaggggccaaccaaagcaaagtcggagaaagaagactctctctttctcttcc

SEQ ID NO: 181033 - DNA, 714 bp, Cannabis indica
gaacaaaaaaaagaagataaatcttggcaaattaaagttataattaaaaggaagaaaactgaatctatctattcatttttttttttttttgaaaataagacgttgcatagataaagaacattagacttcgcggttattacaaaagatagaaactaatatggagggagactccataactcttgaaaagttttgggcgaaagctcatctaactacattatgggcagtaaaattacagacacggaaaataaaagcaaagttacaacatagaaaataggaagcaaagttacaacatagaaaataagaatctatctattcattactagataactatcttaattatgtatttgtcataatgcttttccatttgctttggaaaatgtataattattatgtcgaaataatatttttgttttctaattctcaatgtgtcaaaacatatctttatgccaaccaaacgctacctagtactcactgtggcatttgttgtttggagaatgataaccattcacctcttttttgactatcattctagtttgcaatgtgttcatatactttttggtattggatgctagtctttgtttaaaatattttacatgtgagaaattttttgagatgtaattatttaaggttgtctttttgtttggtaatcttttttaagtgcaatataattactaacttataaaaaaaataaaataatttacagtataaatattt

SEQ ID NO: 181034 - DNA, 942 bp, Cannabis indica
atatatatatattaaatataatatatatgtgatttattttttgataaacgtcctatactttatttttattcgttttccctctctaatatttatgtgtatatatatttaaaacgatatgctcatctgaaaagaaggagtatttatatagaattatttaaaattatattatatgtgtaaaatatccaaatgtaatatagttgtttaacaattattttgattataaaagtgtaaaaataaactaatatgatctctttacagtatatatattaattgtagtatacatatggatacgatatgcgtacaccgcacagtacgcgttatgctccattaattatataataatatgcaagtttgaaaggttgatccatgtaaacatcaatcaaaatgaaaaatgattgttttctcggtttgcttataagtaattatatacgtcttgaaaaaaagttttcatttttttttccctacagttaaacactcttaaactgttaataactatgaagctgtgtgtgtctacgtacggttcatttcaatattaaattagacatagtttagtttttaataaataatataaaaaattattaattaattatatcatattcgtgtaatattagacacaattttagcttacaacaatttttctaaaatagaaaatttttaaaaatattaaaaaactatatacaaaatatactacatcagaatgctctaaattcttttttcgttttaatttttttttaatttattatttatatttatagaatattatttattgttctaaatatattttattaattattttaaatttaaataattattttttgtatggaatatatgtctatattaatattatatatttgaaatattttaaaaaattaaaatttaagtgatgtattttaaaaaaatttaatgtatagtgtcttataaaaatatgcctattgtaaaaat

SEQ ID NO: 181035 - DNA, 689 bp, Cannabis indica
ataaaattaatgacatgtactttacatttataaaaggattcatgcagaggaaagctgtagattcattgttatggcttattattggattattttttcttgtttttttttattcacatacttatggaatccacaacttgtcttatctttcattactcaactagtaactaatcaccttcaaaacccttactcctacactacttccttacaagtaactttctgtcttatttacatatgtggtttgttgattagttttgcactttattacctacttttaacaatgattaaagtactatttatatatttatatgttctatatacagtagaacctctattcaagaatactctattcaagaataacctctaatttgttataaaaaaatgaagtcccaatttgggccagttataaataagaataacctctatattgtaattagttatacattttttaagtcccgtattaataaaatatacctctatataagaataattacatcttaaaaaaatatatacatatattttataaatttacttatgtagaattaataattttatttcaaattatagtacatgtataaatattatatgtactcgaaaataactttaatataatatagtattaagaattgtttattggtatttttgtttactattgtatattttttgtatattttttgattttttttttacta

SEQ ID NO: 181036 - DNA, 644 bp, Cannabis indica
ggacgtatatttttttttgggtaaaaatttagcctcatcaaaaatctaattaaaaaggaaaaaacccctgatataaagctcgcactctatgaaaactaagcattagcgagacaatcaaggttggtcagactaccatacatatagtgagacaacgagaaagctagtttttattagagtgcgagctttaaggacatcccactttgttcaataaaatttacaaaccgctcaattcgaataaaccgtccaaaccaaactaaataaatcgataaaaatacaacccgaaataatacaataaaaatccaaaaccgctcaatgaatatattaggtaatttacaaattattcaaaacctcccaattaacttacataaatcgatttatacatttttaaataatactagaaacttacaatagtaattatataaaaaaagtaaagaaactgtttagacgggttaatcagaccaaatagaggaaatcattaggcaagttgaactttttctaatttttaattggatgagttataattaaatatttacaacccgatatttatatatgttataactcgaccgacgtacattcctaataagtattactaataaaaatatatacaaataaatttttaaaatttttgaaatttagtaaagttc

SEQ ID NO: 181037 - DNA, 655 bp, Cannabis indica
tacgtacaaacccataaggatgagacgccgcagattatcaacaacctgaaaattcaattgaatataagtatatcaaatcatctgtctgaatcaacgagcgaaaccagatactcatagaaaagtcaaaatgatttcagaaattacatgagcaatattattaataatattaatagtggataatcatcactaccactcctcatttatgtgcaaaccgattattctagtgaagatgatcaactaagattttatttattaaacttgatctaattctaattattaaatataatgaagcttctgaaggacgtgcatatttaataccacgacacaggaagtcccatcctcaaccctcgaatgatgttattgaaagcaagatttcacgaaaaccacattcaacaattgtaggcataatctgcatatttcaacacagatgaaaccaagacaaggcccaattcaatgccaccataagctaaataaaccaaaagaaaccctaaataggaaggaatcgaataagaaatatgaatccaaactcaaaatgaaatcgattaagaaccaaacagatctaatcagaaacgcaaccaagtgtaaatcaacgatctgcataaatcaatttccacagtacaacccaaacagttatatatatagaagaacaaagccc

SEQ ID NO: 181038 - DNA, 676 bp, Cannabis indica
ttattattttgtcagtgtagacttcaaatgttgtgacaagctaggaattcggggataagttaatttaagtggtgtttggcttaaaagaataaaaatataagaatagaaatgagaatgagaataataataagaatatgaatagaattaaattaaattcaaaatgcatgaaaaaaattaatagaaaaattattgaattttttcttatatagcattaaaatagtcttttttatttttaatttcaaaataaaataatcattctactattttaatacttaaaatacaactaacaaaaaaataaataaaaattatttcattttcattgtatttatttcattacttctaattaaatactgttaagtttgatagttgctaataacttagtagttattatatatatatatatatatatatataaatatatatatagggactaataacttagtagttaaaacttttcacacaatcataaaatatgtaactaatcactagagaaaagtcatcccgaggcagttgaattagtgttttaattaggtaaacatactttgttgttttgagtaataagtgaattttaacttctaactctaaaacattcttttaacaaatataaaaatattaagctaatatatagtttctctataagtttttcttgagtaagctgaaatccaaaaaaagctac

SEQ ID NO: 181039 - DNA, 679 bp, Cannabis indica
gttagtctgtgaatattgcaatgaaagtgttggtttgacctggcaattttgtggttacaacttacaagaattcttgacaaggttgttgaatagtaaaccaatataaaacttgttttactctgttgaataatatgaaagataattcattttttcaccatgtttaaaaataaatacaaatttgatgagcatattactttttttttttttaattgagagtctcagagtatcaaatcccgggttgttttttttttaaatgtgttgtgattctcgaatatttagcatcaaatatcagttcaaatattaatggaatttgttttattattattttattatatataaataatattttattattttattaaataaaaattaaaagtcacccaaatatcagttcaaatattaatgggatttgttttattattattttattatatataaataatattttattattttattaaataaaaattaaaagtcacccataaatttctcaaaaaccaagaattttagttatataggcacactttatatagaatagatatagagagagagtttaattagtaaggattaaaaaaaatgtgtgagttattattttttaaaatatatgatatttggaacaaaaatagctaataatgaaaaaaagaaaaatcgtgtggttttttgttttaagaaaaaaaaa

SEQ ID NO: 181040 - DNA, 640 bp, Cannabis indica
catcgattgaggattcataacgggacacagccagcacctgtagagttcattcgaactggtccaactagttgaagataggctcctggatctggtatggagcttaatctagatacgaaacttggcttttacatgaccagctcttaatgggttggctgtatgggtcaatgacagaggctattggattcgaggtcatgggatgccaatctgcctttgcttcgtggaatgcactcgaggagttatatggagcacattctcgagccaatatggatgatttgaggacaaagattcagaccacacgcaagggatctcaatccatggcagattatctcaagatgaaaaggatgtgggctgactccttagctcttggaggtgaaccttaccctgagaggcaccttatttctaacattttgtctggtttagatgcagagtatttgtccattgttgtcctgattgagtctcaagccaatatcacttggcagcagctgcaaagtatgctgttaagcttcaatagccgacttgaaaggctcaatgttctctcagcaagtagaaaattgggtgggaaatgcatctgctaatcttgaccaaaaaacctggatcgagtggttcatccaatacgagaggacagagaaggttcaacacc

SEQ ID NO: 181041 - DNA, 606 bp, Cannabis indica
atcgacgataaaatacatacctttcttgcggtgttccaaatatttttcaacataattataaaacttttttcgattatgtttccattcaactacactaataagtctaatagactaatattattcgagaaaaagattgtgggaactgagtaccaaatgagtttccatcgtttcgaaagaagacatgttgtaaccacatctttagttggaagaaacgataggatgtgaatgatcaatgaattgggtaatttggaaaatctgtcatcacccattgatgatattgttattgaatccatattggattgggaactgtaacagaaacacaacaacaacaaattaatcaaatttaatatcagagaaatctaatgatcaatttaattcatatttaattaaaatgttaaattgttcagcattgtatacaatgaaagaagtaaaaggattgagattggttatgaataatatttacattaattaattgtaagtgaagataatgatgcataaattgaatgtgaattaatgaaactcaatttaaagccttgaaattcgagtgaagatatttatgtttgttagtttatttacttatttattttattttatttttgtaaggaa

SEQ ID NO: 181042 - DNA, 804 bp, Cannabis indica
cttagagagaaaatgatatcattataaaaatttgcatggatactatgttatagcattgatgctattcattttattttaataaaaaattaaaggctaaaaaattaattatagctaaaaaattaaagatatatattaaataataatgtgtgagatcataattatatcatttttaaaaagtgttatatattggagtattttaagaagtaagggtgtcaaaaataaatgtaaaagagagataaaataaaatattatatttttaatgatgtgtaaatttttaacatccttaaaggttgctaccattagagatgctctaagaccctatttaaacgtctaaaatttgtgttaaatttaacccaaaacataaatttttgcaatatttgacttattatttataattatatatacaagatgttaaataaaaaattaattaattatattaataattatttaatgttttattgaagatatataaaaattattattttgtattctatttattattcaaataatgataatataataaataaagaatataactttagtaaaaattaatacatcataataattattgatattacagtaaataagaaaataatatttactgaataaatttacaataatgttatatcttgtagtaaatttaacataaattttagtatgggccaaatttagcacattatttaaaacaccaatagaataatatttttttaaagtgtactaaaatataatattacaccatctttttgtcattatattatagatgctctagtcataaatgttgggctcaagataatgttactgtag

SEQ ID NO: 181043 - DNA, 993 bp, Cannabis indica
acataaaaacagactcattaaaatgaaacttctactcaaatagattcctgtcaaaaggaatcaataaaaactaagaaatatttgaagccgattagatttcatccaaatgaaaatagaataaccgcccgttttgtattgtgtgtataacggtatacgttagacaattaaatctaaaaattcttggggcctttcatgaatttcgaataaatctatggggtaagggtttcttgttgaaagatctaaaattgtataaaaagtgatttaattcgatataaatattcaaaaaaaagtcgggaatgccgttttcgtagacatgaatagatacctttatttattgttttgaacagtttttcacaaaaaaatgatcccccccaacctacgactaaagttttaggtcaaagtttaatctctttttatagtaaaataggagtgtatacacctacccaactaataagaatgaatcactatttactcgatttataaaccataatcattatgtaggagagatggccgagtggttcaaggcgtagcattggaactgctatgtaggcttttgtttaccgagggttcgaatccctctctttccgtatccttcacccaattcaccgatgttattgaccgcaatatatcaaatcaaataccaatggacgccactattccaacaccaacagttagaccgttcgttgatatggattctcgagtcctaatccaaatttctgtgatatggaaaatactggaaagtaatggacaaggaatgaaaatccccctagttagtttagttaggtttaagtctgacgagaataatattcgacaactagcaattcatttattttcaaaccgacccatttactatctattatttgattgactgatccttgatattggaatgggttaagagtcaaatgttttggcaattcctcacggatcgatgaatcaagataattttgaaccaaagacttagatttttttgttcatctctcactgtaataatat

SEQ ID NO: 181044 - DNA, 605 bp, Cannabis indica
ataaggagaaggctcatatggtggttgttgctctagatcttttcctaatgaatcaagataaaagagatcaagaccaggatttaagctcaccttgctagctgatttgttgaagctcatacacttggatctgccttcctttttttccatacacagtaatttttcttttgtgcttattttgatctgttctgtacttcttgtaagcccacatgagaccaacaacacaaaccaaagtggcaactcctactgagactagaacagccataagaatccttttgacttttcttttatcatcatcatcatcatcttttttaatcttgtcagctggatgaactttgttcaaaccatgttttgcagcatggggaatcaaatgaacatgatgcataggcgccggagtaggagcaagcaccggagctggagcaggagcaggagcctcagcttcaccaaagagcgatggagatggggctggagaaaaatatccatagtcaccatttgatgtcttctgacgtggaagcctctcttagcccaagtaaaccctgaactttccactaagactttaggctctcttcattatctcatctttcctgaaactttctcaatcacattca

SEQ ID NO: 181045 - DNA, 553 bp, Cannabis indica
gttcattatctattgccttttgttttgttggaatttgcttgagggtataacccttaaattatgcaagcaggtcatggatctcactgagataggccactatttttcctccacgagccatgtattcccctgagacatgatttacaaccaattgtgagtcactacagatctcaatatactaagcacgtacttcctgagcaagttttaacccaacaatgagtgcaacatattctacattattgttggcggctttgaaaccaaatttgattgctccatgcaagggttgcccctaagtgtgatgagggtgattcttgcacaagacaactaatcggttgctaatctatccacatgcaacttacaaatatccttgtcatttccaatttcttatagtgagggtgcttgttctagttccttgtttggcttgagattgtcttttaaaatgtctgcttcttttcttgtgcattcaatcacaatatctaccaaggcttgcccttcaactattgtgtcaagttggtaagttatttcagattaactattaacctaactctatatcaca

SEQ ID NO: 181046 - DNA, 862 bp, Cannabis indica
gtgagtttttctatcaacgaatttcggtcctcggcttcgatgagtcttttactgatgtaatagactgggtattgtacgctgttctcttctctgaacagcacgacactcacggcatgttctgtgactgcaaagttatattacccagctcttcgccgtccagaggtttttgaaagcacgggaggttttagcaaagttgtgcctttcgctcttagaaagctttttcacattcttcggtccactcgaacttgtttatttcctcgcaggatgttgaagaatgggacacattttgaatagattggaatctttattatagctaattagattcaacatataatatgcataaagagaacgacatttgggctcagatcttgataatactctgcgacagaaaggatacaagggttagagatctgagtggaaggagacattatttcgctgcaaccaatgtaaggttttcttaactttatatgtgtttatttatcgttttagaaagttcatttttagggtattgacctcttcggttgtgttaagacaacagaggcagtgggatcatcttgtatcaaataagatgatagaacacttttggaatcaagaaaaaatatctcctttatttgctactttattttcagacttagtcattttcttagaaaagtagtatttgtttaaacaaacactttcttatctaatgactatgggatgttccacccctaatcacttagaatagctaacaaacatgcaaaccatggttaacagttctagcttttcttaagatttcgattaggtcatccatgaatctagtaatgatttacattaagtatacaaccattgcatcattctgaaattgtattaccatagaaggatt

SEQ ID NO: 181047 - DNA, 796 bp, Cannabis indica
cacagtcaggtaatagaaccagcagaacgagactaaaaagttagtcgcctggttcccagaccgtttaacaaaattatagaaataggaaacaaaagagaggactgtacaagagcaacacataccgtaattaaaagccccactaggaaacaacaatcgcttcttctattgaagatgctatgttaggttgaaaccagagctacatttaaccttttttttttcttttaaataaacaattaaagctttttaatttttccattttggtcatttttttttttaatttttgaaaaatgaggtgtcaaaattttaaagactaaatttaatctgagacacaactccatattaaataatgtgtacccttaaaagtatcaattgtttaaaatatatttgtatagtataagaacaaaactaattttactaccataaaattattctatatgatatatattatttatatatattgtgtttaacatgttgtttatatttcgtgtttaatcttcttgtaaagtcttttttggcaagttagatgccaaaatattttttcttttatggtaagatatttttgctttcatacccgattgtcttaccttgtatattcagtttttattgctcttttctatgtttggaaagatgcatatttcagttgatcctttcttgtatggaaacttcttgtaagaaaagcaattctcttatggaaagttggtttttaaaggaaactttgattattgccttttccttattgaattcgattgtgtcttgatacaatcagaatatataatctgtttatggcaagaatcaa

SEQ ID NO: 181048 - DNA, 505 bp, Cannabis indica
gacatttttttgatacgtctatacaaagaagagacacgtgcatcaagcgatgtaaaacgagtggctacttcattcggattaacaaattgaaacaattgttggcgattatgttgtacgagccattgatatagtatcctaatataaaatttagccaaagttaacttagataaattttgaataaataacatgaataaagttaaaagtaataaatttattatatatatcgagtaatatacctcatgtagcacgtgatgataccttgcccaatctttttgttgaaaataaagtccaagatgtcttccttcgatatgtacaagcctgacatatctagatcaaatatgtgtctttcaatggatactttcacattcgcattgttaggccacgtcgatacaattttataaacctcattcaaatgatgacctctaattacaggttgttgcacttcttgtgacagaggttcacgaatacgacgtgtaggctcttgttgttgttgggttaatggtgc

SEQ ID NO: 181049 - DNA, 589 bp, Cannabis indica
gaacctaagatagatgtagcaagattacattgaagagagtggttagagtgaccatcacctaataggtacaggtcattcttgagtatccctttgagtaggacaacacctgattgtttgtccttgacaaaacaacaagatttgtgaaattcaaggaagacattattatctttagttaatttggaaacactaaccaaatttttggtaatagatggaacatgtaaaacaaattgaagttgtaaaggcttggaatttaaagaagggagagtagttttaccaatgtgagagataagtaatttcttaccatctcctacaacaatagattccagtccagtatagggagtggctaaatcaaagttttccatggtgaaggcaacatgattagttgctctagtgtccacataacagccagaatcatcaccaaagtctgggatggtttgagtgcaggagcttgtggatcaaagcttccactttgttctgtcagattgatttgaggttgggatgagggctgcttggagtacccaattctgtcaatcgtaatgacagattggtgcagtgtgccaatatttcatgcacaattgacataggggtt

SEQ ID NO: 181050 - DNA, 704 bp, Cannabis indica
aatacaaaccataatatggtatcagagccatttcctaccattgacggcgaatatggcgactgttgcagctcaaaactcggccaacccctcgaatcttggaaatccttcaaacttgcagagaaatcgaaatcgtgatgctgatgagttctcacctgttcactttacacataatctttccgtaaaattgaatgaccataattttcttctttggaaacagcaggtcctagctgcgattcggggaaatcgtttgctgaagttcattcaagatgacgatcctccacctcaattcctcaatgctgccgatcgtgcctcctcaacctacaatcctgaatttatcgactgggatgtgcaagatcagttgttggtctcgtggttgttatcgtctatgacggagagcctccttactcgaatggttgggtgcaacacagctcgtcaaatataggtaaatctggaaaaacatttcacgctcaaagtctcatctaagatcttggaattcaagactaagctccagaacttaaagaaaggcacactgtctcttaatgactatctgttgaaagtgaagcagcatgttgatcttctcgcgtcggtcggagaagttcttagcgatcgtgccatattgctgcaatcttcaaaaggactacccagcaaattacgacaccttcgtcatttcgacaaaacactcgtattgaagggtactccgttgg

SEQ ID NO: 181051 - DNA, 627 bp, Cannabis indica
tacgtcttaatctcagcggcggaaccaggacttaaatactaaagagtttaattatatataaaaaaaaattaaaatttatattgcatttcgttaaaagattattttgatacacattttatttgtttcattcaacgaaagtttttagcttatttctttataagcacgtacactttaacaaaaaatctaaaaattttacaatgctgaaaataaagttttaacagttgcttaccacatgtataagaaaaaatagacacgcatcaacaacataattgaatcttattttgagcactgtaaattattcagaattttttaaaaatttacatgtgattctaaatagctacaacgtagacaattataaaaaaatcagactaaaaaattcttttaaatacaaaaatagatagggatagaaacttttatactaggggatttactatatatagaattatccaataattttttttaccatgtaatatatatattcatgtaaagtacactttataaaagtgtcgttatgttcgagatctaacagaatatttagtgcattttattttattgattgtgtaccattttattatttaaaatcactgataatttaaaaatttccaaattatagtgccaaaaataaaa

SEQ ID NO: 181052 - DNA, 659 bp, Cannabis indica
ctttccatactaaccattaaaaattgtaatttttttcttatattttccttaaattcaacttattccaaacataccatctacatcatatggaggtggaaagaattgcaagtaacaaaatgaagaaacagcaagtcctgcacaataaaaaaaaggttaagaattcaaccaagaaaaaaaactaaacaaatttcgaactaaactacctatgatgctcccggcgaaaacatcctgccaatgatgccaatagtcatcaacacgagaaaccgcgacaagtgatgcaacaagtaagggtaagaaaacaatgcagagcttcgcgacatgacccttgcgatcgaacaccctgattttccccgataagtacaatgcaaggaaaccaagtcctgcaaatgaccctgcatttaaacatgatcgaaacaattctctattcaatgagatgtccaatgtgatccattaagcctaaagaacaacccttagacttgaattgaacatcaaagaccaaagaagaacgcaatgttattgaaaccaagcaaagttctcttcataaagtcaagcatattgcatgtaaggcaccctttttcattcgaatcccagtaaccataggagcaacacataggcatgtctatgtgctattttttaactttttttttaattttacagtt

SEQ ID NO: 181053 - DNA, 747 bp, Cannabis indica
cgggtaaagtgagattgattgattctatgttatatatataaagggctgttgctacaagacagaattagaacagaggatatccttatagagatatatagagagccaaggaatgaatgaaggaaggaaggaaggaagactaaataaataaatagagaaagaaagttgggtgttctacttctactactaattatgtagcttttttaacactagaattgggtccacatgcttctctttcttgtcttgtgttgcttttgattaatgtttttttgtggattttcatgcatctattgttacaatagggacctcactcactcactcacctctctattatttgtcactattcacaactctataagtattaacacttgaaattcaataacccaataatgtgttttggattacacatagagcccggagcccatttatacgtatagtataaaatttgtattcttcttaatcttctccactcctcctctgttttcatgcccactttcttgccccttttttcttaaatgaccattaaccataacattgttgttggtttaatttaatattagatcctacttatattattttaataaatatcataaaaaattactaacaaattataagacgataatttattgtggtattagacaccataaataccttatagctattctctagtgcttagcatcattaggaagttagttattaaataattgtatgcaatatatacttaattacactactaacaatataacaaat

SEQ ID NO: 181054 - DNA, 797 bp, Cannabis indica
gtaacattattaattttttaattgttatttttatattcagagtatgtttaatatacattataataaatattgttcaatatatattataatatatttatttaataattaataagtaatttcttttaaatttataaaattttaaaaatacataataaacaaaaataaaaattaaaaaatataattaattatatatgcaataggcataataatgataacttagtgtatatatatataaaaaaaataattgatttgtatattttgcagagctacaataaaatattattgcattttttatttgtacagtttaacaattacaataaaatattatttgtaatttttttaaagatttttttcaggtgacaaatgctaaaatgcacgctagtcctcgttaatctattgaacaattatgtagtttatatatttaaattaattttaaatttaaatatacttaattattaatattttttgcgtattttcataaatgatttggtgattatttttttaaaaaaattattaaaagatattaatagtaatattataatattattagtataatttaatattaaattttataaatattaactaatataaataatcgttaaccgctaaccacttataatctcataatgatttgagtaatattgatacttatatttgaccagatagtcaatctggtatataaggagactattgagattatgggaaaggattaccttattaagcaataatggaaaggcatactcacccagattgggggaaagacttataaattgagatgcaatttaatggatatgtat

SEQ ID NO: 181055 - DNA, 1046 bp, Cannabis indica
gggttatgatagcaaaagcagctaagtttgaccttgagattgatcaaatggatgttagaactgcattcctacatggcacacttgatgaaaagatttatatgtcacaaccagagggatttgacaatgggaatcctaatcaagtatgccttctgctcaagtctctatatggtttgaaacaggcccctagacaatggaatttgaggtttgatgagttcatgaaggccattggattcagtcaaagcaggtatgacccttgtgtttactttaatcagcatgtctatctattgttgtatgtagatgatatgctattaattggtaaagacagatctgagataaacaagataaaagaaaagcttaatgctgaattcgaaatgaaggacctaggatcagctaaaaagatcctaggtattgacatcaaaaggaaaagacctcattctattttcttatctcagaaaggttacctacagaaagttctaactaggtttggaatggaaaatgccaaacctgtttcaacaccattagctcaccacttcagactttcaaaggagcaatcaccaaaaacagagagagaaagggctgacatggatggcataccatatgccaatgctgttggcagcttaatgtatgccatggtctgtaccagacctgacattggatatgctatgagcatggtgagcagatttctctctgaccctggacagcaacactggtctgctcttaaatggactctaaggtacatcaaaggtactctaaacatgggaattatgtttggaaaagagtcatttaccaaagaaattgctactggttgtgtggactctgactatgctggctgcatagacacaaggaggtctctcacaggttttgtgttcactgtttttggtggctgtgtaagctggaaatcaaccttgcaaaaggttgtagctctatcttcaacagaagcagagtatatggctgccactgaagcaatcaaagaggcattatggttgaagggattcactagtgaactaggactcaacactgatgacatgacagtgcactgtgacaac

SEQ ID NO: 181056 - DNA, 578 bp, Cannabis indica
aatttgattaattgcgaaataataacacaaaatatgtttagtttgaaaattaatgactaccttttgttatgtaaaaaatatctaataaaattatattatttaattgaaaatagaaatgtatgcaataaattattgttaaaaaattatataaaaaatattaatatattaaattcatggtattattatatgatgaaagaatgtttggaaactatctttttttgaaaagatttaagattacccataagaagttaattttacttccatagtaacaaaatttttatatgtaaaatagagaaatatctataccaaacagagaatgtaaaagattacttaccaatcctattaaaatctatacgttctcttcatacaccaccacttagtacatataaacaaatactaggtcataaaatatgtttagttataacccattttgtttttaattatttttataaataaataatagaaaaataaaagacaattaggtggcgtttggttggaggtaatgaaatggaatggaatggaaatgaaacaattttcattccattcctttgtttggttgtcattttaaagtattggaa

SEQ ID NO: 181057 - DNA, 870 bp, Cannabis indica
agagaactacaaaaaacattttacactactttatattattattttatcttacataagattaaacatacttttttatttgtatatattatttatatttattaaaaaattaatataataataatgaatatttttttaatttaatttttagtgttatagttagagtggaaagagtttttaacactaaatttagttttaatgtaagaccaaatttagtgtgtcgattgaaaatgctcttaaaattaaatttgattgcttaagttctgaacttgctttagcttttattgtatggatgttgtttataatttcttccatttataaaacaaaaattttataatttctcatgaaaaaaaaaaaatattttagtttcatattctgttattctaatattcgaaccaaacaataaattattatagaatggaggttgtttggttggaggtaatgaaatggaatggaatagaaaagaaacaatctcaattccattcttttgtttggttacatattaaagggttgaaatggtctttctaccattttagtagaatgacaattctattttgaaatagaaagaaaaatctttcgaatatatgatgagaaaaaatttaataacttttttatcaattttttttaatgtcattttaaaatttattctattcctttcttattcctatgttttcattcctcccaaccaaacgccaactaagttattctattctcattccaccattttccaaccaaccaaatgcctttattatcttatatcaagtcatcgataatgttattaagacaaaaacgaaacaaataaattaataaaatggataaagaatttcttctccagtaaattaaacatcaagttttttgtagactccaataagt

SEQ ID NO: 181058 - DNA, 535 bp, Cannabis indica
actcccaagagtttctttattctattttttaaaatacatcattaaaaccttttttttttttattattttacaatatacttttacattacaccatacacccccttctttaaaatacatcaccaaaatcttattttttaaaattttattatattttatttatttcaaatatataatattaatatatacgcatatcctcataaaaaaaataattattaaaatctaaaaaaatatatatatttagagaaataaatagtgttctataaatgtagagcacgaatattgtattttaaagaaactttaaaatgaaagatggttttagaggatctattgtagttagggatacacgtacgggaaattagtggggagtgctcctcctgtccccatccccgttaaggattttaatcctaatccttgcttatttttcatcaagtatggggcggaaaatcccctaataggaacggggacggagtgggagatcccgtaataaaaaaaataaagtttaataataaaaaatttcaatatataaacatattaa

SEQ ID NO: 181059 - DNA, 704 bp, Cannabis indica
ccatcctatttaccaaaatggtattaaacagtaaaccccaaaactactttttagatttttttagaaaataaaaggaaaacctcaaagaatacttccaccattgttatgtacaagaacactttgcacttggttaatggttcaccaaatcccaccaaatttcgcaacaaatcgcttgtccaccactcccgctctaccagaaccttcgaagaaccattgccgtttgatgactgcgattatctcatgttgagtttcagtcgtcttcttcgtgtcattggtctcgttgaatagttcagaaaaatatcgatacattgctcaccatctaagactcatttttttcgtaattttcctcattttacactaataaaaataatcagatcaggtttttgtttagaatattaagagatattaattgtaatagtattttattcttgtgatttttttttttgaaagtaaaatccattaatcaacaaaaaccattataatggaaaaggcaataggcatatctgccatatattattctagtaaacggtatgtctctaacgaataggttttttttttcttctctttttttgaaaagattttaaaaaataagtatttgagtcgtggtttaggggtttgcttattaaaaaatataatgaataaaaaagaattaaagacatctatttggtcattttataaaaggtcaattaagtacttatattttt

SEQ ID NO: 181060 - DNA, 727 bp, Cannabis indica
attgttaggttgggggattgtaattaagtagggaaaagtattgttttgttttgtaaaaaataaagatattattgagtgaatttcaatatagaaagtatttgcaacaacttagaaaataaaaagaaagaaaagaaaaaaattgacaattttgtgtcataaaaaataaaagttgttgcaagtttatcaaagaaaaggttctctcgtgtatttagagagaaaggacatatgaggatcatatgtgataattgtagaatgatttgatttgagaaacttatgatataggtgagcctaaatgaaattttctatctaccttgtcctaagccttaaacattaaaactcattggtccttttgatttctaatcatatgttgttgacattaatggataaggttaaataatgcaactttattgataatcggtttgtggatatgttggaatgactttgagcatgtgtacgaatttctaatggtttttgacatttgcgagttatatttattcttctacaagtttgagagccaaggttagtattgagagcaattggattaaaaatctagttttataacagttgaatcttgtgagtagcggtggtgtcgtgtaaattgaattaaggcttattttgtgttcgtttattttagattagtgtcaatctttactcgagggcaagtaaatattaagtttgagggagtttgatacagtagttttaggtgcattttataatgtattttaga

SEQ ID NO: 181061 - DNA, 750 bp, Cannabis indica
aaaactactttattaatttgtttttgtagtgctcaagatgttgttacgatcgatgtatatacagccaaaggtcttctcagcataggccatcgttatttagacgtcaggttagttagcactatctctcctttgttttattcttctactattctgcattttcactaatcaaatattttctactaccaaaaaatctgaagtttcaaacaaacagaaattttactaaatctaagttgatagaaattttattaatcaaatatttatgtacacacacatgcctctattaatgatatgttatgaaattaagtatcttgttatattatatgcagaaccgttgaggaatttaataagagtcatgttgaaggcgccttgaacgttccttacatgttcatcacccaagaaggtaaactttgacatcaaattcctttaccaactatatacatgaatttactttttttttaaaaaaaaaaaagaaaaaaaaacgatgtgcatgaattaaacatcaaaattaatcaagaattggtgttgaaaattttagattaatttttttgcatctttaagagggaaagaagtatatacaggagtaattattaattgacattatctatgttttatttatggggatggttgatcaccaggtaaagtaaaaaatccagaatttctgagccaagcttcagcagtttgcaaaaaggatgaccatttagttgtggtaattttattactgtttatgattgaacacaagattttactgtt

SEQ ID NO: 181062 - DNA, 538 bp, Cannabis indica
taagataaagctaaggaaagttagtaactatttgctaggtaccactggtgtctaatagcaatactctaaaataaattaaggataaattggcatcgaactatttgagattttttttagatatggggtaaagatataagcatatttaatgaaattttccattatagaagaaactaaggttataatttagttaaaagaatagtgctacaacaaaaaaaaaaaatggtgccccctataattttcctttggagatttgagtgtagcaaaagagtatcaacactgtaaaacaattgaacttttgtaatgctctcaaaaaaagaaaacaacacacacgacacatacacacagcacactatacacacttgtataattttgattttgagcacgattgccataatgccactggtcatttggccacataactagaatagatcagtagctacagctactgtggtagagttccttttttttttccttgagttgtgcgtgcgtaccaaactactgcttctgctgcaatttctcaactttccttagctttatc

SEQ ID NO: 181063 - DNA, 595 bp, Cannabis indica
tttcagtgactaagtacaaatttagtcactgaaaataacaaacagtgactaaaaattagtggttaattcttttggtttcaattaaacaatgtcccatgactaaaaatgtctaccgactaaataatagtcgtaaatgctaactattagtgactaaattgatttagtcacaaaaactctagtcgctgtaaacctattttcttgtagtgcattgctcttcagtccattgtgttagcggatgtttctatctaataaagattattttcaattcaaaaaaaaaatagttaatagtgcaataaaatatttaactaaatgtgattttttgttataacaaatattaattgtgacttaaatatggtatttagataaaattaattttattttaattacaacaattaaaaacacattcagctacaataaattttaatttttgtgactaatatctttactcacgaatcttttagtcataacatattttataattaatcacaaattattttgtgactaaaataagattttttttttttgtaattaactatataataatcatgaaaacaaagtaaaataaaaaattaattttgaataccgaaacaagtaa

SEQ ID NO: 181064 - DNA, 816 bp, Cannabis indica
aaataatgaggtatatttataattttatggggtgcaaataaactccccttttttcaagcaacatagattttttttttcagtttttttcattggaaacttactactatatatgaataaataaacactttatacaaaaattctatagtacacccttaaaagggatgcatatcatgtactcccatctgtttttagatatctaaaataatattttagtaaaattttttatggacatatctacgttataattatttcagacattttacaaaattttacgaaattttaaaaaatttaacacgccgaaaataatgtttaaacagtgtgttatacacgtgactattttattgtacgcgcgtgtaaaaaagactgtttgaactttacttttattataaattattctaaattttttaaaattttataaaatattttaaacaactataacatacacaaatatagaaaaaataaaatgaattaaaaaattattttgaataccgaaacaagtaaaaagtccatcagtgcattcctttatagtgggtgtatcctaaaagcacccgataatatatatttagcttaaactgataactttatatgagaagactaaaatgattaattgtgttataaaaatgaagtaagtttactttacctagaaaaacagaatcgtccagaagcaattgtaagaagaatcagcacatgaaacagtttgaggacaagcttgttctaaagcagccttaattctatcaacaacctcaaatcctcttattgagtttctgtttgacacagcatctttctcactcactatcccatttgctgggtcattat

SEQ ID NO: 181065 - DNA, 597 bp, Cannabis indica
acaacaccgtaagcatttttaattgccctatattattagcaaaaagttattcacaaatgaaaaagaaaaaaaatcttgctgttaaatatgtggttaatttgtcataagtacaagtcaacatgacaagactaggtattggtaattacctctttattgctccatagccatagccattattgcccacaaccaacatagatgcatgatgcttctctacagtttgacagagaacattatgggcttctccttcaataacctccaccacaacatctttcacctataacacacaacccagaataagatgcaaaataatacaatccaatcaagtacaaatttcataatgtgaatcgttaaatatgtcaatctatgatataacattcaacaattaatcaaggcaagcatcttaatcaacagtccgtactataaatactatatcaatcttgagcttttgatgatgacaatattgatcaaatatataccgatttagtgacgaaaatttgttgagtcttgtcaagaactcgctctgcgctcatctcaaatgccctttcctttgccacggctaatgtttggccaatcaatacatcgatatcaaaatcaggc

SEQ ID NO: 181066 - DNA, 648 bp, Cannabis indica
accaacctcttcaaggctaagtacttttctcaaacaaccttcttaaactcatctctgggtcattctcggccgtcttacgtttggcagagcattcactggggtaaatccctttgaaaacaggtatttgtaagaggattggcaacgggactacaacaaaagttttacaagacttttggctccctaactaccgttttcttcctgcccatcttccaagtcacctagtcaatgtctctgatttcgcttcttccaaatggggattggaacatcccattgttgcgcatccattccacccaggacattatcgatgacattctatctcttcccccaccagatattacccaaacagactcctatttctcgcagcacacctcttcaggtcattattcagttaagacgggttaccatgtggcaaaaatgtctattaactcgacacaaccttcatcttcaaatactgctacccttacacgctggtggaaattcctctagagtcttcgaattcctccaaaaattaggcactttatctataggctcactcagaaatctattcctactgcagaaaatctctacaataggaattgccttaactctcctatttgtcctcgttgtcatctttaccatgagtctgtgcaacatgctttttttgagtgc

SEQ ID NO: 181067 - DNA, 581 bp, Cannabis indica
gattgtaaaatctatgattgtttttttattatactaatctattggtgttatgcatctttttatgattcatgactataaatattttttttgctattatatttgtgatcccatgaaaattatttataagaaaatattttagtgttatcagatcttaataaaagatacataatttgctattttgatttttgaattttattaatattattaataactttgttttccttacaaaataataataataataacaataaaacaatattttgaacagaaacctgaaaaagaaaaacaaatatattgaaatgtaaatattgcaattatataattttataatattacaagatcgaagtaacacttcttataaataattaaggcttaattttgtggcttaaatgtaacattatagtttatgttaattaatattagaagttagcacaatggtacagagttgttttaactatcattagaattttaattttatataaaaattgttagaactataaggtggcattttagaggaagtgaaattgaatgattgaaagaaagatagtcatatttttataactttgaaaagttacattatt

SEQ ID NO: 181068 - DNA, 523 bp, Cannabis indica
agttgcagaaaagatattgactgaatctgtgccatgaggtatggccttaaggagtttacaaagagaatgatttacagctaacggagcaccgaaatagtaacaacaattagagaacaaggcagaagagaagtctgaatgaaaatcaagaggatggtgatgttcaaacggtgaccaaaaaaaaaaatgaagatatggaaaggtggaacaatatgagaggccaaatggagttgcagagaaagaatattgactgaatctgtgccatgaggtatggccttaaggagttacaaagagaatgatttacagctaacggagcaccaaatagtaacaacaattagagacaggcagaagagaagtctgaatgaaaatcaagaggatggtgatgttcaaacggtgaccaaaaaaaaaatgaagcagtgattttcgaaataatgatatcgattgttaccaaaaaaaaggacaagtttagcaagttatctggatgcatcacaaaatggaaagagagggaaaagaaaaagaaaagaaa

SEQ ID NO: 181069 - DNA, 516 bp, Cannabis indica
tagaaatactagtgatgcaatttagacgggttcaatccaatcatcatagcccatagtaaagtagaggaattttctttctttttttttttacttgacaaaaataaataaaaaaaaaacccagactaagcagataagcagaggcattaaacgacaggtacaatcatcaacaactaaaatttaaaattataaagaaataaattttctaaaaaaagaataaataaaataaataacacgcctaacctcgtaaaacaggaccactacattttgtcaatacccattaccattcacaaactgccacgtgttactaaaaccaacgccaccatcatcatatttcttttccttttttatttatttccttaaattttcttctaaaataataaaaaaaacgtcccctgagtcctgattctaaaattaaaaacaaaaaaaaaaaaattatccaaagaaaacaggaaacacaaaactctcaattaacttaattagttaattaattttctaactttacaaaaaaaaaaaaaa

SEQ ID NO: 181070 - DNA, 518 bp, Cannabis indica
agtctgatactggttatctcagcaccgttgattgtaggcaagttgcgttgatggtgcagtatctgatacacttgctcgaagattggtcttacgtgcattgcgatcatcgggtctgtagggtttatggctgctgcaacgtcggtcatccatcctagctttcgggttgtttctttgttgatatcgcacgctaactgttgcaacagcgaaagcaacactccttggctcagtggaagtggtgacattgacaatagacccccgaagatcaacctgtcaaacccatgtattttctcatcaatatctcaccgaaattacttactcgagttctcctttgaaagggaaaggaatgaagaagaatacctgagaacacaaccatgatacaatcgtcaagtcggttctttgtagagctccagtgaaggcctcctcatacttctgttcggaaatcaatcttgacagttccttcgttggatccaagggaacctcaatctattatagacaacaagagtgagagcatatcagta

SEQ ID NO: 181071 - DNA, 625 bp, Cannabis indica
cttgtattatcttgttctattaccgattttcaattagttcaatttgatttaaagctattagctgtaaagtgctgaaaactaaaaaattaaaaaaaaaaaaaaaaaaaaaaactacaatttagatgcttttcttgtactaaaaacacattttagtctagcagtgcttggatttctctaaccaaagtaacatgcactatatgatttgtaaatatacaaattccaattcttgtacaatgatcacaaattccctaataatgaaattatccaactactaaattcctttgtaagatcctcttgcttcttgttcgttaaaattcttgtaacaaatttttttctgattttatagaatacagtaaaaatataaaaaaataaaaataaaataaaatattaaaatataaactttttaccaaaaataactgtagttttacattaaaattctaataatgtataaaattaattacttgcgtataatagagtacaataattgtacattttgtgaaaatttaacattctcacttaaaattttcttgatatatgatactttactggatgaatattgtgaaaatccataactgaacagctccagcccttaatatataatatcgaaattaaaatgtaaaaaagc

SEQ ID NO: 181072 - DNA, 520 bp, Cannabis indica
ggcggataaggccattttttaacaccggcgcttatttttcaccggcgttatttctcgtcggtaaaaagaagttttacttgcgcaattactatacgcgccagtaaaaaatcctttaccgaccaagcttcccagataatctttgccggcgcagttagggtacttttgccggcgcaacaatgcgccggcaaaagctgattttcttgtagtgagtccaaggttgtttcagaagtgatgaaatggaagcaaatgcactcttccacagtctgaattgggctacacaacaacaattgctaataacacatgtggaaattgatgccctaagaatatcctctgcttcgaattctccgcatgaagacttatcttgttattctgatctaataaatgatgttcgttgtcttttattctcttttcttggagttactgttactcatgctcgtaggcaagctaactaagctgcccatagcttagcaaagtacgctgtagagttggatgaagatgtatcttggataggcaaaaatcc

SEQ ID NO: 181073 - DNA, 1219 bp, Cannabis indica
gccaaaaaaaaataaatagaaaaattctttagcaatatatgtataatatataaatagtagtaaattcttatttagaataaaatccaactaaataacataagtatatttagaaaatccaatcatagatgtacaacagtaaaaatccaatcatatttttttgaatttaatgagatttattttattatatataaataaaaagtgacccataaatttctcataaaccaagaattttgttatataggcacactctatatagaagaatacatataagtcattatctaaaataaaaaatagtaataatcaccagtggtaccataataatataacttttaattataggacccgccattatatttaagattttaaaaatttaaataaatttgtagcgaaattttaaataaaattttagtcgaaatagaatgtttaccccatttcaaaaaaataaataaataggagaatcacttttaatatattttttttcatttttacagtgtaaattgtttcaatagttattatatgggttcgttatgcggatttagattacaattcaagttaatcagttggtttttatgtaagttgttatataaagttttagaaaaaaaaactacctcaaaatataaagatgaaaaaaaaaatacatttctaaaaaaagtatgtttttttcttttactaaaatattaattgataaattaaaatttgttcgtccttgtctttacaaatttaaaatatctataataagggtttatttattgttaactaatgtcaaacacacttacgacaaaatagagcgggagtttgttgccttgtgagagagtgcttacgtctctttcttttctttctcattgtttataattattaaatataattaataagcttacgtctctttctttgagttgaaaaaatgatcacatatgtatagtactgaaaaaggtgtaaagaattatgttataattataataaacacaaactacaaaggtaacaggcagcgccctcggtggctaactttaaattttagtttcgcattaaatttttgtcgccttcccaatgccaccatgattggactttattagaatctgtttcgtgcatccccaattacccatctatccattcattcattcatattaccaacttatataatatacaattatcccaacacaaaatattacctatatatacacgtataaaataacggtatacgtacgtacgtatatctacacac

SEQ ID NO: 181074 - DNA, 778 bp, Cannabis indica
gggttttggggtgggcttccgagtcacaaagaatttttagactgctaatgcaaagaagtctcaatctaatgtgtgtcccgctctgcctattatgtgtctgattactcctgcttgggtgttgcctggttgtaatttgttgaaactgaacattgatgcggggcttcggggtgcgaaaaaatgtgtgggatacagggcattgctgcatgatcagttgggaaattatttggcttttgtggctttctagctttgggcaccctttcccatccagtggcagaagctatggtagtccttcatggcttacttctctgtacacgccttggttttaataatgtggagaagtcgaatcggattgtcaatgcggtatccatatcctacacaagagagacttgtttaaagacatttatgttatttgtaatcatgttaatatttctaagtttctcttttttatttgttatacgaactctttactcataatcctgctaaacttgccttgcctttggatatttttaacctcaaattaggactagtaaccctcaggattagttaagttaattttagggaaggaaaaacttcattctcagggatagccactgataggtcacctgaggatgcacgaaagtgacctgctcgacatgcatggcctaacaaggcaatttgcaactctgtcaaaagaaatttggaggatcaagcagaaatggaacgagaaatttacatgatcacttcaagatttatcctcttagaaagaatcgtgatataaaaacaatcaaatcttgaatcc

SEQ ID NO: 181075 - DNA, 845 bp, Cannabis indica
cttatatatggctcaattctctaccatttattccatgtgagacattgtccacaataagtttaactaaaatgagacatgtaaacattatattgacaataaagtgattttaattcaataatgaatacataagttagttaaaatatatatcgatatatactctaaaaatttaatattaaaataatggaaattagtaaaaatatatatatttatactctatatgttaatatattaagactactcatgatatatgctctattaattaatgaaattctatttttaatatacaatgaaattatcttaatgtatactctattccatttttttaatcctaatcttattatcttaatatatactctattaatttgttcaaaagaaaaatgtatactctattaatggaaatttcatttttcttaaaaaaaaaatcttaatatcaaaaacatcagattttttttctcttaaaaatagaaatggaatgaattagaaatcatatttggagtaacttttctttattttacattaagaatattatttaaatatttttagaaaatatgatttttttttatttgttttttcctatttttatagattttgtaaattatttaatatttcaaaatatattttattagttagtttttcataataatcaataaatttaaaattacgggcttttgaatatgtgatgtatccaataatttagtccagatttattagaagtttagaacgcactgtacattataattatcctaattatataattgcaaagaacaaaacactaataatagacatacattatttgaattttattaagatctttgtcgagattcggcataaaacatatatgtgtg

SEQ ID NO: 181076 - DNA, 720 bp, Cannabis indica
ctcatgtaaagtgcacatctaatcaattctatatgctttgttctaccatgaaagtgagagccctatattcacatttgatactcaagcaagatatatatcactttctacttctttaaactccatgaaatcaaattgtcaccaatatgtctagacagcatatccagcaccatgagtcacaaaaggcttcaacattttgagatcttttgtttttttttcattttgtattggatttggacacctctttttatttctttctttcttaaatctatttatttatattctgattattttcttacactcattaatgttttcttaaaatctcaccctacacatcttaaaaaattgtgaaatttcatacggacgaagcaaagactgttgtccatcacttttctattagtcacatttagaaaaaatatagttttcttgcactaacgatcattttaatcgaaatagtgaaaatctcacatttttgatagttcctttgtgaaatatgacccaaactcatctcgaaataattttttcgcaatagttataatgaatttgtactactaagaagtaaatatgaagattgatttcgcattaaattttgtgaaaacgaccccctaattcaaatattaaaaataatttttctttttctaggataaattttacacaaagttttttccttttaattctttacactcatagtgttctcttaaaaatctacaccctacctcatct

SEQ ID NO: 181077 - DNA, 794 bp, Cannabis indica
gcctatcaggttctggacctcgccctccaaatattttatcttttccaagcctcggtactgggtgacaaaggagaggaaagaactctagaaacccacaaataaagatgcatgagtaataaaaaagaagaagaataaaagaagtgaacaaaaaaggataaggaaacttactaagaggctgtgagacaaactccttgtaagcaccccctccaaatccccatggtttatcaaatcccacacatggggaaggagagccttgaaatgatgccaacatgctgctccaaactctgcgatgaactctgggccagtgtttccagcctcgacaggcaatgtttcaagggcctgactcgaggaggcagaggcttgagtcgctttgggaagaggcttgtcggtacttgcggagactaaaggaggaatcacatcctaggtttcagtctcaggaacctcgcaattagcagtctaggaggctcatttcttgttagctatagttttcttttgccttttagggggctccacctcgaaatcagaaggagcctttgaggtggccactctcttcttccctttccagtggacgaggccctcgaaatgaatttctgtgagacaagataaagtgttagaatttattgaaaaacgagtaaaaggggagattggggtataatttcctacctaaggaatttaccagaatcactagaagacaaggaagaagggctataatatccactaaaatcccgacaacatgtgatcctaaatatatcatagggattaattagttctaaatcccagcttgcatctatatg

SEQ ID NO: 181078 - DNA, 537 bp, Cannabis indica
agtttaatcagtaaatatgttgtataattatttttggccataagaatacttttttgtctccctcaaggttggttcgggctggcctttgtaattgaattttcgtaataatgtaaagctctctctatcattactcaaacaataaaaacaaaaaagctagagcctagctatcacctcttatatttttccttttacttttcatcttttagaatataaatgttcaatgcgtttgcataactcaataactcacgacaactctaataataaatattaaatttggtattaaattaatacaaaattaatggaattttaatattaatttttttttatttctaatcacaatactaaaattatattttttattattatattattttattaaattataaataaatgcaaataatatatatacaaaaaatttagttataaatattaaaaattaaagaaaaaatatatttgatgtagtctatgatgccgtgctaatattaatgggatactataaataatgatatatattggataagttttaaaatgttgtta

SEQ ID NO: 181079 - DNA, 663 bp, Cannabis indica
ggccaaaatataaatggattcatcaaacccactctctttttacattacttcacaattttcaaaacctctgtcttcaaacttcaaacataagcccataattctaaaaaacttttaccttgttatcattcccaggggtgaatgcaagaatcttctgactacatgatccaatacttctttaacctttatttagcacgttttttagacatggagccactaaaccttaaactattccaccctagcccgatgaggattttgacgttcaagttagctttgatcgcgtaattgattgagtacacaactcttaggaagatttccacaataatcttttatttttcagtcatataccatgtaagtatccggatgcttgttgaatcctgctattttgtatctaggatagaaaggcttacttcaagctaggtttaggatataagacatgtgtaaatggtaaaatgatgcccatatagttacatttctaggatagattatgttgaaattttctcgccaagggagtgctgataccatctggacagttagggtatggaaaatttaaccttataaacttttgcatgtacgtaggattctaaaattagggtttgaactagtaggaataactttcgagtgagtgttaagtccgtccatattctatacgtctatttggagttg

SEQ ID NO: 181080 - DNA, 852 bp, Cannabis indica
gtattgattcatcaaaagtagtatagctcctcatcctttatgggaagctctttgttgttagttagtccaacttttttcttttttttctttcttctaaagattttgtagattggatagataaaagggtaattaatattgttggaaattaattaatataaactcttaaagctgctaattataagtagattaagtttcttcatatggatattgataaattatatatctttttattttatttttcattacttgattttccaatgtcaagttgagtaggactgtatatatatgttggaggaattgattcgatttgattttttttttcttgtgtgacataaagtttagtgtattaattaatttgtacaaagttatatatacttcttttcaatctattaaatcaaactgccacatacagaacacgttggattcgggattattgacttggattccacaatttatgttctttcttttgttgtttttgttttacaaaaatactaattaatacttaaaaatgaattatatacttacatatatatgtgaatatattatctaaagccatgaccaaaaataaaaataaaattcctagttataattattcccttttataaagtggggaacaaatggaatcacttcctcttgaagtgaactagttcctgtgtaaatgaaaaaaaccatatatataattgaataattattcttttccacaaattttgatgatctcttaatcgaaattctacatttttttttgtttcttgttttataattagattttgtattaaataattttatgtaatttacagtgaataacttattctcagttggtaatatttattttttggattaattgtgttattt

SEQ ID NO: 181081 - DNA, 1164 bp, Cannabis indica
acacttagcgagaaacaaccttcatagtcagcataaccgttcaaggataaaaacaaaagagtggttggtggttattaaatattattctatgtgcataaaaatgaaatgtggggaatgtccactttacatgagcagtcatgaataaatagagctcaagaaaaaataattgtcaccctatacacctacaaataggaaaaaaaaatccaagataaaagggacaacaaatttgagagaaaaagttatctatcagattgaaagagagaacttgtactctgtatcaagattaatcattcatagtaagatggactcgtggagtatgtagattttaattacaaaatcacgtaaaaatatctaggtgtttatttattgttattattaactatgtagtatatttattacatgaaaagttcatatatttggttaacaatgatctgcgttaacaacagttggtccactagaaacctctgaaagcgcattgacgccaaatatgaaaagactaaaggagagaaggtgaggccacatagaaacgacctaaggaaccacttaaacggcaaggctcgcagatgcaactttcgagatagtgacacaaaaatgttagaagaaaaaaatctttgctttgacaaaactcgttcggaagcaaagtggggtcccttcatattcggagataaggacccagtttcgtgtgtcagacggatcacggaagccccactacctaaaaattttaagatgctacagatagagttatatgatggccatatggattttaggacccgcctgtctaagtacaacaagatggtgcaaatggtgagagtgagtgatgatcactactagaaaaacggctttcagtgacccacgttgagtgactctaaaactgtttagtgatactttgcatgtcactaatgagggtgactggaaagccagtttttagtgactcttcaacgcgtgtcactaaacccttttacaatcacttattgcacgtcattgtaggcatttaaagtcgagttttgtcagactgaaaaagtaacagcaacccccaaaagcgtcactatatctttttttaattattctttattattattttgcagatatagtgacccacaaaaagggcactatattagatttttttttaaaaaaataatattcaattctttttaattcaaattt

SEQ ID NO: 181082 - DNA, 937 bp, Cannabis indica
tttcattcatgagttttggagcacaaaatatgtagtgtaagtgtaatgtagtactataattagtttttacatgtgtatataaaaaccttacagtatataagtataacaatgcaataatccgattgccttctcagttgtgattaattcgggttttgattagtgttttttgcagtcatatttgatagaagaagatggtcgaaattagtgaaaagcagcaggggaaagaaaaagaagtaagataaagaaatctaaggtgttgaggaaatgcaaatattttggagaagtcaagaacgcaccttacatgatcctttcttagcatttcaaatttcgagttttgcaaggattataggggttcgggtattgacttcatcgaacacattatgtagaaaagaagaaggccttggaatttatgttattgtacttggaatgtcaatttcggagaaatttatgttattgtacttggaattttcttttttttatttttgaaagaacaaacagttcagttgaagagataactatcacaacacgtgactcctccctatagtaaacaccgttgaaatgaccattattccaggccatttttgctacactatccgttgattgattgtcaattctcttaataaaaacaattacagacatcaaaaaaaaaaaaaaatcaagcaagattccaaatttactaaaatacaggggtcgtagctttccaacaaggtagggaactgcatattactctaaggccttcaccaccactagggcatctgaggcaatggcatcttctctagcctccccacctgcaaggcccgccaccccactctttccaagaagcatcagtcaaacatatatatagaactagaagtggacggggatctttgaatgcagcaagaactgagttcctgcacaaactgatctctgcaatactctgaattgataaggactcctc

SEQ ID NO: 181083 - DNA, 705 bp, Cannabis indica
agaaagcatgcacgtgcaaggcacgttgtacttctatatatatatttatataattagcaatataatataacaaatgcatacattgaggcagttttgcatgataaaaattataatttaaatgggaaccaatcaaatatattacaaaataataaattattatttgtcattactcttttttagcaactgttgtgcaccacgcaacaactcaacgcaatcgaaacgaaaatactagaaagaaaaccactattaattttggcaacttcacctgagaagacgaccagaatcaatcaaaatagaagttgtttcgaattcatgaaaaaaagtagaaaaactactacgaaactaaaattcaaccaaaaatctagtttaatttgtataaaactaatgtctgacttcaattttcagatccatataaaatgcatatctcaaaaaattgaactagagttcccaaacaatccaaccaaagtataatctaaaaagaattacatcaatactataataaaatatttattctggtatattttcgttgttttctaaatttttaatggtgaatttattcatattaaatcataaagagacatgtagatagagttagatatgtagaaacactaaactgatttttaatgttttcataatagttacattacaattgcataaacattttgctaaccgttatttcgtttgattgaaaccttcgtctgatgc

SEQ ID NO: 181084 - DNA, 714 bp, Cannabis indica
agtaccttatctctaaattattatttgttaaaaaataatagggtatacatttctttttgtattttttaattttcacaaatatatattttctttttttaagaggaaaaagctagtaaataaatataatttagaatcatcattgtacaatagaattgtttatataattataatatgcatggtatgttttttttgaactaataaatctcttatgcaatgtgcagtaagtattttttttgaatattaacttattgttagtttttttaatagtgaaagctcatatattgatttatttaattattggaaatcatagtaaatagattattatgtgatcacacaaggaaataaaaataaaagtttaatttatttgttcaccaaaaattataaaactaagttttttttaccctgattaatgtctatatctttgcattcttttgcatgcccaattatatcatcaaatatggaaaaatagtaccgtagtaaataaatgatcaggttagatttcttttttttcttattttaataagtattatattggaataaaatcaaattatttcattctcccaatttcaaatatacaaatctcacttttttgtttcttccacagctttctttctttttacaattctaatacattacagttacactattttaatttagtagattaaataagatagtgactataacgtaggaacaaattaagctagattatattat

SEQ ID NO: 181085 - DNA, 553 bp, Cannabis indica
taatctaaaaataattcaaaactcattatatatgttccatgtcaatcaaaactagttacatatgttctgtgttacatatgagagttttttttgtgattgtggtggtaggctccgtggtcgtccatcaaattactaatcctctaaccttcttcttgctataagagcactgctcatttgagcgcaacatttgattttctatgtttactacctcagatgaaataattcatttagttgtatttttccttgtaatggttatgagaaaataatgttaatctaaaaataattcaaaactgattacataagtttcttgttaattaaaacttgttacatatgtttcatgttacatatgaggattttttttgggcgattgtgttagtagacttcgtgtttgtgcatcgaactaccaattcttcaatatttttcagtgttgatacaagagtgtggcttatttgagcgcaacgtttgattttttgtatttgttaccttgaatggaacgtatttatttagtttgctttttttttttcctttctggtctgtaatggctacagggggg

SEQ ID NO: 181086 - DNA, 589 bp, Cannabis indica
ctcttatttataaagtcacgaataaaaaaattcaattagaccagttgaaactatataggatatatatatatatttttttatatttttttacttattttagaatttagttatattaaggatgtaatcatgtattgtatgtaatgtattagctgtttttttttgaaaggtaatgtattagctgttttgttatgttttattgtatggtgtaattaatgaactgatatatggaagctagcgaaagcttaagcaaatctaattaagaattgtgaaacttaattaattatcaactcttttggggagacatataacatcatcaataatatctataagcatctttcagatttgataactacttcatttccaatcaactcaaacataaagatgatctaaaagcatatctgtaatttgttttttctttaaaaaaaaaatctaaaagccaaaatatgatttgttaaaaaactatatgcacatatatatgcactaaatatttcgaacagtgataatatttttatctcagttatatttgttcaaaattttcaaaaaaaaattgatataattaaaaaaatatatcacgttatagtgtgttttt

SEQ ID NO: 181087 - DNA, 913 bp, Cannabis indica
cgatttatcgagacactaacgataaagttatggttaaaaataccatcaatcatcgcagttagaatttcaaagataaaaaaatattatacactgttggaattagatccatgacgctcaaatattgcgccacggcgccacctccacggtgaattgcaatattttcaacttcttaagagtgtttggaaatttcaacaaaataaacttagggtttcgtttttaaaagaaaaaaattgtgaattttaaagggaggagacttcttaaaacttagaaaaccatgaagaagaaaaaaaaggaaatttacattatgtactaactttttcccatttattacaaaaatactgtgacacgcttatatttacgtttttactgttttttttttttaatttggcagtattctgccattagttgtaggtttgtatatattaatattatatggcttataggtgtcttcatagggtttagcctctacattttttttaaaaaaaaatagtgctttaaaaagtgatgatttgacatgttgtgtcactttttgtgacattttttttttatcttttttgggttttattatttttataaaatattttcaaatccactctcccataatccctgttcatcttcttcttcttccacatgtgggtagtttgatatttcttttcaaaaaatttcagttattacattttcttctcaagcttccctcttaattttcccccattttttgttcctttttctctatataatactactcctcctcaatctaaatgacaattacacgttcatcctcatcatcccctattgctaaaaattccccaaaacaaccctagaaaatgaaacccaaaccaacaataggtaagaaaaatttgaaagataatcctcctagacctacttctcttgttgcccctaaaagaaaactact

SEQ ID NO: 181088 - DNA, 765 bp, Cannabis indica
tcttaattttcaataatcaaatttaatttaaattagaggagttttatttgcacttatacccaaatattaaaaataataataataataaaataagcttaaataatttttttaaaatcactcttaatttttttttttaaaaaaaattatacattattattttgtgttaattttaatacttattttaattttattttcaaagttttttaatcatgtatatattttttttaataaaatttcaataaattttttattttattttttttcataatatttaaaatataattgtaagaatatgaatgaaaaaaaaaaaaaaaaaactaagatattattaaacttatatatcttatgagttttaaaacaatcatacattcataggacaatattttataattaaagtaatagtgtcacatgacactcacgtctcccatggattcagtttggatgtgtttgtagaaaatgtattttcattgtgcaaaataattaatcagtacacatagaaaaaaataatattttttactaataaatattaaaaaaaaaattaatacacaaaactcttgaattactttttataattttccaaaaccacacactgaaattgtacaaatgataatgttaataccatcatcctcaaatttctacatggtggtctcacttcagagcttatgttatgttttattattggttgcttcataaggacacgagaaacatcacgtcgaaaacaaagacacgagaaacataacttgaactaaagacaaataaaacaaa

SEQ ID NO: 181089 - DNA, 645 bp, Cannabis indica
gtgtgggcactcactctatcactcaaggttgaataatatgaagaagaaaagagaggaggagggtggcggctagggtataggtagaaggcttagaatttttcttgaaggaatgagatgcatcatctttttcctgaagccatcactacctatttataggtaaccacctaggtttaggttagaattatttggcattaaaataatagaaaaataaatggtaaattacactaagtgtggccggccatggattgtggattgggcccactttgcaattttgccattttgtcatttttccatcccattttctcaaaaacgccaattttccaatttaaccacttaaatgccaattccaattatttaataactaaaaattaattattaaataatattgtcatttaatatatttattaattagacttaataaagtctttcaattaataaataaaacctagaatctcttttcttcacaattttgcccttgcttagtgaaaattcataaactagacatagtctaattttagaattataattgattaattaaaatcaattaactgagtcttacaagcagtatggtctcaactagtatggggaccatgggcctatataaccgagcttccaataagcagaccaagaatttaccaagtaaat

SEQ ID NO: 181090 - DNA, 573 bp, Cannabis indica
ttatgattgtggtaatttgtatttgtatattcattttattttggactaatgtgagtatgctatagtgttgtgatattttttgactgtttatgtgagtattcaatgtctgaactttcttttaacttcaattcgaaatggtttgagttgagttgagttgagttgagctgtttgtatgattgtgtgatttgcatttggatatttttgtgtgaactagtaaaaatatttaggaatttgaaaacaattcgttttgttatgaatgttgttgttgctgacgagctcttgaatcaaagttatgttttgatgtgattaatcagctaattgtatttctccagacgttttggttgtcttttattacttccaaatgctcaatttttattcttgatacatttttgtgtgtgttgtttgatggatgaatcccgaatggttttcttgcttcacttcatttttgaaaatttatagtcttaaactaatctttcagtttcttgatttttcttgtgaaaatttcagatgctttcaaaagtagcagagagacttcttttgagacacaagagcaggttcatgatcctcgtgtat

SEQ ID NO: 181091 - DNA, 540 bp, Cannabis indica
ttaatgctatgtatatttacatatatatatacacaaatatagtaatactccaacattaaactaataaataatgtcttagttgattaagtggatatgagatcagttggccggccggctattatgacatatatatttagacctgaatttgcgctcagtgcactgcagttataagtatttagtagctatatatatatataaaactcatagtaatcaatcaattatctttttttttccttgtatctaattttaatcaacagaacatatataggaaattacgcgttatatatagtaattagatattataaataaataaaaatttacatgaacgtatgtatatatatatataattatacatatatagatagctagctataaaagagcatttatagaacacacttgatatagctagccttaattaagtacatatatgcaggtaaagccgcactacgaacaagtggttctatgtataaagtacacatatatatatattgttcctcttttaattatttttaatataatgatcatatatatataaatata

SEQ ID NO: 181092 - DNA, 607 bp, Cannabis indica
caattgataagatgaaccaaaacatacaaatgaatgaaaaatacttttgtttctttattgatgtgaataaaatggattacattgaaatggagttttatttagggcataaaacccaacagttactcctagaggtcatcgcctctcgttatcttccaggttacgggagacgttccttttcttagctacctcaaataattattgtcgtggctatattcttcccctcaatcatgccacgtgtcttattagtgaaaacttgtttaatatttaccccctaagctttcaagatcctttggatcacgggagcttgctattgttttcggtgttgaccattgacacgtgctaaagatttaggtcgcggatacacccccacatgagctgtattctactgagcgtacatacaacatttacttcctcttgcgtggtaaccacgtgacatttcaagaagtatttcttgccccttttcgcgcgtggcaaggtgtgtttagcaaaaaaggtggaatgcaactggcaactaaatgacgtgcataaaaggacctcaacatttttgtgggtcccaggctgatcgtacgggacttctcatctccctagctgttagatctattgcaag

SEQ ID NO: 181093 - DNA, 681 bp, Cannabis indica
attatgccaaaacataagccacaagaaatgtaaacctatgtacaatgaagaaattactcataacaaaaattggaaataaattttttatccctagactaaagaaaagggttttttttaaataaaatactgtatttttaataaatctttttgattttactgtcgcgtggtagaaattacatttcttctgtcctccattttttttttcttttatattataaacattttttttttcttttatactataaacataaaaaaaaaaaatacgagtcctccatcttccacacccatagataaaaccaccacaacaacactaggatagctggaaaacaataactaattctgatgagattgatcaaaaacagtaaaatcaacgtcaaataaataatcatggaaaaacaactataaaacattactaaaacaaataaaaaaaataaaggaaaaaaagattaaaaaaactaacaatcttctacacaacctcaacaccaaatgcaatagtggctatatttacaagcacggtcctgcaaaattagaataagaaaactactaaaacaaaattaaaacaacacgaaaataaatgtaaaataatgaagcagatataaccacttaaaaaaaatataaaagaaccatacacctcaaaactcttttgtcagtgagctcgtcaaatatatttataggagaacc

SEQ ID NO: 181094 - DNA, 549 bp, Cannabis indica
ccagctttcctcgaacttgaaacatctggagactttaggaccgattcccccggtgtccaagcataagggtctatggtcagaagtactcgtctgaacagagcaaagaacagtttttggaaacagctgcatccacgcgccattcacaatgcctttatccagcgcagatttcacatgctttattccactccgatgattatcccaggtcatcatatctccttgaatatgcatatttattaggccccgagactccactagttgagagatgaaagggatgaaagggtcccttcccatagatccttctcgctccgagggactaagaacaaaattagtatccccaaaaatcaaccaagggccaccaaatctatcccctagagccataatctccgaccagaattgttttttagcatggttataaggcggtccatacacacacgagaggagccacgggtgggagggggggtccgaatagacgagccccgagatatggttacgagagcaagaaatacattcaaaactaaaaccagatttccaagctaaaataatacctcc

SEQ ID NO: 181095 - DNA, 788 bp, Cannabis indica
  modified_base (758)..(758): a, c, t, g, unknown or other
ataataattatttttattgcataaatttagaattgtacattttttttctaaaagtatgaataagtaatataaatttgtggcacattagaaatataataagtggtattacactttagattatggtatgaaatttttagcataatatttatcacatgtcacccttgaaaatatggtttatttgctattatttagatatttttttatttaagatatatatgtgttagtaactaatttgaaggagaattacatagtaagaaaatcatagagttgaaatgaagttgttttattaatcagttaattgattttgctgctatcatttttcttaattggttttggaatatagttagtagttatatgtaatatcatataacaatatatgagaaaatagtggagaaaatatacgaactaattaaacccttgacacatcatatgtgtgttagtgagttagtggcattaaataataaaatatatataggttaataagaaagatctcaacagaatcaatattttatttttttttagattgaaaacactttctttcttattcgatactcatcaaatttacattaaggcttactccactcaaaccgtagtcaatcacctcttttctcgtctcatctgtattctctcaaacatgaagaccattatataattagttcctttgtagattggaatcttagaactcattttattgttccttcacattgcaaagattggagtcagccaccactcaagaacaggagcatcaaagtaatacntattaaggtttcaaattccacactaagatt

SEQ ID NO: 181096 - DNA, 579 bp, Cannabis indica
tactattataactaaaaaaaaaaaaaaactgacttcttgattggtttcaaacacagaacacaatacccttttgctgaaaatatctgcacccttccacagcatttacagccattttatctcattccacaccatcctccacctatcaataaaagtcacatttaaaaacaattaataaatataatttataacccagaatttcaaaagaaggaatttgtcaaaaagtatagtcgtttggaaagttaaaacattattttacaatacataaacaaatacaagagaagaggaaatttatttaacaaaaactaatcaattccatacaagaaaaaaaaaagctaagaaaaacacacgttgaaaatatttagttaaactcagaagaaatttctgatgaaatagatgaaaagggttagacacaaaaactaatctgaatcaaacttgacaaaatataagaacagagaaggaaggctttaccaacattcagagcaaatattatcattatcatcatcagagaaagaaaacgacacagaaagtgactgaaagaaggacccctttgaagctttaaaaagagaaccccaatagctt

SEQ ID NO: 181097 - DNA, 513 bp, Cannabis indica
attttgtctgaatgtatgtgattgattaatgaataattaataataataattagcgggaatattggcggttgggcgttgattatagggtagccaatgtcctttacttttctaattgtaataagacgtcgtttttttttttttttttttcaagttcaactctttctttctttcacttctttttatgtcttctcctttcattaatacattgttgtttttctttttatccaaaaaattacattagtaaatttctttagtgcaccattggtgtaaatatgacttgggcttttcataatgaaactgatacgagcttgcgagatacgagtatgatcccatacaaaaaaagaaaaaaaaaaattatgacatgaaaaaatataaatttaggtataataggatattgtattgtgaattagcacaacacgtcataaaaaatatgagcttaagcacgatacggtaagacaaatctaaaagtatgacgtaaatacgaataaattagtaatgcggaattgaaaaagc

SEQ ID NO: 181098 - DNA, 826 bp, Cannabis indica
tgtaagataaaaataagaaataaagtgatgtgatggagaggtatatataatggtgggtggtattaacgtttttttgctcgaaaacaatcgttgctcacttacagtccgacagtgcagttgcaataatgggttccttcgcttttgtgtggatgatgatcttcctcatctccttctccaatctccactttcccaccttttctcactccccaaacaacctcaccctcttcggcgatgctttctttagcaacgcttccattgttcttactcaagaactcaactcttgttcttcttcttcattggcctcttccaatggcgttggaggagctctctacgcagacccaatacgcttcgtcgactctgaaacaaacgacacagcgtctttttcatcggtcttctccttctccattacgccctctccgttctgttcccccggcgacggcatatccttcctcatagctcccgaccaagattctttcagctcattcaaaggccacatcggtcttccgaggccttttgatgttaaagatcccttttttgctgttgagtacgacacaagcttcgatccactgctcggagacgtaaacggaaaccacatcggagtcgatctcaacagtgtcgtttcagtctcctccgtcgatttaactccgacaggtgtcaacttgaaaagtgggaaaaccataaagacttggattgagtacagaaacccaatcaagatgattcgtatttgggttggctactctgctgtaaggcctaccaatcctgttctagtcgcaagactcgacctttctcagatactcaaagagtatatgtacgtgggtttctctag

SEQ ID NO: 181099 - DNA, 528 bp, Cannabis indica
ttttataaaaataataaaataaattctcaaaaatgtaataaaaacaaaaaaacaatagatctattaaaatgtaatttttttttctatttttgtatatttataaaataagaacattttataatgcactcctaaaaggggcactcctaaaaggggtgtaccgatatagctctgtctatttcggtatttgagagaattttttagtctaatttttttcatgattgtgtacattatagttaattaaaacatcttgtaaaatttttagaaattcaaaaaaatttaacacaccaaaataggattcaaatagtatattacatacatgactcttttatgttttaaagtgtgaaataaaatataaacactgctttctgtattgttaattattttacatttcttaaaattttacatgatatgatatcttaaataactataaatatacacgactataaaaaaaaattagaatgaaaaaattcttctaaaatacatcagtgcacccactttttataagagtgtattatacaagcactctat

SEQ ID NO: 181100 - DNA, 1262 bp, Cannabis indica
gttcaatctatgaagtttcttaattaatagttatacctcaaatattcaaaatattagtatatagttatagggtttatttgtaataagaaccaactaatttgtgtagagtagaaaattttgttgaaacattatttgttttattgaaaattttagttttgccaatcttgtatagaggagactttattgtagtttgggatggatttttttttcgaatggaataattaactttattaattacaaaacttcggctaccaaccaaggtagcaattcagttagaataatgtagcagccttaacgatattatgaactactatattaatagatcatttaataaaagaaaaagaaatactttttaaacttgctagcaaactttttacaatctttaatgacaagaccaaacaaagactagtttgggatgatttagcattaaacttctatatttagagtgtcttttgaaagactcaaaattactggtttagtgtgactgcctaatagtatgagttaaggctaatagctatgaatctaatttaaatattaggaatcattaagttagggcttagtagattaattctttttctttttttttttatataagctttaagtataagaaaaaactatgtcaagtaggctaataataagttattgtcatttattagtatgttgaatttgaattttttttttgtattttatttttttttggtgtgggagttacagtggattccttacctttttatgaaaaagtgtagaaagacatcaacagaaacagtatatgttaagactgcaagtgataactataaatggaaaatgaaattacaatttttatgatggaaaattttggttagaagaaggttggccagaatttgctaagcattataatctaaaaagaggctacaccctcacgtttagatatgaggggaattctgactttaatgttattatattcgatataaatacaatagaaataaattatccttctgttcttgacactaaagaattcttaacccctaagaaagaagttataaatggtgatgaggtttcatcttccaacaacaaaatgaaagaaggcatttgcattgccatgtcctatgcctataagacaagccaaatttaatggtgaaatagaattcgtaacacctaagaaggaaagcatggatgccactgattttgtcaaaatttttgattgagtttccacaacctagaatgcaaagtagtgaatttcaattgttaaatgttccccaatatgatccgaatccaataatgac

SEQ ID NO: 181101 - DNA, 690 bp, Cannabis indica
ataagagtctctaggctggagactggattatttttgatgagatggtcgtaggggttggtgatattaatcccctggaaaagaagaatcttatgattggagatctgatggtaaacgagggactagcctggaatgaagcggaaattaaatcctttgatcttgctcagaaagataccttggtctagactccggatcctcaaggtaatttctctcttaaatctgcgtattgggctttaaataagaacactttttctgttgatgatgagttatttaagattttatggtgtagttctctacattcttgcattaagttatttctttagaagttgtataaagatgctttgcccacgaggtctaaacttgctactatttttgctaatgacctgggaccatgttatctatgtaatcttccatcaagtaatacaacttcgcatttgtttggggagtgtgaggctgttaaaaagctctagtttctgtcaaaatagagcattagaattgagtcatttcatatcaggtttggtgcagatgtagtgaaatggataatggatgctcccttgttgcaacatctggatgcccaagatgttagcgagttcaaagtgtatgctaccgtattgtgcttttagaatatggtatttcaagaatcatgctttccataaaaaatgtgccattattgtagatgtgatgtctaagcaa

SEQ ID NO: 181102 - DNA, 1137 bp, Cannabis indica
aaaaccttacgaattggataagaagagggtgagtttgcagagaagctccctcctcttcctcttcttcttgtttgtggtctctctctctctcttttctttttttctttctcacttcagattctctcttttggttctggttatattattcggtgttgagaagagagaaatgtggtattaaaatataatatagcataaaaagaggggtgggcacgtaaattttataatatttattatttggttaatattattttaacacaaaggcgaagagaagtggaccctacttccaggtcgccgtttgggattgcggcctacaggtaccgaaaccgctaacggccgtttctgcacgtgttgcattcttctcaactttcttttttttttttcaattctgttactgttactcacccattctctctctctttttttaatgtaattttttattattttctttgggaggatactgaatctaacgaaaactttgagatgttcttctttttaggggagcaacttgttctctttttctctttttactggtagttttttttttacttgtttattattagatgataatatgatattgtaagtgtaggatattttctcattaaacttgaagaaataagaaataggaggaataaaagcaaaacacaaaatacgtataaatgtataacatcatgattatatgagaagtagagaaaaaggagtacaacactctccaatgataatacataatatatgaacataagaagagaagaaaaagaatattctcgcaggcttaaataagagatctttgtctaaaatcatttcttgtctcacatggatacttaagaaaattctaaaaatacttttaaagaaagcattttatgctcaatctaatatttaaggatatcctcacaaaaatgaataggaccaatgatttaaccaacaaaatgctataagtcttatctctatgacatggtatgaaagtttgttttgtgtattgagtttttaaggtttgttccgattagggttttgttgtgatgtctacgtcttctagttttattgacactgatgcggatcgattttcgattgttccattggaagaggaagaggagtctacagttaggtatgagaagccactaattgaagatgccgaggttaata

SEQ ID NO: 181103 - DNA, 499 bp, Cannabis indica
aaagtaaaattgacatgaccatccatcagtcatcaccctcaaccgtcctcctctcttcctcttccttcttcactcgtcaccctcttcattttttagttttcttttagattagggcaaaactcttcagtttccattttcgttttagaataggcaaaatcctcactttgtattttcatttcgtgtacatattatgcgggaggaagtgttagtagttcattgtggtgtacattgttcgtcttccgacaatggtctggttctcagaatcatgggtcttgacgactgtttctacaagtaagtttctctggttcttcttttcatgtttttcgttcttcactatgggtaatcgaaaatcaaatcttttttgaaggaaatgtggtgtagtccattttcgtgtactccattgatacaagtgcagtttgattaagtggtttttctctcagttatcgatagctctatctctggtagttacgattttgctcttgaggtctctctctctctc

SEQ ID NO: 181104 - DNA, 781 bp, Cannabis indica
aataacctcactcctctgacccacaaatttttgtttaattaaaatataagaatttaacataatctacatttttaaaagccaaaaaaattattttaacactttttttattttgttatttgatatatttattagtataaaaaactgtgaaaacattcatgtaacgttgatacaaataaaagattgaagaaaacaattttgattgtaagaaaaataatcttgttagttgttagtataagagttctatcaaaaaaagtattagagttcatgttaataaacctttaaatatcatatgacatttgtttgattcaaatgattttttttgtaaggtacatgagttattgatttaacttaattttatacgggcttttattatttttctaaaactatatttatatatgagaggcaaacaattatttattttaaagtttttttttttttttttttttgatatcttggtatgtttttattaaagttgagtgattgattagtgagtaaatgagtaatagtgaatcgtgactgactgaggcgaaaagtttagtcaaagaggctgtgcttgttgggggctattggctaaattgcgcaggtctttttggcaaaagagcatactgcttccaactaaaatgcgctggtttcaaacagaaatgccgatcatgccccctcaaatgttcgattgacaattttacccttcgtgcttctgtcatttaagaatgattagtagaaactatttgtaactggcacccatattaaacttgcttgtaataaataaaacattaaaaaaaaa

SEQ ID NO: 181105 - DNA, 680 bp, Cannabis indica
agtgacttaaaaagatagatgaatccccttagaattaggattctatttatagtgctttaaagatagatgaatccccatatatttagaattctatccatagtattaggaaatatctcactaaaagaaaagataactcaatttttaaaaacagaataaaaaaattgcaactctacttgaaaagctatcctttttttttcgctatctttttatttttatttttcagaaatttcttcctacgatgactgatagtattttggctataactctctcgatattactctaaattgcacgattcaagatgttatcaaaagctaagaacaacatctaaaactttcatgtttagctccaagtacagttctgcctctaaggttttcaaaatttgcaattaagttccaccttgtaaaatcgagctcgccaacttctactattttccaccaaaatatgctaaaatccctccaaaagactctaaatgcattaatagtctttaaaatagcttaacaaattaacattacactaatcaataatttaaagaatcaatttaacaatattaatacataaattgatcatatttataagacaaatatagactcatcattggactaatccttcctttcttctgtctctctccttaatgccagatattttaagcacaatgattttcttagtgcttccaaaggcca

SEQ ID NO: 181106 - DNA, 834 bp, Cannabis indica
cactcaagtgcatgcaattgaaaattttcaattacttcaaattatatcattacagtataattatatggttataattatatggtttgataaatatattaaatatttaaattgtataattatctctaattatatataaaaagttaattacaccatagttccattagagatttttttttttctttcttcattttgttttctttagtaaacatcgatcttccttatttgtataattgtaggttaaaaagagtattagacaaattaaatgtaaccaaaaaattaaatgagtatttttttttttttttgaagaaattaaatgagatctcaagtgacaataatcatatataatttcttttttaagggggctttaatttattattttgttaacgtctttgccaattgatgaatattgggaaagaaaatataaataattaataaaagaatatgtaatctgaaccaattattattatcattgaagtcccacaagtacaaataatgtgtatctgagctgctaactgaccgattatgacacaccaccacccacttcggaaaacttggataatttggtacccactagggctgaacatcgggcgggtttatcgggtttcgggttgacgggtttcgggttcacgggtttcgggttcaaaaaattgaaaccaaacttggataatgtgtatttaaattaatgtgttttgtgaggtgggttcacaagtacaaataatgtgtaccaacccggacccgattataaataatattttttttttaaattatttggcatatttattaattatttaaattttgcatggtaaaatatcattattctccgtagaacataag

SEQ ID NO: 181107 - DNA, 572 bp, Cannabis indica
aggatttgttagagagatatgtgggtgagtatatttttttttaatttaaaaaagatttgtttaattttttgggttaattattggatttatttatttttaacgtttaacgttaacagtctgttaagttaatcgtgtaaaggctaaaataaaaaaaaaaatcgttaaaaccaagaatcgttaaaccaagaattgccgttagataggcacttttaatatataaagatatctgatcacaagaatgaagaaaatcaagctgtgtgtgagtgagataccataattttctgatttttaggcccatataatatactatatatatttatgtatatatttattgttctctctacgtaccgattcaatcattaatgcaaatgatcatgtataccaccatgaatcaaaagccatatctttgtacattttgtacgtatacgtacatacgtatagtaataatatgtatatatacatgtataaggcatttatatatatgtatgtataatgcatgcatgtgagacccctatagctcataatattattatacgaagatacaatatgtcatagttattagagaattaatt

SEQ ID NO: 181108 - DNA, 713 bp, Cannabis indica
acaattgtagcattagatattctattacacctgtgaccacctttggagtatctgcaattttatcacatgccctagcttcgataatgcacactaccacttttataagtctccttcttttcgtttacttttattgagactgaatttgcttcgttcaagctccatctctagatagacttctcacttcttatatactgagttaattttgtcacagaatgaacgcggtcaagtggacgtgtggtctgagaagtgtcttccaccaggaactgtgcatttaaggttgccaagagtattttccattgccaaggagctggaaatcgattatgcacctgccatggttggctttgaattcagaaatggtcaatcttatcctgtctttgatggtattgtagtttgtgccgagttcagggatgtgatactagaggtaaccacattgtcacattaagagtgaattctggttcttgttttatataatatatatatgtatatatattctcatgatccgtcaatgtaattaattgttaagtttctttttcctcttttgcattctttaaatcttactgccacccattagggaatattaaacttacagccggttaactatgtatttttgatgaaatctttttgtttttaatgtgaaattctgatatcagtgtctgtatattgaattagttttgaatgcaattccttcatatagaagaacaaattctgaaact

SEQ ID NO: 181109 - DNA, 984 bp, Cannabis indica
ataaaataataaaatattatttatatataataaaataaaaataaaacaaatctcattaatatttgaactgatatttgatgctaattattcgagagtcacaaccctctatcataaataggtacgtgccgaggcattaatatagccattaatattgcccaataggtactaaccacacaaaaaatcggttttgggtttgtaatttgtttctgatttaatttatatatatatatgcaaaaataacataaatagactatatatatttaataaacacacataatattcacgtacttaattaatatattaattacttgatataaattaatatcatttatttaattaatttattcttttgggagctatatatcaaataattaaattaaatcggacaaatatattatcatttatggaaaaattaattgttcaatatgacaatgagcatagttttttctttaaattgtctatagctagctacgtctttttaatcttttttctttttaaaaaaaatatatgatcaaaccatggactctctaaattaatataggtaagttttgattatatagctattaatatttgaactgatattatttatctttttattaaaatttctttaaactagaattctaaattgcattactgagaacaaaaaaaaataattttaagctttaagctgtaatacatataaaatgtataagattttttctaaacctaaaatttttaatttcataataattaacaatcatttatctgtttttattttttaaaaaatacttgagcttaccaaaatctataagaacaaaaccaatgaagaaaattttaacaaaaaaaaatgaacgaagaaaaaaagtgtcataaacattattgaataatggcaattgccaacacaagaatttcagcacaaaaaattatacttgacccctagacaagattatcatgatcttccaatcctaataatataaataatgaacaacacctcattagttattc

SEQ ID NO: 181110 - DNA, 1212 bp, Cannabis indica
actatagccccatatcaacactactaggtccgtccctgactgtgatgttagaatctttttcatctattttattttttgtaaaatcatctgggaattaggcgactaattatttagttcatttttttaattctaatcttaatcgtgtttccaataaggtccaattggatttcatgctattatttaataaaatgccatgaaaaatatgagcttagcatgccttttgactagacaataaacatgcctttttactagacaatataatctacatgccctttgtggctcatggatacaccctttggctagacaatactgatcagttcaggggcaaagccacattcatggctagagacggacccactaatactataagtcccaaaaaaaaaaatattatcttttaaaaaattaaatgtaaattatttaatttgataattatacactaaaatagtaaaaaagtacccacaaaattaaataaatctagtaaaattaaattataatgtaagtataaataatttttttaattaataaataaagttctaaaaggtaaaaattttaaggtctgtcactgaccacgacaaacatatacgaccatcgctacccgatatatatacatcctcttattatatacaataacgaaaaaaaacaaattattgatgaaaaacacataaaacatatatatatagtctctaatactacattaatttaaaatatatgtagtgtaaattgagcatctatgtggtttcttaataaaaaaaaatttagaaaaattgtcatactattatttttttagatttttatttttatttttatagcaactgtttgaattttgagattatattgtttacattttataaaaattattttcattttgaggttatactgttttatttcgagattatgttgtttctatttttataaataaataaaaagtcaattataaaagtttaaattaaagaactccaaaaatatataggcatataataacttttaataattataaaatataaatataatatactattttggaccttatattttgtaaaaactactaattggatcctctattttattaaatgataaaatgagctttgtattttttaaaattgtacaaataagaccctaaattaattttttgtcaaaataaaacttaataataatccgatctaaagatattatgacaaatctggtcacattttctgtatttgttcgtgttag

SEQ ID NO: 181111 - DNA, 1016 bp, Cannabis indica
ctttgctaatgtcaatactatgggaagaagtttaccctcctttctgatcatcttcatcacttactctcaaacacaagttttttttttaaaaaaaaaaatcaaaattattagtattctaaatatactcgaaaattaagaagaaaaaaatggttaatttattagtccgaattaattatgaggcattgtcgattctatactctgtttttctgagttgtaaattctcctgtccaattttgtttcctaattaaattaagatgcataagtgcttgttttgtattaattaaattaatatttatgtacttcttattatttatttagtaataattttttaggcctttaattttttttttccctgaatgcttcacagcgtaatcaattcacatgcataggatcgaggaccttatagaaatttaacattatatatttagttatacttacaaaaacgtgtagcactatcaatttagttttttttgtttaccaattggactgcgtttttatacatggtacaataataaggaaaaaaaaaaaattaggactatttttttttttgaaaataattaggacttattttagtatattctaaaatggtaaaataatgtttcattttttggataattttcacatgaattttgaattgataaaataatgatgatgatgatgataaagatagaagtattttaagtaagaactgttttgtttacactgaaacccgctactttatgtctgtcttccatggtttttatattgtccatgaattttggtactctagcgaacaggccttaaaccataaagttattgactaatagttttataaaaaatttaaatgagtttttggctgttggtttacttatgtttaaccttctaaatttaaatttggcagtatataatgtttacacttttatattgtatacacctaatattattattttaaaaattaattttaaaataaaataaaaatacaaaaataaaaataaatattaaaaaaataaaataaaattgaaaaaaataaaaataaa

SEQ ID NO: 181112 - DNA, 599 bp, Cannabis indica
gctatttagatatcctacaaaattttgaaaaattcggaatatttacatatagaaaacaatgttcaaacagtctattttacacgcgtataaaataaaatagtcacgcgtgcaatacactgtttgaacatagttttcggcgtgttaaacttttccaaatttcttaaaattttgcaggatgtcttaaataactataacgtacatgaccatgagaaaaaatttgactaaaaaattatttcggatgctaaaacagataggggtgcatcaatatatccattttaagggggtgcattgtagaattttcctaaaatatttatggtataaaatttgatttatgatatattttatattaaatttaataaaactcttagtattattaaactattactattagagtatcatttttattaaagtgttctaaagaaatggtaatattatttttaattttatagcattcattgaatgtaatacgggtctataaatatgaaagaaaaaaaagtgtgttgacaattatattttctaaattacttatctcataaaattaagaaaaaaaatgatattttataataagtctgttgatttatcaagttgtgagatttata

SEQ ID NO: 181113 - DNA, 1037 bp, Cannabis indica
atttcaactaactatgttatagattctacaatttaaaataacttaatttaatagtcgtaattttatagttttcaaattattaaatttatatataagaaaaaaaaagatataccaacctttaaatttatttaatgtaaatattgccttttatatatgtttaataattaaagaaacgatagtaacaaattcaatttaataaagattaaaatatgatgagaattttgtccccaaaataaaaatatgatggccatgatgataatatattattgtattttaatacaaaaaaaaaaataattattgaagacgtggggagatattgtgctgttaatgttatgatactattattaatactgttttgttttttaatgaacaaaatgatttattgttataataattattaatagtgagaataataataataataataataataaaattaaaagtgagtgattaattaaagaatctttaaaatgtgaaattaattattcactgattactttcgtgtggatgtgaaaaagtagggaatgcgtactgcgcactctgcgtacctgagaaggcaacacaccaccactagcggttaccttttttatttttcaataaatttttatgttgctatcgtacgctttttcacggcccttctataaacttttaaataaataaaccttcaattatatatatttattatttctttggtaccactaaaaatttataagtgcacttattccaattaattttttttaatttatattcttaaacaatagaaaaattactcttatattaatttttcaatttattttttttttaatttttcgatttgagttgcttcgatgattgccatatgaatttgaatagctttgttaattgcttagattttttttaaaataaaaaaacttaaaaaatatatccatcaaataaaataatgatgacaaaaaattaaaataaaatattatataaaatttattaaaaaaagttatacatgatttaaaaaaattatgcaaataaaattaaaacaaatattaaaattaacataaaataat

SEQ ID NO: 181114 - DNA, 546 bp, Cannabis indica
ttttataatggataatcatttttagacacgttattttttaatcattagcataataactattaattaataagctttaatatagaaaaataaataaaaaaaatctgacatatacattatagaacagaacacagcttatttttttttcattattaatgcaacatatttatacacgttgatataattaatacagcccacagctgtaattaaattaaaaaaaaaaaacataaacccagcacatacataattaatttaataaaaaatacataattaattaatatataatacacaagaagaattaataaaatttatgataatattaaatttaattaacgagtcatgcctccttcaacagttggaggagtgggacccattgccacctcacgattcttctcctctgcatttccatgccatcctatacaataataaaccaatttaattaaacaacaaaccatatcattaattcaattaattatcttcatgattctacttcttattattttatgatatatgagtcaattatttatttattattatttttaaaaaaac

SEQ ID NO: 181115 - DNA, 699 bp, Cannabis indica
ctctcccatgcttcaatgtcaataagcatggcatatgctctcctcttcatgtcaatcaacaaagcaggtctcttgaaagggccaaccttctgaaggtgatttgccttgaaggaggactggggtataaaagtattcttgatggtagaggccacaattactcttggtcacattctcaatgtatggacttaattgatggaagggatagagtcctttctcttttcgagtaagacttctttttagatcacataagaagtttatctcatggggagtgggaacatgcaaagttcttagatgatagaagatgaagaaggttgatagagttctatagccatttggtattatttggtagggatagactctaaaataatctgctatttggataaaccacgggtgtaaaggtaagttagaacatgcgttcatatggaactgaggccaagcactacaatatggattatgagaactattgcaacatccagtttgaggtttatggatgaaagtttcaagaacaaagtaatcatccatgatcaactcaacttgatgttcagagatagtgctgaagagaagaggtctcaatttgaaagctcgatctttcgaatcatcactcataatggcagccttaataagctcgattaccataacttttccaccacgcgctttgtctagattcttggatttaggcactatgagcttggctctaat

SEQ ID NO: 181116 - DNA, 762 bp, Cannabis indica
actaataacccactcttatatatatttatttatttcatattttaaatatattttttatattttaaatagttatatataattatttattaatataaataagttaaaaaaaatctacagatatttggggtaagacttaagagagtttctttttttattggaattacacattactaatttttttaactttttttttttaatttactgttttagttgcgctccagtagattctatgtgagttctgaattttagttgcgctattgctttctatgtgaattttcgtaaaaatgacaaaaaaaaaaaaaactacttaaagtgcaaaaataaaaataaaaaaaaaactacttttttggtgaagaatattttaaaaggcacttagggtgcctactgcctagtaattttgtgagttggagtgttactatcaatctcttattacaacctcttagttcaagctcttgactgtgccttccttacgaggtggctcttgccatgtgaaacaaactttggaatcgcaaaactttagagcgtcataaagttctgtggtggtgtattctgtctaataccctctcgacatgagctattcttgccaagagatcgccggttagtgatatatgttgccctatttgtggggtgggtgaggaaactaaggagcacaaattcttgtactatgattttgactctcatcttttggaggacatctccttaggttctcattctggtgttggaatttcagaggggctcatgtgggactgggtgcaaattcca

SEQ ID NO: 181117 - DNA, 522 bp, Cannabis indica
ctctgtctcgagaacccccacgcgtccacgcacgcacaccggactttgacggagactgcccacaccgtccacgccggccacctacactcgaccgcccacaccgtccacgcaagctgcccacacccgtccgccccaaccctcaattttttttttcaattttttccttcaatttttgatgcttaaattcatgaaatagattaatatgttgcaattatttgtgaaatatgttagttagggttagatttagaaagagatctattagttaatagggttgaaaatggtatgagttttctgtcgaatgtcaaatttttttgggttttaaagggtcgggtccgatggggcccgatcccagtccgatgcccgtctgatggcacacaaaacacttaaattttgagtttttaagatcgggtccgatgcccgtccgatgggcccatcggacccgaccttaaaaacccaaaaattaaagtggttttgtgtgcaatcgagacgggcatcgggcgcatcggacccgaacttgaaatc

SEQ ID NO: 181118 - DNA, 757 bp, Cannabis indica
aaaaattgaaaacaaataaaatactactttaattataatggaatattggggcgaaactctcttaacatttacaattgttacacatataactctaataaaaaaagtggtggcaaaaatatcttatcttacgatttcgttacagtcataccctttttagccagtaagtgtcaacttaaaaatacgtgacgacatattattagagtgtgtattaaataagctaaaaaatatgtcgccacatatttttaagttggtacttaacaattaaaaaatgatataactgcaacaaaattgtaacataaagtactttaactgtcactttttttttattaagatcatatgtgtaacaataaaaaatattaaaagaatttcaacacaaatatcccaattataattatagtgttgatcaccatataacaaatttgaattataacctttttcaaataatgtccataatgcccctaccaatagttactccataaattttagctaagtaaggattgagagttaaaagcacaaatggtggaacaacaaaagaaaagagccattgaaggcggcttaaggaaagcaagagaaacctttttttctttctttctttttcctttcttttcctttttttggttcactttccaccctaagttcctcatcacctttttctctttctttacttctttaaggtccataaccaaacaaaggtcatttctcacctcacttttctttcctctacttcctttaatttcattgcctctatctttttatc

SEQ ID NO: 181119 - DNA, 506 bp, Cannabis indica
tattaggaatgaatgaatgatttgagtaatgtaattactctttgattacttaatagcgattttaaatatatttgttgtattttagtatagtggccaccaggtgtttgtaataatgttcaaacgaaaacataatgatgtattggcttcacaaaccaatacattcatatatccataccacatcttacacacaagcgcacataatgactatttgagaaaaatgatgaatttaggaagctagctaggtaagccttgcttctatattgtagtgtgtattatgaattcttttatgaaaagatttcgatggttatccaaaagatatgctatatattagcacaatgttgctgttgtggaattatacattatgcatatctgctattgctaaagatattacacttgaaaaatgcatataatgttgaaatatttgatcttcgtgtactcagtagtaatattttatggtctatgatagaaggctcagggagaagggtgaaagaaagaaataacagaag

SEQ ID NO: 181120 - DNA, 837 bp, Cannabis indica
gtataactttagattgtttcaagtagaaatgtacacttatttatcactttattatctgtatgttactacttcctgctagcttaccccaaagccagaaaagtaatattactcaagacaacttgagttagaaaactaaaattttgctaataatttttttaattagggcattttaataatttttataataaaatattagatcgcaataattttcacgctaacaaaaaaatacatccgtgcaattcccagttccaaatgcacctatagatttacctgcgcaaaatgcacttgaaaaaaaaatgtatatgtactcactatagatgtatttcccgaaaaacatatatatatatataatattactattttagtaagttttgaatccttttaatggtattaataaagctcgccatgaattacgggcctaattaggcttacaaccacaacttaattagacctaattaaccttagatgtaaagtttaaaatgcacctaaaagtattgcactgtggatctacctatgcaaaatgcaccaaaagaaaatgtacatagatgttgggttttatgccctaaataaaactccatttcaatgtaatccattttattcaacatcaataaagaaacagaagtatttttcattcatttgtgtatgttttggttcatgttatcaattgcttgtctatttgatttataaattcatctgaaacccttttcacatacttgatcctgtttattgtgttgtcaacacattggaaagtaaacatgactatgtgaataaagattcctagatttatcagacacagggttttactgatatgataatctacaacagagtttacttgca

SEQ ID NO: 181121 - DNA, 757 bp, Cannabis indica
caaaaatacatattttaattttcaaaagtttctctattttcttcaacattacattttatgatgatgatgattgtgtgatagtatatgtgttaaacataaattttaggttcagctataaaaattaggatcaaaacctctgtaaatactttgaaaatatactaattttgacaattttttgcatattttaccctattttatttccaaaatgtattttatgaacctgttataaaaactcatgtgaatgcctaacaacatttttctgttatcttctttcattctatggtgattttaccaagtaaaaagagctcaaactcaaagtaaagtttctttcatgccaagcaagcaaatatcccatgcaccaaacattagtaaacattgttcttgtttttgtgacaaaaatggaacaagatattaaaaaaaactatatcccaatttaagaatgttatttgtcttagaagattgttgtaggttatgaagtgaagagtctcaagaatttggtttaggaattcttggtggaatgaaataaataatgtcctaaaaggaaaactttatttcaatgggttacttgagctacttgcattcttattattaagcttgcaaaagttttgttgagtgacaatatatcattcttacttagttgtataaatcttgtataccttgggttactatatcctcttatttacataatctacctattaaacaaggtcattgcatgagttttctaatgtactaaccaacatgttctttcatctaatta

SEQ ID NO: 181122 - DNA, 552 bp, Cannabis indica
taccatttttagtgaggatgatgttcctcctgattttctttctattgtagtggttgaatcttcttattaataaagttaccattttccttcaaaaaaaaaaaacagcagcttaaattaccaagacaacttaagcatgtattctaatacgactgtcttggtaaaattttgggtacaatcattagattggttagggaattacttctgtaattgtatttaatatcctcagtgtgaagtttttttttctcgcttaactacagtgtgaagttaatgccatttgattttgctctaattattaactagtcaataatcatgctttgagatgtctatttatatgcttccctttttttttttttgtcttacttgtttaaaggaaataataacaatatatataatttttcaggtgtgtgattttggcctatcccgttcaaaggaaaacaacatttttattcatccaaaaccaagcggcgaggaacgagtaagtttagtggtttttttcttaacccaaactagagtttaaattacatatatttgtttaagaatgtatgtggtata

SEQ ID NO: 181123 - DNA, 666 bp, Cannabis indica
ctaattaaaattattgtgtatgcattctaaattgctacaaaacttttaaaagtaaggatgactctataaattttatgcttttgtgtgcttcggaaggctaaagctttgtattctaacttcaaagggtaatgaggaagtagatagacttgaaagatttggtatgttttataataaggtattttaatttctttcttaatctattttatatttttctactgtaatttatttttctatataagaatagttattttgtatcttgtactatagtcaactgaattatttttttttccatgtgagaattgcataatcattttcagtttggttcataaaattagataaaatattatagacttgaatcaagttgattgtgatttttatattctacctgttataccaattttttttggattatttaacaaaaagttgaattgaattgttttttttttttttaaacaatgaaatatcaacttcattgaaataaagcattcaaattacaaattggcatgaaagtctgccagaacatcaacatcatgaatgctacgatcagaatagaaacaagagcgcctagctaagaagtgggcaactttgtttgctgatcgtctaacaaacgaacactaatataggtagagaggataagagaattttacaatcatgagtaatcagacc

SEQ ID NO: 181124 - DNA, 585 bp, Cannabis indica
ctacgccagcaagcccattctttgtttcagactttcactttcagtattctgctcattctttgcttcttcgcttcttctccaactgaataaaaattacccagtacattgctttcctactcattttcagtcctttatgttttcaatattatttaattattttattttagtcgcattttataaaaaaaaaaaaaagagacagagagagattttgtttaggtatttttacacgtggcgctacttttgtcacttttttttacatttttgtcaatactcggttatttgaatatttataaaagtttatttttcaattttatattttcaaaagtttttttttttttgaagaaaacctgtatccattgcaaagaggaataaagttcaggatacaaattacagattacaattaaaatgctgatttttccaacaaacttcctgatttaggcctaatgcaaactttgcaagacgatgagcatcttcattttgctccctagaaatatgtacaaaagtagcattaggaagataagataggaagtttttaatgtcctttgcaaatctgtttaagagcaaatgatgattagcaccactgcg

SEQ ID NO: 181125 - DNA, 675 bp, Cannabis indica
gtaaaaagcttaggccacttgtgaccacaagaaacatatcccttataaagggtaatttcgtcattttctatactttacatagttacagctgaagtggtctattcacactttccctccatttttttttttcattttaaaaccctaactctaaaacttgagaaatactcccaatcgaagaaatcagtgaggtctgaagatgttggagttgcggttggttcagggttcgctactgaagaaggtgatggaggctctcaaggacctcgttactgatgccaacttcgattgttcggcgaccgggttctctctccaggccatggattcgagccatgtggccttggtagcgctgctgctcagatcggagggcttcgagcactaccgatgcgataggaatctttccatgggtatgaacctcaacaacatgtccaagatgcttaagtgtgccggaaatgatgacatcatcactattaaggccgacgatggaagtgacactgtcacatttatgttcgaaagtcccagtatgctaactcttcctctgttctaaatcttgtttccgacttggtgtttgttttttttggtcggtttacagtttttatttctcgttatcatttttattgaattatttttgttagctatttttagtttaagatgattccttgtagtttattattaaatcac

SEQ ID NO: 181126 - DNA, 511 bp, Cannabis indica
aaacatcataaatggtggcaccgttattggtgcattttaatactacaaattttaatttagtgaataatatgagaaactgctaacgaattattgtgtcatatctgtatagtgttggacatattaaggtgccaaatattaatgttaaataggtaaatggcggcaaaacccccaaaacttttattttggtttcacttaatccctaaaacctaaatttgggcggcaaaaccccccaaaactacgattctgttagcaatttaatacttccgtccaaatttagctgttaactgccaggttggcttgtccacgtgaacacaaaatacacgtggcacaattttattggtctacgtaaaaaaattatttaaaaaaaataaaaaatttaaataaaattaatttaaattaaaaaaaatatatataataaaaaaaatctttttttactttcttttctttttctttcttattctttttttttcttgtctttctctgtactactttgatctctctctctctctct

SEQ ID NO: 181127 - DNA, 564 bp, Cannabis indica
aatttatttttactcttacaaaaagtatatattataaataaacaaaataaacatatttaattaaaaatgaattactgtacacacattttcatttgacccattcttttaccgggtgagacataaatttcccttggtattttggagtacatcacggacttactaaattcaatgtaattattaattaatagtcaaattgatgaccatttactcaaaactaacaaaatcaaaaacttttttatactcaaaaagaaaaatacaaaagttttaattttaaaggatatgtagataatataatagtaaataatttggttacttctaaaatttcgtctaatatgccaactgtcaaaactgaaaaaaaaaaaaaaaaaacatatgaacaagaaaggttagaaaattaccttctggatagttcctttctctctctctgaagagcgaagctctaggtttcactatggttcatcagatcttgtcgttgtcgctgttcatcaacgtggtcgtccgtcctggatccttccatctcagtggcggtgtggtggggttttccttccagtacttaatgaagcc

SEQ ID NO: 181128 - DNA, 530 bp, Cannabis indica
ctttatatagaatagatatttacgaaaccaatagagcaacactaaaatttacatagcaacttacataaaaactatagcaagggaaatataagaaaaaaaaattctcattttttaatttttaaaatagaattttattcttaaaaaagttgtgtttattaaataggaatcatccatttaggttgtatctgaaacaagtggtgaaactaatgaaaaaaaaatgaaatagtttttgaatgaacaacaattgattcagactcagtgcaaataattaattgtcacatcaatatcacatgtataatttaacattaaaaaaataaaaatgaagtatttttaaaaaattattaaactaaaattaattaatgattaaaaaattacttacaattatatttaaaaaaataaattgttttttcaaattaattatacacgtggtattgacatgacaattggctaagcagtcatgttatcatttatttatcatgtgtaacaaaactagaatatttaaccaatttacagtattgaatagttcaaag

SEQ ID NO: 181129 - DNA, 542 bp, Cannabis indica
atgccccaaacgtgcgaaaacgtcccgaaattaatgtaagatataagatatttatccgtctcatttattttggtcttatcatcataccattctctctctctctctaatatacatatatttattatttttatatataaatagtggggacttatactagtactttcccctatatataattaaaaagaaagtattatacactttattttggatcaagctactgtggcgatagcaataataatacatatcaatatccactgtttaggttttctttcactatcacatatacgtacacggtatacacgtgttcttttgttattatttttcttttctattatacatggctttcccttaattagtatgttcttttttttttatacaaaaaataagaaataaataataaataaatgtgtatatatatgtgtgtactatgtgtggcagagtcattacaaatcaatatgaaaaaaagacaaaaatagagacaagacaaagaaggtgtgaaacaaaaaaaatactaaagtaactactacgtcgttttattatgc

SEQ ID NO: 181130 - DNA, 536 bp, Cannabis indica
atgtcagactatactgctttcacattgacgatggaagaggaaaagagggggggggtcactcttacaagaactcttatcttcattggccattgcttttagaaaataataaataataataataataataataataatacatgcatataaagcttttataatttttatcaaaatccctaacacccatgcacatgcacatgcatgcatatcaattatatatacatcaaatacatataaatatatattgatttgttattagatatcatcaatcatatcacatttgtgatttttcactttaaaaagaaaggatggaaggaatgctcttaaaataaaattttgcagagagtaatttgtcgtataaatatttaagtttaatttttgattgtaaataaatatttaagtttaatttttaacagtaataatacttaaattatatttctagaactttgtaagtatctgaccgttaaatgttaagtcattatccacgtgtattttttattagtatatttaaaatatttttttttaaaaaataaaaattt

SEQ ID NO: 181131 - DNA, 618 bp, Cannabis indica
agtgggtcatcgcaaaggcaaagctccattcccatgagagaaattgtatactttaaagaaattgtatagattgaaaaaattattaggaatatttgtagcaccactttaaaggaatttttcgatagattttttttatctgtttcgacatctaaaaaaaatatttagtttattttttttatggtcgcatatattgtagctatttagaactacttataaatttttaaaaaatacttgatgatttacaatatcgaaagataagatttaaatatttcaattaaaatgtttgaaccttatttatgacactattaattatttgaaattttttaaaaatttacagacgatcttaaataactataatgtacgtaattataaaaaaaaatagactaaaaaacttttttaaacactacaaacagacaaagaatctactagaacaattatataagtatttaagtgtagtgtataaatttccaataaattattgtaagagtgtttatggtttttaataagtatgattttaaagtattatgatattgaataaagtttgtagctaaatatagattgaatatatcttaaacaagttgttaaaattttaccataatcagatattaaaaaaagaag

SEQ ID NO: 181132 - DNA, 649 bp, Cannabis indica
gaaaaaaaaaaaaaaaaaaaaaagggtttacaatcaaaagaaaaattagacactaccaattatcgttctccaagtactataataattaatagttatcttaattcttatcacaattccagcactttatgtggtgtcccttccaaacaaaaaataatacattcttggtacatatgtaaatgtttcaaactttctggtacaaaattttgaaacaaaaacttaaaaataccaaaatatccagcttgtgaatgacccaccatgttgtacattgttcaatataatttttttaaaaaaaaaaaaaaaaattaattattattattattattttggaggtgtaatgaagaatctgttatgggatgaagtggcacagaatgatagatattattacgcatcattaggaggaaaatgggatctccacctgttgattcggggttgtgtgaagtttcgaggaatcatcagacggtggaagaaaatcagtgggccccacatgcaagaacagacgataaaagtcaactcaacttctgaaacaaaacctcccatgtgagtgactgaagtaggggcttcatttactgggacccccacaagcccagcccatcaaaaaacgcaacaataccatctcaagttgcgcctgctggggcttgatctcctacgt

SEQ ID NO: 181133 - DNA, 669 bp, Cannabis indica
tattttgtttaaaaaataactacacaaacaaaaactatgcaaaaaaactcttcttcaaatatattaaaactaaatatctcacattattataaattatgtaggtattattcatataggttacaaatattattcttactatgccatattttcatccaagatttatttttatgggtggttgattaatttcttactctataagtttttattttttttttaattttaatgtcttactctataatttttttatttttcatctaatatacaatctattatgtaatacataataatatacaatttattatgaattgattttattttaaaaattttacatatactattttatatttttgttagctcaaaaaaagtgttcaatctattatttttcttaaaggaatggaataaaagtttgataattgtaatttaatttagtattatttaaaaagataataataataataatattgatattatgattattgtttcaataaaaaaaaagtaaattttgagtaatatatattttagtttatacaataaaaatttaaagtctcaatattgtataaaataaattaaaattgaatagtcacgaccatattagtaatatatatataaaaaaaattaattggataataatattttttaattagtataatgatatttttttatttatta

SEQ ID NO: 181134 - DNA, 741 bp, Cannabis indica
ggatgatcctatacatattgtctcatcacaattgtatatttttataagcaaatagaaattaaaactacttttgatttagacaactaggaagaaagacttaattgatagtattgcactatcaaattaaaattattgatatgaatcaattaattatgtatccctaactcttatatatattaatattgtgttctagattatatataaattatattttaggttatttcatcttctaacactatctatatatttaataaagtttttatatacttttaataaaaatataatatttttattgatttttttacaactttctgttaaaataaaatttatttaaatcttagtatattgtaaaattttggctaaatattatattgactcattttctgaatcaaatgtatcacaaaatttacacttaaagatggtcagaccccctaatgtaaaacttgtgctatatttaacaaaaaaaaaaactttataatatatttgcattaatttttaacattgtactctaatatataattgcaaaacttgatacaaaatttaatgttaaattaatattttattaaaatataaaaatataataatttatcattaattttatcattttttattacataaaacaataaaaaaaattaaatgtaaaaaatttaataattcaaatgaaagaaactataaaattgaatagtaattaagataaactataaattaattcattcaaaaataatcataaaaataagtata

SEQ ID NO: 181135 - DNA, 700 bp, Cannabis indica
atatttatatttatatgacctgcaataagaaaatgacatatccataatccatgtataaaagttggtaaaaaaaatgaaaattagcggcttgttggctacaatgttatgtcttgtattgtattatattatattgtgttgaattatatttgaatttatattatttaatggaatattatattttatattgacttgtatactaataggttacgtaaaatataaattctttacaataaactcgacctcaaccccgaccacaacctggacttgggctcggacccaaaacatgccctgaactcgaactcgaactcgaaccccgaacatgaactcagatgcggaccccggactcggaaccgaacccgaaccgtgacccgaacccctaacccaaactgagacccaaactcgaactaggacctagactcgaaccctgaacttggacttggacccaaaaccccaagtttgagtctgagtttcgggttttagaccctggtccgggattcgtgatttgggatcttagtccgggtccatgatcagggtataggtccaggtccgctgggactggggtcaaagccagggttgactccaaaccctttgtacacattataatacaagttaatacagactatttgttatgtattaaataatacgactcacattgtattaaaatttatagtcgtaataattaatacatacaatattatcc

SEQ ID NO: 181136 - DNA, 620 bp, Cannabis indica
tattacatggatttattgtgtaattaccaactgtcttgaccaaacatgaaaattgaaattcacatgtaattaccacttaacatctaaataaacattgtattttaaaatataatgtaattactatgtagtgtaattactacccttaccacttaacatctaaatacatcttctgttttcaaatataatgtaattactatgtagtgtaattactttccttacaccgcatagtaattacaaagacatgacaattaaaaatttacatgtaattaccacttgacatttaaatacactttgtattttaaaatacaatgtaattactatgtagtgtaattactaccattacactgtatagtagttacaaagacatgacaattgaaattcacatgtaattattatttaatattcaaatacacattgtattttagaatacaatgtaagtaccacatttacactgtttagtaactactaaattgtttccaaacaaaccctaagtgttcattatttttgtgagtggaaagattgagaaaataacttttgaatttttattgatttttaaaaataattttaattattttagatatgaactatggtttgattgtttgattgaatgttgctttaaa

SEQ ID NO: 181137 - DNA, 763 bp, Cannabis indica
aaatattgatctatgtaataatattaatgacagggtctagcagaggagttgagcaaagatggtgcatgtgacagagcaatttttccggtacaagcatagtagtaacaagatgtgctatgattgggaatttgtcagctgaaggggtaagaaaaaactcttaaccattttcaacatctcagtgtttcgtttgtcccaatttaagcttatttttcacatcgataagtgattgcagggcgatcgttgtgagcttaatctcaactgaccgaattcctggtcgagctataataatttctgttgtatgtccaatctctaaatacttaattgtttaataccatgtgctgcagcatattattatgtatggcatcataagtggctaaactcttaaatgttggtgtagattgacaatcttcttaagggagctttaggtcaagctatgcagaatcttaatctgatgttgggacttccagaaagcacagggcttctttccccggctttgtttccttaacattttcctcttttttatgtgtcccgagaaagagtaagcattctacacatgaactaaaatctccttatttccaatgtgaatatcatttcaatatttatgaaatgacacattgattacttatagtaacaccctatatatgcagtcttgaaaaagataaaaaagcaaaagaaaatagttcacattgtaaaagttaaacggtcaaaagtaaagaaatagtcagaattctaatttaagatcagtgaaatgtatctagtctat

SEQ ID NO: 181138 - DNA, 1149 bp, Cannabis indica
gagtagctccacactccattctacgaagaaggaataatttcactctatattatataattaagtaaaattgttaagaagatatatattagtagtattttaatattatacactattaattattaatattaatataatttaatatacgtgttaaaagtaaaattacaataaaactcactatactcaaataccctaattgaatttaattatagtaatattgaatactattggtatttgtataatttgtaatattactatactacactaaaaaaaaatttagatattttataataatactctttgtactacaataattgtagaactaactttctatattttaaattaatggatggtaaacaaagtgggatttatttatttatagttaatttttatttgaaaaaacataccatatatatatattcattcatgtctagtatcacatcactaaacacgacaaattttatagcacgctcttatccaagctaattaattaatgattaatgttaaaaatttgatgaaaagatattggtcaatagttagggcctataataaataaagaataagttaaaaacattgaaaacatatcatataattcacttgtataacctgtagcagatttaagatatttgttttttctttttatacatgttaatgaaaattatgcatatataataagaagactaattagtgcaattttcgcctctcaacttttgctattttattttatttatttatttatttatttaagataaatttccattaatgggtaaactgttagaataattaataattaagtgatgttacaaaatttatatataatataataataattatacaaaaattaaatatttatacctgattatgttcctactaatgtaatttcgattacagatggacaaatatttctatccgccaatctgttcaattggattcgtcctgctattaatgtgggcatttagtttccagagtaggattcgcggctcaatttctctctttcttatttattataactattatcactttctatttaaaaccgagccgactaaaaaaacattaacgtatcagggtagtatgcctggaacaaaaggttacgtcgtacaatttcggcgattcaaaaactaaaggagtatatctctctctcttagtgtcttt

SEQ ID NO: 181139 - DNA, 627 bp, Cannabis indica
agcaagtcttaggtgatccaagcaaaagtatagtctttagcaatcttttttttttttaatttcttgggtgttaagttttggtattatgcatgttttgggctttttagttgctgtagttgctgcttgtgtttgttgttgttttcagtgcatgaattatgcttagatatgtcgttttaagcttgttgtgttggctggtttgttgtttgagcaagcttggagtttttgaactcaagcttggctcattaatggtggatttttgttctgagcgtgggtggttgttttgttgctttagatatgttgtgtatggtctaaataacaggtttggaaggtttctttaagtttggggttgaattggtgaagttatgaaacatttggtcgttcctgcactgaacccaaattctggttcacaggggcctgtaggaaccggaattccggttggcttctaggaattcccccagaacaggaattccggttggggaaccggtctaccagttggggaaattttgggaaccctggtttttcccatttttgtgttgtttagggtattgtcatgttatttatcgatagggaaacttttagtttcaagtttatgtccccgaggagtgatttagcgtgtcactcaccgat

SEQ ID NO: 181140 - DNA, 640 bp, Cannabis indica
gctttgcttaatatgaaattctgagtaaactgcttttctatcaatttgttaaaccttttcctcgtactgatttgtgtatgatcttcagagggaatctgggaaggctagatcagcagagatgatgggttttcagttcagcgatctcagtccttgacaatgctgagttgacagtaagtgaaacagagaacacttccttgattcatatggatgctgatcaaagcttcttgcctgttccatctcctgtcaaggcttctatttttgaaagctttgcaaggcagaatatggctgagtctgaaaccgatcctaccccctgcatcaagcaatttattaaaaataattatggtttcccagctgataatagtacagaatttatatatgccgacaacacacttgcacttttcaataagttggtactttgctgtatccaagaaggtggaacattgtgctttccggctggttcaaatgggtattatgtttccgctgctaagtttctgaaagcaaatatattaaatatacccactaatctagaagaaggctttaagcttaccgagaaaacactttctgggatacttgaaactgtgcataacccgtgggtgtacatttctggacctacaattagcccaactggtttgctgtacaa

SEQ ID NO: 181141 - DNA, 817 bp, Cannabis indica
tttataaatgtagtgtgtagtattattaagtagtattaaattgataattttagtgttaaatctaataaaaaagattatttaaatttcaagaattgaattgaatagataaaaaaactatgggttaatttcacaaatgtaacaaaaacaacaaaaaaataacaaaaatacagtttcacggaattttaaacatttttacgatttttttgattttatttacataaaatacggtctttttatgttgaaattttgttcatttgttgttaattttttgttatatgtatgttattttttgttgttattttcatgttacttttatgttgttttcttgttgattttatgttgttttcgtgttattttttggaaaaccgtaaaaatgtaaaaaaatattctttgaacgtaaaaatgtaaatattttacaaaaaatggtgccttatgtaattattccaaaaactattaccaaaaaagcctagaataatataagtctcaagaaaaagaaaaagaaaaagtgaatttagttttttttttcttcctttttttaaaataagttatgcattacacaatctatacaacaatttatgtgccatccatttttttctttcattctttttaaatgcaaattaatagaattatagattcagggtgtactatattaatatttaacactaatattatatatctcagattttgtgtgtacaaaataaaaaaagtggaacgaaattactgatagtcttgagcattatttaaaaccttaagaaaattgggtatttttcttaaactttttaaatgtagaatagatattttttgtgcatagataaaa

SEQ ID NO: 181142 - DNA, 1142 bp, Cannabis indica
tctaatacgtactttaaataatgcaattaaacacatgtaaaactatctaatttccttatctcaaattctgatgctgttttatcctatcactactctttataataacacataggtcaagaccctaatattaaaattctaactctttcagtacaacaaaagaacattattttttttaccactattttacttttagtcacaactattttacttttagccacaactgaggcaagttcttatcacaaaaaacaaaataaatagataagtccataaaaaattgacaatttatggcgtaaatatttataattaactctcagttgtaactaaatacctaagtttaattttttatggtagtaatatttaagttatatttctagaacttccgtaagtacctaactgttaaatgtcaagttaatatccatataattttcttattgatatttttaaataacaaataaaatttaataatctataccaatcatgaattgtcacgtggcaatttatttagacacttagcaggtaagtacttacaaaaatttcagaattataacatagatattattaccactagaaattaacttaagcatttatttacatccgaaattaaatttaagtatttatgctataaattactcatattaatataataatttttgccaatttggcatatatgaattgaatcttctgtattttcagcacgttgggaagaaattcacacaaaatctataatgctcttaaggataatttaattaattattttttattaaatattatataaatatgtataatatagtactatacataatatttatatggatttgttgaaatggcacatcttagttcacctaattaatcatattatgataaaactaagtgacaaaactaaatcaaaacattattttattgagcactcatacatataatagttctaaactaattgaatgttagacaattttaattttattattatattattttatagacaaatgaaaaaaaattacaaaattggaaatatgagtacttaaattaggtagcgtttggtattacttttatttttaaattttttaattcacaagaatgtaattaatttttttttaaaaaaattaaaatagcgttctataataatcacttttatttttaatttt

SEQ ID NO: 181143 - DNA, 677 bp, Cannabis indica
gcatattttacgattttatatagttttaaaaaaataattaacgtgatgttaattttatgattgtattagataactcaaggataggttttaatataatgttgaaatatgattcaatgtagtgatttataactaatttaagtaatttttcaaagctattttttaataataataataatataaaaaatattcattactaattattattacatcttataatgtaaaagcctacggtatctacattaatagacatttacatcggaaacaatgctaaaaaatgagcagtgtttaaatggcttagtgactctattaaggggttaagtgtattaaaattaaaacataagagaatttttgccaaaaaaaaaaaaaaaagagaattaagtgtgaaaaaattaaatataaaggatttgccgcaaattattcaaaatgttatcaataaaagttagtaaataatccaactaaggggtttcccttattgactctattaaaattatattataatgattgaagagttgtaaataaaacatacttattattttaaactattttggtgtaggtatttttttcagttctccaatcgcagaaagtagttgctctactggtaggtttgtgttgggtttccaagactaccatttgaatgggtcttcttagattcactatcttatttggtcttagctttg

SEQ ID NO: 181144 - DNA, 779 bp, Cannabis indica
ttataaaataaaaaatatatatgaaataatttattaaagttcatatttttataaataaaaaaaaataaaaaatcgtaaaaaataaaaaatcttctatgcatatttttcgttaattttttttttaatttttgatacaattaaaaaaatagttattttattttataaatgtttatataattctttataacttcaattaaaaaaaaatattatttattatctattaacttttaaattacggccagctgttaccggtgacgggttcatcgcacgggacatcgggttccacaacacggcgggaccacatggaaaacaagccttggctctgtacatcgcctcggaccgatcagccctatacaggtgcagcatcgccggctaccaagacacactctacgctctcgctctccgccaattctaccgcgagtgtgacatctccggcaccgtcgatttcatcttcggcaacgctgccgccgtatttcaaaactgcgaactcgccctccgccgtccacgtggcgccaacgtcatcctagcccacggcagatccgacccgggtcaaaacaccgggttctctgtccaaaactgtcgtatcacagccagcgcagaattcgaatccgtaaaacactcgttcaaatcttacctgggtcggccgtggaagtcgtactcgagagctgtggttatgcagtctaacatcgatgaggctatctccccctaaaggggtgggaaggagtggcctgggttctggaaagctctgttctgagtactctgtatttttgctgagtatg

SEQ ID NO: 181145 - DNA, 655 bp, Cannabis indica
gttgtttttctaacgaaaaaaaagaaaataaccataccccataaacaatagagaaagtataaatttttatttattcttctcaaaagggtttctgagtttgaggtcatttttttttttcttttcactttcttatcactttgtgggatctctctctttctggttggttctcattctgaatatctgtctgggattactgttgtttttttttctttacccagaatggaagcggagaagaagtacattaccactgaggaactgaaggagcacaacaaggcaggggatctgtggatctctattcagggtaaggtttataatgtatcagaatggcttaaggatcaccctggtggggatgcgcctctactaagtttcgctggcagagatgttactgatgcttttattgcataccatcccggtactgcgtggaagcatcttgatcagtttttcaccggttattatgtcaaagatttcgtggtctcagagatttccaaggattataggagaatttcaaacgagtttaccaaactggggttgtttgaaaagaaaggtcatgggattttctacactctcacatgtgttgctataatgctttccatggttgtttatggtgtgtgaaatctgagagcattttagtccatatgggttgtgctgtcgtatt

SEQ ID NO: 181146 - DNA, 530 bp, Cannabis indica
gtttgtttttagttctatccaaattaaaatgttagattttagacaccccatctaacatttgattggttacttttagctatatgcaatgccagtatttgatatgatagaaaccgtattggtgaagaaactgaaatttaggcctacttggtaccttcggttcatctctaggaatgtatacgttggtatgtacaaaattaagttatttttttgttttgttaaagtttttgtttaagacttacttgcatattctaacaaaggacccatctttgttttttgtttcaggattcacaatgttcattggtatgaccttccctttctttggtggtctattgggattctttggaggctttgctttctcccccacaacatacttcgtaagcacaaaatactatattcataaatatatattgttatttgagttgtgcttacgttcctaattgagagactttaattttctatatatacaaaaaaaaaaaaaatgaaaaatttacggtataaatcaatatgtaattcactttattgtgctaaaa

SEQ ID NO: 181147 - DNA, 792 bp, Cannabis indica
tacaattgaaatcgaaaactctaacttttattatcgttaatttacctattatttacttgcttcatggtttttatttgttttttattatttttttagattttaagtttctctttagattggatatagccaaatagaatgtaaaaatttaattttaaagtacttaactacaatctttataggatcgacctcagtctttgtgagtctattacttgtttacgatacgtatacttgcgtgttaaaaaacacaacaacagcttggctcttggctctcttgggctaaaaataccaatctctaatcttgttcaccacatttatttatttattttacttttttttttcttttttcaaagtgtcacaataatttttaactcctacaaataacaataaattaaatctaaatcaaatatttttaaaataaaattatatctcattaatttcacaaaagtattaatataaatttaatttattgtaaactttgagatcaagaaatgtgtatttttactgttaatcataaggttacaaggagaaaattataaaagaaagaaaaggagagggaaaacgaaaaaaggaaaaaaattattttcaattatttatttatataattttaaattattttttgataatatagagaaaagatagagaaactcatatattatggaatgtaaaagtttaatgtaaaataaaaaaaagagattttggtaatatattatataaagttgataatctattaagagtgctctagttaggaccgagctaagcatatgttattctagctattgcacaaaacttcct

SEQ ID NO: 181148 - DNA, 1346 bp, Cannabis indica
gttatctgatccacgtgtcccctcttgactggtccacgtattttgggcaaattttggagcaacaacaagtataataaaatttaaattatgaaattatatgtatataattttaaattataaaaagttttgctataaaattttaaataatttaagtataaaaaaataaattgctaaaagatccttatatagtaataaattgtaaaaaattaattaataattataattaatttaattttaaaatataattaatcttaattaaagttttataaggaaataaatgattaggtcactttcaggttacaagttatttattatttatttttatttaatttctaaattaatcacaaccatttaatagtaatccaatgacttaaaaaaaatgtaaccatgatggttacaataaaaatgtaaccattgaaacctcttccatatatatatattatctatataattataccatataaaaaaaattaaatgagttaatactttaaaaatacaattattactcaaacaaactactttcatattatatcatatatattttattttgatttatgttaaatataagtcatagtttgtgataatctaaactatcctatatataaattaataatgtatattgttttcaaatatacaaatcattacaattttaattttactatttttgctatatataaaatatgttttttttttctacaaatctaaataaaatgaatatttttaaattgcatgaaaaaacaataaataaaattcaatgataacaatgaataagatacgaggagaaaacatatgagatacagtagtaataacggtgacctataaggtgcgtttggtaatacttctttaatttctgttttttcaattagaaaagtgaaaatattttctaaaagcatgttttataaaattattttcacttttcaattttttaattaagaatcaaaatttaaaaattttaaaaataaaaataaaattatagaacacacttttatttttatttttaaaataaaaaattaagtccgcgcgaagagcggctatattacctagttaacaataataaaaaaaactaattaaaataaaataaatcatatcttcttcttcttcgtcttcttcttaatcttcttcttcttcttcttcttcttttttctaagtaaccatgttattctcttcatcttctttgcatcgttcgggcacactaaattagtctctttcactcttccatactcttctagatcctacaatggtagaacccccttcagaaaccttaattactgaagaggctcaatcgatctacgctagaactccttcgcgtcgctgcgatctcgctcctgcacgctggttttcgctcg

SEQ ID NO: 181149 - DNA, 679 bp, Cannabis indica
acttgcctaagaaactgtattgaccgctactatggattttccctcgcctgtgccttcaagctttcatttcaacagattgaccgagaacccatctcaaaagagaccttctcaatcgaaaaagaaaaaggatttgaatgactcaatagtttagggatacaatgaatatctgcttgacaaaactactgcaatggaaatagatgccaaaacttcataggcttcttttattacaaaagtacttgaaagaaatgcgcttacttttcatttaatgagagcctgcgcctgataactttcttaagtttttgacccttctgctttgggcctgggacaagttgtggtacagtccggagaggattgataggtggaaaaaaatctctaagggattaaagtccaaccaactgtaaattaaataggatatgctgtcaaactttcttcctcgtccactggctattacggaacagggactattactactatttactattagtaaaaatataatgaatctctttacttatctttattttattatctttttttgaacagaaggaatctcacgaattatcactggcactatcaagactgtactctttttgaagaccttctcctttgattggaaaggcccttctctttttggttgtaattgtcagttcaagttggtaataactttagccctttccgactt

SEQ ID NO: 181150 - DNA, 784 bp, Cannabis indica
ttgaattttcaattttttttttaccaaaccctaagaataggtgacttatgctcacttacaaagacacgttttttcatattttatattctagctcgagagcatatagctagaaaaacaccaaggtggcgtttggttggaggtaatggaatggaaaggaaataattttcattccattcctttgtttggttgcattttaaagtattggaatgacattccaatggaatgctctttccaccattttggtggaatggctattccattttaaaaaggaaggaatgaccattccaatgtaacaagaaaaaaaatttaattatttttttatcaattttttttatgcattttaaattttattccattccattcctattcccattcccattcccattcctattcctatattttcattcctcccaaccaaacgcctcagtcttgataattccacataattatttctatttgagagtttctttgttcaagttggtgatcccgagcctcaactttacactaaatattgtgtgagagctcattctatttttctactttgttattatttctatttctattgctcttatatttacttgtcactttagtcttgtctttgtagtaccctctcttcatctacatattttatttgtattttgtgcacaaattttgtaacttttatttattaaatctattagtccttgttattttgtttctttgacttataatttattggtattatatccactgagatatatatatatatctttatatattaaaaagtgcttatctaacgacattt

SEQ ID NO: 181151 - DNA, 893 bp, Cannabis indica
caaacaacacaatcactaattaagggtttacgagttacattttttgccgaaactgaacaagatatcttgctcattaaaagtttaagctgagacctcaatctcagtagatactcttacatgttaataataacatttcaaaaatgttctccaatttgattagatacaagatcatattatataaaatatatatataataaaatgaaacaatttcctcctgtaaaagaagcttatgtgtgtgcagaaaagattaaagagatttttagtctttgacacctcaatgtcaaagataagccatgaaaaaacatctttcagtataaggactaatcctattcatgtcgttatattgtaacctattatcaacttttttttttggttttgccagtaacggctccccattttatgattgagctgtacattctcagatcaaagggaaatgcaactttaaaaacacaagagaatgttatccacacacaacacaagggtggataagacctttttcttttcttcttcttttattctctttttcatctaatgttatggcatcatcagattcacaactagtactaccactcgaaagattataagtattattttgctccatcatcagattcaagaacctggatttcgggggtcggtgatccagttcctgaagaaggaaggtaagaccatgctaatgcgaccgtgccaagtgtaagaacagaagcaatggagccccatacccacctttgccttctttcctttttcatcctctctcgtcgtgccgactctgaaaaccataacgacaaagataacacagaatgattagatggtcaaatgaaattcagttgtgaaagaaacactaagagaagacgcgcaccattggtgctcaaacatcctatattgttattggtaca

SEQ ID NO: 181152 - DNA, 618 bp, Cannabis indica
gatctgatatttaattaaactaatagcgatactgatacataaatatcagacaccactaatatcctttaacatttctctttaataaattaacaactatttcacaactaatccaattacactatttttttgagaaattctattatactacttgtaaactttggtctttaaaatattaaagttggaaattgaatctttttgttgataaagaaaaaattaataatttttatccctgaactttgatatgtattaaattatgcattttaaacttttaatgtcgttaaaaatacttcttgaactattgagattattatatttaaggacttttgtctaatttcattcaattttactatttcagtaattatttatgtactaaatcatgcttccaatctttgatatatactaaattatgctcctcgaactttgatatgtactaaattatgtccccttaactttcatccatgtgagacttttttactaaaattagacaaaagtctttaaatccaacaatttcatattcagagcattttacgactttaaaagttcaagggcataatttaatacatgtcaaagtttaagggcaaaaaattctaattagcataaaaaatgtaaaaaaaaaaa

SEQ ID NO: 181153 - DNA, 718 bp, Cannabis indica
ctatctacgtggacatctacccagtaaaataaccttttaacccttaacaacccaaaaagtaattttgaaaaactatgcaaaaaattatccaaatactctctcaagtaagctttagaagtgctttcaatttcaacggtatgctagacaaatccctaatatgtggtttcatttataatttacattttatttagaacacaattaaatttaaattctataattttgaacttggtgaagttaaatccaattcaacttctgaaaaataacacacaagccaccctaaatgctctatgcccaatcatttttccataatgagctacataggagttgtgggccatggcccatagtagcccaaccaataagattcgatctcttcacaccatcaccacactgttttttcatctttatagttgagtctagtaatagataaccaacaactgagcatcacgtttggtttgtttttgcactttgcagtgaatacgtcactgtctactttgttatgtgaataagagaaactcaaaatttgttttcatttatgaaagaaagccatatgcatctactggaattttcacaaagagatcgaatatcaaaactagctatatcatatatatgagaagattttaataattaattaccaggagcttgaattggtctgtgattttcgatctcacacatctcgaccctgaaaaatccttcgatgcaagaaaaacaatacaatcca

SEQ ID NO: 181154 - DNA, 722 bp, Cannabis indica
agtcacaacaatattgtgatcactaaaaacatttttagtcacaataaattgtgattttacgtgactaatattttagttacgaactttttaatcacaacataaaaattattatttataattagtcataattttttttatttttagtcacaagtttttatacaagttttatcgtaaaagtaattaattttgtaatgtatatagtgcatggggagacatataaattaattaaaggaaaaatcaaaaaataaaagtaaattaatttaaatatagaaataatcacaaacttacttgccttataaaaataataaaaataatagaatttaatatttaaaaattaaagatattatctaattgtatctttatatataaaaagtaaaaaaaaaaaaaaacgtaaataacacacattatatttgtttttaatttaaagatatttcctgtttatagttcaatttttatatagaaatattaaagaaaaaaattatggtcaaaaaaataataatcaaatatatatatagtattagctaaaaataaatcaatgagaggagaggaaggtgttgcttttggtattggtttggtctcaaattgaaaaaacaattattagtataacaaagtaaagtttgtaaacttaataaatttgtacttattactactcaaaaatataaaactaaataaaaatgaaagatatattatatcatttttaatagtaattttttaaactattg

SEQ ID NO: 181155 - DNA, 755 bp, Cannabis indica
cattcttccaatgtgggacttaagttcgatacccccaacaactcctcccccacaaaccaaggaccacatactcgtagcctccctccaacgaaaccaccttatgccaccgctattaccgacagaacttgccgcctgaccattacctttgttaggaagacttttgacaaaacactactaaaaaattgactttttctaacggtttataagtgtcttttatactttctcatcagttactaattaaaaccgttgactatgtgggcacgtgtcataaaaatgcagaactttaaaagacggtttataactgttgagaaaaatcactttaaatgacggtttagaactgttgagaaaagttactttaaatgactgttggcaaatatattatgtagattaaattaaattactttttaatatatatttgtaaatagtaaatatataataattaatattaattttcatcaaaaaaataatattaattaaaataaataaaatcaatatattttcaaatttaaatataataattaattaaaactatatataccaaatcaagcattattagataatgaaaaatttacatctttcaatatgatccataagatacaatttagaaaaaaaatatacatattcaaaataaataataaatatgaatattacaattttaatctaaacaaaaattatgtaaataataaaaaataaaaaaaaataaaatcagcaggcaaccaaaaccaagacagcgttgcaaatccaacttactatcc

SEQ ID NO: 181156 - DNA, 558 bp, Cannabis indica
gcccttgaattcagcaatcagtaggtggaaaatttcttatctacttggaagcataatctatattgaactgtatctactccactattagagtatacttatatccagtgcttagtttggttcgtgcagtggtgttcctgaagctggtactatgactcagcagaacaatgagttcctattttatacttttttattagttttaaggtaaagattgctatgatgctgctctcataggggtatatatatgaatattttcatcatcactgtatattgtgttaaatcctacttcatacatgagtattctgtgctactcacacgaacttggagtggtgaaaattgaaataactttatacacttgtgtagattagcttactttcaagatcatggcaacatatggttgttgttcaactttgttatgtattttaatatcgactctcttatgtatgacttctgtaaagtttttatgtgtatctatcaaatttgatcttgtcaacacatctggtttttcgtgttatcgtacatttgtgaatgttcatgtgttttttcttggtttgtattgca

SEQ ID NO: 181157 - DNA, 713 bp, Cannabis indica
gatatataaacttcaattacatacaaattttatactctcgtgataaattaaacatgtaacaggccttaaacacagaaaccctataagctatctaaaccatataggtactctcgtcctatatcaaaattcagttttatttcactatagcatagtcaatattcacttctcagatcttgcatcaaaaatcataaatagttaattggtgatcagacaattaaaagtatttaagtacgaatgaaaagaatacatagaaattgagggaaaattaaatcttatttaaaccacaaatcaatatcaaacaatctctatctgaccctaaagaactatttagctactcatgttcattgtagcaaatttacacatattaatttaagaacagagaagaaaatagagaagaaaagaatgttgaaaaccctcgtgaaaagtgcctccagtattgaattcaatctcaaaaatccgtactcagttgaatgcttttgatttcattctgaattgcttgcccctaaaatccactaaagttcacttcttatatagccaatgaggaataaaaaagataagcataagatagcacatgcagaaaacctattcagcttcgaattagataggacagatgagccaacgctgaaaagtccatttctctttaaaattagcgggggcgggcgacgacatgctcatcttgtgcgacgacctgtgtatgaaatttctcacacgct

SEQ ID NO: 181158 - DNA, 521 bp, Cannabis indica
attgaaacttcaaaatataggtacatgatccccaaatcaactctatacagggaaagatttgatttgatgaataaattgagaaataattaatttctatgataaataattcttaaagaaaatagtaattttgtataaattattattttgaataattatatcgattatgaattgaataattcatgcagtatttaactatttagtttatttaataaaattatactaattagttaaatataatattagagagagaaaattattttagtgtaaaataatatttatttaatcctaatgaaataagccaataataagaattaatcaattattatttattggtaaaataaacaaaaaaaattaatttgtagcaaaattaaaaattaatcttgcgttttaaaacatgtcccgcacgtgtaatgtaaaagttcatttaggttttgtttgatttatttatttataaaataaatcaaattaaaattaaaaattatcttttattatatgagttaaatatattataagataatgta

SEQ ID NO: 181159 - DNA, 647 bp, Cannabis indica
aaatcatctgaaacaaaaaccaaacaccattttgtggattcaaattttagtaaaaaaaaaacaaacaacaaaacaagaacaaccatatatataaagaaatatttacattgtgaagtaattaataatcaatgaaaaagactacactgcacagatataatattcttccaactctgaagtttaaaagtcattcaagacaaaattggagtccaaatgactattactaatactaaagacacattaccattcacactgacattggctgccaccttttacaaattttcagcttgagaaaagaaaaaaaataccaaaccccactaatttttttaacaagacaccaaatgggcacatcttaattggtcaaaaagttaaattttaacacaaacccagaagaaagagagaacgaaattcaagtaagcaaatttagaaaccaaaaaaaaaattaaaaatacaatttttagtgaaggtgatttacagtacctttgtacaagaaagaacaaaacacaggaggaaaaaaaagctaagcgttagttgaaagtatgatgataatgagaaatgggttactgccattttcaatggtaaaaaaatccataagaaccgtacctgcactttgtgaattctctcgtactccattagatctctctctctct

SEQ ID NO: 181160 - DNA, 703 bp, Cannabis indica
agatgtgaatccgcctgccccgacggatttcttgagtgttcgagtttatttgtggcatgaaacaactcgaagcatgggtctagtcttattaatacgttcaaaaaagtccctactggctttagaattactaattttcgtttttttttttttactttttatacgacaaaaacccgcgctcaaaataatatatttttttttgagaacgggtttttctagtctatttttctggtccaagtgtatcttgtttttaccatgaattattttccttggttaacgataattgtagtttttccaatatttgcgggttccctaattttctttcttccccatagaggcaataaggtaattaggtggtatactctttgtatatgtatattagaactccttctaataacctatgcattcggttattttttccaattggacgatccattaatccaactcacagaggattataaatggatcgatttttttaatttttcttggaggttgggaatagatggaatttctataggacccattttgttgacggggtttatcacgactttagctaccttagcggctcggccagttactcgagagtgccgattattccattttctgatgttagcaatgtatagcggtcaaataggacctttttcttctcaagatcttttactttttttcatcatgtgggaattagaattaattccagtttatctac

SEQ ID NO: 181161 - DNA, 774 bp, Cannabis indica
aaaaaaaaaaaagaagaagaacagtttggacgagttaacccgaccaaaccgacaaaatcattgggcgggttgaactttttctaaattttcattgggtgggttacgattaaatattttcaacccgatatttatattgggttaataaaaatatactataacccaatcaaactgactgatgtacacccctacaattttcaataacaagaaatgtattgtgaaggtcaaatccatgtgtacatatattcagaggctggacttggacacatttgtattgggctctggatcaaatttggactgtccaaaacagtttctctgggctttttggggcatatagttgtttaaaacaaatttctttgaattttgatttttgccattatttctgttattgtcataatctaatgataataaaattcgattttttgttttacaactcattttgattttgatagcataatcatacacaaaaaatgtcttatcatatattcaatgactatatctcatctcacttttgagacatgaaaggaaggtaaaaaaggactataaaattagatgaaaaaaaaagataataatgagattttcaatttaactaacaataatttagacacatgtatgcatgactaatgagactgttgggtgagaatattgtgtttacaaaacacttgggagatgggagacctatttatgatatgagcatgctacaaggcatcaaacaccactatgtttagcaaataaattttaaaagagattagtagtgcctaacaccttcctacatgt

SEQ ID NO: 181162 - DNA, 1283 bp, Cannabis indica
atctttttattaattaactaaaagaatatgcgtacatttgctaaagtactgttataaaaagaagcatagctaggtttgatttgtattaattaacgacaagtcatacgtagtcaaatcaaaacatatactctcactcactatattttttatgttaaagttgtgcttaatactttcctatgtgtcaatatcgctattgattcaattaagtgtcgtgttccatataatttaatataataatttttaaagagtatcactaactaatcacaatacgacatgtcgagaaagtactaacaatgttcattttttatagttatgactcatattaattaataaatatctttttttaatattatagtaaaaaattaattatttgtatttgtcttccttaacacgtctaaagtttgaattgtaatcgcaacttacctttattagtagatagagacgagtagtggagcattcattcatggccatttttttctttaaaaaaaagtgatgtgtagaaaaaatttacatcattcattaaaattttaaaaaaaaaaaaattcaaaaataggtgaatacattttgttttttacattttgaactttttttatttaaaaaaatattttttcagtaaaaaaataaattattttttttattgttttataatttatttataattgtatcatatagttgtcaattgtcatgttattttttttttgttattttatagttgattaatagtttttgtgagaaagatttttggttatttttttttagttattttcttaatttttacttaagaaaatgtatttttataattttaaaaatttacaaacatatttttgtaaataaaaattttaaaccgtaaaattataaataaaatataaaaaaaatgatatttttaaatttcccttatattgggtttttttttcatcaattttaccaaaaaaaaaagtaacaatattataaaaatacttcagctagccaaataaacaaatatacagtttaaataaaaaaaaaattaacacaaataatcacttacatacaccttcaacccagaattcatgcttcctgacagtaacggacccagaatttttactttgtggggttatttatcatttaaaaatatttatacctatattataatcttttttacttacatttatttaattttattgggggctttttctccgatttttgatctataattatcaaatttaaaaaattacatttattttttaaaaggcaatattttgttattagccccccactataatacacctgtgtccgtctctacttcc

SEQ ID NO: 181163 - DNA, 596 bp, Cannabis indica
atggctatatgatgattatcattgtcatcatcatgatgttgattaatattgttaataggggtctgtgggtggtggtgatggagtttttgtaattctttattgagaagtagttgagatgatgatcttctcttttgttgcttacgagaattagctttgtctttcttcttgaaatgtgttctccagaagttctttatctcattatctgttcttcctggtaagtatctagcaatggttgaccatactaacacatatacatatatacatgagtaataaattaagactaattaagatagataattaaattaattaaattacttacttgttaccccaaagagcatgaagttcaataatgatgccttcctcttgtggtgttatctggcctctcttaagaccaggccttagataattcacccacctaagtctgcagcttttcccactcctattcaatcctgatatatcatatatatatatgtgtcatgtacatacatattacatattacatagatcatatacatatatatacatatatacaatatatatatatcctgcagacgaagctacagagctccatctccttcaccattgaagctgacata

SEQ ID NO: 181164 - DNA, 518 bp, Cannabis indica
gcgacatagaagccttcaggaaggagatggttttggatagaattggtacctggaagaatgtaaggaatgcctagtgttacaactcctgatactctttctgggtgaactgccgctactaagtacgaccggaaaagctaccaaatctttccactaaaaagccttgttttttattcaacacaattcagtagcaatagattagttaaaagcgtgaaaagtatatctttacataatttttttaattattatcaaaaaaaaaagataaaccttgttgatggcgagggaatccaataggccaacgacatcatctataagatcttggaatgtggctttctcaggctctaatggctgatctgagagtccgtagcctctgaaatcaaaggctatagcacgataacctttgttggccactgctatcatttggtgcctccatgtgtaccatatttctgggaacccatgtaagaacaccaccacttttggacctgaatttcgtattaattaaccaaaaaattattagtgat

SEQ ID NO: 181165 - DNA, 698 bp, Cannabis indica
  modified_base (641)..(641): a, c, t, g, unknown or other
gtttatgtagtataaactagattaattacaggataatactgaaaaaatatgtaatgtatgtttcttgaaaattggatattaattcaattttatattgagtaaaatatacattcacacataaatattttcttaatggaaaattcaaactttataaactaacaatttatgctaccaaacatgaaataaccaattagccaagacatcttcaaactaaaatctagagaagttctaacaaattcataaacaactacattagttaatcgttcaacggaaaaaattaaaatatttcttaactcaaagtaaaattttagattcataaataacaataccaaatattgaaaccataaccagccacccccttaaggcttggacaattgccaagcaatcaatctcaaaaataaaataattgtctttgaaccaatttaaaagcttctatatataactcccattagcttccgtttactacaaaaactgtacttgacacttttaatcacaatataatttttttgttagggatattagcggctaaccacttgaacttacggtttgtaacacttaaccacaaaactgaaattttggcagctaaactacctaaacccctggttccgttttggtctctgcacacctccgtccaaaatacncagttaagtgtcacggtggcgtgttcacgcgtacacactgtcacgtggcagttttag

SEQ ID NO: 181166 - DNA, 636 bp, Cannabis indica
gtttttttttttcatttctatttatatttattttcaatgaatcgctcaatgaagaaaaaacaacaaaaaaaaaatgttatatcgatatatatataatattttgatacatattttgagtgctattactattactcgtataatattattaataacttattaaacaataaattagtattgaaattgaccaaactaaaaataaataatctaaatttaaacaagtttgtatgttttagttaatttttgacaaccaaataatcgtgtgaaatattattattcatcgtgaaaattaactcaattgcacttgaatttgtcatttaggatgatggttcatcatcaagataatcataattgacatatattctaagattaattgtaataaaactcaaattgtacttggatttatcatttatacatgaaagttttgattgtatcggtttcaaagctcgttcgctttcattcttttatcaacaccattaaacaaagtgacaatgagtaatatcaaatacctcactaatcaatttcctatatttttgtaaatttgaagatgaataaaatttgtaaaggttgcgattaaattataaattagaggtacacattcatggtccttaaatttaaatggtaaaaagtcctaatatt

SEQ ID NO: 181167 - DNA, 1162 bp, Cannabis indica
agcaatactcatattacaatgtcatgccacttttcgttgataatgatgatcactagtgtattgtgtatagtaatttatttatttatttattattattattattcttataatataggttattaattactcgatatatgttttccgtaataaaaaacgttggagttgtaataaggttgtgttttgtcaagagaatatatatgacctcatcagatttagaatgcatgttataatatggcatgcgtgatatgcaaccaacagtactatagtgtgttctcgaacgttgttttaggtatatgaatatatatatataaaatacattcttaaaaaatatgagaaacaatattcgatatgtatatatttattgtattaggtatatgaatgaggtggatatctattgttttcttctaacctctaggatttttataaacaatatgtacatcattacatatataaataattatccggatgccgtaatatacattaattaataatctccttctaaagggactgacatataaattcttaaagaaatgttaatagtgggaagcaccataggaagtgacatatatattattattggtacattttaatactagataagtttcacacattaattttgatttaataaataatataataaaaatcgttaaccaattataaaacatcacatcagtatactgttagacactttaaaatgttaaatagcaatactcaaatttcgaccctaaagtatatataatacatggtatatgtttgttatatttagtataatattatttgtgtgttcttagtcgagattgagttggtgttgagtttagaaagtttccgtcaagttgaaattcaagctgatggtttgttaaattggaataaagtaatagttgtgatttgtttattagcgataattttgtaatgtgtttatcgatctctgactatgtcgtacaagatatagtcgatcacggactctctgctattgctggatcaccaattccaaatcaagatgttgttcttcagctgctaaatagacttggacctgaattcgactctgtggttttaggcattcactgcacaaagtgacactctactcctgaggagatgcaggctctccctctttcgcatgaaaagccgcctagaacatcacaactcagtgactgatctcagcatg

SEQ ID NO: 181168 - DNA, 620 bp, Cannabis indica
ggccactcctaatcatttcagaataactatcaggcatgcaaatcttagttagcaattctagctttttttaagttcatgatcaggacatccctaaatctagtaatggtgtagactaagtatacaaacattgcatcattctgaggttgtcttggggtcaaaattagataggatgacattcagaatgttgctttttgtctctaaggcatattcctaaaaggactcttgtaacgtccccgcttcaagcctccattgggcccttacacctacaaaatgatggctcttatacactggtacacactctggctgcttcctagaatgatgtctgacccctcaggccaactcaagtgttcccaacgtgctttgttctgactcgcacgcttcttgggaaaactttctaggaagtcacccttcctgaaatgaaatcaccccagatcaaaggcacttaactgtggagttttttcgtgatgggccaccgaaaacaagatgcaccttgttaatataggtagtcccagaccatagtctcgacatcatcacatacgacctttccccaggcgatggtgggattgtatagctcccgtacctttttcttacggagcgacggggctttgactgtcacggtt

SEQ ID NO: 181169 - DNA, 614 bp, Cannabis indica
cagagaaaaacctgagcctttctctctccctatctttagctgccacttcttctttctcttccctcttgaaatttcgaaatttcttagtgtatgagtagtgcccacacacagcaagtgatacctcaatcatagtgaggaagatcgtgaagaaagatcatcagcaaaggagtttcagcatcaaagattcagagaaagagatccaggttcagatattgataatgctctgctacagaaaggaatcaagggctagatatctgaacggaaggagtcatattattccgctgcacccaatgtaaggtttcctaaactttatatgtgtttatttcatcgttttagaaagttcatatttagggtgttaatcaacatacttgtgagtagatctaagatcctggtaaaataatttccaacagtgggggtatgaggtgtggggtgtggggtctgttagaggaggcggtggtggtatagggaagctgttgggagataaatttgttgttgatatgggaggagagacatgtttgggaaaaagtgtatcataagggaaactggtttcatttaatttgactgtgcgagcaatatatattcggccagtagggtgcatacatttgtaacctttg

SEQ ID NO: 181170 - DNA, 729 bp, Cannabis indica
aaatgagcaatgaaattgtgatattaataaatagtttcattagaaagaaaatgaaaaggggttttgtcggaaaccatgagtttaagcccactgataatgttgacaaacaaacaaacaaacaataataaacaactatatgttaaatgaagttttttactttttgacttactcttttgtatggtaatggtaatagattatcttctcatcactcaaaacttcatatgttattaattcagtaggagattatattctttttttggtcataagacagaaaattagagacaatcactcttttacccgtatagttagtagtagtagcatagtcatttgttttgttagataaaaatgagctgacgtgtcacctaaagatttctctcctaggacactcttgtctgcagtctcaacctctcattcctacttttttggtgccattattgatcaagaaaggagaagaatattcatcatgaaaaactctatagaacttttattattcaaagtaggaaggaacaagaaagagggaagaaaaaaaacgaaggggcagagggggcaatttatgtttgccttttatgctatatatattagtatctagaagaacaagaaaaaaagaactatactccaatatgaatatgtaactaaaattgactcagcatattaaagcagaaactttgaaatagacgactatgttttggtttactaactgtggtttttgtatttgacatctagttgtaa

SEQ ID NO: 181171 - DNA, 754 bp, Cannabis indica
aataatctctttttaaattaaaaaaaatcatcttagccacatatctctctaacaaacctatcttgggagaatattaataattttttttatttattttttaaaaaagaaaatctttatatattaaagttaacctcacgttatctaatgttttctctggataagcataggaagcagaaataccacttctatctttgtgtgattgcagatataccacttctgtcattgacccactttttagctttataaatggagatgttcatataatattaacactttacagaatatttatagatataaacttacattacaatgctatgttaaaaaaagaactaaatagaataatctactactccaataataaatttatttacaattttataattacactaatattatttttaatacattattaaataatatttcaaatataaatatttaattttttcaaaaaaaaatttgtaatctttaaaaataaatacattcaaaatcttaaaaagaccaaaatcttaaatgaaactagcaatacgtggctcggcacgtacattcacctagtatatatatatatgtaacaaattaggtggcacacctagcttagaggtccaaaaaaaatttatacattttttaaaattacacatgtttttactaattttaaaaataccataatattttctaaatagagtccaaatttattttatgtacccactaaattttagagccgatcctaaaaagaaataaatttttagacaaagatatc

SEQ ID NO: 181172 - DNA, 912 bp, Cannabis indica
cgagtgaggacaaagcacgctggaaacacttgtgttggtctgtagggtcagtatcatcagtccatgaagtagccacagtgacgtactcgtgtataagagccattattccgtgggtgtaaggacccaataaaagcttgaagcggggacgttacatgtatggtattgaaaaatattatttaattaggcaaaagaggaaaatagctctaaaggaaaagtctaattttctaataagccccctctccacttaaactaaaaatattattgtgtatttaagtagtgttttagtcatttactagttctacactaacaaaaaaaacaaaataagaattgttctgttctatgtaaatagtttaataatgtataagatgataacactcgttagagataaggaaaattggattaagatagtagaaataaatgagtgttcttacacaaaatagcttgattgggccttcatgccaccggggtataatataatagtatatataattgatccgaataactataaacattaataatacacaaagattcaacatctgagtatgaaaactccgaattttaactaatacaagcatcttacgttaggagaaaatacatcagaggatgtaaaaaatacagaatctagaggaaaataattaatcaaaactttaaaatcaaatatcgcacctaaatttaaccaaagttgtaacaccctaactaacttaggcgtattacgtgatttttaaacgtactgtgcagctcgttgctaatcaacgaggtttatggaaaaacgtgattaattaaaattttgctttttaattaaacttataaaaccatattacaaaagactcgggatcccgattataaaaatatttacaaaaagtttaactgtttaactgttacataaaaataaaggtcgtctaacgaccggtt

SEQ ID NO: 181173 - DNA, 948 bp, Cannabis indica
agtttatttttcatgttacttcaattatttagttagtttgactattgttttggttattgtctttggtcattgtaattaagttttgaatttcatataacttatgacaataactattagggaatatcactaatcaatcataatgtgtcacctataaaaggtactaaatactactgatgcctaataactatgctcttacctaggctcgaccttagacataggtatattaagcctgtgcctagagtctacctaccttaaagtcaccaaaaaaattattcctttttaaaaatagatatttttttaggggttttttaaaaaaattattcctttttaaataagggcttaaacatatattttttttttataacccactaaatttcaaggtcgcgagtgaatgtttaatttaagctttgttgagctaaacattttcactcaagaatttacacacaaaatctctgttatgttattatggttgtgtaaatctcatttgaaataaggtttagtgatgagccttaattgtatagtgattgatgggtagtggagtgaggcctcgtaggattcctaatcgaatagtagacagtacacattgatactagtaaatggattaaatacaagatgagataagacaagttttaaaaggggagtgcttgtttcttagatgagatgttattatcatactgtgccactctatatgtatagaaagaaaaaactgtattagtgtcttcactttataaagttttaaattttcccattttgcaaaagcaaaaaacatttaattagtgttttaaaaattttagtcattttctataagttttcacattcgattcaactacaattttctatgttttttttcttttatttttgtaattgtgtatgctctattaattactgttttgttgttagttgataaaataagttgtaaataacgtgtgagcgtcgaggttagctcgg

SEQ ID NO: 181174 - DNA, 535 bp, Cannabis indica
aatttctaacatgaacatatacaaaaaaaaaatgtaatcagttttgtcataacatctctaggtcagattatttaagttttattttgaccgagtcctattcgtacaattttagaaaatacaagtcgattttgtcatttaagaaaatagaaagtgcaattgagaatttttgtaaaatacaagtttcaaaatagtattgggtaattctacaatagacactccaaaattgaatacatcaatgcaccccttaaattcttaataattattagatgtaatattaagtgtacacattatttagtggggtgttgcacacagaatataattctttttctcacacacgttccactcttctattttatcaaaaaaaaaaaaaaaatctcgctcccttaaccacaaaatctctgttttttcgttacctaacccacttttctctcctacactttctatttaactttctcactgcataaacttgatttcaaggctcattttttaaagttggtcaagttttaaatttcaaatgatcgcttactctcagcaa

SEQ ID NO: 181175 - DNA, 609 bp, Cannabis indica
taagttgcatatagtatatatggttgtatatatattattgtatctttatggattagtgtatatatatgtataggcgcttatattacgttcatgattaacaatatgatatattaatataagattttgtgatcttgaagtatataaactgtttatatattgagattatgatctcaagcatagaaagtcatctaaagtttcaaaatattaaaatatcactatagtcatccgaagtcttaagattatagaaaatttttaccaattatcattgggtgaagcttataggatgttagaatttagaagacatagcaacatacgacgagtggggttgtaattatccaatcaatgatcaaatttaggaggacaactacaacaattcagagccaaattttgacaagtactcaaggaacaaatgaagagattttagaagatttttaagagttcaacattgaagaagtacctcatcaaatagcttaaccaagttcgttggaagtgttgatgatggagttcatggctaaaaacgatgttttaattcacagtcaagcttcatccttgaagaaattggtgttgtgaatttatgcattaaattaaacttaatttcaatataatctt

SEQ ID NO: 181176 - DNA, 746 bp, Cannabis indica
aggtaaaagtaccaggttacaatttgaaacaaaaacagtgtctaaaattcaacaactatgttattttttttttctttcaaagtaacacgttatttttgtgcaaaaatgttactttgcaatttgaacaagttacttttgtattaaaaccaaaaaaaaaaaaaaactaaataaaaaaaaaataaaagcacattaattaaatttagtattctagttaccaaaaatagaaaacaagttacttttgcattaaaatcagtcaaaatgttgcacactctactaaattcataattccaattactaggttactatagaaaataggataaaatgcaaaacaaaaataataggctactttttgaatttgaacatgttacattatacattaaaactaatcataatgtagcacactcaaccataattcaatatttcatgtaccatgttactttagaaagcaagataggtttaaatatagataaaaatttacttttcaatttaaacaaattattttctatattaaaaccagtaaacatagcatactcaaccaaattcaatatttcatattctaggttactttagaaagtactgagttgtttttttgattgctgccaatagtttatatgtgtaatggttgtgatttttaaaaagtatcaggttacgaattttcgatgctctgctacatgtgacattttatgacgttcaaaagtaccaggttactatttgttatttttttgtttatgcatgtaattgtttta

SEQ ID NO: 181177 - DNA, 777 bp, Cannabis indica
attcttagcctcggtaaagtccatcttgttgtgataggattgaacaagaacaaataagtttagctaatgtaataaagatacctattgttggttcaaaaataccatatgttagatataaagacaaatcttgatagaaaattttttgatttaacaattcttagttattgtcttcgaaataaactctatataggggcctggtcgatatcgatactcaccccaagagtaataaatatactaaaacttggtctaacaattatcaactaattgagaaaatcgacaaaaaaggtcttgtttatcccacgcttcatcaaaatcaagaaatcaactcaacattaacaattattccaaaagtgttgaaattttacaatcaaaacaaaaacctcatcttcaaattccagaaatgcaaggcttcttcagatgcaaaataataaaaaaaaaaaccaagaatcaagtgaattataataagctcaaagctaaccttaaacatgaaagagcattcaaagttactgaagaaattgttgggacacgcgaaggcggtgggtggtcgcagatgaacaacgaccttgagtccgtgtacttggggccaggagagagccaaggatttttcactgtcattctctctcgaaacgaattacaatttcgcaaaaactgatttaaatacagagccaaattttcacggtgtctctcttctcccaacccaaagttcaattaagaatttgattattctatgcaattggggatgaggatgaatgaagaagaagaagtgtgactagtgtt

SEQ ID NO: 181178 - DNA, 537 bp, Cannabis indica
tttttttttagatgaataatttagtagggaaaaaatattttatttttattattttatctatgaaaataatattaatttttttgagaaaatattataaaactaaaaagaaattattaaattttttttaatggaaagaaattattaattttaatttgtagtaaaacaaacatatttattatatatttacatttatttacttatatctttatatattaaaagtgtctatctaacgacatttcttggtttaacagaatatacttaaaaataaaagaatattctgttaaatttaacgattaggtttgatctcccgttaacaaataaacccaataattaaacccaaaaaattaaacaatcttttaaatattaataatttctttttaaattaaaaaaattaatcttaaccacatatctctctaacaaacctatcttggaagaatattaataatttttttttattttattttttaaaaaggaaaaatactttatatattaaagattgttagcgttattattttcttaaatatattaatattagtg

SEQ ID NO: 181179 - DNA, 780 bp, Cannabis indica
ccaattctcttgacagtgttcatgatttcatcaccattggaggcaaatttctccccaccttgatggtcttggtagggtctacatcgcagatactagcctctctacatccttcattaattcagtccttctttagtccccacacgggggcctaatttgtcttcaaagtcctcccagatggcttcaacttctgcttgagtctccattctaggagaaataggtgcctcttcccgcaccacacgcatagccagacatagacgttataacaactcctcacgctctactggtcacccttaaccactctaatgcatccattgtcacatggaaattttatacatagatgccttatggaagttgctgctccaaagtctaccaggactggacgtcctagtatttcgttgtactccatgggacaatccaccacagcaaaagttcaatgtttgaagacacaaatattgttttctcctttaaggtgacagggagttggatcttcccctttagcatcaaagtgttcccattgaagccttacagctaaataggacaaggtgaaaagtctacctttgtgagcccaattgcctgaaatgcaaacttgaacaaaatgttcattgagcttccattatccaccagaaccctagaaactcacttgttggctatttgggctttaatcaccaaggggtcattttgggaaagggcatgtgtcgggcgtcatccactgtgaaagtaataggtagattcgttgtttgaggacgctgggctggtgattgcccaacgacacatgttttg

SEQ ID NO: 181180 - DNA, 842 bp, Cannabis indica
gagtgtaggtagtggcttcgacgccgagggagaaaagctctttctccccctttgggaggttgagctgtggaggaggggtaggaggagggtttttgaggttcctctctcgtcgggatttcctattggatgaagagcggcgagggtgttgaaccctaggtcgagactgtgcgtagggacagaagcatgacatggatatggatatggaagacgccattgttagaggcccccgaagaaaagctttgagtgatataacagagagtttgtttacagaagagaactacaaagcgggaagggaacgtgacgccacgtgttcattctctggatgaggcctccttagacgacgaaagcgacgacgtcgtatcatagggaaattgcgtaacaaaattgtattttctttttcttcttcttcttcttcttcttttttttttttaattttttttattaaaaaactattttaaattaacacattaataatgttgtgtaggagaggagtaaacagaggaataaatatatgccattagaaatgagaatataataaaatatatagattagatagagttgtatctaatcaaattaaattcaaatgatattagaacagagaaaaatgaaagtgctttatttctgtgtattgaaattgaatgatacaaatgaatgaggctgcactatatataggcagcagagtaccagaacaagagagttgaactacacaacctaaaccaaccaactaactaaataatccaaactaactaacataacaaactttaataggccccttcaagatggagtatagaaatttttaataccctatcttggatacaatttcattgaagtgaattggaaac

SEQ ID NO: 181181 - DNA, 599 bp, Cannabis indica
attttttaatctcatatatttttttcattatttatgtataccataaaaaataaactataccctcaattcccatatttataaaaattccactttaataaaatacaagtacagaatcctgaaagaaataatctaaagatgaaattagtatttttccactttttattacttcaatattaattattcttgagtttatcttgaatacgattatagtacaataaacaagccacaaatatctgatccatcatgtttatttaatccctatggtactatctctgtaaaagaaattaggcatgaattggctaattgcataattgacccctatctactacatctataaataatataagaaaggaatatagtttaaaacaaacccattcaagcaatcctattattctactatccatacgttaaaatgatatttaacaagaatatataataaagtttttgtggagaaaaaagaatatacaataaagttatgcaatagctatctgtttcattaattaactactaccatatatcattattatatattagttttaggtcattatatatacttgtcagaggactttcgattttataccctcgaggattgaaatttg

SEQ ID NO: 181182 - DNA, 787 bp, Cannabis indica
tgtaatgtttgcagctaagttgaagagctaattccacggcatcaccaaatttgaagccttgttggtgatgctctagtattctcttttcttaatcattcaaccaaacatggtgtaagtagcgtggttgactagccatattagagtaaggaccaccaacaccatgattacacaagattcctactcttaggcttctcttctccccatgccatcacaaaggtcatatctccactcaccaccttcctcgtatattatttattatattattattaaaaacaatgcctacaaataatgcattattattactattattctttttcaactataataacaaacattaacatttccatcttcttaatttccaaatatcaccacaaaaaaaaaaaaaaaaaactctactcctcaaattcaatcacactcttcaaaagaacctcagatccaacgtttccaaatccattttccaaatttggaattccaaaacaaagaattttctagtgtttactttcctttttctgattttccaaattaattaattaaaaaaaattattaacaggttataaatttcaatcattgtttgatccgcacacatgggatttttctccgatttgaaaacactcctcctcggtagatctcgttcgtcgttttcgaatcaaaattctgtttttggattctgaattcaaaaactaaaaaccagagacagagagagaaagagaggttggggttttgatttgtgttgttgttgaagatcgagaaagtaaatatgagggtggcaaagtctcaggtatggcaa

SEQ ID NO: 181183 - DNA, 610 bp, Cannabis indica
accacaattttgttggagcagaagtcttaaacccgaattcagtcaaaagctgctaaatccatattacctcacacacagactatgtcatagctctatattttgattcaacactagatctagacacaacattttgtttcttactcttctaagatatcaaattgcctccaacaaatacacaatatcctgaagtggattgtctatctaccttgaaacctgcccaatctgcatcagagaaacaatctgggtatgcctatgattcttgtaaactatgcctcgtcaagtaacataaaatttgttctaatgctttccaatgatgaattgttggagaagacataaactgactaatgccaaaacaatctagctttcgagatgctagtatctccaattacaacctttcgagagggctgcctatctctatattctaagctcccagaaaagaaataaaagaacaatctagctatcgagatgctagtatctccaattacaacctttcgagagggctgcctattctcttatatttctaagctccccagaaatgaatccctcccccttatttataggcactggataacataaaattgtgttagctaggaagtactaaaaataagac

SEQ ID NO: 181184 - DNA, 822 bp, Cannabis indica
tggatctctttgcaagtccttcagctccttcaatatctttttgaggccattgaaaggaaagcaagttttctcaattaagctagtgctgagtatacaatatatgtatgagactttttatgaagatgatcaatgttttatgagatattgagactgagatgaagaacttctctatggacaacacagacataaaaaatggtgtatttataaataaatttaataagacaagtggttctaaggagaggccgaaagcaaagacccatttgttttcttttggactgctcaaagtgggtacagaatagattccataaaaatttattttccttttgtagccgaaacaaatatctatctatctatgaactttactttttactaatgatagtgctttctttactttttcaaatatcacaaaaaagtttggatgagttaacaagatgatttacttacttgtcaaactatatgttattgggtaaagggtatagtgatacattcttacttatttcgatatttagataaatattttagtttaacttattttaatggtcttataggttgtgattaattttataaaattttaagaactttaaaaaaatttagcacgttataaatagggtttaaataatctattacactcgtgattcttttattttatagttatacatgtataaaataaattgtttaaatactactttttataatgtaaattatactgaatttttcaaaattttacataatgtcttaaataattataatataaacaactataaaaaagaactggactgaaaaaacttcttaaatatcgaaacagtaaagaatgcatcaata

SEQ ID NO: 181185 - DNA, 586 bp, Cannabis indica
ataaaaagtcacccataaatttctcataaaccaagaatttcagttatataggcacactttatatagaatagatataaaagagaagtatgagccggtgatgtggcggtttaaaatctctctaaatactactatttgttctctctttaattctccgatttttataatttttttattaagcttataaatattaatataaattaattaattaaaaatactaattaaaaactacactcatctacctaactaaatctatattgatatattatacgtaaattttaaaaaataatatatatatgtatctcctattttttttaaattttttaactcatttacctatagctaattactcatttaaatgatctaaccctaacactaatattacttaactcctctttctctctctttttcttttttaacgccgatttaccttttattctcatcttttttttttcatttctttttttagaggtttgtcaagccgttcaaaaatgtttcctaacaaatttcatggtattatttattatttttgtttactatatcacatttatgtgtagttgtacatattgatattatatgtaaagcccgc

SEQ ID NO: 181186 - DNA, 594 bp, Cannabis indica
gtttagtaaaactgtaaattttcctcctaatttcgtcgtcactacagactcccattttgtaatttaattaaaagaactatttagaaagtaactgatactacattatttctatctagacccaatgaattaaaaaattcgaatctttacatgtgccctagtttaaaaaaataatagagtctgtacagaacaaaattagaagaaaaattactaattttaataaacattaagtgcttatgccgttaaaaataaatattgaatttatgctgcttacgaacataaaactttgagtacttatatcgatgtttatcctaataaaaataataggtatggatagagaatttttacaaaacagcactacatcaattgtcttataattattctgccaattgttttgttgagattatgttgtattgttaaattgttataggtcatgaattctatacaagttctcataaagaccaacgacagctgggatgaaaggaaaaactatgttgattattgttgatcgtcaatttgagaacctgcaacagcaggagaatcaacaataaactgtatcttgtcaacataatcggagatggtttggctgccttttcg

SEQ ID NO: 181187 - DNA, 808 bp, Cannabis indica
taatagataccctaaaaacttataaaagaaaaataattaacatataataatatttttaatttatattaattttttgtcctatgtcatcttctaaaaaaatacatgtaaataaaatgcattttaactattaagacattcaaaaaaattcaaaaagagaaaggaaaaagaagatagaaaaaaatggaaactctttattaaagtaaaaactatgattgaaaataaccaataaataggaaaataaaaaaaatggattatgacttaaattggaaaataaatacatatattacttcaattatattatgaagactagggagagaataatacctcgttgatatgtacttcaattttctttgttttccaagcttaattagctttgttactacatatatatatttatatgtataagtatagctatatatacttacaaaattatataaatataataattaggtgggtaaggataagaaacgtgctaagaaacacagttgttgagaataaacaaaaacaatatagaatttatatattaatatataattatgttaattagggtttgcaaaatgttatcgtgtcatgtttgtgtcatattttatatatatgacccgtttttatattttgtgtctggcgtgttgacgacccgttttttactcgtgtctattttctcaactcgactcgtaaaaaaatgtatcatattcatgttgacctactttgacccgttttgctattactgaaactagagttgtagagaaatgatagatttaggatacattttgttaacatctcacttttagtcaacgacgttgagtcaatt

SEQ ID NO: 181188 - DNA, 713 bp, Cannabis indica
cactgatggagaacctttcgaagatatcactttgtaccgaagtactatgggggctttacaatacctcagccttacaagaccagatgttgcatacattattaataaactaagtcaatttcttcatgctcccaccaccaagcattgggaagcatgtaagcggctgctacggtatctcaaagggacgataactgatggtttatggctctcaccatccgattcaatgacacttcatggctatagtgacgctgattgggcgagttgcttggatgatcgtcgttccacaggaggctatgtcatgttcttgcgcaataatctaatatcctggtctgccaaaaagcaacaggtggttgctcgatcttctactgaaagtgaattccgcgccttagccaatgcagctgctgaaataaagtggattacttccttgctgtccgagctacaggtttccattatcccaccaccggttctatgggttgataatcaaagtgcaacatcacttgccgcgaatcctgtgtttcatgctcgaagcaaacacattgaaattgatttgcatttcgtccgcgatcaaatccttgcacgacaactttcagttcgttatgtcccttcattagatcaagttgtcgatgctttgactaaaccattttctacagatcgattcctgtacttaaagacaaacttcacttagctacttccaagtttcgtttgaggggggatat

SEQ ID NO: 181189 - DNA, 628 bp, Cannabis indica
acctttctatttatattttttttatgttttttttattttactgcgtggagggttggtgttccccctgtccatggatcatcatgctcttctttcgtttccatgcatcacaccaatcttttatggctcaaagatgattactgattaatcttttcactctcatgcatcatactcatctttttactgttcattaagattactcagctcttcaatttttactacgtgtaggcatgggaagtaagctcctctgcctataaattaccaccatttcattcattgccatgcatcaatcttctttcttcccatctagcttcctttcatcaatcttcattcttcccatccagcttccttcttcttttttttttttgtctcttttttctttttccttatgtcttctgaaagccacaattcacttcctcaatttgcacgtagcatgaatcccatcactgaactaaaagaactccctcctgatgctctctcgtaccttaatgatttacgaaataaggtatattatttggagcattctctttttgattcagaggatgtcactcgagaacgggctagggaagtgccatgatcatctgcgtcaactggacgggctaactgatcgggttgagcagctgtcttcgag

SEQ ID NO: 181190 - DNA, 636 bp, Cannabis indica
actgcctacagtatatttgtacaattaactgccacgaacagtaaaactgttgtacttttctactttaacaacgtgaacagtaattaattgtaccttttattcttaattaaaaaacaatgtacaaccggttaacaaacctagaataatcggttgccaacttaattaaataattaaaaataaaactattctaacgtgggacctacctgccgtacacggattgcaatccgtgttttgcacatattggcacaaaatcggctgcctataaatataaatatataatatttatatattataaatatatatattatatatataatatcataactacaaaataaatatatattatatctaattatatatataatatcataactgcaatgtatttcaaatttacatcacaacaacattttactaacatatttcagatttttataacaattacaatatatattcaaaatatttactataatttataaaaaaaaataaaaaacatactttacacaaatgaaaatttgtgaatttcttatccaagccaaaagtttaaaacccctcctacaaaatctgaaaataaaaaaaaaaattacattaagagcacaataaaattaagcataaaaactgttcaaaaaaaatatcaat

SEQ ID NO: 181191 - DNA, 564 bp, Cannabis indica
tgaattgtttttgacaacaattctttcctaaattctacatttggattacttcctaattatggattaaggaatagtttagtgaagtaattatgctttgtgtatgaaggtttatttcccaggctcccagccacttattaatgggtatgaattggctcatttttggatcttgatataatgtcattgttgtgcttttttcctcttatgttctcctctgcaagttctgagatgagcttgcttgaagttgatatagggttacttgttcatttcctgactgcaataaggacttttaacagaattaaccatattaaatacttggtgaatatgtgatgcagcctacaaaggtttattgaacatagttccagaacctattcaagaaagggcttttacaatggaaaatgaaagattaatatataagcaactagtcaaatgtttgaaatagtatcagaggagatactatagtactgtaacttacttttttttttcttttctataatttagatacacagtggtgctaacctttgtgaaggttgataagatcgatatcatgaaggataatactccagc

SEQ ID NO: 181192 - DNA, 1355 bp, Cannabis indica
gcgatcaacctcatgtttattttggcgattaaagccatattccataataaaatattacaactatccattagcgaattgagtaacatcatcattgacctaatcttgcaaaactcgaaaggtattacctctttgagtagcaactctctgatgtattcttccatttttcctttggaaatctcccaattatcagacttagccttttctgtacaagtcactgcagctgaaactatccctagcttcaagtagagttcttttgcaaatcccacttcaggttgttaggctattttagcctacgtttgggtcactttttatagttgtttttccttctttgttattctttttggaatagaattacgcttgttttctttggtttcaggtttcacacttgaaatatatcaattgatcaaatttcgaaaaacaacaatctatagaatagagaaaattttgtaaagaaaataaagctgaaatttcaaaactaaatttgactatgttttgatcagattttggaaaaagtcaaaacatagaagctttagatctcttctttctttttctaacacatcttgaatcaactcatttggagtttgtatgtgaaatgtatgtatattttactgtaaagatgctgaagctgtcaattttgctttagtattcgtcgacccttttttcatggttgcgactaagaggccagacagagagcatggatttttccaatttgcctatggtcgcgactaagctttatgtagtcgtgactatgggctaaagacgagattttttggcagttttgtaatttcacaatttgaagatatgtgcattattttctatataagggttgcgtgttttagaggcaggggaggtagaaattaaaccctagaactgaagaatgaggtaaagcaagcaattatggtgacccagagcaagatcaccaactagttctttcttccccttttttatgtctttatgttaatttctgcatcaatttttatggatgtgaacatgagctttttgaactgaattcccaatttagggatatgatgaatgttagataatgtttcttcaatttagttaatgtgattattagtttttttcttccctatattgtgtgatttgttcttatttattttaatttacatattttagactggccatcttgaatgtgatttatgatcttaatatgaaatctgaaaagtgaatattagaaatgctctaataggacaaacataagttttgatgtaaaacgagagtatttacatagcttatgtgatttttaaattctgaatttaatgcaagttatatgttaatttacttcagagatgaaagtagataatatatgatttaagaccttaatgatatgagaagag

SEQ ID NO: 181193 - DNA, 657 bp, Cannabis indica
tttgttgagagaatatataaatttatttaattagtcataattttagttaggtttactcacctagtatatctatacatatatagcaagacaaccctgagtagaagaaactgatacttattgtgtatatattgaatataaatattttttaacaagtaaacatatatactatacatttttggtctatatagttctttattgttaaggagtatttaaataaagtttttgtatacatgatggagacatcagtttatcaagatagaaaatatttaataaaacctctataatatgttatatgtatatataggacaaattaagtaactataagagggtggttccaaaatccaaataaaagactattgcttaagaagaatactatcacattttttccaagttgatcaatatatatagttgtaatttggtactttaattttataaggagagtcttagggttgggtatgatgagttctacacgcattgtagtcataaactaaagttattttcatccaattttaatcttgaaaggcacataaaaatatataaatatgatttaaaaaatatattttaaatatgaattgttaattgcccttaatattttgtctaacctaataagacggctaatttgggctgttaagtttggcaatcagtttaattcaaagt

SEQ ID NO: 181194 - DNA, 812 bp, Cannabis indica
cccggaccaggacaataatagcaaatcatctcttctgaactctgcaggatttcattaaaaatctaccaaactgttgagatggtcggattcaattatattttttcaattttactcatagaattttgacgtagttataagttgaaaggacacaatttaaaacatgtcaaacttcaatagtataatttggtagatgtcaaaattttaagggtacaattttataaatagataattgttacgttagtaaaattgaacggaatttgacagaagttcttgaatctaataatctcaatagttcgggaagaattttaactacttgaaaattcgaggggtgtgatgtgatatggtacatgtcaaagttgagggaacaaaatttaaggtgcgtttagtaacactttttaatcagtttttgttttcaaaattaaaaagtaaaaatattttctaaaatcatattttataaaactatttttacttttcaatttttaattaagaatctaaattttaaaataaaaaattactttcaaaattttctaaaacagttttttcttaattaatattttagattccaactccaacttagaccttgaaaaccgaacccagactcggcctcagacttggacccgcccccgatcccgacctccctagacccgacttaaataaaatcaacaaataaaaataaaaatgatattcacagaatacgcttttatttttttgttttaaaattaaagaataaaaataacacatttttgtttttcaaaaataaaattttacttttatttttgtgataaaaaatttaaaaacaaaagtatcactaa

SEQ ID NO: 181195 - DNA, 663 bp, Cannabis indica
gttattatcatacagttaagcctattttcatgattgtcttatgtgtcagcgtattggaaaacttactgtaacatttgcacctatatctcgttgattaatgaatttccggccattcaatctatcatggcttcctccaagataaggtatcaatcgcttcacgtcactcatgactttaggtgtaatcttcttaccaaatgaaaggtgtgatacaatatgtgacatattcatttgagaagcatcaaaagagtgagatcctgaacgagctgaaataataagattcccaggaacctgcccagtaaaggaaaatcaaatttagaattgaggaagtaaagggacaagcaatgaaaggttgccaagaactaacgcaagatgaaatgatattttgattagattacataaaaataataataattttaagggttattggcaccataaatacttaagtttgtgtatgtgctgcccttaaataagtaacattttattttgacagtacaaatacctaacttttaatttctgttgcaagctttagttttaacttaattagatgctttcataacaaaaagttaggttcttttaaaaacaaaaattaaaagttagatatttatgtgcaacgagttgagtacacatagtatttttgctgtcaacagccgcaaaataaaaatt

SEQ ID NO: 181196 - DNA, 903 bp, Cannabis indica
tcatcaatgatggagctagggccggggagggtgtcgtggcctcccataatttaatttatttatatatatatatatgtattggcctcaacaaattttttggttggcttaattcgtttaaatttgtattctcaatgtattttttattgtattatttattagtgcattattttgctaaaaaaatactaaattatttgaactttaaagattttttctattatgtctcgtgtgttagcattgttataaggtattatagttatcacagtaaaatcttacaaataattaataattttttataattattattaaattaaaataaattgaacctatgttatagtatttttcttatatttcttattatttattttttacaaatatttattatagtttaatgagagaattactataaaaacttactgtgtaacaccgttttctaatgccaaaaataacacatcactaatcagataattaaaatggtattttcttttggtcaaagtaaaatgacattttcttttattaaaagagaaaattttattgtcaaaacgaacaaatgctacaaagatcaacatcaacaaaataaccacctatcgacttatttacatagggaaatttgattttctatgcttagaaaatcaaaaaatttagattttttaaacctaaaaaatttaaaaaccttaaaaaaaacctaaattaccttttttttcttaaacccctaaaaactaaccccctcccacatattctctctctctctctgcatcatctctctctccctctatctcaccccaaccgcccaccctcacccgaaccaccctcacccacccacgtcaaccccaacgccgatcaccaccctcacccccgtcgaccacgaccccaacccctccgaccccaaccccaacccgaaagagc

SEQ ID NO: 181197 - DNA, 525 bp, Cannabis indica
gtttgatctggattgaactgttttccatatgttggatttttgatcaactcaaccttcaaaatgcctgaaatagtagattgaccaaaaggaatacgagtacccctgacaaatgcactcacacaacatggatgaccctcagcaataacagttctatctagattggcatagaattcacgaactaaaatgggatgaggtgcagacaacttagagacagcgtgagcccatttcctaatttttaaaaattcatgcacgtcaggatagtcatctaaaatcactatttattcgaaccatagctcacgactactaaaccatcgttggtacacaaatgctttggaggcatcaacaaagcattgaacagaggatgggttgacatttgagataggggcttttggaggttttgtctttttggagcctttggacactgtgttggagaagagtttggagttggggacaggaatagactttgtcttggactttttgacaggtggttgataagtggtatcacgcgatgattttctttttggc

SEQ ID NO: 181198 - DNA, 962 bp, Cannabis indica
agtgaaggcttcaggaaaattacacttttcttcagactttctgaatcagaaaaactgagccttctctctccctatctttagctaccacttcttctttcttcttcctttgaatttcgaaatccttagtgattagagtagtgcccacacacatcaagtgatacctcaatcatagtgaggaagatcgtgaagaaagatcatcagcaaaggagtttcagcatcaaagattcagagaaagagatccaggttcagatattgataatgctctgctacagaaaggaatcaagggctagatatctgaacggaaggagtcatattattccgctgcacccaatgtaaggtttcttaaactttatatgtgtttaatttatcgttttagaaagttcttatttaggatgttaataaacatacttgtgagtagatctaagatcctggtaaaataatttccaacagacacatgtttttagtttaggaaagacaactagaaaaaataataataataaaagctaaaggtgcaagagtctacttatttatgttttttaagttttgtttttataattgaatacacagtattcttagctaatattgaatacacagtattttttgctaacgtgtaacgttaatttttgttgattatttgtctaataaatggtgagtttggaagatttcaagcctagattcataggtcatagccatatatttaatgcttccttacaattttttttttctgaataaacttctggcttaggggttaattgaaattgaaattggtaacgaaattggtccccaagcaaaccagcacaggaagcaccacacttcctagcccaattgaccaagatatgagctaaactattgtcttttccagcaacaaactttaaaaaattcacacaatctcgtgttaagagatggaaaaaatgaagttttgaatcttaagattgggaaaacatgcatcttcagtcagtgcc

SEQ ID NO: 181199 - DNA, 664 bp, Cannabis indica
tgcttcgatgatggcgtctttatggtctggcagactaacgaccaaaaccttaagctcgacttctatccaaagcctaaggaggttttcgtctgcttctgagaggagaagaagagactcgatgccttgctggaggagcgcagggggcctcgtcttccgccacgcattgattaagccaatcgttaatcatcattgctattatcacttatctcttttttttattatatatatatatatttagtccttcttcccccctctaagacaatttattatatattttcttaaggggagacacttaaggcccgtccccaggccattatatttttcttagagcttttcattaggtttgaacaacttacatttatgcttgaatacatattctgcttttaaaatttgttaaacttttggcctattttaaatttgtccgtgtggtatgccttactacccccctgagtgacatgaaaattgtttttaggtcactcagttttacaaacattaatttagaggttgcctatacttgtccggtacaaatttactttacagggcataaactttaattttttcgactattggtaatactttcggaggtgatcagcattccaggccctaggcaccatggttccgtccattccttttagcttgtaggtccttccaaattaggcccgag

SEQ ID NO: 181200 - DNA, 673 bp, Cannabis indica
gaaaataaagttacatttaatgaatttataattttttttttcatttttaataattatattaaaaagaaaatattacaaaaatttacgcaagatgcatatggtgatttgatttttttttttctaaggggtggttgatctgagattaattagactaatgggtgtgtaattttttttaattaaaaattgatttatttaacaaaatcttaatcattgagttttctcttaatttatttagaaggattaaggagtattttaattatctaacttcgaaacagagatagatctaacaaactaaagtgaacgtttgtaaattatttccaaagtgaattgtccttacctatatgtatcaatttaacctaattaggtgaaaaaacattaatttttaccttatttttatcctttatttcatatacactaaacttttgtacgtctagctgcatagtctatctcctaatagtagtaatagtaataggtgagccatattaaattcatagattggactataattatatattcaccacacaaatgtaataatatatggggttttatttattttattttattttttttatttttatacttcattaattattttttattttgtattttatagaaatccacataataacccacataataacaaacagagcaacctaaatcacaatcaaaatcc

SEQ ID NO: 181201 - DNA, 552 bp, Cannabis indica
atatatgtgtgtgtgatttgtagttgtttttaagtttttaatttttttaagtatattttctttttgttaacgcaatgtgttcttgtctaattgtattgatttgcatattaaggtataataagttcttatagctatcagaattttaataatgagataaatactatgtgttatacataaaaaagataagatatgctattgtccaattattttttttatttaattacaagagaaaaaccttagtaggtttaagtatattttgagaatgatgtctagtttacttataatgattttatttttagttaatgtaatggatttaaaatatatagatgctttgttgttgttgttgttttttttttttttttttttttttaaataaaaatcgaattatttctcaattacgtttttagttaggatttatgtgtagctgttatgatatatatttttaatttatgtttagcatatgttaaaatgaatatgttctttgatttttttgtagtttattttaggttaacacttaattcatttttagttgtttttatttaattttttttt

SEQ ID NO: 181202 - DNA, 519 bp, Cannabis indica
atatcgtggaacacgatatcatttgagagagtggagtcaaacacaagcaccacagacagctcgtgaattgttcaatttaaggcattcaaagcttcgaaatgtggttgaaaggacatttgctgttttgaaaaaaaggtttcccatactaacaatagctcctcaatacaccatcaaaaaataaggttggattgtattagcatgttgtgtacttcacaactttattcgcaagtggaattgggatgatgaatttttcgaagaggacatggaaaatgaaataggaaattgtgaaagtttgaacaatattgattttgattcagattcagatgaagaacttggtgacgggccaacagatgatgacaagcaatatatgtttaattttagagatataatagctcaaaatatatggaacgcaagagcaattagatagtcttaaaaaaaaattattttaaatatttgctactaaattgttatagttttgactttattttatgaagagattattatttatttatatattat

SEQ ID NO: 181203 - DNA, 720 bp, Cannabis indica
atagtttaagattttatatatttcagtggtactagagtgcacacgatattatggcatgggatactttaggatatcactattgactaatgtacaacttgactctacacccattcagagtaaagcttctaacttggaccttttctttaagtgctcagttacaagctacaaacctagagaggtaaacatcattcactaattacccagttgagttagtttcaattttctaataatatttcagacattaaaacaatattttaataatataggaatgcacagtttttttatagagacggtctcatggaataatggggtgagaattttccggagcacagtgcaagaacagaaaccacactcactggccccgaggacctgggacctgtattttctcttatatttttagtaatatattataattcataatttatgtttgtttgttttagtatattaatatctttttataaattttaagttatgttttggttaataactaatttattaaataataattaatgtgtaatatgttttcatttaatttaatatttttatatatttaaatttttattataaattttattttttattaggagatttaccatcttctcccgctccaacctcaataagaataagcagagattgaattaaatcttaatggaaatgaggatggccgctaattactcagtgggtccctaaatatagacccgtcaatcatgcatggtcata

SEQ ID NO: 181204 - DNA, 590 bp, Cannabis indica
tttttataaaaaatggtgtcttaatgtaattatcccagtatttatctactttaaaaagtatttacaaaaattaaatgaaaaataaaagaacgcgtggataaaaaaatcaattattacatctcatagtggacatatgtattgccaaatttgggagagaaaatttaacttttaacttattttctccaagcatttttatataggaaaatttacaaaaaaaactaactttttctcctatctttataaaaatactaccatacagtagaaatttactgtcttagccaattttttttttttcttttatactgtaaacacaaaaaaaaaaaataaggcctccatcttccacacctacagacagaacaatcggaaaacaatcattaattccgatgagattgaaaaaaaaataatgaaatcgacgtcaaataaataatcatagcaaaacaactgtaaaacaaactctaaaacaaaatcaaaacaaatgaaaaggaaaacaatgaattaaaaaaaaagtaaaaaaaataattactgcacaacctcaataccccaatgcaatagcagttatatttacaagaggaaattacacttagtatgag

SEQ ID NO: 181205 - DNA, 654 bp, Cannabis indica
gaagaggaggaagaaaatcgatgatgatgatgatggagaagttactcatgacattttatattaaagatttatatattttttgtttattagttttttatattataataatcaagtcaagatcaataaattaaacacacatcaaaattggttgtagcaaaatcatataatatatatattttcacaattattaatttatttttgaattccttataataaaaaaaccatgaaatatgtatagctttaaatttcaaacttaagtcaacacatataaagaccttataaaaggaaagtctggatgtaactatagctagctggagtagtataccaatgaaattaatgctagtttatattgaaaatatatatatagtacacatttaggcacgttcataaaataagttaagctcatttcatcaattaatcatatactgatataatttttttatatatatatatatagtaattagcaaagcagtgcatgtgacaatgttctgtgcagtgttcgacgaaattaataagtacagaatatgaattaagtttattaaacgcgtattgagaggtacgatgtcatgtgtgtatatatatatttatatatatatatatatgtgttatagtgatatttgataggttgaatggaaacacaactgctagctagct

SEQ ID NO: 181206 - DNA, 685 bp, Cannabis indica
tcaaaaacagagcatcagatgagaacgctcctgtttcatttttatcactcgattttccattaaactttacgatcataacttccttctttggaaaacaacaggtcttggcagccatacgaggaaatcgattgcgaaaattcattcaagattcagctcctcctccacagttcttgaatgatacagacaaagccaatggcaactacaatcctgccttcactgactgggaggtgcaagatcaactcctagtctcatggcttctgtcgtcaatgactgaaagtctcttaactcggatggtcggatgcaactccgctcgtcagatctggagcgccttggagaagtattttgctctgcgagtctcatcaaagatactggagtttcgaacgaagcttcaaaatcttcgcaaaggatcgatgtcgctgaatgagtatctgctgaaagtcaaacaaactgtcgatcttcttgccagtgtaggagagaaactcaatgatcgtgatcatatatctgcaatcttcaaaggtcttcccagtgaatatgacacattcataatttcctccaacactagaatagagggatatactgtcgcagaaatcgaagctttgcttctatcgtctgaatcaagaattgagaaaattgatcctgaacaagaaatgagtgccaatcttgtcaagactgatgttgaattctc

SEQ ID NO: 181207 - DNA, 694 bp, Cannabis indica
agttaccatttttcctcaaaaaaaaaaaaattaattaaccaaacgcttatactaatgagaattgctactattattggcacctggtattctttttgtgttatactcttattaatataattaagtcttagattttatataacttaaaaaaataacctttaaataatattgttaactaatcgttggcactacctataaaagatattgggcacgtgtagcaatattttatattaatggagtacaaatagtaattgagtattaacatagagcattgttattggacactaatgttgtccaacaccttttataaatagtactaacgattagttaatgatgttctttaaaaattacttttttaagttatatgaaattcaatacttaattaaattaatagcagtttgatacctgctaagcactaactaataataagacaccttagctaagtgagacttacgtgtcaaatttttattattagtttgtttgttgtgggacccatttgtttgtaaattgtacaattcgcgcgctcaaactactttccattttgtttaaaagaaaaattactttccatataattattttatttaaatgttttagtggaacagaaggggcacattgacatttgtaattttttttgttttttgtataagtttgtacatttgtaattatttttgtaaaaaaagtactcacaattcacatt

SEQ ID NO: 181208 - DNA, 1021 bp, Cannabis indica
atgattacatcaacccaaatattcttacttgctataaccgaattataaaaattaaaaagtataatttgagatatatagactaaaatcatccaaataaacaaataaattagttacacatagaattataaatgatactttttttagagtgtgtttgaagcttatgtgaaattttttggatctcttcactactattttttatctctattttttttttgtataaatatatatgtatatagaaaatttatattaaaaaaatgaaaaatatacgtacatatattttattgttgttaattaaattcaaaatagtatagtaatagagaaaatttagaaattagatttttattatgaatttttatttatttaaaataattaactttaataaaaaaaaattagaaaaaatgagagaacgtacaagattaggtatatatattttgttggttttaattaaattcaaaataggatagtaaatttatggtttaaataatatcacagttcaaatattaaaaatatcagtttaaatatcaaatatcagtttaaatttttattttattattttattatatataaataatattttattattttattaaatataaataaaaagtcacacccataaatttctcataaccaaaacttagttatatagacactacacactctatatagaataaatagatataatgggtgacctaaaaataaagtctggacaaaaatatacataattgtgatgaaattggtgtgagtagctagctagtgacgctaatttgactttttgcacatgaaaaaagcttagtctcaagtctcatcgaaaaaatctatggcttgaataaaaatactcttttgaaaaagcaataataattatgatatcatattaattatatagaaaaaatattaattattaattaactatatatatactctctagtatctattatatattatccacggaagtaatattaatattcaacctataatatctaaaggggaaaatacgccccaggtaactgtgaatatgtgatat

SEQ ID NO: 181209 - DNA, 643 bp, Cannabis indica
tacgataatgacatacaacttttaaatattagtactgaatacaagtgagatacgaaaataactagttgttaattatataatgcgttttctatagtatttattatcttctttttgttatagatctctatttttgtgtgaggattatttaatttcaaattcactgtaaaatatatttggagatatttctttgtattttcttttttaagaaattgtataataatttttttttctagaattttttcgatttctctatataaccgcacgcgaagcgcaactcgttgcgactagttattaaataaaacatagaaccgcaagcatagtacggtttgtttcctaattacatatgaagaacccaaaattatggtgagcataatatactaactacttcatcaaatttattcaaaatatatagtgtcttttatattaattggctccattaatgtagcccaaaaatgtataatttgcatattattcgtgtaagaaagcaaaattaaatggccgaaatattcaaagtcatcacaaattcacaaaccaataccacaagtttttagtcaagattcaaagtcaacacaattagaagattcaaagggttttttttttttttttccaaacgattgaaagctattttacatataatcccgta

SEQ ID NO: 181210 - DNA, 553 bp, Cannabis indica
acttagttgggaaattctagtcttaaagagagaattatgctttttaccccaagacttaagctgactagcacagtgttgctgtttgtcaaaaaaagattgcatcccagaagtagacagaggagccatctggtcagaccaaacatctttaacagtagagtaaaattcaggatcctccagccaaatattttcaaatctaaaccttttattgacaaaattaggtacaagatatgaattattatctaaaactaacttaagagctctatgatccgagccaaaaaaaaccaagatgatgcaaagaattattagggaaaagatcacaccaagattccgagacaaccacccaatctaatctttctttaacactagaattatgccaggtaaatttattaccaacaaaagggaggggaataagagaaaatttgttaataaattcagcaaaagaagaagaacaagaattagaactaatacgacccccatatttatcactattgaatagataactattaaaatactcccacttatagcccaacggaagactaggagcattataata

SEQ ID NO: 181211 - DNA, 657 bp, Cannabis indica
aatagggtcaaaaaaatcgattcatgccccatggttcttggttgtaatttttaagggttccccagttgttctcagctgctccctcaaaataaaagtgagtatagatgctgctgggtctggagtgtgcttagattttgtgtaaatgtaggctatgtagcaagctctttaccaagtttcatgtttaagcatttagtcgttatgctcttaattattgcaaatggcggccgcattggacttttgagcattgagtaagacaactattcaatcaagagagattgtactaaatctgtttggtaatcattagttattactaattttatgtgctttattacattttcaaaaaaaaaaaaaagaaaattattagaatatgtttttttatgtactatgatatatgtatactattagatatgtttttagttatttatgttttaataatttatttatcttacacattatatcaatagcaattcctttacttttgtaattatttattcatttaaatttgtaggtcttatactttcaaatgtgaaaatataaatacacatatataaataaataaattagtggtaataatcatagcctaatagtactacataaagaggagatgcagctctagatcatgcatttatatttgaacaaataagatctattctattc

SEQ ID NO: 181212 - DNA, 598 bp, Cannabis indica
tctagacagaggatctgcttccgacataagccacgaggcgtccatatcaggatatagcttgatcggaaattagttccaacgagaagacaatagctcccgagaagttgctcatggaaagatgcccccaacattttcagattaaagtctcaaaaggcaagtgaaggagcctccaagaccaaatgtcacatggggagactggcttaggggaagcctaagggaggttggctccggatgtttactcaatacgtggacgtgaaacgtgcttgatacacttgcttaaattggaaggacactatagcatgtccttcctgtaaattaagtaaagatgagatttttacaaaagagtattgttattggtcatcagtggtgcctaacacccttagaagtgttgccttgcgattggctagtgatactccctaaaaattattatattaaactatatgggacccgatactaaattagaccaatagcgatattgacatgtaagagagtgcttgacaccactggtaccttttagcatttctctttacaaaatgtgcaacatttacgaaattaaaataagcatggggatacgcacactcactactttgacatatcc

SEQ ID NO: 181213 - DNA, 795 bp, Cannabis indica
tattatggttgcttctaataatgatactacgtgctcttagtgcttttaaacaacaacttaattcagtattttaacttaaggatcttggtcatttacgttttttcttaagcttggagattggtctttcttcaagtggcattcctgtgtcacaatggacattcaccttaaaacttttgattgaaggttacttgggagcttctactctttctacacccatggaactcaacattaagctctcttctaatgttgggaaaccattggaagatctgaaagtttattgcaacatcattggtataaactgatttacttaactattactcgtcctgacatttcttttgttgtcaataagctaagtcagtttctttctacccttagagctcctcaccttcatgcagctcaaagaatattacaatacctcaaagacatttacctcaaaggcatttatggtcaatgattatcttttcactcagcttcacatgctgtaaaattttttagatgtcgattgggcctcttgtatcgatactcgaagattaatttctggctattacttcttccttcaaaaaacattaattcttggaaatctaaagagcaatctatagtttttcgatcgtcgactgaagttgaatatagagtcatgatcaatgcaacttgtgaaattacttggttgctcaggattttggcattgcgcgtgacacactcattgtcctctactgtgataacacctaatgatattcatatttttgagaatccactcttctacgaacgaacgaaacacattaacattgattgtcatgt

SEQ ID NO: 181214 - DNA, 596 bp, Cannabis indica
atggtcttcttgttctgatgatatggtttacaacttcataatttctatgtttttttttggtctttgatttgatttatgtttttggccttaggcatcaaaatctgttgtttgaccatatatataattcatttagtttttgaatttgagctcatacattggccaaaatcactccattcatctttttaatccacgttgtaacctgtttgtaccagacctcagcatcgcgatagaagttcagccgtaaggaatgaagaagcggagcgcccacttctcaacggtcttctggtccaacatatgtcagactgaactacctttgaatcttccctgatgattgtacttctcactgcttgtttcttagttctttcttcccactttctctttgctcatcttcttttatcttaggcatttagggtagttattcattaatgattggtctccttgcatggaggggtttctttagacccaagtgtctgaagtttgtatcatatagaaatgtagtcaatagaagttgaaaaaataacaatagcagaattctaataattaggttatatcaaagacaacataaacctggctgagtcgattgcctaggtttgcaa

SEQ ID NO: 181215 - DNA, 506 bp, Cannabis indica
gccccataattgatttgggttgtaaatcttatcaccatataacagcaggtatttttttttttaatttgattataatcttgatttggtaggtgcgacctgtggtggaaacgggatatgaaaatctcttacttgtgaggttattgctggaaatgagaataccttctattagaaaatcttcggtaggtatatatttatactcatgcaattttctggctgctgttaaaatcatggcactagtcattagatttctgtaaaattggaaattggtaatcaagaaattttcagtcaacctcaatttaaaaaaaaaaatattagtagtgcgaactttataaatatggtttaatgtaggtttcagaagggctcacagttgaggggatattggacaattggtcgaagttgaagcctgtcatcatggaagaatgggatgagaatagggagattctgatagacctttttgggaaggtgagagacgaatggttggagaacgacttggatacttggattgg

SEQ ID NO: 181216 - DNA, 669 bp, Cannabis indica
tacaaggcaagtgggtggatgagttcttcaagtgaagtgaattgattagtggattgaacagtaggaaccttgtgtaagcgttttggggtgtagtattgaaggaccagaaagccttttagttatgaatttgtacccaataaaagccttgatcaaatactttatggtaagtttatttcttgttctctttcctcttataatttataccctttgtgtgaaaatttacaatactcaaaagctttttgttttacatagataagaagaacacatatatactaagttggcaacaaagatttgatatcatatctggaatagctgaagggcttgcatatctccatggtggttgtggtttgaagattatccatagagatatcaaatctagtaatattttgcttggtgatgattttgttccaaagatagcagatttcgggcttgctcgatccgtttcggccgatagaactcatctaagcacaggaattgcaggaacattgtaagcacaaattttgcttctcatgaaaaatagatgctacttgtggtattcaacatcaaacactaatacaaataggtcttaaattcttatttgtgatgttagacaccacatgtaactaattgtagctcaactaaaattttcttgttaaaacttttatataggggatatatggcacctgaata

SEQ ID NO: 181217 - DNA, 672 bp, Cannabis indica
tttcttttcttgtttactataatgatttgtttatttcttttgatgagcggtgtgagtttgataatgctagctatatgtaaatttacgtagacaatatttcaaaaatgtgcttcttcttattataataatattaaatgcatcagataattagaaatttattttgagtttcattaagttataaaatcaataatatatttataataaaaaatttatacattaatttcacatacaaatattattgtgataatttaatggcaataacactactttttaaaaatttaaaaaaaaaaaaaccttaaaaaatgtaaaataaagttattgtaattaaaatttatgtatattgaattctaataatgactattcttttttaaaaaagaacctcaatacctttagtctttccaaaaaaactaataacaaacataaataaaagaagaaaataaaaagagactaattaaaataaataaaaaaaaatattttgacaatttaattgcaataacaatgctactttttcataaaaaaaaaaaaataaataaaatgctacttaattttgtttttcagtttacattattatgattgtacgttattattattaaacaataataattagttaatgtattttagataaaaaaaaaatttattaataataatcgataataaaattaaaataaatta

SEQ ID NO: 181218 - DNA, 688 bp, Cannabis indica
ggaaggatccttattgggctcttgagaactattgctccttttgtaatagatcttctctctcgttttttagttgtattttttcgaatgttagtagaacttgtaattttgcagcccataatgtgatcaagtggacgtttgctcacctgagatttggtgatatcctggtctcttctattctgaagaaccttttatgtaatgaccacgaggtctaactgcttttaatttataacatcatgattttacttaaaaaaaaaaaaaaaaaacctcaactacaaccaccattgactgaaaatagaggagctatacaaaaaaaattgttatacaaatacaacagctgaactaggattcctttaaacgaagttctattttattctattttctatatgtaacaaaatttaatataattacactgaataataataatttttaatacttaatatgtaaaatagaatatttttaataattacagtatatgtataataataataaatttttgagagtataattgaaaccttttaataacttttaagtacacaaatattgttacattgtaattacgtaactaaacaaatacgcaaaattatgtattacactaaatttcaattcctacttggatttccgaattcgtctttaatattctcaatgttacattgcattttaaataagaaatttacaccctatactgttt

SEQ ID NO: 181219 - DNA, 943 bp, Cannabis indica
agatatatatataggtaatgttgttaataatatattaaggttactaaaaatatttatatatatacatatatgtgtgtgttaggacatttaaattgacaatatttaattaagtacttatttgtctatatatacaatatattacgtacatgattaatgaactatacatatctatgcaatatgcatgagctaatatgctatcaatatatacacactcatccacaacaacaatctgcctataaagtggattacttacacctatatatgttcagaatcagaacttacttaatctaagacctcaaaaaaattcctcacaaattatatattatttttactcattttaaaaaataatatctattttttttttaagtaacagtccaaaaatattttctttttcttatgtttcattatattttaaggccaaaaaaaatccttgagagtggactctgcccaaataccaacaaagagtggtctcctcctccaaaagaatacattaaaatcaattttgatgttgcttgctattctacttagtctaactctctaagtgtagttgcccaagaccatatatttatatactcaaattgtaacgtactagcactaagagagttggattaggtggtaggagagacaactacgcttaatcaaaacccgtcttggagttgtctctccttcaattgtattcgtttttcgggtgaggccagtttaagtctctcccttctgaactcttttgtaatgactagaaatatggttcaatttttatgtaaatgtcacactcactttttaactaaaatatatacactcaaattgtacatacttattacacataatttaattgtataattcaaaattaagtagccgtgtaatttaagtgtgtctcaatcataatcattattctatttataatactcataatcttgctctacataataagtcaaattaagaaatc

SEQ ID NO: 181220 - DNA, 604 bp, Cannabis indica
ctgggcaatcgtagttcttggtaacaagggatacttcggcagttacaatcatttgaatgtcaacttctgctcgagagaataaactcgccaagactataaatctcattgaaagatgtctgaagctgattagtgaaagtaccaggagtgtgccttccaatagcgaggtaggcgcctcgctattagttgcttggattcacccgactgttatacttagtttgtatattatacgctaagtgttttcacagtcaatatatctcgcttacgtctactcatgcgtaacgaggttgatgtcttgtcttgcacatccaatgccatgtagtttctcgttaatacacgaggcaacaatttgtatatctttatcttggataagaccctatagtcagcaagttataaatatactctgttacttctgcattaaatgagttattcaattaaatataattattgtttcatacattgatccatattccccttaatttgacatgtgtcctccgatggccaaattttgggtataacaattcccttaaaaagttcttttaataaaagtattttttaaatgctactgagggtacattcatcacaattcctttcttcaagaccacgc

SEQ ID NO: 181221 - DNA, 485 bp, Cannabis indica
ttatttataactatttgacattctattataataatcatgttgtatttttatttaaatcaaacatttattcgtaatattaaataatatgtcaaattttaaaattagaaacctttaagaaaattagatctaccagacctaaagttaccctccttaattatatgatcttgaagtgaaaaatagcttcgactaaagtgattaatttctgtacttctcaaagctcaaaccatattcaaaagatataatgtaataccaaaaagcaaaaatcttgaggtttaatcaataaaagtgtttttcaaatttatatcaatcaggttaagagttaacattgcacatttttaagtatcatgaagtagctgagaacgcttttcttgtggatgaacaacttgtttgattggacaattttttaattttttctttggaatgtgtagttttattttaaggttgttagattccatgccaaatggtcgatctatttatgtattctt

SEQ ID NO: 181222 - DNA, 401 bp, Cannabis indica
atgtataaattattttgtctcttccattgttttggtaatatagttcaacaatttgtccccatctattaacatcacccacagtattcttaagcacctagtttgggctttaattcacagttagaactaattattattctcttaaaccaatcaaatacttaatatttttcataatcatattttacaaaaattatcgattggactcatacaaaataataacttaaactcaatttttatcaactttttcagtataaccaacttgtagtcttacacaaacaaatgcaaaaaataaatataatcagtcataagttttgttgcatttatagtcataaattttattatagttaaaaaaattaaaagaccaaaacaagatcgtacatgacattttcgaaagaattccataa

SEQ ID NO: 181223 - DNA, 525 bp, Cannabis indica
aataattaaactaatcacaaatataataaatcttgagctaagacttataaaaaataccataaaacttaaaaataaatataaaaaaaattaaattttaacaatagaataactattgagttttgaattgaacagtcacatattgggcgtaagagaccgtaccgcaaaaatttttaaaccgtatttttttttacaatgcaaacaatttgataaacactcctaccaaatcataagctaaaaacttctgaaactattaaaattaaaaatcatctcttcaaattttaatatgttgtttcatgtaaatagttcaaaaaatattattttgatacatgtaaaaattgaaaaaaaaaaaaattagcttatttatttttatataattaataatgaaattaaaatattagaactttggagttttctagctaccaccgtcacaataggcatattcctatcattatcccacgcagtccgtacaagccaccaactttttttttttaaaaaaaccttacctattttagtctaatttactaa

SEQ ID NO: 181224 - DNA, 570 bp, Cannabis indica
ccaactattcaaacaatcgactaccgtttatatttataatttataataatgtatgagaaaaatattcactcccaaaaagaggcacatatattagctaattaaatattagaaaagtcgatctagtctgctaatctagctacatttaactagattgaaaaattattatcattattatattttttaatgttaaacatgctggtggtggtggtgatactgatcaacctctaaagcatatagttgttaatcctagaatgacggtgaaaatgtacgttattaatttattgtatgatcatcaaatataaaaacacattaagcttaattaggcaacacttataaggacggggaatagcaggatgacaaaactgcaagtatatcacatacacacaaaacaaggcacatacctaaagaccaaatatcagatttaaagccataaggaatatcagaaggcaattcaggacacgtgtaatttggagctccaaccacctgttcagaaagtaaaaccaagtacttagttccctatacaactaaagtttccaaatagatttattttaaattcatatggtccaagaa

SEQ ID NO: 181225 - DNA, 580 bp, Cannabis indica
ttaattaatcgtttaaataaaagaaaaaaaaaacattatttaagtctgcaagcgaattcttatactcttaagtaacgataccaaacaagaaaatcatatttaaagaatattgatgagcttgcatcacataaaaacaatatgtattctgtctctagactccaatttctttcctttatcaaactcagaacctcacaaattcttatagcctcagttagaaccgattcaactaaactaaacgagagtttagttcaaccttcaatgagcaaacctcaggcatccttagccaccaaaccaaccatacaaggcaaacaatattattttttgaaacaaggcatacaatatttattttcgaatggaaggcatacaatatttaattaatggaaaagtatattaattaagatataatagagatcttatatattattatttaaatatttttaactcaaatcgtgcttccaatcttaaaaaaagataaagaaaaaaggtagctttcacacttccttccactagcattgaatggtaatgagaaatgctaatgaaaactttaaaggtagtgtcacatcataatattattattggt

SEQ ID NO: 181226 - DNA, 709 bp, Cannabis indica
ggtgcctctccaatactgattgggatgccaactttcctaatcctcgtctttaacatggagacgtttttggctctgaccatcggccactaattcccacattgcatcaccctgctgaccaatctaagcatgtccccaaattcatctttgataggctttggatatccgcacctggttttgaggattgccttcgtgacgctttgacgttgaacaaccataatcatcattctaatccgttgattggattcaatgaaaaattgtataattgttcgtcccgtcttaagcaatggaaaaaatccttgggacctcatcttgctactcaaattcgtgaagttcaatctcaactcaaatttgttcaatccttccctcagcccactaatgatcaattagatcagggaaggaatcttgaaaaggaattaaacagtttgttacagaaagaggaagaatactggcaacaacgatcccgtgtcacatagctccagctcggtgataaaaatactcgatacttccatcgtatggcttccatgaggcgtcaaactacaaaattctttctcttcaacgctcagatggttccacggcaaatgatacaacctccattttgaacacaattgagcagtattttactcacctatttcaaagccaatcacctaaggatgagatcatcgattctgttctctcaggcattacagaatgtcttactgagaagaaattg

SEQ ID NO: 181227 - DNA, 1119 bp, Cannabis indica
aagcccatccatttcttaaggtaaatgattcaaagtcttttctcaatagaatatctgtactcactgaacccacctggtttttttcatcagcactcaacaataaatcattgtagtacttttgtccccaaaacaggcccacctcatctgaaacatcaaaagcttaattaacattaacatttacaagaatgagtgaactaagctaatatttcaatatttgtaggaactaagaagtacctcccaatccaacagctggaagcaaagtactattgaaactataagctttttccaattgtctgagacttggatgctgaactagtacattccaatctgtgtagtttctttgattagttgtagtttgaaactgtaagctttaccttccaatggttcatgtaatttgttttaacatgccaatgaactctaactgggcacatatgatcactacatttcactatgtctaagttatttactgaatttgagcttgatagatggcttccttctctgttatatatcatatgacattagaaaaattctttatgagacaaaagaaacttttattaaacttgaatgaatcaaatgagtaaacatagataaccaataccaactaggatgagtgttctaacataactaaactaaggggctgcagtggcacttaagcttgattgagatttaaaaaaaaaagctattcatagagttattaaaagagaccaatcaaccaaccaaccaacctcatgctcatacaagaatcagttacttttgtcagcctccctacatccacagctacaagttggacatgctgtgatggtaggattgtaaaatgtagaaagtgaaacacaacacattggtgttttgttggccaaaaagctcgagtaagtgcaggttgatttccatgttcctgtgagccatgataaaaagaagagcttagaaatcttcatactaaaattaagcttcttgacagctacctaactctaaaaacttggaggtggcacgttagagttcatactaaaatttaagtttttaagtaacttcacttgggctttttgtaacacttaatttggtacaaagtacttactaaaaacttggacacgtcttctgcctccaatatctgaagaaactgtggga

SEQ ID NO: 181228 - DNA, 696 bp, Cannabis indica
tgaatgaggagaaaggagaatggtaatacagttatgtgagatttgtccaaggtttggggacactttttggacccattttttttaaagaaagattaaaccttaagcctatcaataagaacaatgcataacaaaaaaaaaaaaaaaacggattgatcctatttggtttaacttctataggtgtttcttaatcaaaaaaaaaaacttactataggtgtttcaacaaaaaataaaaagtaagaagctaggatttaaaactattttaaaattaaataatttaatgatatccaaacaagtacttttatttgaaaaaaaatcttcatataatagttattctttttcatttatacttttacaattgatttttaatttatttatacttttataattgactttttattcatttataaaaataaaaacagtataatcttgaattggaaacaacataatatcgaaataaaatgaaattttataaaacagaaacagtataacctcaaaatagaaacaacttgtataaaaataaaaaataatatattaaaaaaacgacaaaagtaaaaaaagtaaaaaaaaccaaaataaaataatcgtataaatggaaaattataaaaataaaatacaaagcttatacttatcttattcttctggttataagcaaagtataaacttaatcaaacgaagccagcaagtcagaggcacata

SEQ ID NO: 181229 - DNA, 706 bp, Cannabis indica
ttttgtgctaaatttaacataattttttagcatgagtcaaatttaacacatatgttacactatcattggagtttacttttctcaaaatgtttaaaaaaatggcaatatactatttttatagtactctattgaagatgcttttatgatttaaagtccgaaaatataagagcatctctaatggagggcaataaaatgtgttttgctatattctagccatttgaaaaaaaaaattgaagctctaatagtagtgtaaaatatatgttaaatttagtacatagtaaaaatttgacacaaaatataatatggccaaatgttatttttttatttactcatttgttactaattaaaagctttttgatattttatttattcattaaaaatattttttttttatattttgaataaaattaatgagtacatatgttatctttagagcttataacactgaaaagagtattatgcactaacaatacattttaatatttctcatataatatatatagcaagaaaagagaaacaattatcaatgaataaagagaaagtagtacagttgagggttgagaatgaaatggaaagtgttagagaggaaattaaaaggtgatgattatcaaaattgtatgtttgaattttccaatcaatatttaatgtaaagggtttttcaaagttgataatgaggtgggctagctttcttattttttgactaatt

SEQ ID NO: 181230 - DNA, 551 bp, Cannabis indica
aacacgaataacactcttgagattgaacctaatcatatcaggattaagatcatttgatctaggatcaacaggtgatattgaattgaatagatattacggtaaattctaatatatctaatcaaagttcaatatcggtcccttccgatgtatactccatacatccgatactggtaaactttgccaatgtcctggaaaggacataacacttttccaaggtgtaagaatacctatcgctgattataccatgtcagtctaaatccagtgttctgacaaatcagggaataaactttcgaacatataattaagattatattccactgtgctgacaacactataatcattaacaaattcatatgttctggacttaaatagaattcatacattatatatataatcatgaaataaatcatgtgaaccatgcaacataaaatgttatttctgatctttattaataagtaaatctgattatattgaaatgggttttatttagggcacaaaacccaacagatgagtcagctacagatcaggtatctggtgcaggaattgtccct

SEQ ID NO: 181231 - DNA, 643 bp, Cannabis indica
aaattttaaaaaaataattaattttatctatttaatttcgtttttttattttattacaaataaacaattgaaaagaagaaagagtaattcattgattggtataaattttgcatcataattaatgttatattaaaatcatatattttttttgagcattgctattaggcaccagtgatgcctagcacctttgcgacatgtcacgttgcgattggctagcgatactcactaaaaactattatattaaattatatgggacccgatacttagttgtaccaatagcgatattgacacataggaaggtgctaggcaccactggtgccctttaacatttctctatttttttggcacactattaaagtatagtttttttttactaattgagttatattttaattttgcatcgcttatactaaaagtacaaatcaaatatatgtaaggtagagggaggagggccaaaaaatattaaaatttaagaagaaattacattgtatactcactttactttatttgttttaatttttacctttattttcatattctttaaaatataccaacttttattaattatattctcattacaccccttagactaatgtaaattatgtgctacacttaagtgaatagtaagggtttattaagcaac

SEQ ID NO: 181232 - DNA, 1513 bp, Cannabis indica
atactatcctcgttggctagacgtctataggggcaaaatcacttgctgtgctgcccctggagggccattatcaagccttgtccacgggcctgacggtggcttgtacctacaccgaaggcatcatggatagcatggataagactatgtctaagcttgagtgtctcacccatgcccagatcattgaccttgggtgttgagagatgataagggtaagtttctcattcttgtaaaaaattcttttctttagccatcatctaacatatatgtcatgatgtgtgacaggccgcgatgattacctcctatggtcaatctagagttctcgccctataggaggagcacgagaagcagggagcagcctcgcttcagcttgaacttgatgccctccgtcaagaacactcccagaagattcatgacctagaaacttctactgagaagggtactgctgagaacgagcgtctcaagggtaagcttacaaagaaaaaggaggcttacaccaaacttgccaaggagaatgaaactaatgtcaaggagcgtgagaagctagctgcggaggtgaaacagatcgaaaacctctccaccgatgttttcttcaaattttggctaaacaacaagaaggctgactttagttatctgggtaagaacatggaagtatgctatcttattgtcgcaatcgcgaggaggcagaagccagggagaaggcgcaggtagcttgcattcaggccgattcatacctcaactttggggttgaagcaactgatgacagtccccataatgacttacttgatggtttctattaatgtacttctacttttacagcttttatgcccactagtactctacagagattcgtgactgtccgggcagtcttaaatcccgtaactttacttttgagacatttatgtgtttaatctttttacttggccatagggcccttatctttatatatggctttacatgttgacttttgtttggcctgagccacatagcgtgggtatttatctatagtcaaccattcaccacacacaagttgctcagtactgcaccaacactttaaaaattttaatatctacttaagcgagggtgcgttttttcttactagtccatatatgggtgtggttgccccccaagtgactatgcaggttcacctcttggtcacttatcttatgattggggtgttactttaagtcttggttgtccactattacccatatatctgtgaccattgtgaggcttgcaatttgattcaataacaatcatacaagctgcgtcattatatgaaaagaacttgcaattttattgataaatgaaattggcaacaatgccttattacatcattacgtagcagtatatgattaaaactaaagcaaatctaaaagaaaagactaaacactaataaagattctaagtcgcttacgggcatacccttagcatgaatcgtcgctgaagagaaactgttattgataatatttgcggaggtgttggtcgttccaatatcggggtactggtataaggt

SEQ ID NO: 181233 - DNA, 882 bp, Cannabis indica
ttattagggcggatcgcggtgcgaatggtgggggttctaatatttttttaaaattaaattacatatacgatttttgtaatttttcaaactgcaaccgcattatgagatcttagaatcgcaaaaactacattgcaaaaatacagtgtggtgcagcacagtttgaataatttacactattatcattatcaaactttataatgaaaatttaaaaatcaatctaataaatttaaacaataaaaaattcttattaaaattttaataatataacatatatatatatatattaatcatcatttcattttattgaattgtctctaaaactaatgtactatacatatatatatatttgttcttatatgaaaaaaaaaactcatattataaaaattagtaattttgtaatatatatagtgtgatgtgatttgaacctcaattattaattcaaaactgtaaatcacaccgtactgcatggtttagcaaaaaatgcaaaccacaaccgcaccacaaaagatttcaaactgtattttttatgcagtattgtgcagtgcaagtaatttgtacggtgtggacggtttaatgaataccccatctttacttagttttgagaaaataagataagctacgagataaaccaatctaattgaagaacaacatatacaattcaaaacccattaaatcaaaattattacttatgtattttctagaagaaaaaaaagaaaaggaagtagaagagacacataggaaaaggaagtcaataaggtggtgtttgatttgaaataatgaagtaaaatagaaaagaaataatttattctaatttttgtttggcttcatttcaaaatattagaatgttatttatattttaattatgttttcattcattccaac

SEQ ID NO: 181234 - DNA, 512 bp, Cannabis indica
taaattaggagaaaactactctatggtttgaaacaaacccctctgaattagtatgagagactcactctaatttttttattttctcatggatataaaagtagtgtagttgataaaattttatttatcaaaaaaatattaaatgtaacataattattctaaagatttatgttgataacattttgtttggttctacatctgagattgatgtgcaagtatttttaaaataactgaaagaataatttgaaaggggcatggtaggagaattaaactattacttacgattgcaagtcaaacagttagattaaggtacatttgtttctcaaagcaaatatactaagaactttgtgataaagatgaaaaggaattggagcaactgtgaagctatccaaagatgaaaatagtgttaaagttgatcctatactatgtatgagcattattggtagttttttctatcttacttctagtagacccaacttgagctctagtgtttgtgtgtgtcaggtaccaagttt

SEQ ID NO: 181235 - DNA, 888 bp, Cannabis indica
  modified_base (881)..(881): a, c, t, g, unknown or other
actatactaaccaaattatatactacaattaaaatatatatataccatgacaataaaattatatactaccattgtatataataaaataaaaattaattgaatattatttctaataaataatatatcataattaaaatatataaaaataataattaaatatatgtatagtatgctaataaaattatatatacattaaaatgtttgtattatgctaataaaattatatattattattatacatagtaaaataaagaataaatatcatcaaaaaaaaataatatactatacaacaaaataaaaatataatgtacaaaaaattctatacactaacaacccataaaaatttaaaaaattgatataattttaaaataaaaaaaaacttagcaaaattaatatagatataccataattttaagtaatttttttataattctaaaaaaaatatgaaaaaaatttataatttaaataataaatattgtaaaaaagttatttttctacaaagtgttataatttgaaattatttactataatttcctaatatttaattgttaaaaaattgtatgggaattatttgtaagagatatagatagatatgtgggcattaattacataaaaaaatttaagggttgggtatagagtcgttttcatgtgtgacgttgatgtgtataaattttttggggaagcctacgttgatgtatcgatctagtattggtcctttacaaaaactatacctttattttgtcagtcaaattattattttagaaagataattacatacaaaatttaggaaaattctacaatcatcctcttaaaatggatatattgatgcacacatatctgttttagtattcgaaataatttttttagctaaatttttttcncatggtc

SEQ ID NO: 181236 - DNA, 553 bp, Cannabis indica
aaataataataaatttaaaattaccctatatatctttatagatatcctaaccatattattttcaaattcatcagttggttattttgtgaaatatttaattgtttataaattataagttaggaaaatgatatttatgacaacttcatatcattttacttatcagacatttataaatagtatcataaatatttaaataacctagatatttttgtagaaatttgaaaaatgcttaatttaatatattttgacatataatttggaaaattatcatatctttattattttattcataaaataataattgcctaaccatgtctattttaaaatttgtttattttattattttaattttattaaattataagattagaaattgatattgaaaatatctatttggttagtttcaaattatttatcttattagatatttaatttaatttaataaaataattcaaataaaacctagatattttaaattagtttcaattttgaattttgaaaagatatttaaggttgtttcaaaaactctaaatttttaaaatagttgattttt

SEQ ID NO: 181237 - DNA, 732 bp, Cannabis indica
tctgtgtttagcattagttaataaaagctaaagacgtacctgaccaaaccttcttgacacccctacactcaaataactcatgtggtaaagtttctttgcattgattacatcgagagtgaattggggtgggaacaacctttcggaaatggagattgacaacagtaggaagagtatcatgacagaacctatagataaagtgcttgatttttcaaagaacatgcagaccccaaagagattttctccacttagagatgagagttgagttagaggaggccaatttagtaggtttggatagagttcggtccaaatgatatcctgatttaatagaacagttcccatgggaagtatactgccagaaaagactatcaccttcagacaggtagggggaggaagggagaggatatcaagaatagtgtttgactgaaagagataattgagaagaggacattccaatcttttgaaggcagtaagagctcacccacttttgatattggataggaatgaggctgaggaaggaaattatagttaggaaaccatttatcatcatacatactaataattttacaatcaccaaccctccatctcaccccttaagtaacgtaactccttacctccttaccatcatagatattgtttgttagcttctagaaagaagtacgaggaaagtattagtcctaaaactttaggtctaagagagaagaaggattcgactggatcctccaaagcttgctt

SEQ ID NO: 181238 - DNA, 677 bp, Cannabis indica
cattataatttctttgtattcttcgagcaattgattaactaacccaacacaacaattttgttttaactcacagactcacagtcatatattattggtcaaagcattggtattgagtattaatggtgctttaacaaacaccttttgtaacactttaagattgattatatcaataattaaaagttattttcttatagcactcgatacttattacaacaataacgacatgatactgaaaaaaaaatgttaaaactaataatacctttttttttttttagaaggaaactaataataccttttagtaattctctattagtcagaaccatttgggtcttatcaaactatgatatttgacctgtaagaaatattattttgtttattgtttatttatttatttatttattttgaatatagaaagtaatttatttttctaacacttaataatttggtaaaagttgaacccacaaaatagtaaataaattaaagttgtttcctctctctgtcgttgccctagagggccggtcctgagttgatttaggtttaaaaaaaaaaactaatttagacttttactataagaataaatgatatttcttatttttttattttgggtccctacggatgagtgggctctaggcgtgggtcgtagcttgccttagcctagggtctgttgccctagctgc

SEQ ID NO: 181239 - DNA, 727 bp, Cannabis indica
attattttttttactttaaaattttaaagagcatggtgtctacttcgaaaattttttatcatctctcttttctctcttatatagtcagtagtatgtggcatataagcaccaatgacacacacatttttagtcaactatatgggtaaactaaaaataaaaaaaatagtaaatgtaagagactaagggctcgtttggaacgccgtattaggtcgtattgtattgtattgcattatattgaattggattttatgcaatatttttacgtaaaactatatgtggtattaacttttatggacacctaaatatataatattttagtataaattaaagtttaatatagtattatataaaaatatgatatataattcaattcaatataatacaatacaatacaatacgacttatatattcattatatcattttaataggtgagtatacgttttttttttttacttcttttttatagttgattattatctatactgatttaaaattaaagcatggcatattatacaaggaagtctataaaaaaaattatgtaaaatttaaatttgaaacaataacaaattaaattagataacatataaagctaaaaaaatataataagggctgtaaaaatttagtttttctaatacaataattattaagttatggaaatttgaatgtgagcattgagttttataaaatatattacatttttttttttttaactaaactaatacatac

SEQ ID NO: 181240 - DNA, 1386 bp, Cannabis indica
atgatcttcttcgtaaggagtgaaaataatcggagaggatgttagccaaggagacttgttgtacggagaagaattttgattattccaaggggacatggcgtagggagaagcactaaccgatgatcccggactcatcgccgacgagctactttgacggtggccggagaagttgtcgtcgtcgatgtgggacgctttgtgacgtggcgagaagatatttgattcggaatgcaacagtgctccgaatttgggtctggcaaggagaccattattgggcctatccgctaccattgtggatcctccttttgagtttctcatctaccgtttgggaaaattttatgaattgagattcagggaaaagttttgagatagattttgtaagagaagagaatgaagagagtgattattttttttttttagatttcgaagattgtgaaattagaaagagaaagaatttataaataggcgagtatgaaaaaagtggtgggtgtggtaagttgacacgtaagggaaggagacgtaatcgttttcggaaccgggaaccgggttagccggtattattattggagaagttgaaattagaggaaaggaaattcaggaaaaatagggtatttcttttcttttccttgcggcgtttaatctccacacgctaaatttgggaaactatcacgatgttaataaccacgtatgcagtgaaacaatgaagcgtcttcaaaattgaaccaaaatggttatttgactttcgatgaaacatgttttctttactcactacacccccaaaatagtattatcaataattggcaagtaatgttagctgccagcactagaaagagttgtgaatggaagaatttttttaatggtaattattaaaggaaggatacataaatttactaaaaagtaataaataatttaattattatttttcatttcatattatgcaagcttactctatttatttattaaataatatttatattaaatcttgctactcatcacatttacatacatttttgtaaccatacttctcatcattcttaattactattttattaatatatatatttaagtaaataatatgtttatttattacattatttaatacttataattaagaaaatgatatataaatttattaaaaaataataaataacttgtaccacactctatgttttttttgaagccgattaattagaacttaaaaaaaatataaaacgataaataatagacacgtagttttttacgtggtttagacattaataattcttagtccacgaatccattatattagctttgccggcgagagtttaagtattacaagtgtttacagtatgaatattaattgtgtattccttttgtttctcttagaaaagaataaagcttccaggaatt

SEQ ID NO: 181241 - DNA, 776 bp, Cannabis indica
gggtttcatggagtgtcgtatacagctttaattataatttggagtttttctcaaattaatattaatattatttatttatttatgtaccttaaagctacttaattattagattttgtttttttctttttgttaattttctttctcaatattattttgtaaaagttgatcaaataattaattaacaaagatctaatatgtttaatcaatgaataatatttttaattaaaccaagctaatcaagtgacttgatagattgattgtgaaaggaaaagaaaaaaaaattactaattgagaaaagagttgttggatttgtattaattttaatatgttcatgaatcttggaattaatatatttataatgtaaattaataatttataatattcgcttctcttctgaaaatagtactttttttgtggggtaaataatttttgcttttgttttaatttatttatttattattattttatggcaggtagcatgatcagtcaaattaaatgtggggaattagcaaaatcaaatgagatttttgtaatatttgtttaattaattatatatgttagctataattagttgtgtaatccaacctacctaactactacaatctgttaactccatcatataataattatattaattaaaaacctccaaaaaaaaattagagatgatacgtagcatacatatgtaacacacaaacaaattataaactattaattaatgtgtttatacatttatgtttttaatataaatatacatatgtgaatagaatatgtgttct

SEQ ID NO: 181242 - DNA, 615 bp, Cannabis indica
aaaataactatatatatatatatatattatgtaatttaatactttatgatatattttattgaaaaactctatcatgcaacccctttaaaagatatattgatgcatttctatctattttagcatctgaaataattttttagtttaattttttctcatggtcatgtaggttatagttatttaagacatcttgcaaaattttaataaatttgaaaaaatttaacatgctgaaaactatattcaaataatgtgttgcacgcgtgactattttattttatacgcgtgtaaaaaagattgtttgaacattgttttctatattgtaaattatttcgaattatttaaaatttggtaggatatcttaaatagctataacgtacatgaatatgaaaaaaaattagactaaaaaattcttctcgatgccgaaacgagttaaggagtgcattgtagaatcaccttattttattaattgttaagaaaaaaaaaaaaaagaaagaagatatttttattactagaaataagagcgcttgacttttagttcatcacatatttccatatataatattaggatcataaatatataccatgctttgttaaaaataataaaaataaaataaacac

SEQ ID NO: 181243 - DNA, 643 bp, Cannabis indica
gttttatgtaatttttcttttgattgtttgttatttttttattttgttctgttatgtgtggatgtgtttgtagaaaataagcaaaattttcttaatgggtttcgatattgagttttgatttttgagttgtttcaaggaatatatatgatgatgctttgcttgttgaaaaatattattaaaaaagaaattgaaaaatttcacagcgaaagatctttaattgcaaaatatctatgcttgggtcgatctacatgatgttataatttctattcattcttaagtttttgtgatttaaatatgttgtttcatttcttatggttcgaagttatggattagaatagggttttacttttgcaaaaacaccttgattatctatgcaaaagcaccttgattatctgtcaacacaatgaaatgtaggattcttttgtactattggaaacgtgtgattggactcccgatgttcctatttaatttttttaaggttcgtatttctttctttcctttgtatatgatttgggggtgtagaaaatagtgattcgaattgtgtgttgatttcatagaataatacatatttatatacagagttaggagactaaatatctactaaatatctaactctcttacagctaatatacatctaatatct

SEQ ID NO: 181244 - DNA, 737 bp, Cannabis indica
tactttgatgctgactgggccagctcagttgatgatcaaaaatccacttctggatattgtgtgttcctcggagacaatcttattcattggtgttcacgcaaacaaactgtggttgctcgctccggcacagaatccgaatatagagtcattgcccttgccacaactgagctcatatggttgcagtctctgtttacagaaattggcttgtctaatgtgtcttgccctgttctctggtgtgacaatcttggggccacttgtcttgcttcaaatcttgtgttccatgctagaacgaagcagaaagaggttgatcttcattttattagagatcgtgtgcttgctaatcaacttgatatacgacacatctcatgaacatcagattgcaaatcttctaacaaaggctcttcctataccacagttcgagaatttcaggtccaagttaacacttaggaatcctagtgtaacttgagagggggtgttaggacctttttgtcctttgtctgtatcagtttaattgttttatctttcttgtaactgttttaatagtttttccgttagttagtttaactaagtctgcctcttgtaatttcctcttgattaatataaataaagcctctctttctcagtttgaggttgagcttgattccattctctctctttcttttcttgcttctgtttcttacttttccacaatctcaacaaaatcggaaacacatttttttgtctcaagtaataataat

SEQ ID NO: 181245 - DNA, 687 bp, Cannabis indica
gtaaacaataatttagaaactgattataattaaaaatatatataatataaattataccatatcataaaaattagtgcatttattagaatataattttcaagacttttgtatcatatatattataatatttaaaaccttttttcaatcctataaaataaaagacagtattatattataatttgaaattcaaaataatatcatataacttaatagaattcggttatgtagttttatttaatattattttttaatttaaatatattatcctataatatatttaatccaaataataaaagataattgtcattttttaatttaatttattttataaataaaataatcaaacaaaactaaattgatatttatatatcacctacacgcagggatggacacaggtgtattatagacccccactaacaaaaatattatcttttaaaaaattaaatgtaatttttaaaatttaataattatagatcaaatcgtagaaaaaagccctataaaattaaatgaatctagtaaaaatgactataatgtaggcataaatatttttgaatgataaataagcccccacaaagtaaaaatactgggtccgtcactgcctacacgtgtggggtatggacgtcggcataggcgggctaggcatgtgcctagggcccacccagcccaggggcccgaaattttttttct

SEQ ID NO: 181246 - DNA, 623 bp, Cannabis indica
tgtacaaagaaaggttttgagcaataaaattcactaattcatacaaaaaaaaaaaaaaaaaactcgattccctcttaaaatatcaaaaaaataaataaattaaaagtttgggaggggttaataagactcctaaaaatcgggataaaagcccatcttatcgtgaaaaatatcttttctctgacattgatgatgttgtatacagaaataaatatttgatttgggacataacaaagaaatgaccaattcaatatataatttttatttaataaactccaattcaatatacaatttaatatttgattgggatgttcactgtgcgggtggtccagtttttttcatttttttaaaccaatatgcacgtgcagattttctaatttcctaaatcgcactgcgaagctaaaaaaaccgcagaaatcgcactgtaaaaaaggtgcggtgcgatgcgatttttgcgatttctgcggtttggactatcaccaataattaaactattacaaatacaacaaagtttgagtaacacttgtcaaaaataccatcaggctttaaaataaatatgacaaaaaaatttaagtttcaataatacaataattagtgggctttgggttgaacattcacatattgga

SEQ ID NO: 181247 - DNA, 727 bp, Cannabis indica
gaatagctattattattattattattattattattattattattattattattattattattattaagtacaaacagacagaaaagatcgtaaaaccatcatgaaaaataaaattaaaaaatatatatatatatataaaaaaccaaaccaatgatgaacctataataaggactgactgacaatcatactcatcatcatcatcatcatcatcatccatgaaatttagagtttaaaaaaaaaaaaataagtgtaatgatgatgatcttttacacactacttcttcagtagtcagaaattatattttttttgaaaaaataattgtaataataaacagtcaaaactcaaaatcatcatcattacactaatctgctcaaccaaaaaaaataataataataatatacaatacacaaaaactaaaacatacccttttggatttggatcaaaaatctgaagatctgaaaagggaatagcaactaataattggggggaatgaagcctggtccgacgtcattaattataattataattaattaactcaaacaagaaatgttgagattaacaaaatcttatagatcgatcgatttatatattttgttaatgagaaaaaaaattaaaattaaaaataatggcctcgagccagacaacattcccctcaaaaaaacgaaaagcttcccaaataattactaaatctatctttgaaactacatcgttttggccccgagatcat

SEQ ID NO: 181248 - DNA, 539 bp, Cannabis indica
ttgcattttgtttttgggttatcatataactagaactacttactttctattcaaacttcaatcaattactttttcccctatttttttagtattagctcaatattgtgcaaagcaataaattatgatacttgaagagccagagaaagaattatccccaaattaaatcatctcactattaatttaggcatttttgtctcaaactttgacatgatttatcatgctacctaaacttttaagattactaaaaaaaatcctatgaactattgagaatattagatttaaggacttttgtctaattttacataaaaaagtctaacattgatgaaagttcaaggaacatgatttagtacatgtcaaagttcgaggggtatgatttcgtatatatcaaagtctggagagcataatttagtacataaacaatcactgaaataataaaaattgaaataataaagttcgaggggtatgatttcgtatatatccaatctgcactagtagcaaattttatattttggatccaatccgatccgcatagcagtttt

SEQ ID NO: 181249 - DNA, 620 bp, Cannabis indica
aaagttattatacttttttcattctaaaattatctttagaaactttaaggaaataataataaaatcttggataaataagatttttttttaattgtatttttgtagagtcttgtcccctaatttttttttacttagaaaatatgactcataaattaacgtttttgctcatgtgccttgacaaatccaaacataaatatttattataatttaattaattaattcttataaattgatcttagttaattttaaaatagaataaaaaaaataaaaaaaaattattttttttttaaaaaatcattttaaagaaaaataaataaacaacttggaccaattagtgtaacacataaaaatattaaattatttaacaaaatataagcgaatgacatatttgtaattattactttaattttgaggtatttttgtcaaacaaaataaattgagagcaaaactctacaaaatataatttaaggcccattttcaaataataataataataataatttagggagaaaaaaaaacattttcctaatgagcgtcaaaggtagggatgtacatgagtgctcctctcatcccccattttctattattttctatcggagataagcagagaatctcttaat

SEQ ID NO: 181250 - DNA, 673 bp, Cannabis indica
gtgcaaattaaaaataccataataagttgataaatacaatacatatttcaaaaaaaaaaaacatacaatataataatgaaccttccttcctaatctctaaactcctcatttgtgcaatgaatccacaccgtagaaataagtcaaaaaatttgtctatttagaaaaacacatgaaagcatttcccgctatttgactaacggtgctgtcgtttcagcagataggtaccaatagtcatttgttttattggtatgtattaactatttaaaccaccaaaatccactaccaccatttattacaaatgaaatttaaaaatatatatatgtaattatatttaattgttttggcgggagtttttgttgatattattaaataggattgaggattggggttttgggtccgtagcagtggaaatgccgtgaaaacagtggaaccatccaatgtttgatctgatgggtatggaatgataaggggtcacggcgccgtcacggataggattgatttgattgaatccccgttaagagagaagaatatggcgggaattaggagagaggacagtttagacagctgaatccgtaggagattgccacgtgtcaggatttagattctacgtttgagggcaaaagattttgtgtgttatgggaattgggatgatacggatcctacttatccagct

SEQ ID NO: 181251 - DNA, 567 bp, Cannabis indica
atataattgtgttttaattaaatatgtgactaaaatatagtatttagatacaagttgttattaattgtatttttgttaaaacatgcattgtgacgaaaaatacatctagtcacagcaaattgtgatttttgtgacaaatatatctttagccacaaatattataataataatataagaataataatttataattagtcacaaataatttagtttttagtcacaaattttattgtgactaaaagtaaaaaatattatgatgaaatttatgataaattaaacaattcgtacaaaaaaaaaacattaaagataaagtaattaagagaaatttagaccacatacaatctttttttaaattatacatttatactttgagaaggaaattttatatttataccttccctatttaatttttttctttttgttttttttttacttattaaatcttaaaaaaaatttctttcttcagtatattttgtttagtcagctctggctgacttttttttttcttctctatttcttttttttaatggttttattttagtttctctctctctctctctctctctc

SEQ ID NO: 181252 - DNA, 743 bp, Cannabis indica
gaagaagaatcaattttttaaattttaaacctcaaaatatcaaaaattaataataatctattaaataaattaaatattattaatttttaaatttgatattaagtttaaatatttaaaacaatattttatttagatattagggtttgaaaattggaaaaatttgaaattgggtagaaaaatcacccaaaaatcaaatttttaggtgcatcatgcacctgctgcccaagacagactgcaagcagtcatggggcgtgtgtagaatgaggctacagtagggtctcttgtgcgtagaaaactcgatgttggcagctactttccctcggacaaatggtagggtcacgtgcgtgcgagcgagttcagacaaagagttgtctgaagcacatgctgttgggttttatgctttaaataaaactccatttcaatgtaatctattttattcaacatcaataaagaaacagaagtatttttcattcatttgtgtatattttggttcactttatcaattgcttgtctatttgatttataaattcatcttaaacccttttcacaaacttgatcttgtttattgtattgtcatcacattggaaaataaacatgactatgcaaataaagtttcctagatttatcagacacagggttttactaatatgataatctacaacaagagtttacttgtatttggagacatactatgttctttccagaacattggttaaagtaaagctcaggttggatgcatggag

SEQ ID NO: 181253 - DNA, 512 bp, Cannabis indica
cacattaattgtcagaatattttgacaattaattcaggaaatcaaatcaggtaatgaatatagaaatctgaccatatatagaatattacataattgattttgtccagatttaatgaatataaaatattcatttatcagaaaatcaattatttatttatttccttaaatagaaaatcatttccttaattagaaaataacttccatatataaaatattctaataacaaaaatatgctcatacgtaagagcactttcaatcactcaatttttttattattattttacaacatactttattataccatacattaatttttaaaatacgttatcaaaaacctttttttttttaataaattaaatatattttattcatttaaaatatacaatatttaatatacacatatatcctcatagaaaaataattattaaaacaaaaaatagttaataaaaatatgtttagaacaataagaatagttcatgttcttatatgcgactcaatatttttacatttaa

SEQ ID NO: 181254 - DNA, 804 bp, Cannabis indica
agtgaggatgatgttcctcccgattttctttctattgtagtggttgaatcttcttattaataaagttaccattttccttcaaaaaaaaaaataaaaaataaaaaataatggggtattcaactattcatttcttacaacaaatgataatgatgactcaacttactgtatatcaacttgttaatttaattttaactacaaaatgtgtcagtcaactagccatatattaataatggtgaaccaccgttttttattttatcccaagataatttgttttctaaaatgaaaatagatcatcttggtgtaatagggaagtagagtagacgcagagggtcagcgcgtgatggcggggtggagagagagaagaaaaggagacgttatttttaaggggaaaatgtagttgtcaataatagccgccagtttttccatgggcttcacgtgttctgtcaaatgatttttttgggctttgtgctgatccaattatacaagcccactatttcatttttcgtcttttttttacattcattttaattttattatattttaataaataatataataaaggagattattcgacgaacttgtttttaaaatacttaatataacatacattctcggacaaaaaatagttttttcttttttttttttaagtaaaaaaaatcattcgatcggataaatatgcttcttaattcttaaaaggtgaagttggtgaagaaaaaaaaacaaaaaaaaaaaaagaaagtgaagttcatactagttttaagttgttttaaacgtgaaagaatatcatggaaaaattacttatac

SEQ ID NO: 181255 - DNA, 592 bp, Cannabis indica
aaaaacaccagaagtgggaggatcggaccggggaaggggagctgcgatcgtgtccgacgaagaaggagcagtcggagctgcgatcggaccgggcggcggagcttcgacgtcggcgatgatggtttcggcggtggagatttcgtggccggagacagaggtgggttcggagagagaggcggcagccatggagtgtcttgttcttggagccatgaagaagaaggaaggaaggaaaggaggtgaagaaaatggaggctagggtttggggttaacttctgataccatgatagagagaataaaactcattttattgtatgtgtaaatgctttacacggctatatgctaaaagaatagaatgtatgatacaacataggtatatataggaggaaggaggcatctgccctagaggaatgggccgaggaagaggcccagtgggccaataattttaatattgactgcttaaaattataaaatgatgaaaattaggggtggtaattagtgttcatcaattgtaaacttataagtaaaatgtcaaaattgaaaatctaacccatttattaaattgtgtcaaaaaattaaaaaacttatacagttt

SEQ ID NO: 181256 - DNA, 682 bp, Cannabis indica
ttaattgttattttgtgggaattgggttggatatttatttactatctcaccttcggttgtgttgtgaattcaactcttaaattattcagctatgtactttaaatctatatatatataatcattcaaatttggatttgaacttttaatgtgtaattttattaacttggctttgttcttaagcaaacaaggatgaaaaaactttacttcgaaggttgctcttctacacagtaggcattttgacatccctttggaggtggtggtaaaagagccaagttaaggatgatgatagagctgttctgctggaggaaggaaagctccaagcagcctctcctagagctcggatattgtcttcgtcatcttctattgtgaggtgtgttgagggaatttgtttttgaaaatcttgagtgtgtgaagtggttttcacattctgttatcttatgttgtttgtaaaaatttgcattaaacatcacattactttggtttttctttgcttgtttttcactccctcttattcatacataaagttgatttccatcttaccacagtaaaaaatttcttgaaattttatctttatgaagcgaactgcagccgtaatggtataagtaaaaaatactcttctttcccctaatggtcaagaatattgaaaagtaattcaagatagatgataaatatttacttactg

SEQ ID NO: 181257 - DNA, 487 bp, Cannabis indica
aaaaaaaaaaaaaacttgattagaaaattatcatgcgtgccaaaatagatatgtttattgtttgctgaattggattaattccttgtttgttgaagtggtttaattcttcttacaagcgcacacatatgtttgttaagtgtttttcgattaaaaaaaataagaaaggaaaaaatccatacatgttatgttagtgatctatgtatgttaacatgttatcttagtgatctatgtatattagccaaatttataaaatttatttattaaacagaaagttgaaatttttttttttgtaacttggtgttaattgttattaagatgtatagctttatacatttcagtgaaagatcaaagagaatattaaaatattttcgttgaaccaataaaaatggtgcgatagtctggtgttatagatagtagatataattgtacctgttaccaaacgtaccattccttgattgaacccaccagactcccaactcacccttaa

SEQ ID NO: 181258 - DNA, 661 bp, Cannabis indica
agagactaaatagaaatagatattattattgttgttgttgttgttattattaataatattatatttatgtatacatactttgttaattgtatttttctatttcgtattatttattaaataatataataataatatattattttgtttttcattgttgaagaagggccaacaaaaattgatttaagtttaagtactttataaaaatttattaaattttaagttttacttatacacttttataatgatacattcacatatcctctctatatattttatgtaaagtatatgtatcttctttcttactaaacaaatttagtaaaaaagtttatatagtgttattctaaaaattgttattaattatttgtaaaatttaaataaaaccaaaaatttgatagcaaagaaaatgaaaaattaactatagaaattttttatacaatttaatcacatcaatgtagtatatctaataatataaatagttcttaattatataaattatacaaagtgaaaataattattgattatataaatttgacctaaaattaattattatttaagtatatatatattttaattattaataataacttaataatataataaaatgtaaaatataaaattgatacatatattatcaatagagaatattataaaaacagaaaat

SEQ ID NO: 181259 - DNA, 676 bp, Cannabis indica
ctttaccagaccatgctcgaaccttacatgatggactatatcgagccattgacatatacttaaaagtaagattcaatttttcataaaatttgattttttagttataaatttgcataactttgttttcacgttgcagcaaacatagggtcactattaaatttttcattgacaagaaaaaactgtaaattaatccatttttcataaaatggctttgttttcaaaagggtcactattaaatttttcattgacaatgtctatctacacacacaggcacatcaaggattaccagaaccagacagaaagaaactatgcaaattgatagactttcaaaagctatcccaagaagcaggagctcacgcagcacaaaatgaaagactccctctccaatcaatagtccaagttctctactttgagcaaataaggctaaagaaactctctttgcagctcttatggtgatgaagacggcggtgttggtggcggtggcattcccaagccaactaccatccaccagtcatggcggataagcagtggcgcgctcagcgcagccatgtctccacgagacaactacgcctcgctgaggagggaaaaccgagagactgaagctggagctggcccgactaaggatgaggcttaatgatttggaaagagaacatgtttgatgaaaagggatatggag

SEQ ID NO: 181260 - DNA, 549 bp, Cannabis indica
atctaggagtacaaaagacttcatttagaattagccaatagaaaaaatgcttcaacatcttactaatgtaagctgcttacactagagtaagtaaattaccaggcataccacaagccacatgtttagataatctcagacctataatactaggatcaggaaattttgttaactccattgaatagacttattatcaaaatttcccttcttgtccttgtaatagaaaacttttagttacttcatatgaatggttttaaccatagttctcttggctttacttcttagttctttattctgactatccactacttgtttaaactaacaatagatttttatcacaggtttcttccaagtcataatagggcgagttccttaaaaccctcccactacaacagcaaatatctggtctagtgcatgcaagagcatacacaatacctcttactattgaagtttagggaattctttttcgtggctttttccttttctatagtagttagaaacaacccctaagatacatgaactccatgtttggaagtcaagtgacctccatta

SEQ ID NO: 181261 - DNA, 565 bp, Cannabis indica
tttaatttttatgggttacaaaaaaacatatgctttcctgttataaaaaaatgttttttttttttgtcaaggtgaaatgctttctaattcaaaagataatgtgtgattttcataattcattttagtttttttttttttataataaataattcattttattttaatttatttttatttttatttttagagaatccttttattttatgatttgttgtgtgtggcatacaaggtattagtattggattttgttgttggaaggtcgttaggtacattttttaaaaaagctaaaagttatttttttttaaaaaaattaaatatgataaaaaggtgttggtaaaactagcaaaacggatcagacacgataacacgacttgagactcgcacgagagttagcagatttgagtttgtcctaaatgggttcgtatcgtattcaagttgacttgtctaactcgaaagtgagccgttaataaacgagtcatgtttgggttgatacggctaacacgaaagtgagccgttaatgacatatttatcgttatttttagtatttttaacaagtcataaacgt

SEQ ID NO: 181262 - DNA, 770 bp, Cannabis indica
cacaaacatgaaagaatgatactacaaattggcacgacatgacaccaaaaatatatacttaaacacaacatgataccaaaaagcacggcatattaaaaattcctaaaatttataattaataataataaatatgtacttatacattataaataagttaaaataaataaaaaaaaactaaaaatataatactgaatattaattaaaattattaaaacatgtaaatctatgattatatatcaatttattttataaagtgtgatataaaaatttaatatttataattaaatatttaaattttaataatgctaataatttttatatatggttatttataaaatattattaagaagttatataaatataactaaagttattaaatatacatataatttagtaattgaaaaaatatatatatgaaaaagtaaagtacgaatttaaatccgtatataataaaaacatgttggcctgtctaagaaatacaggttgatacaaacaaagtacgacacgaatctgagcacgacacatcaagtcgtgatgggcctttcctttaaaaataatggcatagtagcataacctatatttttttatagtacagcataaaaagtacgaataaatatgagtcgggctatagtacgacacacacaaatttacattactagtactaaatattataactagtgcttgatagtaatgcccgtacattaattactatttcattcttttttattgcataatttaaattgttatatattgttttgtgtaaaaatata

SEQ ID NO: 181263 - DNA, 820 bp, Cannabis indica
actctttttactttttaataatattttgtgaaaaatatatgactaggaagatcaaacatttctttaaaataaataaataaaaatctaacattgttagaagacagtaacacaatttaatcaatgaggtaatcttgtcagaattgtaagaagaacggtattttatttcaaaattaattgattatgataaaagtagtttatgaatcttatatattattttgttctacacattagcaatgtaaggctctttaagattccctcaaaatggcatctattttttctcattatcttagatagctcgatcacaagcggctttttttttattactatgcccggattgcaagtgactcttttgcctctacttattttctttctacatattagcaatgtgggactctctaatatctctctcaagatggtagcttctttttttctcattatcttggacagttcaattacaagcgactctttttttgactcactattctcgaattacaagtttaacttttgggtctactttttggatcgattttttggacttttagtggctctttttagctcactatacccgaatcacaagtgactcttttggctctactttttagatcattttttttagactttttgtttgctctttttcgcttcatttttcccgaatcacaagtgatatttttttgtactttggcactacttttttgtatttggtggctcactttttggtctctacttttttcttttattcgtgttttttagtatcggataatcataagattaaaaatgtcatatgattatctattgtgattgtctttgtaaacatataatc

SEQ ID NO: 181264 - DNA, 1123 bp, Cannabis indica
agatcccttatcaccatacctgtttatcctgtgtgctgagggattatctgcgttactccgccgatatgaaaacagaggtttattacatggttgtaaggtggcaaatggagcgccgagaatttcacatatgctgttcgctgatgatagctatctctactgcaaggccactcagactgaggcaacgagaattcaggaaattttgaggaaatttgaatcggcatctggacagaaagtcaattgttccaaatcctctaatttttttcagcacaaacacaacgcttacagcccgtgaagacataagtaatttatttggcatggctatagcgggagttaatagtttgtacctaggcttgcctagtactatgtcccgcaacaagtcggctgttctgggttatttgaaggaaagagttcgcaaacgcattcaaggctgggaaaccaaattcctgtcacgtgctgggaaagaaatactcatcaagacagttgctcagtccctccctagctatgcgatgagcgttttcttgcttcctcttgacatcacccgggagatggagaagattatgacaaagttttggtggcaatcttctgaaaagacgggtaaaggaattcattggctatcctgggataggttgtgtaagcataagagaaaaggtggaatgggctttcgacaccttagagatttcaacttggcattacttggaaagcaagggtggagactaatatcacaaccggattctttggttacaaaagtttttaaagccaggtacttcccaaacaacacttatctcaactcggaactaggtaataatcctagtttcgtatggcgtagcgtatgggaagcaaagcaattggttaacaaaggactccgctggtgtgtagggaatggtgaggacatcaatgttcttggagaaccttggctgcctagcatagagaacccctttatcacttcatatcatcctagtcttgttcatgctaaagttcaaaacttgctgaaagtggatggtacagggtgggatatagagttactgagagatttttttgatgatcgtgaagtaaagctcataacaaatatcctttgcaagccactgtaaccgaagacaagttgatatgggctgctgaaaaattc

SEQ ID NO: 181265 - DNA, 1060 bp, Cannabis indica
gtaagattcggtgatgataatgacattgaatgtagtggtgactacaagtaagatattataatgataataattttgaatatagtggcgactacaaaaagttgggtaaaatatcttatttattctaaatatttttatcttatagctaaaatatagtttgccttaattatattgtaatactttttaatcacgtgacattaaattttgtaatttgtggtgttcaagacgttataataaaccatatccaataatcattaattttttcaattttattttttagttttttgtttttgaaatttttattttttattttatttttattttttgttattttatttttcaacttattttttttatttttgttttttgtttttttgttaattgtaaagattattagtttaaatattttacacagatttttgaaatcatatttttattggatcaatcaactaaataaatgatttttttatttgtttgatgtgtttgtttttgtaaattaacataaaggaaacaaaaaaatgttcaaattaactagatttcataaatatcatcataaatatttatgatgtataaatttaaataataaatatcaactaaaaatatctaagtgatttcataataaatattttaaaattttaaatttagatttttattttatcattttaaattttaaaaataatgttcattaataataacttatataaatataaaatataattaataaataattaaaaaataaaatatctaaaataactcataaaaataaatatttaaaatcatcgcagaaaggcggcaatattacttagtttatgctataaatttcttattaatatattttgttagaaatataaatatatctaatcaggtaattaaggtataatattaataaattagggtgcccctataccttattctactttgtacttgcattaggtacatgtatgccctactctaaatcttaattcaaagagtaatacactactcatacgggactaaatgattagtttgtcaagaatctaaataattcatagcaattatacattactttctaataagaactagt

SEQ ID NO: 181266 - DNA, 547 bp, Cannabis indica
tttttttaaatggtcaatggcccgtgttaatcagcattgaaagtggattatgttttaaaaataaaagacaggctgccgtgtttgaatatttccacttatgtaggcaaagactgataatgttaaaagctgtggcagttggttaaattaaaaatatatatatataatatacaaataatggtacagcagtataattttgtattttcatggactaaatctgtcatatcattttcaatgaaacaatacattttaaagaagtttttcctcgtgaaaaaggtaaaccattggaaagcttcagcaatctattttcacttttgtttatttttgctattttcttctcgtccatgtagacctttaagtgagtgtgatagagattgagaaccagttagtgctcattcgtccttcccaaaaccaaaagaatcagagtgtaggtatggaccccaggacaaccaaaaagaatttgttaatgaaataatagcgtgacttttcttctccttcgtcaagttgcatcccattcagatatatagccagtaaaaatcaaaatcaatac

SEQ ID NO: 181267 - DNA, 673 bp, Cannabis indica
acaaccagtacagatcttagacaggaaagaaaaggtgctgcggaacaagactattccgctagttaaagtgctgtggcggaacagcaaagttgaagaagcgacttgggagttagagtcgcagatgcgggagttgtatcccgagcttttcaggtaaattttgaggacgaaattcctataagtgggggatagttgtaatatcccagaaaataaataatatttaaatagacatattttattaaatatgtaattacttgggaaatgaagtaggattatgatcttacttaggtaaattgttgagaaattatttaatgaaatacgttattttcgggcccggcaattgtggaaatttagctatgtggttagtaatgtcacgacattaaatgaaagaattattttgagaatatcccggattaagttagaattttattagaatgtcggattggggaattagtaaaattaccataaatgcccctaggttataattttagtttaggtttctttgaagggtaaattagtcatttttatgtttttgactttttgacctttgaattttggtgggctgattgttatttaaaaaaaaaaaaaaagaaaaagaaagaaaaaggaaaccctaatttaaggaattaacttccaagacaagaaaccaactcttttcttcttctctctctcgtgc

SEQ ID NO: 181268 - DNA, 770 bp, Cannabis indica
cacttaagtttattttgaacccttaataatatccccaaatatcactgaaaatatttgttactgtcatttttaccgtttaaatattttattttattttattaccaaaaatctcaccatattcggaactaggttagagttataatagcttagattaaataactattttcttcgatctcacgcaattcccatgggttcgacttcgttcttcacaatctccatactacaataaagattcatgcacttgcgagttgataaatgtaatacgtaccactttcggtacacaacacttcaccaaaaggaggccaacctttgagtgcagaggctagccttttgcaagttgaggacatctttctacgttgtttccttgaagaggtcaggttcttttggtcgaatgaagtctccttgggtctagaagtcacttcatggccgactagcttatgcacagatcctaatcggcctataggctcaccttgtctagcctataggctccttttggccggccaaagatgtttgcatagctccttgtgggctcgcttcactcccttcgatcgctgcttgacggttttgctatatcttgcatgaaggctctattatgctattacggggctgtactccagctatactctatcgttggcttacgtggacatgccatgtcaggtggacaaaatttgggataacatttacccccaaagtccctattcgaacgtctagttggatagggactttctagccatcgtcttgtttatagtagtctctgttgagcaacctta

SEQ ID NO: 181269 - DNA, 572 bp, Cannabis indica
atttattagaaaataaataattgaaaaaagaaaaactctaggaatttaatggacaaagaaatataaatagtagtcaataaatttctcattgatttcggtggaagtgcaatatgtaagggtgatattgattttgttaattgtataaatgaagatatagtaagatttgagtatatatttaatcgggatgttatatacttttttcttaatatttttaaataaaaaaaattataaaaaactgcaaattaggtaaagtagaaaattaaaaggagatgaagtcaccacacttatttttctttcagatttatatgtagatataaaaatatatagataaatagatcgattagaagacaacttaaaattaaatattaataattcaaaattaaatttatcaataacaaaaaaaattcttaaattaataatgttttagaaagttaaataattaaaattaattaaaaataatgtattacatatatcatttttaatatattaattatatgttgtaaattataaaaaattaaaataatatcataaaattaatataaatatattgtgatgtttttattttttttatt

SEQ ID NO: 181270 - DNA, 665 bp, Cannabis indica
gatagggattgttgcgaggaaccacccagtttttatcgaaccgatagtgacacacaggggctgtatgtccagatcttaaacagacttgacagataactctttgagaattgtagcaaggatatcctcgacctcgacctgtggatgcagaagatgattcaactgagggattcttgatgttggcatatggtcgaacaccacccgatcgaccactgccaaaggtgagatttgcttgcatctttacagcaagatctgtcatcgattgatggtgcacaagtctgctttcatgagtcaagagcagggcttggacctcttcaatcgttaaatcatcactccttgatgttatgcctgagacaacagaatcaaaatctggtccaagaccatttaacatttgtaaaattaaatcttgattgctgactggggaaccagcaacacaaagcgcatcagaaatcgactgaattttatcaacatattcagaaatggagagacttcccttttgaatgttgcagaattggcctttcaattgaagtagtcgagcctttgtttggctggcgaatttctgttcaagagcattcacacggcataggagctggtgtaatttgctacagaagcaagaattgactcagtcatagacgatcgtaaccaagaaaggagtagctgatcctttc

SEQ ID NO: 181271 - DNA, 776 bp, Cannabis indica
atagttaccattggtccacggtaataatctgtaacgtcacgtgtaaagacaacttgtataattatggcttttttggaaaaatgttggatgaaagcaaagatagacaggcacgcgtaaaattttttgttgtttttattttttcttcatatatataaaaaaacaagggcaggtttgtttggtcttgaaacatttgaacaaaataaagatgtttttttagggaaatttacttggtatactaatttttgttattttttttacttttttactgtatttttttataagtttcatactgcagtatactgtgttaagttttcacttttgttctactggtattttttagttgttctactattattttgagttgttttgttttgtgttctactggtgttttataaaaatatagtatttttgaaaatatttccgtgtgacagtatttttgtaaaaataacttaaatttcaatatttttataagtttcttatttttttaagtctaaaagttcccatatattatgggccataatttagataggctctaggcttagccagacttagtccaaaatccaacctttaagcaaggaaagatatagcactactgcactagtgaaaattatttgaaatatgaggttttcaaaaaatattttaccttaatatgataattctaggttaggtcacattttatggtattttttttttggtaccaaatcatgtcccctgaacttttttgtccgttaaaactttacttttgtaactattgtagattgttagtatttaaggta

SEQ ID NO: 181272 - DNA, 600 bp, Cannabis indica
ttttttttatgtcatcgtattggtatatatacactttccagtccacagtgtccacatacatgcataattaatatttcttcgtattcttcttatggattaattagctaattagataataatttattaccgaatcaataactaaaatcaaggattctagctagaatatcacgaacagtcatcacatatccatattcacttcacgcgaatgacccaaaggcaatacaacttttatatatagggagctaataagtattgtatattttatctagataatgatttagttattggtttattcaaatggcttaaaattaacggttgaaaattacaatataattattaatttttatttataattaattttaaatattaataattagatttacctaataatactttcagtgttaactctaaacttataatttttcttactaatttatcttataattttttataattttaattattaattatttttaaattttaaatttatatattaattttattttttgcttaacaataattacagctaaaaagagtacaaaatatacaagttatttaaccctaaaataatcaatacaattaataatataatcatggtgt

SEQ ID NO: 181273 - DNA, 770 bp, Cannabis indica
ccaaataactaatcatgtccttatatatacacattataataatacatataatattgatggaggcacctttctccttattatatgctacttacttctagtagttcttgtttcttttctagccaatcaatattagtacaacaacactgctctttcaatattcaccctcctctttcttcctctccaaatccaaacccttcatataataagatatatattatttgagattattaatgcatagtagaatcgggagtgggagtgataaagatcatcaaaggagcaaggaagtgaagggtgaggaggtggagctggatccggtggctcctcacccaatggagggacttcatgaggtgggtccaccgccgtttctgaccaagacctatgaaatcgtagaagatccggcaaccaacgacgtcgtttcatggagtagaggcaacaacagttttgtggtttgggaccctcagaacttcgccatcactcttctccccaaatatttcaagcacaacaatttctctagtttcgtcaggcagctcaatacttatgtgagtactgtttttcctttatatatacatatagccatatatatatatatataccgtgtgtgtatatatatataagatttcctaagattaattaattaataagatcatcatatatacaaacattacattattgtatacagcttttatattcaagaaaatatcattaattaactccttaactactaccttagctatatagatttattaatatacttacttttttcgatttac

SEQ ID NO: 181274 - DNA, 642 bp, Cannabis indica
gcatataatcacaattaccttccactgtgttcacaacactgtaattgtgaataactatatgttctggacttaaaagattttgtacacattaaacaataaacatgaaaaccacatctaaacataaatgacttctaatcttctattgataacaaatcagattaaattgaaatggattttgtttagggcataaaatcccaacagacctttatgcaatatactatccttttaaactcatgcaaagtaacaaaaaagtagtaaactatttggtcacttggggggcagtaggatataaagcataaataactcataatatatatatatatatattgctcaaatgtcaataaaagagcgtatattagaaaagagccttagggagaggctaacaaaaagtctctacaaaggtacacaaattaaaaaagaagttataaaagggttttctggataaatggaaaattagatcggctttgggagaaaggcgaggacccaaagcctcagtaactttagcatatagtttcttgttcttttcccagaaacaggtatggacgactttaggatcatgtaggaaatggagtatgggcttaaatttgctatacctctagcacatgaagatgccatgttcaaaacatctcacgcactgatcac

SEQ ID NO: 181275 - DNA, 739 bp, Cannabis indica
ctatattataaacacaaaagcattcccatcaaattatcattctctttcatagtgataattacttgcacttcatggatctttttcttagtcagtatgatattgatgcttaaacattcctccaggctaaattcacttcattctttggaccggggattacagctgaaattggtgagtttagtctttaactacctcatgaagttgagatatatttcatatatagtggaaatggataatagattagatgcatagagagtatgccatgcatgcttgcatgcacgtatagaaattatttgctgatcaagttctttggtaattaattcttgtgataatgaactattattgggtgcagcaaagggagagaaggatctatatgaagtacgacttatctcaaattctaacagtaccaccacatcaccttagtaacttgtaccattcattgttgttttcattctctatacaagctataagcttataatcacttgtaaaatttccgcttatatattgattcgacataaaattacaagaaattttatatgaattttgaagagatcccaaccctccaaaagtcaaaaaaaaaaaaaagtattttgaccatgctgagtaattagtgtttgaatattgcctgagcatccccaatgaatatgtatttttcagcatctctattgatctcttatggtggtgtataaatattagacatgctaaaaattgtattaaatatagtataaaatatagcattgta

SEQ ID NO: 181276 - DNA, 769 bp, Cannabis indica
ggttagacctaaagtgttcaaatcttcaagacagttagatttttattttggtaattgctaagcaacaacttttgtataaatatgttttgtaatcttttaaacaagatcctgaaatcatataatgtttgtataaatatataataataataataatataatctaaaggcgctatgacaagactggttacattttttgtatttgttcgtgctagaaattgttttcaattaattagttatattgaaaaattgttaaaaattgtgttcaagataatattttataccaataaattaaatttaatttgtcatttaataaaatagtagtaagttttataaaacacaaaatcgaaaattgtattgattaatgcataatataacaacatatattatgccatagtgatcttccaattaattaactcagatgcaatttcaaaaccctttgtatgtttagtctcaatcatacataatgaatgagatttgttttagggaaaaaaacacattttggagaagaagaagaaaaaaaacttaataaatacacactaaaatcacaatacaatattgcaaaacaaacaatattttttaatgctgcatgcatgtgcttgcatattcactattaattatttccatttgtcacaataagatggaaaaaaatcattcaaaataatagaaatatttcccttagacaatgtataaatatatatatagaaatttttcaataattgagatttgagagaaaaaaaaaaaatcaaaatttttagtagtagaaaaaagaa

SEQ ID NO: 181277 - DNA, 710 bp, Cannabis indica
agagatagcaacccccttaagaaggccctcatcttgatggacacgaatgagagaggataatccctcaacacagagaataaataggtacggggataaaggatcccctatctaagatcaacagaaggtttaatagaacctttaacaacaccattaatctaaaaagaaaaactagtagtagtcatacatttcattataagagaaataaatttaataggaaaattaaaatgcatcataagactctccaaatagtaccaatttactctatcaaacgccttaaccatgtttgatcaaaattgtaaatctccaattctaatcaaacatcaataataaaatatcatcagattcttccatatcattagtataatcaaaattctacatgtttttaagtttgtggatttctcataaatatagcctttgaacatatcatttgcaatatgggaaaaaataaatggtaaaatatatggtaaaaaattaaataagcttagggatttatggaaattatagaattactaacaacatgagtaatcgtaatttaaaaacaaatatacaagagtgtagaattggaaaacatccataataaaatatcatcatatttgtccatatatatcaattccaaaaactacccttcaccaaaggaatccatgcattgaagtattttgcttatgttttaagtcacagaaaagagaactgttgtttctctggtgagtttg

SEQ ID NO: 181278 - DNA, 859 bp, Cannabis indica
gaagaggaaaaagagaagcaagggggagggttgggcgccgtcaattttgttttttttttcttatgattcttttatttttagcctaaaagttttagggcgggtggttcgataagtataaaattaagggtatgaaaaaatttaataatgtacaaccgaatttcatgtgggatgtaactcaggttttagaattgtgtaattccttactctcgaacctggcttggtttggtaccagattctacctatcatttttcaaaatccaattttttttggggaatacaggtgggtacgttttttggtacaaatgttctaccctaagtgcacgtgttggtgttgttacaagtaataactcatgcaaatgaggtcaatcccacaaaaactgtaactaagtactaacaaattgaatatttgtttctatttagcaaaataaaactttagtttgagaaaagattattgatgttttataaaagaaaactcaagaaggttattcctaagaaaataatcttttatttttgatttgcttagtgtcaatgaacttttaaattaaatgtttaaaaattattacaaactaaatatgtaatatcccagaaatataatgatatttaattggacatattttattaaatatgtgattgtattaagattggggtaagattatgatcctacttaggctaaatgtgtgaaaattagcgtaatctaattaatgattaaataaagcttaatttattaattacagaatttattgggttatgtgggtagagtagctatcacttttgaaataaaagatttttggatattgtcgaccttggaattcagtagagtggttagaaatgtcacgacaattaagttgtgttgtattggg

SEQ ID NO: 181279 - DNA, 1048 bp, Cannabis indica
gagcaaaaaggtttgtattctacagtacttggttgtttcttaagattctgcatattcttatgtgtattgtgtatagttggttttttttttttttgaattcaatattgtgtatattgttgaaactaacacaaatttatagatatatatattcctatattatattaattcaacaattatttttattgttatttgctaattaaatatttgaatacttttgatgagtcataaaccaatagaagaatgtgaatttgatggactggtttttcttttcttttttgctttttagttgtacgttatatcccactaaataagaatttgacacatggaaaacaaaagtgactaaacttgaattcatataataatgaaaaataaaagtacaaaaataaaataaataaacaaaaataaaaacaagtagaagaataataatgatggataagagggtagaagacttactgaatcatcatccttatccgaaacacacctcaattttcttcaattaatattgtttcttttattagttatcatactattactatactatatagtaagtatatgtaaatctaacattaaaaaacatttctatacaccattttatgccctctatttttgtggcttttgtcccacaaataaagtttgaacaaaagtagtaaaaaataataaaaaaatatattatttttagcttcatattaattaactaatatcatatcaattttattatacacatatgtatactgtattaaatatgtagactttaaaatgggaccaatagtgtacgataaaatgggtggataggaaaactatattaatgttatgtttggttgtccgcaaaatttaaagaactaaataatttgtttaataataaagtcttctataaatttttgaggttgaaacttgaaactctatagaatatctttgcatttatcatgtataccatacatataatgcatatgacacatgcatataaatatatgctgtatatggaattgtattatatacatatatatatatttatgcagattgatttatgctgcaatataatctattgggg

SEQ ID NO: 181280 - DNA, 554 bp, Cannabis indica
tttatctaacttctagtttagaccatgagaaactttgaattggataactttatttcgtaatgttcagaatttataatttatgaagaaaaaaatatatttttttaggcagtgattataattatttatgaatttacaatgcagattgtaaagtccttttttggcaagttaggtgacaaaataatttttcctttttatggtaagattgctatgcattcattttcgaaatcttacctcttttattcggttataagttgccattttccttgtttggaaagttgcactttcagctgaactttcctttgttgaaaacttctcaaaagagaaggaattctcttttggaaagttgtccttttaagggaaactttgattattgccttttccttattaatttcgattgtatcttgatacaatcagaatatctaatctgtttttggcaggaatcaagctttgaaagaagatcggacccgattttagtaagtttcccgtttctgggcagatctgcttcgtcagcaaccgaatctgatgtagcagatcgtgtttgtttttggaaagtc

SEQ ID NO: 181281 - DNA, 621 bp, Cannabis indica
aaaggtttttttctaatgaaaaatattcatttttctcttgcttgtattaattaaataaaataaaatatatataataatctttcactacataaaataaattttatttagaagaataatttaagaattatttcttatatttttctcttataaatttatttgattagatgaaagatctaaacaaaatctaaggctaaaaggaaaaaaaaaaacctaacagtactatagtgaggtagcataaaaaggagattcattaaatttatattgaatgggtaaataaataaaagagatcggctcaaggggttaggccattaagaaactgtctatagcatcccttgaggtaaagctcagttatacacattttactaactaattgataagtgaaaaaattaatgctatcataggcattaattactaaacaaaaagttctttagatgtcacccaatagtagttctctaggaactttagtttatctaacttctagtttagaccatgagaaactttgaattggataactttattcgtaatgttcagatttatattatgaagaaaaaatatatttttaaggcagtgattataattatttatgaatttacaatgcagattgtaaagtccttttttggc

SEQ ID NO: 181282 - DNA, 1306 bp, Cannabis indica
aatatattattgaaaactttcctaaatttaattatgtgctataaaatttttgtttaaaaatttagccctaatatctatatatattaattatgtggctaaatgaatatttacccacaatcagtttagtcgattttttacctctgccattcttaagaacaatatattgtataataaccacaagatttaagatttctatttgatgaacgtttttttttttaaaaaaaaattatttctattcacactaattaatatgagggtgttagtagttagtactaattattaagcattacatatacatctaattaattttttatttttattttttataatcaacgttttatagatagaaacactaaaaattagacatcgtgatcattacaaacaataaagtctggtatagaagaaagattaaccataccggtaacattattagcagacgtccacttaaactacattataagccacgaaattacaaactcttgaaataaaagaaaaatgacagcctaacgtaaaaagaaagaaatatttacaataatacacataattaccgattttccaactggaattccaagttccctttagagtcaaaactagttttaactttttatgtatattttcccattctctatgtaaaactaaaatttggaacatatacctaccattttccttcccatacaatgtaacacataaatatcattaaaaaaaaagttaaaactaacaattacccaataatactacatgtgtgaagaaagtagttgacagagttaaattgtgcaactaccagttaagacagcctacactaaagacatttttatttttatttatatttatatttatatttatatatataagagaaaaagacacatatgcaaatgcagagtgagtgtgggaaatggaaaatgaaatttttttacttaattaaattattaatttatttaataataaatagaataagaaaggtcggtccttttgtattaaatgctcctaacagcgcccaccaaatttcatttattgaccaaaataaaaataaaaaaaaaaaaacttataactacaaaaccacaagaaaaaaaaaaaactaaatatcatctttgtatgaatgaatgaatgaatatgatatgattctacttcttcttcttcatcatctatcataacagtttcttcttcctctgtaatggtttaccattaaatcatacatattgtcacaccaaaaagggcaagtctatttttggtgttaagaggctctttttgcatgccccattaaaaactctccttctctcatctttggtcaaatttcacacgaaaccca

SEQ ID NO: 181283 - DNA, 569 bp, Cannabis indica
ataacaaaaaatcaataataaaatatacaacataaaaaaagaaccgtatttatgtaaaaaaaaatataaatcatatttttgtaattttttttattatttttatgttttttttaaaaaattcccttattattattattattattattattttaatttgtacagtaaatgtaattaaaaattaaaatataattatgtagagagactacccacctgaatagtgtggtttttcaaagctggatgatcaaaagctggctgtttatatatgtcaatacagtctataatatctccatcactactctgcaaataaatatataaataaagatttaaataacccaatttgagtagaaaaagaaaacacaaaacaaaactaattgttaccttgatagtcttaaggggaggcttattgagaagctttaacttaaaatcaataagtttttcttcatccaaagatgtagatgtagtttgagtttgattattattgattggcctagctgctgctattgcatagtgaaaaaacacaaccaaattcatgagtagtattattacactactactactactacttctca

SEQ ID NO: 181284 - DNA, 662 bp, Cannabis indica
aacaaacaccaatgcttgttgggactttctccttaaaatgttgcatgacttctaaactgtagatgatgtgaaagattctgaggcagagttgccaattcagggaaactacttgtgcgcacgattccagcacacaaatttatttatcaatataataaatacacacttgtaatttttaattctacatgattgaccaatgaaacaatcaaaatctaaatacaaagataatataccatgactgactatttcatagaattgttagacaagcaaggaaattctgtaaaggaatttgaagcttcttttgtaggtaaggtatcattatccactaagaaattcacgtcatatgtaggctaaatagttttaaatacagaaagagaaacaaaaactaaaagtctcttccaatcaaaaaataatcgaaatgacaacctagactgaatttaattggtaacaaaataaagagaaagattaagataaaggaaattgaccttaacactagtaagaacaagatttgcatgtttctcctgccattccgtcagatctttccttatattcgaagccgtagtcgacgtttctgaatcagatccctccgcctcatctaaccaaagaaatatttatttaaaaaagaaaaataggaaaattaccaaaaatcagatcagaacttcagc

SEQ ID NO: 181285 - DNA, 515 bp, Cannabis indica
tataatttagatatgttcatcctaaatatctcaaataaaaataaaaaatgtgtagattttaagtgcatatctttctcctccgattataaatgctattcgttcgtatgtgctgacactcttacactactttctgacagtctataattgtagctttgcatataattggttgaataccaacaaggttttcatttggatttacgtactttcaatataacgtgaaaaaaaagcccaaatattagaaccaaaccaacccctcgcatataaaattgttatttcacaattacgagtgtttggaaagttaatacgaatgagttgtcgttaactttttttttagcacttattatttctccaagaacaaaatatattatcaaaatatttgtccttaaaaaaactatatattttttgtcattttattttatttttttaataagttttttttagttttttatataaagagtattgttttgaagtattagtattactaggaaatgttgccttcatagggatggaacatt

SEQ ID NO: 181286 - DNA, 1182 bp, Cannabis indica
tataatttagatatgttcatcctaaatatctctaaataaaaataaaaaatgtgtagattttaagtgcatatctttctcctccgattataaatgctattcgttcgtatgtgctgacactcttacactactttctgacagttctataattgtagctttgcatataattggttgaataccaacaaggttttcatttggatttacgtactttcaatataacgtgaaaaaaaagcccaaatattagaaccaaaccaacccctcgcatataaaattgttatttcacaattacgagtgtttggaaagttaatacgaatgagttgtcgttaactttttttttagcacttattatttctccaagaacaaaatatattatcaaaatatttgtccttaaaaaaatatatattttttgtcatttttattttatattttttaattaaggttttttttagttttttatataaaagagtattgttttgaagtattagtattactaggaaatgttgaccttcatagggatggaacattaaaattaatgtgggagttctttaacaaaatattaatcttttaaaaaataaatataaattttttaatttgataattatagatcaaaataatagaaaagctccctcaaaaattaaataattcttataaaagtataaatatatttttatgataaataaattgccacaaagtaaaaaatttttgatttgtaacgcaatatccacaaaaattattatgttcaatcatgagacttgatacttaattttacgtttactatacaatattcataatcggaataaattaatagaaaaatttaacgaaataaataaagaataatcaaattcataataaatatattatttttactaaaattgtttggaaatagaacgttaatgatttatcttgtttactttatcagaaaacgtaacaaaaatgcttaaattaactaaattatccttttaagttaaacttaatatatggtatttttttgtaagacgtattttaatggataaaattctcaatagaaatttaatattaaaaataaaataaaataaaaatcattacccttaatgacattctttgaaaaattggtgggcaaagttctgtctttcttttctcccttatttaatcaagttctctatttcttaaatttaataaataaaatgaactaatataaatgactac

SEQ ID NO: 181287 - DNA, 579 bp, Cannabis indica
attaactgatacgactaagtaatcagtttaattaacacgtttcttaattaaataataaataaaaataattatttattaataattttctagtaaaaatatattgtgtcacaccacaccaaccaacccaacccggctcggatcggacggacggcgcgcgcgcgcgtgtggtgggtcaagtgtgtgtgtcctcacccattcgcacaaaactgggtaccccttggggcccaaacccaaatgccaaagttgcactctttatacccttgtcaatgagggttcatatcccatgtgggactctttccaactcacacacactaagacacttatatattttgttaaaatattcacaatatttccaacatatatcatacaatccagataagtatttgtgctctctatacatatataaataaaagatatagaagatacagttaatgaatttcttctcaaagaattactagtgtacttttaatttatatctccaaatattttacaattttacattaagagaatatataactatatactggcgatcaatatttcaaggtatgtaaaatagaatacaatatagtatatagcagg

SEQ ID NO: 181288 - DNA, 582 bp, Cannabis indica
gttgttacattgatattttttgatattttaaattttttttaatataactctatttagttataacctctcaattagaaatataatttgcttaatcctaagtgtattcttagatagagattatactgtataaaggaatagtgcttctctactttgagctgttttagctgacttttctctactttgagctgttttagctgacttgatatctttatatatatatattatttttttaactattttagctcatgagatgtgagtggtactctttcttgtgagactttaagagaatcctcaccgaccatcagagttaatttggtgtaagtaccataatcggttcaaccttagtacattaatcctataatcaaagcagtggtgtagctcttcaccctcatttagttttttcttcttcaatagtcttcgttgctagcaatcaaaattcagatcaaactaattacctgtttataatatgtttcatcatcaacgcaggcttatgatatgtttttgttaatagataaaaaccaatgagatatgacataatcttctgtctagaaccggcttatgagaaaaaaatgagacatgagc

SEQ ID NO: 181289 - DNA, 787 bp, Cannabis indica
aggaaagaatttaaagaaaaagaacaaaaaaataaaataacaacaataaatatctctctaccattaaacatacatatatatattaaaatgataaagagttaatttaatattttatttacctatttattctaatttggtactttttttaagttttaattttaatttctgtgttatcttaagatcatttatttgtattgaattcgggtgtttattagagtataatactagtttactttgatgtattatacatattgatttatttttaataaaatgattacctttttaaataaaatgtacaccacactaaaataataataggaattgtattcttttttattatatatttggagagggcgatttgaacttattactttctctttatgaaaaaaaaaatatagaactattaaattatgtttatgtttatgaccacaataaaaacaacacttaattactaagattatctccaatgaaagatgtaaaagttgagccatattttagtaaaaaaaaaatagttttgtgatatttttacatcaatttttactattgtgctctaatacataattataaatcttgatgtaaaatttaatatgctatttaatcacttgataatttattaaaaaatataaaataataataatataaagttaaatgtaaaatttaataaaataataataataatacaagtcatttaatgcaaatgagtatgttagctaaaataataaaatattaaaaatgaaataaatataaaagcatgcatagcatttattgtgatgcaaattttgcatca

SEQ ID NO: 181290 - DNA, 645 bp, Cannabis indica
caaaaccaaagaaatgattagcaagaaatccaaataaaatgagaattctcacatccaacaattaaatcaaagaacaatcaaaaataaacttgaaaaagaaaacaagaacttgcctgattcctgcaacaaagaaacaacatgaataaacactttcatttctacttcaaaagttatttttgaacattggacattaagtacattgttatataataaatatatcgtaatacatgaaagataatactcatcaaataatgacaatttatcaatatgatttgtatgtttgttatttagtatgaataatcattatacttaagtagtaaatttatgtaatatcgatcaataataattataatattctctaatattataattattaattatattaattttaattgattttattaaaaatcaacatttagtttaattgacaaaatattctaaatatggtcaatgttgtttagttacttatatttaatttgatttagttgctcaaattaaatttttttattaattgttaaaatattatgacaattaattgtgttagatatcttgatagaatgtctcgattcctgaactcactactcattttgtgaaacatacagtaaattcatctaaaaaaagtagagacagcttgaaattctgatt

SEQ ID NO: 181291 - DNA, 805 bp, Cannabis indica
aatataaattttcggagaaaaaaatagactcaaacttgttccgtaaaatttagtttttacaaaaattaaaatttaatattttttttacatcaaaataaattttttaataataaataaataattttttaaattgtttaattatttgtaaaattcatattttttttaattttcttaacattcaaatgataatttttaagctctaaattaattttttaatatttactacaaaaaaatattgaatcttttttatttttattttgaggcataccatttgattgtagttaaagcttcaaagacaaaattattaattaacaaaaatatatcagcacttaataatgggacatttttaaaaatgtaaaaatttatgaaaattcttaataaatttatattttaggggcgaaattaatgttatcgaaaatttaaagttaaaattattctaaatgaaatgagtaaagaaatccacatatacatgttatagtttcatttttttaaaatgttttcttctctattaagtccttatatcgcccaagacggctgaaaagtagtataaaagtaaatattattattaataataataattaaagaaagaaggaaaaaaacaccgttcttggcagctttcccacgaaaacatttaacctttcgaacatgtatagtggtcaacacctgtaatgcttacataccagaccaaaccttacacggctgaatcattttccagctgctttttggtggatctggtcagaatccaagcccctttttttgaagcttccctcaaggagctctcgccgctctttcctctctcccttgt

SEQ ID NO: 181292 - DNA, 606 bp, Cannabis indica
aagttaaatacaatggagtaaagaaatatatccgaatagtagaccaaatgcatatattttcttttttagaaacctaaggatcaatttacaatagtgggtaagtttttggttccaaatttttagaggtactactactagactactaatgctactataggggcattcaactcaaacagtaccgtgaactcaatgtaattgacaaataatctcctccatgttgttgttattcttacgaaatataggaggtttgggagccttagggaaaattaaaattgagcattttattaaaagaaaataaaaaataaaaatcaatacctcataaatttaatatatgagaagctgttaatgatcatattttgacccgtaattttctggccaaatttattaatgtgtacttaattattatatttggtttgtgagtttattttctgaatctcatcttcatctcctctttctagaaaggtgattacttacttcttaatttggccagttagtctcggtgagtggcttagaaacccggttgggcaggcgaatggattggctgcttcgttatcatcggcagttattgtatttgttgtctatttcatatggtgcacctgcataatt

SEQ ID NO: 181293 - DNA, 774 bp, Cannabis indica
actttttaattttttttagttacaagacgtaagtggagggttgatcttggccgtctcagacctaattttttattataaactaactctgtattgtatgtatatataaatagatgcatgtgttggtgtgatcatatatatatatatatataattgatgatattataaaaccaagtccaacatgacaaataatgttatccagtagtagtactgctctgctggcatgcacactgatctgatgtcaactatattatgcctctcattacattattagtcaaatttaatacgaactcttcactctcttctactccattctatagtccatacactactctagtactctttcaagattggacaattttcattattataattattattattttgtaaaaatttacaaaaatatgatatatttttttttttgaaaaaaaaacaataaataaataatatggaaaaaatagccaattatcgtactatttttctcatattttaaatttattttttaaagttttcccataaagtttatttcttgtaaaaataaacccatattctaacacgcatagtataaaaactaatttttatttgaatattttatatgtactaatataattaagtataacttacttattgttatgtaagaataattatatatgtagtgtatattatatacttattacacaactagaatcataatagaatgatcagtttggagcggctgccgtggctcgagaccatgatggtcgggttcattgaagcctttacggtggggttcgtgga

SEQ ID NO: 181294 - DNA, 562 bp, Cannabis indica
tatgtatgtgtggagctactgaactgaattaatgggttaatatatcgatcaagcatttgaggtaatttaattatttacaacgagataataatagataataatatacttacttgtttatagtgaatagtgatcaggtctttagataaatctagggacatgaagggtggtggtgtcatgattggaggactgcatttctaaatcattgttgagatttttgattattatgatcagtagtctgagaatttcttctctttcgacaatgatgaagtgtataatagagaaggcgtagacaaaatagaatgcttataatcaccaaaactgatagaacgtagattttgaaggaggaatgagaatgttggccgccacagaaaagtcccaagcacaccatagctataactaactatatatatatgtattgtataggcaatgatcaccaatcaaattttatatacttcaatatgaaaatatatactctatattagggttccgtttcttgttctaagttatataggtatttcttagctagatattatataggttgatacatgcaaatgaaaaggaa

SEQ ID NO: 181295 - DNA, 642 bp, Cannabis indica
ttattattattattaaaaaaattatgaagaagaataaaaataagtgtcccttaaattatccctatggaaagaagtattagtttttttttttttttttttaaaaaaaaaagtgcaacacattttattgaatatatatataaatacctatataagaataaatatatatacaaataaaaaagaccatgtggtattatatatatgagttttcttctcaatttttaattctctatttttctaatttttttatttatttagtttatactcattatttttatttactcatatttatattaaatgttactaattaacattacaaatataatgttggaaattattttaccaggatctagatttactaacaagtatgtttcattaacatcctaatatgaatttctaaaacaatgaaataaacacataagggtttaaggaaaccttacattgattgcagcgaaatataatgactccttccgttcagatctctagcctttgattcctttctgtagcagagcattatcaagatctgaacctggatctctttctctccttccttgagcccgattctccttcttgttgattggattcttcacagtcttacacactatgattgagataccacttgatgtgtgtgggcactcactctat

SEQ ID NO: 181296 - DNA, 587 bp, Cannabis indica
aaagaaactttataaatattatttttgtaattagtaaaagtataaatgtttatttttccttaagatggtataaatgtttattttaactaattttaacctaaaatagaaaaaaacccaaagtaaaaggatatttccctaataatattagtattttatagtctggaaaaataatttgtattaggtagtgagtcaacaacaccaaaaccagccacaggaagagtagtagctagatgatccctagaatttgaaaaaataaaaacacatttcactaatgaacaataatgaatatccttgtactataaggtaacagtatacattttgcaataccaaattgtggtataaatctcatcttccatgtttgattctgattcatacaaaaaaaaaaacgaagaaaaaataataaccaaaacttgtatgtgaaaagaaaaatgggaaaatggaggaggagaagagatgagaggagattcttcaattatcaagactagttctacagtacaaagtgtaacctccaattgcatataactatcgaaacgaaccacaccaaaaaccctgctagttgcccgcaacatcttcattgtcgggatcag

SEQ ID NO: 181297 - DNA, 516 bp, Cannabis indica
atgtagtaactctataaattaggatatacattatgtttcttttcactttttttagaatttctttcttcaaatagatatatatataggtttgtattatcaaatgtgaaatatatctattacaaaatgatattattaaaaaaatattattaatagataataataaaaacatagctcattaatctatgccatatagtcttctttttgtgtaaacaaaatatatttaaagaaactataattctcatcccattaaatagaaggatttaattctttctaaaaaaaaaaaaataataaataaaaagatataatattaattaatcaagaaaatcaatgacatttttgtcaattactttaagaaagcccaaaagcaacattctctcttttaatagagttatagatttaattaaaaaaaaattggctttgttcattctttatggttattatactatatgtgaaaatttagatatttgttattaaatattatttatgaatgtttaaatcattaaattaattatcacc

SEQ ID NO: 181298 - DNA, 480 bp, Cannabis indica
gaaaaaggatttaaggttgaagacgtaggtccaatatacgacctggatggtacggttcgataggtggcccgataggcttctatcaattccatttttttatgtttttgtgttaggcctagtgtaggtttgatagtgctacgattggggtcccattttcatgtttttgtgttaggcccaatatgaccgatgtagggtccaatagtggtctgattaggggtccagtttttatttttttgtgttaggtccaataggcccgatgtagggtccaatagtctgttcgattggtatttgtatttttatttaattgatcatttttaactgtggctgataggctcgatgtaggtctgatatttgtgtccaatggtatcttattttttttgaattttttgatattttgcctgtgtctgatggggcccgacatgtacaattataatgtactgatctctttacacagtatgtactaacttctactttcgtgtc

SEQ ID NO: 181299 - DNA, 670 bp, Cannabis indica
ctgctttggccttgaagtaggactagtcacattgactaggatctgaaccaaataaaattggttatgttcttatttgtgttatcttttcttgtatttatgttttgattaccaatagggttgtacatcggtcggtttggacaatttatcctatatattttctaatccaatcatctaaagttcgagttgctaaaatttaagtgcaacccgcccaatttacaaaaaaaaatctgtaccgaccaatagtttggacggtttgggcaggctaaccaaacttttttttttaagtttcaaagtcaaagtcaatataaattaaaaatattagattccaccaaagtacaacacaatacgtatgactttgaaacaaacaattaagtatatgactttatattattatatatttaatcatttatgttatatatgataataaaaaaaagtaaaaaaatctaaagtcgggttattcagtttaatttaacgagttggatctattttcaacctgcccaattaatagattgggcggtctataacttttttgggttattttagtttgtaaattttatcagttttttcagtttgatttggacagattattcggtttaggcggtttacgaaattttttgtagagcgctaatcaccaagcgtttacattgtgctcttattattattattatta

SEQ ID NO: 181300 - DNA, 506 bp, Cannabis indica
tttgacaaaaaatgacttttaattacaacaaaatattacttattgtgactataacataatatttatatatgcaaattgtcattaatttaacaaatactgtgaataaaaatacatttataattataataaattataattttgtgattaattaatacttttagtcataaatattttagtcacaacataaaaataataatttataaatagtcagtaatttttttatttttaataacaaattttattgtgattaaaaataaatttttttttaataaatattagctttaattattatgattactttcaattaacaatattaccatttttaagtcatgatgaacatgatacttcaccttataactattaacatttttcggtttataggtgaacaacaaaaatgtatatacacaatctatattttatatatattaatttatttgacatttattaattacaagatcttgaaaatagtgacacacacacataaaaatataaaaatattctttctc

SEQ ID NO: 181301 - DNA, 1030 bp, Cannabis indica
atttaaagacaggcatcagaattggaaaactcatttcagctagatattatttatgtaaaactctatctagcttagataaacttctacccccacttcatgctatttcgccaggtgaaaaacgatcccgagcttttaagctcctcaacctaactcaaagcaagccaattctgagcatccacaatatctttattctgaataggctttccaccacttcaatcttgaaaactaaacattgcgttgaagtctccaagaataacccaaggctgatttagctgaccgatgcttgctagactgtcccaaagctctttacgagttttccattgtgttactaccataaactgtcgtgaccactatgccctgcttttgcccactgaatctgattttacaatgcaccagctattgagtctcttctaaaatatcaaattgaacaaatttgtcttgccaaattagcaagattctcccagaagtgatctcactagagtgataattccaattaggaaagctctctgccatcatgctttgaaccttagcatgttttattttggtctcaaccaaagctcaaaaactaattttattcaacctaaaagcatcaagaatagccttttggtttttcttttcttttttattcatacctctaacattccaccctaatatattattaacttccatcaggattagtgtggatttagggaccattacctcttcattagtcgctgcttgtaacgcagcatagccattgctggaataagagtcattcgcatactcctttgcctctttgaattctgtctgctttattgctttcctcttaggagtgatccactcattaccatcatcaacatcaatcttttcccctcatctttatctcttttcccagttcaggagcctcttgagtaatagtcatattttcaggtttgtctactgtcacaacagccgcttcccctgtgtctctaactatcatctcttgactccttctttggcccccttttttcagctgtctggttttttcttccaaactactttcgtttccttg

SEQ ID NO: 181302 - DNA, 709 bp, Cannabis indica
caaagtttgttgtatttgtaatagtttaatatttagtgatagtccaaatcgcataaaccacaaaaatcgcaccgcactgcactattttttgcagtgcaatttttgcgagttttagtttcacggtgcgggtgcggtttgggaaattggaaaaactacatgtgcgggttggtttgaaaaaatagttaaaaatcgcaccacccgcactacgaacacccctactttgactgtcgttgtggcaatcctcagtcaccgaatcccaccaaatcagggtcttttccacagtgtcagactgaaagagtgcgcgtaccaccaagaagagcataccctttgtccaacaaccacctttatgcaatattatatggaaattgtgcatgcacgctgcctgtcaacatcaagttgtccccacggactgggtctcattccataagcccaagtctttctattcagtgtattttcccctattagtgggttaagtttaatgcaaaccctagtgggtcacgggtatacccatacctcgatcctagcctacaaacacaacattataccttcatgcaagaagttggaagattgtcgttcaaacactatagccaaagtctagggttcttataatctatttaaagaacacttgtgtaatacactcaaggctatttagcccaatacaactaactcgtagattaagactctttaaggccctaactacgtaaaaatt

SEQ ID NO: 181303 - DNA, 540 bp, Cannabis indica
gtcatggtattaaaacatgtttctaaataattaaagattattcatcacaaaaaaaaaaaatagagatcatatatagaaaaatcaaaatggtgattacctttcttaaaaaaaatcgtgattaccttataaaaaaaaattctttgagcagtaacaaatagagattaaaagggaggttagagattttccaattaagattgaaagaagaagatggtctccataaaaaaataaggggtgtacttctccatttaaagaagacctaatttcataataaaagtgggggtgtacttctccatttaaagaagacctaatttcataataaaagtggggtgcttttataaataataacaattttaaaaataaaaaggggtgaacttagatatggggtgtacttatatatttttttgggtgtaaatataattcctcatattaaaatagtgatgagttagcgatacttcataaaaattattatattaaactatatgagactcaattgcaccaaatagcgaagcgatattgatatgtaggaggatgttagacacc

SEQ ID NO: 181304 - DNA, 581 bp, Cannabis indica
aacactgacttattattacaagacaaaaaactcagaggtatcggggggtcctgtagtttgaaaacgaacccattttctggaatccccaactgactaaaaattctcaaaaactttgaaagaaaacgacaaatcttaaatgtaaataaaaccccattcattcagctcaagttagcaaccattaccaaacctgacaccccttttaatgtaaaataatattttggtactaaaatatgatttaagtaatcacgggccccagaatttcttgtgattaaatactcacatgggtttcttgaatggagataaaaaatgtaatcaaagctcatgcaccaatctcaacaaaactatatacactatttaaatgaactcatgcactaccaactttgttaaaagacttatgttacatcagtaaaattaattatcgagtctcatataatatagtttggtaactattatagaatatcgttgtctattcgtaaggtgttgaataccaatgtttttaacagagaactaaaatgtactgtgattgggccataactagaaggaggaggttaaacccacccagataggctctagtttgactg

SEQ ID NO: 181305 - DNA, 1348 bp, Cannabis indica
cctgaatttttgacatcgtaccaaatcatcgcctcctgaactttttaaggccgtttaaaaaatacccatgaactattgagatcgttagatttaaggacttttgtcaaatttcattcaatttactatttcagtgttgtttatgtactaaatcatgctccccagactttgatatctaccaaatcgtgaccctcgaactttgacatgtactaaatcatgctttctgaattttcatccatgttagacttttttactaaaattggaaaaataatccttaaatccaacaatctcaatagttcaaggtgcaaaaatcctaattagccttaaattttattttattttattttattgcaatcagagatagtttctctactttcgagctaaataaattaagtaaaagcttgaagtttagtgtttatgtgaaataatgttgaaaagaaagtgggaagttaaaaagaagtataagatttctgctctactttaattgttcattaagatgattatgttgttttgaatatggatgggatacaaggaattcaccaactacaattatgcatatgttgtttgaatagtggaaaatataattcacaccaaaagaagtagattaacgtttgttgaaactttttattaaaaactaatattaattttatgaaaaaaaaatcctactaaaattgttataatgggcctttgaacactatagtccaaacagtttccaagttaaagacacattaaccttgggcctaagatggcatccttagtagactcataagtcgtaataatggattggtccattctcatatgggccaagtctatccagtacacttcaaaaaaaattgcaaaaatattgttgtatggagttttaaatatttttacagtttaattattttttctttataaattacagattattgatattttcatattattttgtagttattttcttattttttttaattatttgtatgttatctttatattgttttattattgtttctctattaagtctatgtttttttttgttatttttatgttttcttaataagacaatgtaaacttgtaaaaaaagctgtaaaattaaaaaatatatatataaaatgtaaaaaaacttatttagaccgtaaaaacattaaaattttgctaacaatagtactttagtgtcattttttatttatttagtcttttgaaaaaaagaggttaattgtcttttccttattcaaaatttgcggtccataacaaacactagctcatcattctaataagatgattaggtcccatataataataataataacaacaataataaaaaggctaaattgaacatgattattaattagtaattagtgtatgatga

SEQ ID NO: 181306 - DNA, 732 bp, Cannabis indica
atgaatggttactaaataaatttaactataaatattaattttaaaaatattaaatcatcaaattttgaatctaataacgaataataaaagagaaatttaaatttatgctaagttaactacttaattagaaaaaaaatatacactttttatactatatcaaaaatatgttcatataaaaatatttaagtgaaactcaacttttacttatcttttttttttttgccaaaaactttttttaatttttttttcaaccgatggaacaatctcagcccatatgatgtaaaagtgagagatttttctatttagatagaaaaattaagcataaaaactcaaaattttctaattttacccattaatgggtaatacccattaaaggtgcacccatatatatatatagaacagagaatattgattttgtcctaagatgggaacattttttaaatgcttgatcacatattcaatggttaaaatggtgtaagaacacaatagttataaaatgcttttactttttttttttttaaattacagttaattacaaaatttataggtttttaagaggaaattacaaattttacgggttattaaattttttatgtaaaaatatggctttttcttatgctgtttttttcaataagttaaggaatatttctttttcgtatccattaatcaaaaatatccttatattataattcattaaaatatacccatttttgtgagtcggttgcttaatat

SEQ ID NO: 181307 - DNA, 624 bp, Cannabis indica
tataaataaattataaaaataatcaaaaaaagatttattatgtttttttttgaaaagatcaaaaaaaaaaaaaaagaagatttattatttttactgaaaatgtattttttgtaaataaaaaagttcaaagaataaaaataatttttttccgtgttaatgtatttttgtatttttttttaaatttttggtctatataaattttttaaaattaattactaccaagtccaatatttaaaataagagcataaaaactaaataaatgattcacaagtcacaagtttccaattccaaccaccaaacttcatgtatttactttagaatttaagttataataaaagactattcatctaattaattaaacaattgactttgtgctctgcttgtagattaagataattgttccatatataaagcaagggttaatgagaataaagaatagaaaaatatggagaggtagaaaataattatgttgttaataaaacactataaaagtagtgtattgttatatttttagtcatattttttataaaaataaactttctaatagggcctataagaaatttagtataggctaaatttaacataaatacaacatgcttcaattttaacctacacaataaatgt

SEQ ID NO: 181308 - DNA, 521 bp, Cannabis indica
ggttacttttcggtttttagctgagcttgtattttttagctggtggatcttttaaggtatgaaatatttaagttaagactgtagtatagttaattttcgtataataacattgtatggtatgtttttcaaacttagatcaagtaatactagaagcaagtgaagtaattttcaatgatacataccatactgatttactgtgaaccaaagggtatgccattccatgtttatattttaatgagtgttagcagttcagaaggctcgggttctaaatgttgaagtttgggagttctttgaagtttaattagttagaaggcttcgatacactcgtatttctttgaagatgtgtctgcttgcatttagaagtgattctcttttttaatagaaaacattgtagtacatgttacctttcgtaaatggttgaaactataacttaacgaagtagcttaaggcactagatacccgtttattatgattactcagttttaattgttgagttcgataagttaagattatgatattaa

SEQ ID NO: 181309 - DNA, 778 bp, Cannabis indica
attttttttatcaaaatacaaacttcatcaatttgtttatgcctttgaatttcaagaaaagaatgaattaaaattttggagtgattgcacaagaattttagtttgaaagctcttaaatgtctccaaactccaaaaaaattacaaattttgagaaaatctattgcaataaaagagatcaaaaaaaggtttccaaaaaattcaccaaataacaaagccaaaagcagataaagtagagaatagaagaagaaaaagcaaatgttctgcaatgggtttgatgaagagtaagagacaaggaatttaaataaagtaaaatttgaaaaataaataaataaataaaatggcacaacaaaaaataggtaaccattattaaaaagaaaaataacagttagagtactttttttccattaacaaattaccactaatgaataccaaaaatacatattttatgttgaaatttaatggaaaattatgtaattatgtaacataatttgccatttatgttatattattttatgttatattcatatataacaaatatcttaccatagttttttttaataatttacatggttcaaaataaataatagcctgcataaaaaaataaagtaaaataaaaaacatatatgtaaaaatatttgaatcatatttttgacatcataatttgtaaattaacattttttttttaaaaaaaaattaaaataattataagatatctactataatacacaatatattatgaaatttgtgaaagtaccataaaataatgttaatacattta

SEQ ID NO: 181310 - DNA, 646 bp, Cannabis indica
atacgatagtgttcattattttatttacatcttgtttatttttagaaaattataaagaataagaaatggtctgtaacattcgtgcatgttttttatatgccaataattaattattttaaattttattttttatattataaattagtaaacaattcgcacttcgcgtacagttatattttgtttaataatatatattaaatttcaaaatttaatattttattttaacaatataagtaactattttactatttttttaattcaaaaatataaaaaaaaaattatcatacaatttcttatttaataaataaaagaaataaagatttattttcaaaaaaaaataaaatttgaagaacatttacacaaaattgaggtctaaaaaattaattaataaacctattaaaaaatgaccatatatatatgatctcaaaattgttgtatcattaatgtcttgtagtcgggactacgttaattcaaaatcgttgttataaccgtatcttgtcattatattcaaaattattattgtcatcattgtatttcactccactatttataaacggactacaagaatcatatttagattttattttttgacacaatatttttttaatacttttcatacgggtttttttacactatacacatatat

SEQ ID NO: 181311 - DNA, 761 bp, Cannabis indica
tttaatctagataattagatttgaaatatgaaaaataaaaatctaaaatcaaaattacacaaaaatttgaaattaatccatgaaaaaacatgaaaaaatgaagaggctgccagcagccgagaaacctcggggctgcaagcagcctcgtccaagcttggaggcccaccctttagaaaaaacggggcttcagaccgagaaaactcgaacaagcccatgtccaaggtgcacatgaccgagtaatcactcggatccgctcgcgtatggggtgacaccacccctatcttttttcaaaacttcaaaagatcataacgaattcaaataaaatcgaaattgagttctgtaaaaaagtgaattgcttaattttttccaaactatccaaaaaaataattccaaaaaaaaaattccaattttttttcatcaaacaatcataaaaaacacatagatccacatgaatcacatccaaatcacacatgtatcgttttaagtccaaatttcttgaaagtaaatcaattaccttgcctctgaggccagttattggaattattttaccaggatctagatttactaacaagtatgttattaacatcttaaacatgaacttctaaaacgatatgaaataaacacatataaagtttcagaaaccttacagtggtggcaacggaatataatgtctccttccactcaaatctctaacccttgtatcttttctgtagcagggtatcaccaagatctgagcccaaatctccttctcttgaaactgg

SEQ ID NO: 181312 - DNA, 639 bp, Cannabis indica
ttttttttttacattttttacagaattctatatataaactcatattgcaactagcactgcaacctaaatcgcaataaaaaaattgtatagcaatccacatagaaaaatacctagaaaaccactctagaaacccaaactagaaaatttagaaaaaaaaaaaaagttaaaaaattaatatataaagtaattctcttaatttttattaattaaaatatttttaacattttatttattcatttaaagtatttttcaacacataattccaataaaaatttaatgattatgttaactttaaaagttaatttgcatattgagcattgaagcagaattataaaatttgaatcaaatataacattaaactattttttgagctatatatatcttataaaatttccaccatggtcttatcaaatataagacccatgatcttatctatctatatctatttttttttttttttgaataatgatgaattttattaaatcaaatcattcaaaatcaaagatgcaattaccataggtaaagcatccccaaacaaagtacaaccagcctcagaaagagaagatcgtgcaagacatgcgcaacctattagcagatcgtttaagaaaattgaaagaaacactgacaatacccgaacac

SEQ ID NO: 181313 - DNA, 629 bp, Cannabis indica
tttttaattccttatttaatcaagttctctatattttaattttaataaagtaagtaaataaatgtaaaaaaaaaaataattaatttactattaattttcattacttattagtaaacatggtagtttttctatagagagaaaaattggatagattgtcttaggtatcataaactttggacagtttttgtctcaaatatagccggcaaagtgatctttttaaattagtttttcctgttcaataaattttgtcaaactggaaaaaaaaaatactcatatatattatgtatatatattttgtgaaattggaaaagaaaaaaaatatggcatagaaggaatttgttttaaatctttttttttttttttatttttgtctattgaaacaaaatttaatgatttaatattttcaaaattaatatttatagtaaccatcaataaataatgttacatatatatgtatctgaaaaacaaaaattattagtatagtaacaatgtggtttgttatttagtttctaaatataaaagcataaataatgatagtttcatttgcatcccataccattataaaatataaaagtaatactcttattattattttttatatgacctatatattaatttattttatatct

SEQ ID NO: 181314 - DNA, 644 bp, Cannabis indica
tgtgtggtcccttcgtcttcttcctcttcttccctaatcccaattctttttgttattcaaatttcaaaacaatatttataatttttgaataatattttttaggctcagtcgtgagtcgtgagtcgtgactaactatctgtagatgatgctcttgtcacataaattttacaggtataatttaaattgaaattttcttttttttttaaaaaaaataataaaataaaattttaaaaaaattcaacaatcaataaaaaattgtataattatatagagccattcttttttgaaaaatttaatgccttttaatcccacattttttttaagtaaaaagttggcaattcttaggctatatatagagccatttgcagtaagttttaattatataaaaaaaatgttctttaataacaagtttataataaaataactaaaaaatttagatagattttaatcctatatcttttttgaagtaaaaattgtataagtgtattatctttattaataaaatattaaattatatatgtaatattagtatggcaataacatatcaattatatgttttttttgtaaattcaagcgtaggattatattataataagcaagctagacctcatggtcgttacgtataaaatagtttgtcaggtaca

SEQ ID NO: 181315 - DNA, 849 bp, Cannabis indica
tattattttatctacacttaaaaaaaccgctcttatttcaatttccacattctctcattctctctattctcttttccatgaaagaccacttaaacttaccatagtgcacagctcacgactgcgctccgctcaccaccacacacctctcattttcttgctctaacagatctacacattgatatttgtatttcgttgattgtttgctcgaaaattaaattttgaatttcttgcatttttttgtttttcttttctataattttctagttttttttatgatatttagcgatatatttgcaatgatagaccaaacatgaggttagtgatgaagtttaatgatgttttacgtatttagtgatgtttagcgatgtatttgcgatatgagacaaagtatgttgctaaacatcgctaatcatcgtaaaaatttgaatgtgatttagctacatttaacaatatgttttagcgatattgtaatttagcgatatttaacgacatcgtgaaaacaaaaaaaatgtagaaaacgagcgatgggttgaggactctagtgatgggttgggatttcgggagtttgagggtggttgagctcgtgaatttcggggcttctcggtgaaaacactaagacttagcaagctagagtgagagagttagagagaaagagagacttttattttgaaatgtaaagatatttttgggagaacaatatataaaagtatatagatattttatttctaattatgtggtatatttaaaaacactatatttttgtatttatgcatgctaagccaaatttccctgtaaccgatttaagtttcaggtgtgttgagaatcgtggggttccatctcaaaatcaat

SEQ ID NO: 181316 - DNA, 553 bp, Cannabis indica
actattgtaagaaactaagccataccaagtttgagtgtaataagttattgtttaaaaaatcagcaaaaacactatgctaatgttgcaagcactagtggtgcatttgacaaatcgatcgttatatctatggatgaatttgccaagttctcaaggtgctaggaatcactcaagtcttcatctcctcctgtcattacaattgttattacaattgttgattcaagtaaatctaatgcatgtcttctttccacatctaaaaacgagtcattgattctggtgccacaaatcacatgataagtaatttccagtctcttgtcgactctctagtcttatagtcccacttcttctattaccttagctgatggatcaccattttcaatttttaaatctagtattgttactcctacacctttgcttactttgtcaacagtcttacattttacctaatttatcctttaatttctttctgttagtcaactcactcgtaatttgaattgttgtatctcttctttcccggttcattattaatttcaggtatctatgacgaaaaaagatt

SEQ ID NO: 181317 - DNA, 508 bp, Cannabis indica
aaaaaaaaatatatattttaaatgttgcaccctaaacattgagcaactttgacgcaaatgtctcttataactaaatgagaaatatgaagtatataatttgtgatttaatttgccttctcttatttggtgcttcacaaactgatccttttcaagcagacatgattaaggtactatttcttacttacacatttcattttagtgttagatgcatttttgtcaaattgatgctagctggttgataattagaagttataatttgttaattataattgttgatctgatttgtttaatctcttttttctccagataaacttggtaaggagaatatataggtgtgccattaggataaaaaaaacgcatgcaagtctcatgtagcatggcaattggatttctctttcgctgtttcttaactgatgttatcaacggattaccatacaggagtgattgataaaaaaaaatgaaaaaaaaaaaaaaaaaaaaaaaaaaaaaaaaaacaaaaaaactaagt

SEQ ID NO: 181318 - DNA, 555 bp, Cannabis indica
gtgggtgtgcggtagggctggaggaccgaatgttttgaactttgccaagagattttgtgcaatagtgcacttggtactgcatgggtgcagttggctttcgagcctcgttcaggtgggacacatcaaattttaccctgcgataggagtgctcaattttcataaggaggatgatgtgccgtggaggttgcgtgtgaagtttctagagggacttggcttcagtggaagtgtattttggaggtgtcgttgggtacggttggtttgcgaatgtaaagaccgcttagtttaatttggaaattagcagttaattaagatttaattatgaaattatttatagatatttaaataattattaatgttgttatatttaaattctgaatgcattttatgtcatatagtgaaaattcataattttacattttcggtgcccggcaacatggaactcggtgtttggcttagtagaatcacaacttagcatgttagtatattgggaaaatttattagacattgggaatgtcgggattggtcgggaatttagaatttcccaaaatacccttt

SEQ ID NO: 181319 - DNA, 759 bp, Cannabis indica
cgtcatccaatcgattcaacatccattggatgttggattgaatcggttttacccattggatgtgtttcttatatatttatttgttaaatttgggtttatataatattttagacctagtattttttggatcagatcggatccatccaatattttagatccagtatgtattggattgaactgtattcaatctaataagaaaaaagtaaaattttaatgttaatttttatatatacatatagatttgacgtataacaatataaaatttaattactcatccaaactaaatgaaaatactaattagttcgattggatgttggatgtattggatttttagacagcccatccaccatcccatccgatcacaattggatatccaatgtttggcaatcggttgtaattagatcggtcggttctcattggattggatcgatttatgcacacccctagcgaaatccaatatttgctaaatcaaaaaaataaataatctgataggttcagaattgatctcttaacacaagtgacctcactctctactttaaaaaaaagaaaaagtaacaataattcattgtttatgtagcatttatttgtatcttagattttagataaaatgacatcaaaaaatttaaaatggtgaagcaaggacaaaagcatgcaagtgaagtatgaaatgtatcataaaatcaaatgaatttaaaatatatttttgtaaaattaaaaataaaaaaccctattgtacaaaaaaaaaaagatattttctaa

SEQ ID NO: 181320 - DNA, 646 bp, Cannabis indica
ttaaaaatcattaaagggcaattcaagcatttcattccatatacacattgagatattcccaaataaattatggtatgcataatcacgcaatgcactaattttgaaccctaaacccagttcgagcccaaaatatccgattgtaactataccgtgccaacttatcaaaatcacatgcagtaagataatatgaacatgctatatataataatatagtctattagcataatatacatcaaaattataattacgaaaatggccctaactcataaatagggtcttataaaagatagttctcaaaaaattttatataattaattatataataatatgactactcaattatagttaatttattttaattagggctgctaatctattttactagtctccagatattacacgttgctcaatacttcattgatcatcaaatcgtaccgattataattcttacgccacaataacgctaataagcattttctctatactaaactttagcaatcaaacacacatttctaccatgctttttaacttggcatataatcataatataccatactttctaatcatattctaaataatcatataacaataatcacataacagtagaaaataatactactatactatgagtcgagcttgtcttcac

SEQ ID NO: 181321 - DNA, 850 bp, Cannabis indica
aagggttattaagctcatttcgaaaagccttatttcaaaagagttcccatgctttctctggaggaaggggttgtaaattatggatatgaacattcgatgatgttttgcaaaaattagcaactttcacatttcttgttgtaataactactctctcatttctttcattttcatcagataaagcattttgcatgtcaccccaaaaaagattgttccaaacattatcaaagacgactagataactttttccatgtaaataatctcataattttgtggtcatagtagtttcatctgctgcatcaatttcatcaggaagtaagaatttttacgaggatcataccagtcatttactgatgtagattcttctttgagtgtggatacaaaaccaaaatcttcactttttttatttatatcccgaattttttgtttaatatctcgtattttaaaggtgatgtcatggcgttcttttagttttataaccagacaagcatttcttcgcaaaaatccgataactttatgcttgtgtaacgaccttgttgttgtgccacgagttgtgtgtactcgtcaataatatcttctacttcaaatgctgctctccttagttttcgaacccacattttaacaccattgctattgtcaatgctatgatgtgtttgggctcttacatcagcgtctttgaggaaagtcataatgtagtctagatcacatttgatacttctatgtcattaatatagcacaacccacttaaacaagtatgcttcttcagctagtaatggaatcttgtctatgacaaaaccaatacagtttatgccatctgtattaggtatctagtaatgcactcgacttctttagc

SEQ ID NO: 181322 - DNA, 744 bp, Cannabis indica
gtcactaacattactagacaatatgttatccaacaaaatcacttttataaaatattcaaataatttatagtgctaaaaataaaattttaaaaaaacatatatttatcacgcatgtaacaaatacagtaaaacaagtaacaaaatattaaaattttattttcaataacataaattatttaaaaatttctaaaaatataatataatcctaaataactatgaagaaaactcccttaaatgcaaatacaaatagagccaaagcaatcctatagtaatacccctaagtttgaatagtcaactacatttaataaatgtgcaacttattattttattttatttaaaaaaaacatatagacaaaaataattaagagtttaatacaatatgaaacatatctacctaaatttatttgtcatctacccaaatgtaaaattgtaaatacgtgtgtattatactagctcgatttatattttaatactttttaaatatagatcgtattatttcaggtcataaaaaaaaataaatcgtgttatgtcgtactataaaaaaatatgtaccatatcatgtcgtgctataaaaaaaatataacttatatcgtacaacaattttataaggtaggtccaacatggcccgcaagtttagtaatttcgtatcgtatcgttcttagatttgtgtagtgctttattcaagtcgatccatttttctaaaatagaccaacttatttttttattacgtgctcaaattcgtgc

SEQ ID NO: 181323 - DNA, 1176 bp, Cannabis indica
tttgatgagatgatttattggattgctcattgtacctattaaaaatgatgaaaatataattaatcataaaaaaacttacaaaactgcgatttttaaatgatttgataccttaaaaatgataataaatttctaatacagaaaacaatctaataagcaataagtattcttcaaattcatgaaaagtttgctgtaatattccaaacttaataacaaacttgttatgttgtgaaatataaacataaaaagtggagagagcaatgtgataccttgaacaatttatgaaattgttcagctttgtttctaccttttcgatccaaagttcgaaaatcagaacacataccgctgcaatagcaaaaaataaaaagtcattggaaatcggaaaagaatgaagagaatcattcaaaataatttatcaacctttatcaagaccataaatggtaataacattcaactatatatatggtagtatgtatatatatgcatgaatataagaacaaataaatgagtatgatttcccaataagtttcaagaaagaaacaagttaagaaataaatgggtatagagattgaaagttgagaacaaacccttccatatctaatattttcatccccatcccaacaacttcggctttggtgagctttgggtatttgggtgtgtttttctaaattgtatttaacatgtagtaaaaagaagataatagttaggttaatctactatttttaaataacatgtggagttattaaaagtggttggtaaaaagaaaactaatatataggtggtaactatgcaactaaattagtgcaactgtaaaaaaaaaaaaggggaatttataatttgatagacattatagtactataatgtaatatgtgcaaaaaaaaaaatatttacaatttatcatacattttattaactatgaaaaatatattcttaatttttatgtaaaactatatatggtaaaaataaataataaacatacatattttatttaaaaatttgtatttaaattttaataaacacattatattaacatattatcacatacttggtaaaaaaaaacatatcatcacaaacattatcataacaaatatattagattaataattaataaacattatcaaaaataatataaacattgggtttatacataaggttacatttaattacaatttcatttat

SEQ ID NO: 181324 - DNA, 838 bp, Cannabis indica
aaaaaaattattctttcatttattttttctagttctatatgtgaaaaaattcagttgatttgtctaattgtaaccaaaattaattgtgattattaaaggataattgattatatatacctttttttgtttgaatggtggataatgatcatttgattattttctttcttgctcagaaatatttttatttagtgtgccttctttagtttatcgaatgctttaatgaatttatgtcaagcacatataagaggggtacgtagttgcaattgggccagattaattaataagttttatagaaaattgataatcaataatcacagcacgtggcacatcaggatatgatgttatattatgtcgatcctgtaaattttttgagctcattaaaaattaataatgttggaactattcacaataatattataaaataatagtgattttgttagattttaattattactatatatattgacacatctgcctgatctgtggaccaaggaagcttgatgtgtggtatgccatggctaaaaattaagtagccgtagtcatgagatggacaaattggactgcaccgatcgacactgagaagagaagagaaactgcctaaattggactacacctcctgcatgcatgtaactgtaaaattaatgccatttttttcatctaatttattttactattatttatttatttatttcaaaagttaagtaaaagcattatttatattgttaaagaaaataggtattttcacttacattttaaaatctcattaagtttcttattttgtcacattttacaaatatattccattatttctatattttagtgatatatttttttaaag

SEQ ID NO: 181325 - DNA, 538 bp, Cannabis indica
attaatttaagtttttttttaaaaaaaagtaatagaaattatgggagtaactctttagtgacccaccatattttagtgacactcatggtagaatactaacaattgaatttttagagtctttttgtgtgtgtcactaaaacttatccctaaccctttagtgacatgcacttttgtgcgggtcactaaatagtgtcactaaaactcaattttgttcggattttccaacctactttttcttgggcttttgccagggcatatttgcaacaataaatgtgttatttttctagaaaagaatattcctacgagagaattaccctgccaaaatattagaacttttattggcacaaaagtaaacaaatcatgaaaaaaatgcaccaaaaggcagttagttttctcaattttatcgagaaaattcacaaattgcaccagcaagattacttttatagacacaattgtgcaccaataaaagttatagcctaattaattggccctttcaagccactccttttgctggtgcatttggccaaatgcgctggca

SEQ ID NO: 181326 - DNA, 536 bp, Cannabis indica
tttttaaaagcaatgaatacatcattgacttctttgatcatttgggcatgctcttagttaattgttcttttagagcatctccaatagttaaaatttaaaagatgcttgcttatgtggattgcttattttgcaaaatataaggatattatatcattatcgataaataaatgctattatagaaaattatattgatgccactatataacattgatgctatctcttttaaaaaaaattaaaggtaaataactagtgtgatcatatttataattaaaataaataatatattaaataataatatgtaatattataattatagaatttttgaaggatgttatactattggagtagttttagaattaagagtgtaaaaaataatgtaaaaaaaaatatattaaatttttagatgatataaaattttttaacacttttaaaaattcattataaatatatatatataaaaaaaagcatttgtttttgacaaattaaaaacaaacattcgaagaattaaaatttctaatatgtcttactattataaa

SEQ ID NO: 181327 - DNA, 752 bp, Cannabis indica
cttcttatgtttcgcccactgctacttacttcttttgataacagttacacatccagttttgtccatgttttttgactaagttattagcatacctaagctatatgttatccacagtagaccatatgttaatttgtcaaatctttctctaataatattataaatggttttcatcagtgaacattattcagctgcttagatttggagagtactccttatgttaaccttttacatattttacttgattactattgtaattaagtatatatataatgctacttacttcttttgattacagttatgcatccgatatacataagctatatgttatccacagcaaaccataaattaggccacacttagttcacaaattaatatgtgaactcacattattcagctgcttagactgagtatatataattttatgttactctgcacttccgcaaacctttcccatattttacttgattacttttgcaattaagtatacatatttatagttcctaatgtagatcattatgtttgtctctgtttttcagttggaaaaacagacgacagttcaagctactggggtggcttctagcttggttgagaccatacagggttcaggctttaaactacaaacattgaatttaagtttcgacgaggaagaaagtctcgctgctgtgtagatcatgtttcacgaaaagtcctctcgcaatttaaggttcgaacaatatgaatgaacaagaaaaagtataattttgttactaaag

SEQ ID NO: 181328 - DNA, 617 bp, Cannabis indica
aaataatatgtcattgctaaccaaatatagaagagaaaggtttccgtgtgatgtgtaaaattgctagtgtaatttaatatcgaatttcacatattttacttttgtaatgattacaaagaaccattaattaattatagagtgtcactattttataatagtactagataccttgatgcctcataacaatgcagagttatatcggtataatattatgcaattagaatgttattatattttctaatatcagtagggcctgtaattttaccgcatataatgtggctaagtcccacaagaggtttgaggttatcccgttatctactatctcgataaacatattatgtactgaccgtgaggtctaacaagttctatttatcaaaatacgctttttttaaaaaaaaaaacactatgtatatatgcacattaaacacattatgatattactagtactaccacccaactaccttgcataaattatttgaataagaccacgtgaaccataatccatgccccatatattagacaataatgtactccaacaactcttttgtttttttacacctttattatctattttttcttacaataattttgaattataatctaaaattttgaattat

SEQ ID NO: 181329 - DNA, 702 bp, Cannabis indica
ataaggtctttcttagtttttagattatcttgaaacacatgtaaatctataaatctaagtttaaaacaggtcgtagctaaaattatttggttatgtcgttatttaatcctgaataaaattcttttactccttattcttcccactcaacagtagatctttggtatgagtatattaagagttagtcccacattgctaatgtgtggaaataaattgtgatatataagatgaaagggctactcctcccattgccaattggttttgggatggaacctcattcatcttatcctcaaattctaacagagtatgccaaattatatttaatacctcttactattgatctcttttaagagttacttttattgtttatcgtcatacttggaatggtatcaactattccatacaaaaactataatcctggagatcaaatgatttccttagggtttaccattaaaattactttttagtcattttacaaagtaatatgcatatagaaaagaatgttttgatctcttctctaatatgatgattctaatttaacattgcttcaaatgtttaaatatcatctataagaaataatcaaacacactgtatagtcttttatgtaaaaataaatttactcaagtcatttacttatcttggaaatatatttatcttgcaacctttaagccttaaggtctactcatgtaaatgttagtaccatag

SEQ ID NO: 181330 - DNA, 551 bp, Cannabis indica
aactcattaattacgtgagtatcagagtatatttgtaacccgctgactgtaaggtcttaggcgaggaatcaatgtacaaactgacacttagtatattaatgagaaaccatatgtcactgaatacgaatagcgagacatcaagaatagaacacatttgaaggtggaagcgacatatatcaattgcgaaagtccttagaatacaaactaagtacaacggtcgttccggctcaaaaccaagcgaggtgcccgtctctctatgggaagatttcttatagattcatctagttagggttagcgaggcctaaaatcttggcgagcctcaagataacattcaaatgagcctcgaagaactctttaagaaccgtggtcgttacaagacatgcatcaacgaccccagaagaaaaatgggcccaactcactattgaaattactagaaccaagcttctgtcgagacatctccagaaacaataattaaagacatgatttaagacctgatcattttgacctagtaaaagcgggaaaatcacatctatacaattttcaaatcataa

SEQ ID NO: 181331 - DNA, 659 bp, Cannabis indica
agtccatgtcttcaaaattaattgacttgtatgatttctaatatgatagaattctagtatgcaccgattttgacttgttggaatacatattcttaatgaaattcacacaagttctaaataaagttagtaaaatcaagtgtaatgaagatccccaccatttactaacatttattctatttatggagatatgttccataatttttggtgctataatgtagaagaattcttattaataacacatttcttattgtcagattgaacttgcatatctttatgagtgacatcatttgtagtaaagacctctaaatgtgtctaaatcaagtttcaatagaatcttggaacataaaggtctttgccaattttaaaacaaagccactactatattgcttgttccttaaacttctaaatgtgagaacttatcttgtctgtggataagatttgctcacagttactgactttcttaggtttatttgtaaaccttgcaagaaattatgaatgtggaataacaatctaaaataatccactatgtgttaataatcacattaactatattagaatgaattcatacacaataaattaaaatttattggtgataataaagtgtgatttatttttcttaattatacagtaaaaactgtatatgctagatgaagttatac

SEQ ID NO: 181332 - DNA, 803 bp, Cannabis indica
tacttctgtttctttattgatatttaaaagataaagattacattgttatggagttttatttagggcataaaacccaacacttgatcctgcatacagaatttgaaatagaagtggaaatgatagtcatttaatgttaatgtacttcgaaaccataaaactgccaaaatcataggacatgcattttttcaaaagggactatgacaaatataccctttgtattcattaaaaagtactttttattcaaaagaactttttaaggggcaattgttatacccaaaatttggctagcacttcagaggaggacacatgtcaaattaggaagaatacgaattaccaaatgtaattatgttagaaaatagaataactcgttaaatgcgtaattagtagagtatatttacaacttgttaactgtaaggtcttacacgagataaagatatacaaactgttgactcacgcattgacgagaaaccatacgacatcagatgtgcaaagcgaggcatcaacctcgccacgcaggaggagatgtaggcaagacatgagccggacatgatggttgttaaagacacttggcgtataatacacgggtaaacccaaaactaatagtgaggaaatcatcttgctataggaaggcatgctcatggtaccttcactaatcagctccagacatctttcaatgagattcacagttttgtcgagtcagttccctcagatagaagctgacattcaaatgatgttgatttttaaagttcaccttgtcaccaagaactgcgattttcagatggagcattatgtcttcaagcgca

SEQ ID NO: 181333 - DNA, 504 bp, Cannabis indica
acaacgaatgggatcataccttagttagacaatggtttaactatgatgactccagaaggatcctaatcatctcacttccaaacaaccagtcgaaggattcctggctctagttgccagagtcgaatggtgatttctctataaagtcagcctacagactgtccttgaatattgatataaataggcctgaatatgctaaatggagaactatttggggtgcgaggattcacaaccgccttaagatgatatggtggaaaatactgtctaatagtcttctcaccagagctagacttggtatggtattcgacatggacaatgttctctgtcctctctgcaacatggatgaagaaaattcactccacttgctctggagctatgaatttgggagagctttatggtttggctgttgtggcaagtgcgtactaatattctcaccgctacaagctgggaagattggttgatgtggttctcagatgaagacaaacgtccaaatcgaatgcacttaca

SEQ ID NO: 181334 - DNA, 552 bp, Cannabis indica
gaaaaaacagagagagagagagatactgttatcatatgtagatgaacatgacatgaaatgaattttctttattaattgaagaaaaacagagagatactgatatcatattttatatacgtacaattgtttcagtgcataaccaaactgctactatacctagtattactgtcctccaatcaacatcacctaacatattcgccacccactatgcacaatacaccacactaggaaatctcactctgacacaaatctaacataatgaaactcatttccttcaactccaaaatggcccttttcatcataatacttaaatctattctataattgttgatttcagttgtatagaatatagatacttcatgctttattttatgtacttaagttcaaaataaatgtatttgaataggtttccaatcaaaggatagttacataaaactaaacacaaagtatacctaaacacataaaatcaagctgaaaagcacataaccaaatttgccccgaagagttgaaaatccaaaagcattaatgcttttagaccgtgaaaaaaaaata

SEQ ID NO: 181335 - DNA, 682 bp, Cannabis indica
gcgacaatcgagaggctagcaatcttataatgctgttcaactagagaattgatagaagaggccaggatctccgtagagatccacttgaaggagaccttaacctagattctcagaaactaggacagatcaaacagcaacacaattggccgaccagggatctctagctcaacaaccacccccactctatagccaacggctagccagccatcaataggagcacacatggctatccagagtacagcacgtcctccccaaggggagcgaggtgcccacacgtcgatttttaacccaaaggacttggagtgggtggaaacaccaaaacgataattcaaggagtgaaaccgatcgctttagacatctatgtccactaaactccagtattggtgtgatcttccacctatcaggatgaagccaacaccagttaactgcagtgtcatgggcggcaagagcctgccctttgtaggtctggccagccatggaggagcaatgggcagccagaccctgcctagtgcaggtctggtcggccaagcacaacatccaggtgtaggcttggcgagcctaggcaaccttccgtacctgggaatgacttgctagggtcttcagttcaacatgggtctggccaaccatcaccatacactcttccaaggtatggccagccagcccttatctctctagaatctac

SEQ ID NO: 181336 - DNA, 533 bp, Cannabis indica
atgacgctctagaaatcacaattcactactacccctccaaccagcagggtaaaagaaagaaaaaatattaaaaagagaaaagaaagaatagaaaaatggcgcaataggcgaacactgttttgagacacagaatggcagaaatttggcgtaataagaagaaaaagaaagagagagagagagagagagagagagagaaagtaaaaagtaattagaattacaatgtgattcagctgcttctctctccaataaaaagacacataataaattatcgccgcctttgtctttaatcatcctgatccgctgagatttggagggttttgctgtgtgagcgcgaatctcgatgaaccattccctctctctctctctatctatctctaattgacgatatctgagtcggtgttgtctctgacgtagttcgtccttcttcttcctctctctgaattactttcaaggtaaattaatgagagaagagaaagcaaaggtaagtagagatagagagagaagtagtgtgtagtgtgttactactcgtgtta

SEQ ID NO: 181337 - DNA, 610 bp, Cannabis indica
ttcaattaatgacaaacgtaaattcatgcttagaaacaaattaaaaggtaggaaatacgaacacgaaagaaacacaattacactacacgaaaacgccaacactttctcaaccataagatacactgaagaacaagataatcaccttcaactagcaactttttttaaaaatctagaaccaaaaaaatcgtataataaataaattgcttatattatcagatcaaaattttggttcacaaccactgcgctagaaaaatcgcctgtaagctgtgctatcatcttttataggaacatttataaataaacaaaagacaaactaattcatcaacctactgaataaatacaatgcccactaggcatcctcaaccttgtctaccatatcatttgaggttcgtgcagcatgtttggtttcatagtcagaaccggtccatagtttccgagaagaaaatatcggaagagaaatcaccccctaatccagcttgagctcaatcattgtcgacaccttctaagagctaaaaaaaaggaaactgacaagggcttgatgaaataagagggcattcataattacacttgaagacactcacattgccccgaccccaagaaaccatatatg

SEQ ID NO: 181338 - DNA, 647 bp, Cannabis indica
atgtacattatgtgtcttattatctagacaatattaaaaagaaatataaaccgatcaccttggttgttcgataaaattcttctatttttcccttagtattggaaacgaaactatttaattaatgtataatttccgtagcaaggaaaacatcatttcaaaatatatatatggtgataaatgtacgtgttcttttatatctcttattagaaaagtacactatatatatatatatagaaatttgactcttgtaagtcttgtttgaaatacagtacttcaccatttatatgtatattggctggtaattggattacactcatattttcatttttattttttattttcaagtataagttatatatgatttcgccatatataataataagcttaacattttttttctttttctaagaatgagcttactaaaacgaattactttattagcaaggaagctacatttttattgtctaggtctcaggacattgttatacaacaaaaatagatttgcgatgtttgaatccacacttaatgtttattgtttgtttttaaattaatatgtatatgagagcttgtttataattatctatcgtcttttataattactactgttttgtgaagattacatgggatatataacagtggagtgcgct

SEQ ID NO: 181339 - DNA, 555 bp, Cannabis indica
atgctatgaaaaaggactttagcttccatttcatcaagacgaaattaatcttgtactggctttgaaagagcagcgatgacatggtcattatgagatctaataatcgtcccaatacctagtactttttatgcagagtttaaggcatcatctatatttagtttaaggcatatgttatttggaggtttccatggcgattcctctgtcctactactggaggttgttgttgttgtatgcacaggagcaaaattaatcacagactttcctttttggttcatgttagaaacagaatgaaactttgctatgtaattcatagcatgagtataaaaatacgggctccatcagttctatttccaccatgaaagaccttgtttctttccgtccaaatcgcccacatgacacagatgataaagttcaaaatttaaattttggaaatgtaaatgttgaaaagatggattatgtaaatcaccattatatatttgttgagctttttgataaatcaataatgaaggttgaaatttttccaatatgactttgcttgtgagtagacagaaaaag

SEQ ID NO: 181340 - DNA, 1236 bp, Cannabis indica
atgagacccacactacaggacgtgccatattaaactgcttccaaattctgttaatttgcgagagttacgaaggattggtcagagagggtccacctagatggtagatggaattgtctatttctctctgcgagtggactcgaccctgggaagagatgaagggacaggcgaagcatggcgcattactcgaggttaagtcattgtatacacatttaatgcggcatgggaaagaacatcctacacattactttgaaaaagacgtgttcaagggtttaaacctataattccatgatttcacgatacatcatttgatggctacattatgagctatcaaatcataagcaaaagacaagtctagtctcaccaaacgcctatagcaaacctatgcacaccataaaaacgtaggtgatcatgctctatgatcaaatctagaaaattgtgcaaagcatgacccatacaaacacgataatggtagacttttaccacaattactgagcctataaataccttaaatgatgtatagaagaggggagactgggaaattctctgtaaagaaacactcgttaataataatgactcgtggattatggcttcattactgccccaaccacataaaaaattcccatctataatttcttccaatcattacaaacgactctaattaatagttaccgaaaatcttggtcaacaatgacaacacgaattttttcatttttactatttgaacttttttatctataaaatacatcttcattttttcttaccaatttaaattaattttaaattaaacattagccacttcttacaccatctccaatgcaatatgtgaattttatgtaaaatatggcacaaaatataaatttatgctatatttagtctactatttacaattatgtgttagaattatttatttgtggactaatataataccataatcacaatcattaactatgtgcccaatatttattcactaccataatgggatggttaataattaataaatgtattagaggcacatgggagcacctaaaactataattggcccattaaattatagtccaccactaattatactcattaccccaataagcctaatataaccccttagggttaagtattgtatataaaaagggtaatatgtgtttagtatgagttaagagagggtgtgtggtgaaaagaaaagggtttaggctctcataggttctctctaccaactttggtgttcattctcattgaagg

SEQ ID NO: 181341 - DNA, 510 bp, Cannabis indica
atgtacatcatcattaattgaataacggaaattttaaatatatattttttatgtttattatgttaggattcttcaactctatatatgttactacaatattgaagatactgtttttttttttcatttttaataatatatgtatgatgaagttctatatattattattttctaagttgtgtaaaaaatattttacaagtaaaaaattaaagttagtaaatagtctacatatattttaaaaatatatcaaaatataaataaaatataatatagtttgatgattaatatcactaataaatacaaccgcacgcgaagcgcggttgttcctagtatatatataaggagaagtattaggcggtgatgtggcaccctaattacttaaagctaattttctcttctctcctaatctctatttttaactttaattctataaaaatacaaaatatctccataaactcaaattatattaattataatataatataaccctaaacctatatatctatctatata

SEQ ID NO: 181342 - DNA, 596 bp, Cannabis indica
tttcatactgcagtatactatgttaagttttcactagtgttctactggtattttgtagttgttctactgttgctttgagttgttctgctttgtgttttactggtgttttataaaaacatagtattttgaaagtttttcgtgtgacagtactttgtaaaagttaatctaaattacagtatttttgtaaattttccctcaaaaaacgattgtaaatttgtcttttaggatggttactgggtcggctactacagtaccactgttgctaatcgacaatatgggtttgggctggttgagagaagaatgtgaaattgcactacacccattttttaactaaaacatccctttagcagagtgtaatataggcttgccctaattattttaataataatatataattttattaatatgatatatatatttttaataatatcattttatttttaattattgtgggtatataattttattctataaaatatatcttttgtatactatatatttaatttgttacattagccattttgttaaacttaaaaaataattaaaaaacgaaacatatttatccaattaatctatgtatttctagctcatttaaa

SEQ ID NO: 181343 - DNA, 519 bp, Cannabis indica
aaatctccattattctgatttacctttagctgtgaatcactgaaaacaaaaatctcgtatagtttcaattcccgtgccgcccgaaggccgttgagcactgcctcatactcagcctcattatttgaggcactaaaccctacactgccttctccaatcgatcatttgtcggagtcaccaatacgactcctactccggaccaatttacgttcgccgacccatcgacgaagagtctccagcctgactcgggactccatgggttgggatcaccatcacatgggagggtatctttctcgtctggctcggcatcccaggtcgggtcgtcaactgagcgagaaaatccgctactacttgtcctttcccggcagttcttggctcgaaggcgatgtcaaattcccctaactgcacggccctttttcgtcatttctccgcgacttttctagaccgctgcaataacctccacggagggggtagttcggcgaagaccctcgatccgactgtgcctcgaaaatagcggcgttc

SEQ ID NO: 181344 - DNA, 974 bp, Cannabis indica
ctgaactttgatacctaccaaatcgtgcccttaaaatttatatcaaacacacgttagtaaaattgaaaagaaatccttaaatctaataatctcaataatttaggagaaatttttaaagattttaaaaaattaagagaagaaatatgacaaattctagttggccttactaaataaaaaaaaccataaattagacaaaaagcaagaaacaaattaaaccaaagaggataataacacctcgatttggacgaatgcaccaccatgaacaccactatcacaaaaatgattggaataaaacttaagtgtaaaagtctacagtagatcaagtctgtgtttgggtctggttccgagtctatagtctaagattagatttgggtttggttcccagctgcattcgggtcaaggatccaggatctaaagtggggattgagtttgagttggattgaaatcgagtcgtgaggagtactaatctaaaatagattttaaaaaattatgtttggttctcttttttaaaataaaaaataatgtaaacacaccttagtaaattattaaatttaatttttaacggtaataataattatgttatatttttaaaatttttgttaggtacttagctatgtcaagttaaattctacttattattttttttattggtatatttaaataaatttttaaataaaaaataaaaaactaataagctaaactaattgtcatgtggtaattaattttacaccaaaaaatataaattaagtaatttattcttaaattaaagccgattgataacacttttttaatcagttttctgtttttaaaagtgaaaaagtgaaaatatttttcaaaaacatgttctataaaactgtttttacttttcaattatataattagaaatcaaaattttaaaaaacaaaaaaaaatacaactttcaatattttttaaactagttatttttctttaatctaatcttttggtattactaa

SEQ ID NO: 181345 - DNA, 727 bp, Cannabis indica
tgaatagacacaacatgcaaggcttattacttgcacgtcattcaaccagtacaatgaagggactcccaccccctaacccctcacattggtaaggtgaataaccctcatttgtactcattttgtccaggactacaagttgccaattggcatattagtcaaattgagtgatatgcaaattctacaatcaaacagtcctaaaattctcctctataaaatgatgcacttttcttcccccttcctcgtctattgtatatatagaaaactttccactcaaggactctcttggcgatagagaagctcctccccatgtttcttattaattctttggttgcacttggttctgtccttgagatacttagccaaggtacctcttaaggtacattttacgactcatcacacctaatgacttagcatttgccatctctaagactcaagcatagctaattgaccgatgaataatgaaagttttcaccaatatgtttgattttttaaatagatgaataaaaacaaattaaaaatagaagtgtactaaaagcaattatgaacctaaaaattatcaaagaaaacttcaaaaattagttatttaaattttaaataagtaccttgtaaatatatacacataaacgagtggagaattgctaaaaggcgcacaagtgtctaacacattccttgatgtcatattgttattggtgtaattaagtattgaaaaataatttttaaagtcaat

SEQ ID NO: 181346 - DNA, 632 bp, Cannabis indica
attctctcgatggactcagtggttacaagagcatgccagtagttttaatttctttatttttacgtaaaaagttgttatgtaaatttaatttattatattcattttctttattttgcttatacttatagcttcacaaaagataaaataaaaaattgagtgaccatgcttttctcttacacaaactctcaaatatgctctcaattctaaaagctaaaaacaacataaaaaaggtttagtcaaacgggatctatgtgctcacgggggattatttcccaaagagtaacagtggagtttaaagtgaggcatgctagcccagcccaacctaccacttctaggcaatgaccttaaaatattaaacctcaactgatcaactcttacaatggtgaaaggattggctttaagtcctactgtcctactgaatagacacaacatgcaaggcttattacttgcacgtcattcaaccagttcaatgaagggactcccacccctaacccctcacattggtaaggtgaataaccctcatttgactcattttgccaggactacaagttgccaattggcatattagtcaaattgagtgatatgcaaattctacaatcaaacagtcctaaaattctcctctataaaatgat

SEQ ID NO: 181347 - DNA, 528 bp, Cannabis indica
tttaaataatgttagtattcgttttgtaagacgatcagcaaatcgcgttgcccactttgttgctaggcgatcccgatttttctctgatcgtagcattcataggattgattttcctgatgagcttctagctcttatgtatgatgagtgcgaaatttcaatgaagttgatatttctttttacaaaaaaaaaaaaaaaaatggggcacaccagtgccacctcttctcaacaaagcaaataatcacctgtactcacatccactcatgtgggtccaccaattactaactctaaccaattgaaaagcaacaaacatttaaaaaaaaaaaaaaaaaaaaaaaagtaggttccatccttgtgctcctcttaagggatatactaaagaattttctatattacttatgctattcgatcctatattagaccagtttcaggatcataccaaaacaggtagtagaagtggtatagatcaaataccctttcaactatgcacgttggttgtacaaattaagattttattatatatgctaaatc

SEQ ID NO: 181348 - DNA, 644 bp, Cannabis indica
caatatttctttgaggatctcaacgtttagaatgtaacattttcaacattatgaacaaaaaaatttaattattaaagtctttatcatggcctcaaacaagccgatctcataatttgttgttctacaccccaaattctaggttctacacattctaaaacctataagtttaaataaagtaattaataataataaatctcaaaccaacaaagttaaaaattatggctcaccaaaggtttcgtaatgttttatcgcaaactatcgcaaaatcatggttaaaatatcgttttccctggaaaacatgtcatcattgtagatggtaccattattaaagcatcctcaatgtttttttcctccttaaaaattaagttataatgtgatttataaatatagtatttattttgcaccagagttaatttataagtatcatatttaaaatgtcaattaatttttttcttgcaaaaaaattaatagtggttatcaaattaattatatttatatattttttcaattaatagttgtatcatatttagtagctagtttgtgctatattgagtggctggtttgcgctatatttggaggtgggctataatttgtatcttaacattaacgttttttcatttattcttgaagaattaaaattgtac

SEQ ID NO: 181349 - DNA, 588 bp, Cannabis indica
atctactatgtatgcgagcagttgtcatctgctatgctttctattcgcaagcagtttatcagttctactttgcgtaaacagtcataatctgatttaagcaaacttaaacatactttgaataactcatctcgtgaattactttgtatatttttgattgcacgtgtgaatagttaggctttctattcacaccttaggttaagtattttttcaaggcaatcttggtacctcatttaatacattcctataaaatgtgagtcgttagatattcagcttcgcatgcagcttaatgttatttttatgagttaagtctcatttacaactgctacattttgattttccttttgactttatattgtccataaatacttaatcaatttggaaatttttttaaagtggagtgggtttgcaatatatcatgtaatttcagatggattttagttaatcatacacatatatatgccccctcaagtatttaaagataaaactttgtaattacttgaatagtacttcaactttattattaataattgaaatttaaaattacatcagaagagagattacagcattttgtgagtttactgatagtag

SEQ ID NO: 181350 - DNA, 970 bp, Cannabis indica
tatttttaccgggtattacataaattattctgaattattcaaaattttgtaaaatatcttaaataataacaaccagtaacagtcccaaaattttactttgtggaggcttatttatcattaaaaaaatattcatacctacattataacactcttactagatttatttgatttgtggaaatttttctactattttgatctataattatcaaataaaaaaattacatttaatttttaaaagacaatatttttgttagtggaactatagccccaagttacacgaccataaaagatttgaactaatttttttttcctaaatatcaaaacagtaagggttcatcagtatatccggaagtataccataaaagctttcacgttatacatatatatggaagaggttttcaatggttacatttttattgtaaccattatggttacatttttattgtaaccatcatggttacatttttttaagccattggattactattaaatggttgtgattaatttggaaattaaataaaaataaataataaataacttgtaacctgaaagtaacctaatcatttatttccttataaaactttaattaagattaattatattttaaaattaaattaattataattattaattaatttttttgcaatttattactatataaggatcttttagcaatttattttttatacttaaattatttaaaattttatagcaaaactttttataatttaaaattatacacatataatttcataatttaaattttattatacttgtaatcttaattttaaattattacacttaattatttatttttttatttaaatatttaaaaagtaaaaaataaaataatgttgaaggatttttagaaaaaaaatggctgcacttgttatcgattgattagcttgaggcctcatacttagttcatataattgtaacaaaataattaaaatatcatttaaaaataatt

SEQ ID NO: 181351 - DNA, 693 bp, Cannabis indica
cactcattttctgctcccgaatcagatcctgattccgagttcgccatgtctacaccattaacaaacaaacttcaaagttagctatatatataacaagtagtgtatatgaaatattaaaagcataaacaaattgttaagtattcaggagcattcacaaccacaatataaagtaagctatatatcaagttaccaattagacacgttttcttttctttttttgtttatgtttgcctgaatcacaattgacccaataagttttgtgctagaatttaccttagatgcttggaggagctaggagctgaaatatttgatcaatttcaattaataataaggagcttgaaagtggtggaaattttcttgttctttctagttttagaaggcatcaaggagaagaatagaaggtaatatgaaatttgatttttttttttaaactttgacttagttttgcttttgtttttcttttattttgctttaagttcctggtcacctataaaaggtgagtcacagtcaccaatctttcaaaaaaaaaaacggtgactaatccttagagaaaaagactaaaatgccccacttgctcgctaagtagcctcgcaaccctaggataacatagtccaattccattaccctcgctaaaccccgactattataaaatagtctaataatattttgtccgcaatatacttgatacaaact

SEQ ID NO: 181352 - DNA, 717 bp, Cannabis indica
gcctaattttttatgtatacaaacacatactaggtactgggagtgattatcttaaaagacaaaagtgggactcccagttggcggctttatatcaggtggaagatcaggtggaggcacaatatcaggcccaggcggtctcactggaggaatatccggcggcggcggccatctcggtggatcaatctcaggccctggcggctgtctcggtgggaaaacatccggacccggaggtggtggaaaactcgggtgtggtaagtctatctccggctccgggtcgggttcgtacggcggtggaatctcgatcacctcagaagggaagtcgccaccggggcctacctctggtgacgtagtaataagcggtggaacttcaagcgggactgaaggttgctcccggtctggcaccacagtgggaatctccggtgggtgaggatgagctgaaaacgaagatggtgcggataatatcaacctttgcgatcgagtgtaagaagtaactgtagctttcgaagcactagtcttatttgtgattgggaagatatcgtacggtcgaagttgaagccttcttctcaggacggcgttggagattgcggagatggaacacatttctgggcagtttgggttctaatgaattcaagccattaatttcttttcgattgttttcattcataatgattatatacatttgtttatgcacaatgggaaaacgacaacattaaccat

SEQ ID NO: 181353 - DNA, 808 bp, Cannabis indica
tttcagggtgcaattcctgatatgcttgagaatactaccaaggagtactattcaaaaattgttgcgattgtcaaagaagctgcagagatatgctactctaaaataaaaaataatcctgtcattgattgtccacacaagccagaaggctcaatgtttgtgatggtaagtagcattaagtagtttactgtaactctactgttttagccactgaaattatcgttctgaagcacctaagttgtatctcaggtaaagcttaatgtttctttgttggctgacataaatgatgatttggagttctgtctcaagcttgcacaagaagaatcagtcatagttatgcctggtaagctgattgtttctctgttttgttggaagacataaacaattttatactcaatctcgttgaagctatatggtttataggtgttgtaagtgacatttgggtattcttgcaggggtagcattggggatgaagaattggttgcgaataacttttgctattgaaccttcacttcttgaagatggtcttcaaaggatagaagtcttttgccataggcatgcaaagaagcaataagatttttattgtatgtgtcttgaaaatgctgatggggtgggaggttaaacagtttatatcaaaaaactatcatcagccttaactaataaaaactaaactgtgtcccaatatatttgaaaaaaataagggtaagtttgagatgatcaacttttgtttgtatcttgtatgaagtgggggagtttacaactttatatttcatctcatgctcttggtattggtagctctacaactatcatc

SEQ ID NO: 181354 - DNA, 947 bp, Cannabis indica
atagcatgcagctacactgtagcgtttgttgaccttcagagtaatgaacttcgtattatactttcggatgctgaaactttccaatattgaatatctgcaactctcctttgtcctcatgacctaagacaaaataattattcttcaaagcaagctgctcaacaaccttgtgatacatatttcttgtgtagaattcagcacattggttatagtacttggtcaagcatgtaagatcaggtgggtgaggttgagtgcatttgcttttgaagtcatttgcagtcttattgtgtctgagctttgagactatcatatctatggttgtgacaaattcacgcaaccaataattcttactctaaaaacttttttagagcgcagttgatcgattcacaacattgtgtcgttctcattcctgcgacgaatgagccccttaaataagtttctaccacggttttcttgtatcaaatattgtttggcaccattcattatctgttagttgaagcctatcaataacatctaaccattttgctttaaattcttcctccgtgtagtagttgtacatcatatctttaaaagtttttaagaagatcgaatatttaacttgtttggaagcatttgttttgagatgccaagagcatagacagtgtgtaataacatctggcatgtgttccatgagggttcttttatggccacatcttggtcagtaactacaacatttagcttcttatgtccatggcattcaagaaattttttaagtagccaaggataagatgcaagcttctcgtggaggaggatagcaaacccaaaaaatgcatgtgtttaaatggtggttgaggccaataagaacagtgagaggcttattgtattcatttttctatgtaagttgtatcaaaccctagtacatcctgaaagcacatagtccacacgtgagtttccatctgccaaacaaagtt

SEQ ID NO: 181355 - DNA, 743 bp, Cannabis indica
aaattataaaaataagtacaaagaagaagtgaacaaaaaaaaaaaaaaatcaatttgcactacctagttaaacaattaaagtaaaaaaaaaaaatcaaaaataaaattagtaaaaaaataaaaatagtaatcatttctaaacttttaattactatatatttgttattttttttgaacaaaaattatattttttattatctattctatataaaatgtggctatataacagaattcttgatttatgagaaattattgggtgacttttttttaaataaaaaaataacaaattattagatgttgccacgtaaagggtcaacatccatgtagttagttaaacctaaatataattaatccacctaaagtgttgcaattaataataaatttgttcatattgtttatttttttattaaaaattattttcaaattttgatatttagaattagttaaattttaaatattattttaaattaaatttgaatgttttgatagtttaaccagatgagcattttcattaattccgaagataaatttaggacgaataataattttttttaattactattacaaagtataatagtaatttttgtttttatttaaatcactattatgcttttaaatttcaatgattatcactacattgaatattattaattttaaaattatgatattaaaaaaaactaaaaactaaaataaaattaacatacgtgacttgacacgtaacatctatctagtctacatataag

SEQ ID NO: 181356 - DNA, 548 bp, Cannabis indica
accctttgattgatgatgtaccatttacataatgacatgtatatcctatttatagattgatgatgtactatttacatatatatcttattttattttagaatttaatgtgtctaattttcattttttttttcaaaatttaaatataaaagtcaaatcttctttagtatgtgtcatacatacccttaaattgataattaaattttctagttttttttttttttttttttgtgaaatgatagttatttttcaaagtatataagtaaaagtcaaatcttttttagtaagtgtggtgttggagtgataaatttaaagataattatacccttatttttacattctagattctactactcttttaatggtgtgataaagtcaatcacaaactatcctcatttgtttatctattctttcatttataattcgaattttttgggattattctggtttttatttctataatatttttacaagttttcctccattttttttatgttttttttttatttcccatttttttattgttgtatagtatgatgcatttaaaaatg

SEQ ID NO: 181357 - DNA, 581 bp, Cannabis indica
tcgagatctcatacgtcctgaactagatattgcctcatcacatacatgccttcaactctgggaaaggtttgatacatggcccttgttggggtttgtatactcctcctccctatcagtgcgagaaggacgttgacggtgtctcagtggtaacccacctgtccaaggttgagtcccaggatttctctcgttagcacaagggatctcctatcccctggtttggggttgccttctgttcttatttctacaagaagactctagtagatcattgttttcggtcccttgggatgtgaatccccagggtctccgaggcacttcttgatgaggtgcctggtcatttggttgttcatcttcaggaacatccccaatttccccaatttgctcttcttgagtgttctgggggttttattgagctgtctcttacctcctggttctcgagccccgaggtcttcctcgtgactttctcactccaggaataggttggttttgtgtgttttttcttgtgtcgccttggctgcgacaacctccctttcaaactcagcattttgttggcttgccccagccagacgttaccggagttgacg

SEQ ID NO: 181358 - DNA, 567 bp, Cannabis indica
ataattcgtatagtggaccattatttgaagaagaaaatgatgatattgatgttgatgaacttgatttagaagaagaagaagaagaagaagcatcctctactaactctgaggaagatgatgattcaatggagtctagtgatgaatctatagatcttgactcaatattaatatccttattattattattacagctttccatgttcataacccacctgtcgttttgagctaataataatttattatcaactctttgattttctgaaatgattttctctgcttctttgttcattatgaatgaatatttagcttagaagaaaagcaaaaatacacaaccttataacggagaagaagaagaagaagaagaaagaaaaagaaaagagctttagtaaaatatgatgatatatttgaaaggttgtattttggggagcatattatatatatactcgaacacgttacatgctttctatcttttaataatttaattaatgaaaaataaataggagaaaaactatatttggggataaaaggacgtggctcaacatgtgcttgcttattataccaataaag

SEQ ID NO: 181359 - DNA, 624 bp, Cannabis indica
agggtaaacagttttttgactgtgaggttaagagctccgattctttggttttggaaaaatgtggtgcgatacaaaagagtattttaaaggaaaaggggcgtgcaagctaatatccgatgggcgagagacaagtatttgggacgacccttgggttatccacggtacggaatttttaccctaagtctaattatcgtcaacaacggggcttggagaaagtgtcggatttactgctacctgacgggaattgggacacacccaagctccacaacctttttgaccaggaaactgttagtaacatcttaagaggcggtattccgagtggtcagggaagggatagatgggtctggacaaaagaatcaaatggtctgttttcaaccaagtctgcatatcttattcaagcccttgatcgggctcctatgtgcaacattgctccggcactatggaacaaactttggaactcaaagattttggagcggcataaggtccattggtggagtatcctttccaatgcgctacccttacgagcccctcttgctaagagaatgggttttgaggaggtttcctgccctatttgtggagaggctgaggagaccacagagcacttgttcctgtattgcaactttg

SEQ ID NO: 181360 - DNA, 510 bp, Cannabis indica
actgttattgataatgacttagttcttgttcttgatgatggtaagccaaaaagtataatcagatagcaaaagctttattttctatttttcctttaaacctttcatgttaaacattttctattcacaggcaaagtgattgagtacgactcgccaactcggttgcttgagaatagttcttcttcattctcaaagttggtagcggaattcttaagaagatcgtccacaagaagctgcgaccgagatctatcttgagatcaggcatgatcccctctctgttcttccatcctagactgaatttcgatttcttgtacatggtgatattcttccatcaatttctctctcaccttctaacatgataacaacatagattttagcaactaggaaacttagtttagaaattattggttctgagataggtaattcaaaattgtaatctttcactttcagtaggtgtttgtgattaggtttgtagcattaaagaagaacaaataaagctgaaataataatggc

SEQ ID NO: 181361 - DNA, 719 bp, Cannabis indica
ttgtgagtaactatatgttcagttcgggatttaatagaacttatatattaaacatataatcatgaaataaacaagtgaacaaagtataccactaaaattttagaattgtgggttagttgcaaaaacctagccacttaaggagattatgccacaaattactcatttttaattggctaattatgatttttgcctcctgaattttaccatgtaccaaatcatgctccttgaacttttttggccgtcaaaaatttcccctgaactattgaaattgttggatttaaagatttttttttttcgaaattcattcaattttaccgattcggtgattgttcgtatattgaattatgctttccagattttaatatctagcaaatcatgtccctcaaactttgacattaccaaatcatacttcttaaatttttattcatgttagaattttcttactaaaattagacaaaaatcattaaatctaacaattttaataatttatagaaaatttttaacgaccttacaagttcaaaaaacataatttagtatatgtcaaaatttgacggtaaaaatttgaattaatctttttttatttttttttatttttattttttatttgtaaatagaaatattgaatttataaaataatagtgccctaaaaagaacaaaacataatatacacacgcacacacaacaacacaaacaaccaccactctctctctcgtggtcgg

SEQ ID NO: 181362 - DNA, 922 bp, Cannabis indica
tataaccaaaagtaagagcaaacgccaaatatctattaccattcatggtacatttacaaaaaaaaaaaaaactttcatttccttcgcagctgaaattgaaactttataggccatcattaattaaatatagtggatgctctataaaactaattgcactgttgaaaattatgggattccatcttaaaattaattggcaatgagtggagtagcccatgttcttatatatggctcaatacttttacatttaatccatgtgggataatgttctccaatattccccctcaagatgttggctatttttgctcaccaatcttgaattcaccttatcacaggctatgccatttgctcgcttattttgttcggatctcaagcgtcttgcaccatctggatttcgtgcggttgactaaccatttagacaggtgtggattgaaagcctgctaaggatatgtctctgataccatgctgaaaatcatagggttccatctcaaaaccaattggcaatgagtgaagtagcccatgttcttatatatggctcaatacttttacatttaatccatatgagacaatgctttccaatatgcacgaaaattgtccatcttgcttgagaaaagcattttacctccaaaccctccagcttccttagaattttctcctttaggattaatataaagtcattgcttcttcaagcagagaaaaagaaagagctgcaatatactcctcacaactctttaagcatccaatccaatttaacattttcttctaatttaatccaatctatatatatagttagattttgagaaacatcttccaatccaatcttgttattaggcttcaaaatttaatccaatactatgttagattggatcatttttgtttaatgggtttttaatttgtacatatgagtatatattaacaaaaaacg

SEQ ID NO: 181363 - DNA, 556 bp, Cannabis indica
ggttcagccattaatgatccagtaatgggacatatgaattcaattggaggttgtttatttgattctgttattgtgggaattgtagttgatgatctatgaaaaaacttccatttacgtcttggattattaccactctgttccacactcttctctttcttcttttcttttcttgatttgcttcggttttcttctgtgtcatgaataatcaacctcaccaaaccttcttgaaactccattgttgattctcctcctttgaaacaaactcaaaacaccctttaatctggaatagtgaaatacaataatgggggcttaaagttcataactttttcaccagattcttggtgatgcttgaaaaagaaaatatgaaacgtttgaatgtaagtgaattgggattcgctttgggggttttggggctttggtgtatgattcgattctttgctttggaaaaattaagaagttccaaaactaaactgcatgagtttctcaactcagacgatttatatatttactatatatccttcttcaactagaagtatgttttttctttttttttttt

SEQ ID NO: 181364 - DNA, 699 bp, Cannabis indica
ggttcacgtcccttgtaagaacattaatttcaaacttattttctttactaattaatcaatttgaatgtacataatttcttttattatatgcttaatcatataattaacttgttgattattaaatctgcagcaacttcattgataattgggtcaacatcgctcaagctgctaaggataaagtcaaagctgaacacaaaaatttatcatttgaggaacaatgcgaaatatgtgctgaggtatatataatacttaaatttattaaatatatataatgatgttacataaatataacaattaatctaacatattttattgtttaataattaattgaattgcaggaagcagtgaatatctcccttaaaaatctatattcttatccatttgttcgaaggggaattcaagaaaaaatgatagcacttaggggtggatactacgactttgtggctggatctttcaagctatgggaacttcagtagtacttaaatattaattataatttattttagaccccaaatttcaagttatgtttcataactaataatgtcttgtgtttaatctttctactgtacgtgttacttattaattagttataccacaattaataataataaaaaattgcaacgtttatttattgtttatttttgtgttgttaatttgcttatattattagtaatattttcaatccagtatatagtcatg

SEQ ID NO: 181365 - DNA, 703 bp, Cannabis indica
ttttgctaatcggctgttggccaatatgtctacatgggcggtgagagttaacacacactccaactagggtttccaaaaaagaaacacttaactcaaaccctaatttttttttaaacctaatttcgaattttgaatcacaatcctaagtaagctctgatcccatgtagagaatgatgaatagaattgtgtgttttattcatgtaaatggcatattatttatacaacctaggagaaactaaaatgggaaagtatgagagaaaatagggaaaaaataattacaattgaccctattttctagctaatttacaagtaatattctaacacttaccaacaataatttttgtaatcataagattgatactgctaagctattttgtctagttaattgcacataatgttaccaataacacacaaacataatgacacccgattccagatcaggcacatttaaagtagcaaatgttaattgttaatcagcatccttttaagtagcagctttatatgtgtgtattcacttcaataaaaatttatgagagagagactattaatctggtgaaatataaatatccataacatataatatccatacatatagaaaagagtgattggtgaaaaaatcctttaaaatataaaaaatgacatggtaaactaatgaatgattgtcacctagacattcaaatctcgaatgagtgtcaagagttct

SEQ ID NO: 181366 - DNA, 648 bp, Cannabis indica
tcccttgagacacagggctggacgcacataataataaagggagccgccccagctagaaaaaagaaaaaaaaattatacctgtatttcagtcaattattatatatatatttcaaattaataaacttctaattatatattcactacaaaaaaaaaaaaacttctaattatataataataaaatctttggccttattcatttcattagggctcaattagtataatgttgttatatattctttttagatataagcaacttattttgaatatatattcaatatttttgtggagatttgattgtcattatagtattaaataacttattaatttacctccaacttccaattttcatgttgattgttaattttaaataatatttaatactatgcaactacaatttttttattttattatataaatacaaagtatcacttaaccttagaaaaaaattagcacactcaacttaaatcttaagtcgaaagatgaaaaacatgtttattaacacaaattaaacaaaattgcacacaatcttatattgattagcaacttaaaaaaaagtcaatattgagtattttttttcttaaatctattctaaataattattactatatacttcacaattattatacatacacattagcagtagcagaa

SEQ ID NO: 181367 - DNA, 520 bp, Cannabis indica
atagcttgttttacttaaaaaaaatatatgttagtacgatttttattttaagataacatatgccatagtaaatagtaaaagtagttctatcaaaaaataaagagcattgttatttagtattatggtgcccaacatcatacagatgtggcgcgttgttagtggctaatagatttctatataatttatcaaatcaaaatatgtgagacctaatattaaattgcacggtatgccacctcttatggtacttgacaccttaaattgtctcttaatatttgttaaaaacaaataaataaattgctgttgaaaataaataactaaataaaaatacaatttactttactaatttaaaatattattttaatagatcatatacaataataaaattatattgggtcgattgctaattttattaaattttttactcttaaggtttttttttttttttttatttttttttttttcaatgaagacgtataaccataggatatcaaaaagggaattttaaaaaatatgcataaaa

SEQ ID NO: 181368 - DNA, 480 bp, Cannabis indica
ggactcaaaccccaatttagaccttcgaaaccgaacccagacctgactccaaacttggaccccgtccccagtcctaacctcggacccggcttacaaacccgacttaaataaaatcaaacaaaataaaaataaaaatgtaaatttacaaaatactacctttattttttgacttttaaaattaaaaaaaaaaagtagttataaaacacatttttatttttcaaaaacaaaattttaaaaacaaaaattttactttttatttttgtgattaaaaaatttaaaaaaaaaaaatattactaaacgtcacctagatagttgagtccaattggacaaatttctttccacccttttctttaggcatggattaaaattaaattaaatgaagtctacaaagacaccgtggaggaagagatgtattatttgatattgaaccctaatcagtattttattgtttattcatttatttatttgaaagcaaaccat

SEQ ID NO: 181369 - DNA, 680 bp, Cannabis indica
gtggcaaactcatgaccattcccgtggaaagaaatctaacgtgaaagctaatcgactgactcaagtggggccttttaaagggtgcatgatgggtggaaacagttctcctgtcaccaattgtcatttgagttcaaatggaattcactcaagaatcctgaatggagtcaatgatgccaacacagacttaattatgtccagcaacatagagcttaattcatcaagttctatatctaattctaagttgttggctgctccacctgatacccttggtgctgcagccttgtctcttcactatgcaaatgttgttgttgtaattgagaagttagcggcttctccacacttgattggacttgatgcaagagatgacctgtacaatatgttgcctgtaagtgtgagaactgctcttagggcaaagttaaaaccatgcagcaagagcttggcctcatcaagctatgatccagtccttgcaggagagtggaacgatgcgatgacatcaatattagaatggttggggccgctagcacacaataccataagatggcagtctgagcgaagctttgagcagcagaacttggtttctagagctaatgtgcttctggtacaaactctttactttgcgaatcaggaaaaaactgaagcaatgattaccgagcttcttgttggtctgaattacatctgga

SEQ ID NO: 181370 - DNA, 783 bp, Cannabis indica
atattgaaagagataattatcattaaataaaaagaaataatttatttcatgtataatttaaaaagttttaaatatcgtcgcatgcagagacggaggtacttacaagctgaaggtggccttaaccccccaccccacctcaaactcaaatacatatgtatatgttagtttctaattttatttctattttgtaattttctttatcttaattgtagttacatgagatcatggatcgagtcgaatttcacaacttcttctacccatcttatatattgtccttttcgttttttgttataatagaaactgtttagtaggcaagattttacgaaaaagttcttctaatttattggagagaaccattatttcttctttttttttcaatgcaaatttgacacagcatagagaacctactatttcacattaattatttataattgaaaagtccttagtataacttgtaactattaaaatgaatatgttactatgagtagaatactcaatgcattaaaaaaaggggtcaatttccttttctttagttactttccatttattattaatttttactaaataaaaatgattaactcaactaaaccaccgcttacaatataattcttttaacaaaaaatagtaactaaaaatttaaagatcgttttaataataattatatatatatttatatgaaaaatattttaatgatcgcataaaatatgtaaccatgatagttatattagttttaatttcatttggatcattattgtaatggttgtaatttatttaaaaattaaa

SEQ ID NO: 181371 - DNA, 921 bp, Cannabis indica
tgcacctcgattatgtccttatctgaggttgtcaagtcaatgccatttcattgtctaaaaaggccaacccttttcgtagatgtactctctgttaaagagtatccaaaaacatttctactgcaagtaagctaaattgactcccataaaaaaacactccatagtaaaaacaaaatgctttttagtttttacataacacaaggcgtgtttgtatttgcttattaggtgcttcctgaagagtcagatgtgctttgtactcatcccatgtttggaccagagagtgggaaaaatgggtggaaaggcttaacgtgtgtgtttgagaaagttcgaataaggaaccaatctacttgctcaagctttctccaaattttccagactgaggtaactagtcatttcgcctaagctaatatcttgatcgattcctctgttaactaatagtgctttacatttttgttcctacaattattaagctaaacaaacatcatgccacatgtataactatttaatactcagaagagtatgccctccttactcaaattactatctgatcataatatgtgttcttagtatgactatttaatagtcagaagagtctgctaccccttgcatgtaaaaaaaacaccatttagagatgccttatagtttcaagtatctttgctaacaaaaatcagcatgtattcaatccagggttgccaaatgctggaaatgtcttgcgaggagcatgacaaagtggctgctaagagccaatttctcactcacactattggcaggtattcttcttctttttcttctttttttctagccctatatcagtaatgactggtgaaaaaaaataaaaaaattctgtcatgaacaagtctcaagcatctacatgtttttcagggtattgtcggaaatggcgattgagtccacacctactgaaca

SEQ ID NO: 181372 - DNA, 706 bp, Cannabis indica
atttttgtaaaaaaaaaaaaaaacttatatttattcactaataaattaatttttcaaaggtaataaattaaaattatttacaaacaaaagaaatatataattttgaaaaaccattgtatcttaccattatttttagcaaacgtacaataaaaattagaaaaaaaaaaaaaaaaaattggagcagcacgtcatctctcaattctcagctttatttatatatatagagaaaagataaactttgaattaaaatactttctaactttgaattaagatacattatagaaaattttttaaatgtgttttcttaaaagcaatcccaaacgcacactaaatagattggataagatgaggaaaaaaataatgaaattgaatcaaatattatacatatataattttagggatatgattttgtcccgttattgtacttttacggattgtaattcatgatgtacggcagccgtcagatgagggagttatttgatctgacggttgagattgatgtaggggtaattagggttaaaaagtagaaacgtacctgacactcatttaatgtaccctaagactcatctaatgtaccacggaataagtacatcacgggaaaaaatcaatatccctataattttatttagcatgatattagggttggctttgagaatatatagtcctaaggctagttatatttttgggcactcactctaaaaaaaat

SEQ ID NO: 181373 - DNA, 1267 bp, Cannabis indica
gcaacaatgcttgtcaatgaatcagtatgacattttttcagctgcacgctcaaagcatctttttggtgtctacaacagtaacaaaaatgtaaaatgattaagtgtagaactaaaagtgttactactatgttcattcaacgaacttgactagcaatttcaacttataccgttagtgtcgcttcagtgaatgggacttggatattaaatgaccgagatagagccttgtagccaccagaattgaagccaatcaaatttccaggacacgtcatactgttagccaagaggatgagatgctccttgagaacacccttgctcacctttgatactgatgtcgaaaggcgctgcaaatgaagcaatattgtgattatgacaggaaaccaactcatctacaatactggtccagagctacctatctttatttaacagtatacaaagacggtatttataaatcaaaagaacaacaaggaaaccaaagttacagacaacaataagtagagagttaattcaaaccaccattttttaacacttttatgaaaccttttagtgagcatgaaaaaggcaatgctacaaccaagaattaatgaaattgtttagggaaatttgtttgcatggaataaacttcgtaatttcacaggattgcaaaacaaaggtcgattgaaagaaaatttaccaaataactcaattgttaagatcagcgaggaccaaaaataataaaaaagaaaaaaaaaaaatgtgtgggaaggagaaccatgtaaaaacacatacagaaaagtgttggaaagattcccccaccaggtatacttctgattcagcatacttcaccgacaggaaaatctctactgaagatagatggaactagattatgaagaaacttcaaaagattacctgaattgcttgatcaaaagcacaagaaattcccagcaatttctggatttgtttaattccatatgggatggatcgcttggtatctatcaaatggagtacagggaggcaagagtcaaggactatcctccatgcatcaccgctttgcttgactgctgacttctccaaaacacatccagagccaattcacccctcctctcacgaaatgtgcggatgtcttatccaagttgttgcctcaggactaatccaagttatatttgccgagcaaatccgggagtcacctgcacatttgatagattcctaatattcaaatgcttgttcatagatgcaaaataaatgaccatccaaaatgtgacggtttataaaaattctaggactcgaaaac

SEQ ID NO: 181374 - DNA, 1056 bp, Cannabis indica
ttttcctttgaacaaattcaacagtcattcaacaatccaattttatgttaaacagaatacacaagctatgctgagctctaggcaggcagagatgttcacgttaagattcaacataaaattcaaaccaataaacaacatgcaaaaacaacaaaaactatatagaacatcaaattaaacacaaacgcaatgaaaccaaatgtgaagtaaattgaaagggaaatgactaaactaaatatgggcattgggtataatttaaagtacctatcattcagaagattcgtattcgtttccattaccattttctcgtcctctttctctttctctttctctccctcatccttaactttggccttgttattattcttcttcttatacttattcttctttttcttcttattgctcttcttctcagtcgatttatcgaccccattttcctctgacaccaaaactccatctttctcgtctacattagtttctctctttctttcttctcctcttctcttatcccctaaaccatctgacccagtttccttaattccattttcttctcctcctcctcctcctttactgatattctcttcagaaccatcgcagtttaccgccttgggaccttgtaaagatagggtttttctgcgcttttcacgtttggacaatctctgcctttgagttgccgagtccaaaagaacttttagaggctgaggcttaggcttaggctgctgcaaatgactatccccgtttggatttgcggaggaggcatcgttgttggaatctgatttggctacagatgcagctaaagactcggccaactctgctctgagacgttgcttcagcttcttgttcgataaaaccatgtttgcctccctcaaggctactctaccctggtgctgtaattcggagacctgaggttttgctaattcattctagggaaggggttttaggcttggagcgcaccaggtgttagatacgacatgtcgttattcacatgtataccaaccaaatgtcgttttactcatttttctttttttgggaaagtttcaaaaataccattttttttat

SEQ ID NO: 181375 - DNA, 901 bp, Cannabis indica
aaggatattaaattttttttttaaaaaaaaagcttacaaattatttattaatttttttttgtgtgtatttgtgggacttcatttaatcatttagaataaaaataataaaaataaattaccttatatattattttttaatttacggtttgagttgttcttagtagttatttcgttatatgtgggttgttatattgaatttcggttataatttaagttgttctatttgtattgttatatagatttttgtaaaaataaaataaaattattttaaagtataaaaataaaaaataaaaagtaaaaaaattatttcctatttgtattatttaaaataactcacaaaacactactgataatggttttattttataagatatcacatgcatattcagtttgcagtagggaaaaacaacaataatatagtattgctattattaattactttaacatagatctattgaaacacaaaagtagaatagattgatatcttcttttgcagcttttgatcataatatcaaagtaaaattatttgattggtgcatcatgcttattaaatttttctctttttctaatattttacaactcccaacaagttatatatttgtatatacatatacatataagtataattattaaaaagaagataaatgttaaaaagcatgaggtgcttttcacaaaataatagtgatattattattagtataattaagcatgaaattttatataatttaatggaatattttttaaaaaatattaataattaatagtaagatattatttttagtggtgctcaataccttttataagtagcgtcttataattagtaagcgatagagatatatcaaaagatacccatagtatctagtacccttgtaaagtgtagtatcactattgtttattggta

SEQ ID NO: 181376 - DNA, 638 bp, Cannabis indica
ttttatatagcataatcaacaatcacttctcaaattttgatcaaaatcataaacaataaattgaatggtcaagtcaattaaaaaaattaagaacaaatgaaatagaaccacataaaaagttaggggaagaatcaaatcatataaaaccataaaaagatagtcaaacaatctccatcaatatcctaataacaatttagctactcatgttcattgtaacaatttgacacaattcaaataagaacacaagaaaaaataaaagagaataaattgttgaaaaactccgttaaaaagccttctcggtcacttcttttctataattttcatactctaaaaaattgccttaccaaaaaaagtttgaaatccacgcctttaaatagccgaaaaatgataaaaaagatatcaaatataccaattttttgaattccacctaagcaagtcatgacactacatgcctagtgttgcgacccatgtcttgtacatgatatatccttgatttttttcttcacacatgcctcgacactatccttttgtgtcaacggccaacaaatgacaaattttggcagtgatctctccttgcttctctgcctcaatactaaacctcagtgttaaggcacacccatgaatttagcaaaagtaac

SEQ ID NO: 181377 - DNA, 916 bp, Cannabis indica
ttcctagcttgatttgcatgttttgatcccatgttgacttttcccgagagttgacttttgactttgactttgactttgactttcgggttgacttttgactttgagctttttgaagacctcttttgaatagggtcttgacttgttgatcccttgatgaatcttttgctcttatgaagtatgaagtagtttatatacttgttgaatctacttctttgattatgtttgactttaccgagcaaatatagatactttgtgaacttgcttgcaaaatgatcaagaaaagattagtaacaaataataatcaaatatttgtttatcatcaaaataaatgagtgaatgacttttggtcaacattctccccctttttgatgatatcaaaatatttgattattttaacggaaagaaaaagtaaattgaaacatgttgagtttagctcccctttaatgtatgcatatgttgtttataccgttttacctttgcatatttaatgttaccctttcttaacatgacaaagctcccccttaatcatatactcaataaacttgttaatacttgaaaacataatatgattaatgccaaaataatcaattccaatatttctcccccttttgatttcatcaaaaagggtggcagaggaagcaaggtcaagctaaatatatttctcccccttaatcatacaagatatgacttgtatcaatgaagcacaatgggtaaagagaaatttcaaaatgcataaaaagatgaaagttcatatagtcaaaacaagtttaaacattcaatctacccaaaaaaaaatgtagtcaaaaaaccttgaaagtaagagatgcaggtaaataatggcatggttatgatttcaaaccttttctcatacctcaagtatgataaaacaaaatgtgttctatgtccactttaaaat

SEQ ID NO: 181378 - DNA, 991 bp, Cannabis indica
gcgaactcgtgtataaaagccattagtccgtgggtgtaagggcccaatggaggcttgaagcggggacgttacacaaggagtgagtgaagaggtgctaaggttgaagttattcccattctcactacgagaccgagctagatcatggctcaacactttgccgcctgattctgtgaccaattggaatgaccttgctgagaagtttctgaggaaatactttcctcctactagaaatgcaaaattcagaagtgagatcatgtcttttcagcaacttgaagatgagtccacaagtgatgcgtgggagaggtttaaggaacttttgcgaaagtgtccacatcatggcattccacattgtattcagatggagactttttataatggcttgaatgcagcttctcgaatggtgttagatgcatcggccaatggtgctattttgtcgaagtcttacaatgaagcatttgagattttggagaccattgcaagtaacaactaccaatggtccaacacaagagctccaacaagtagaaaagtggcgggagtccttgaggtagatgcaataacagctttgacagctcaaatggcttccatgacgaatgttttgaagaatttgagtattgggaacgctaaaaatattcaaccagctgctgccattcaaagtgatgatgtctcatgtgtgttttgtggagaagggcatgtgtttgagaagtgtccatctaatccggagtccgtttgttacatgggaaatcagaattttaacagaaacaatggggcattctcaaactcttacaatcaagcatggaagaatcatcctaatttgtcttggggggtcaaggagcaagctcaagcaccgcaccagcccaaggaagacaagcatatccaccgggtttttcacaacaaccgcgacattcacaacataaaggttattgaaaatgtaaccagagcaagaattgagatcgtgattggagaacttgttaatattacattgtagttcaat

SEQ ID NO: 181379 - DNA, 773 bp, Cannabis indica
ttgctttcttagctatctataaacttactctagttggttagttgttagttagtctttagctcctaaggttaatccttgtatataaacttgttgtatgcttcactaaatcaaataagagatttctttctctctttctatccttcttcctctttcttccttttatatctctttctctcttctctgttttgttctgttttcatggctaagaggttgaacacctccaatatggtattagagccattttctccattaataacggatatgacttcaacaggtcctagtaatcaacatactcagtctgcaactcaaggaccatagtttttagcttcaagaacctccactagagatcaaaatgataacacagttcatttcaaccacaccatctccataaagctttatgattacaactaccttctctggaagcaacatgttattgcagccatctgtggcaatctactacagaaattcatcgaagacactccacctcctccaaaatttctcagtgacgcagatcaagctactctaagatacaatccagagttcgttgattgggaagttcaagaccagctcttgttgtcctggcttctctcttcaatgactgaaagcttgctcactaggatggttagatgcaactgtgcccgacatatctggaaagctcttgactagcatttcacctcgaaattctcttcaaagattcttgagttcaaaatgaaactccaaaagctaaagaaaggaaaacatcgagtctcaaatgactatcttgtcaaatttaa

SEQ ID NO: 181380 - DNA, 654 bp, Cannabis indica
gttaaagatgggtaagaaccccaaatggcacttcttttaatacttttacaatttttttttaaattattactgtaatattatattatattttcgtaatttaatttaaagtattatttttaaaaaaaaaataaaggccagttttttttataaaaagcaataatcttctcaaaatgaataaattcttaatttttttttttatttataaaataatttattatatttgttttgacgtaataattcataatcttttattaattttaaagacaagtaggcaatatttgtctatgacaactatcattgattaggtgtcaaataaaggacacatggcagcacataaattggatacaaccacttgtcgcaataagagcgagcgagtgcagccttggctaactccgtttttgggcgtttaaatatcaagcgagggtgaggaagcggtaggtaacaggcggtgtgagattatcacagaaaacaacagttaaagagttaaactaaaaaacggaaaaagggaggacttctttgtttatggagagcggtgaggtgagtagtagtagtgtgttcaagtgtcgtgcatgcattttattgcatctgttgctttgcatgcactctctctcctcctctttctctctcttctttctctctctacacacacaaata

SEQ ID NO: 181381 - DNA, 953 bp, Cannabis indica
aaatatcaaccctttccttaattatttattaaattaaatctcctggaatattgaaccggcctatagtacattttaccaccataaagaaaattacgaaaaatacaatgtgatacacacctcacctacctacccaatcaatataatgttaatgtttgaacataaatagatatataataatttttttttaaggaaatagatatatggcaatttgcataaaatattttaaatggcacttcttttaatatttttacatttttttttttaaattattactgtaatattatattatattttcgtaatttgatttaaagtattatttttaaaaaataatataaaggccagcttttttttttatataaaaagcaataatcttctcaaaaagaattaaaaaattgtaaattctaatttttttttatatttataaaataatttattatattgttttgatgtaataattcataatatttattaccgagtaataaaaaaactataaattaatttttaaagtacaagtaggcaatatttgtctatgacaactatcattgattaggtgtcaaataaaggacacatggcagcacataaaattggatacaaccacttgtcgcaataagagcgagcgagtgtaccttggcttaactccgtttttttggctttaaacaagcgagggtgagaaagcggtaggtaacaggcggtgtgagattatcacagaaaaacacagttaaagagttaaaactaaaaaaacggagaaaggggaggactttctttgtttatggagtagcggtgaggtgagtagtagtagtgtgttcaagtgtcgtgcatgcattttatgcatctagttgcttttgcatgcactctactctcctcctcttttctctctacttctttctctctctacacacacaaataataatacgactctccatctcatacgcttccacgcgttacttcttctt

SEQ ID NO: 181382 - DNA, 616 bp, Cannabis indica
attttgttagatatattttttgtaaataaattttatatattttaaaaaatttaatcaaattatattatatgtattagatttaattttatttttattatttaaattaataattaaataaatgacaactctaatacaaataaacatacattgcatgttattattaattaatatatatatagctatatcatatcatatcatgacatgatattattaagtatgtatatatgtagtgtcatgcatgattattattattaatattcttcattggaacaacatcgatcgtaatgaacttggaagaacaaatattattattaatattctgactaaactaatcatatcatcatgtctagtaatgctttcaataattaaagaagaaagaaatcaattcgtgggtggatcgatgtacgtaatatgaagaaccataaataaataaataaattatcacgtttttgtttataaattaaatatataataactcccgccaaatagctagagacgacttttcatttttctaataatattatttcgatcaagttattattattataacctatttctaatgtaattctatattacatataaaaaccttaagacttgatttggtatctccatgcta

SEQ ID NO: 181383 - DNA, 518 bp, Cannabis indica
aaagctgactctagagaagtgggtgacgacatccaacaatgatctcatcattttggcgcacgctgctaagcaataggctgacagagtaaggttttctttgcattattgataaatatcttttccctataacctcattttttcctaacactttctttccttttttactgtgttagatgaccgtgattgctgagcgggcatctgaaacagctaatgctacgatagtggagttgactcaactcaaagcggagaacatgactttggtttccaagatggaggagatgacgatccagttggaaacatcaatgagataagctattgaggaagttgagaggaaggaaaagaagaaggttgaatcttatgtcaatcaggccaccgctcctatagggacaaatccagcaacttgaagctgatatatctactgccaaggctgaagtggtttctgtctctgggaagcacaaagaggctcaggagcgagccgacctcttggatgcctaaagggtcgtgaaggctgaagagct

SEQ ID NO: 181384 - DNA, 961 bp, Cannabis indica
ttaactgcatttcattttgacagggtagtgaagaggcagaggtcactggctctcctacagaaaggctatccttacttgggcattgatggtaccctctttttaaaatgtatctgatttgtaaaataaaatgtttactttttgggacaaattttaatgtactacatatgtgttgtagttggggatgaagtttgacgtaattagatcagagactaccattctccatgttttccctttcaactcagagaaaaagcgagggggtgttgctttgaaacaggtacgtgatttacttgtttgttgagttatgcagatatcacaactttggaacattccttgagtttgtttttattttcatgtaggcggactcaaaagtgcatatacattggaagggggcagcagagatagtcttggcctcatgctcagggtatcttgatgcaaatggttgtgtgcagcccattgatgaagataaggttaggaatggtgatattataaatgaaaatggatgtattgatatgtgaaaattgaaaaaggaacaacagaatttgtggataccaacaaaaaacatatgtttacgaagctatggaaagaactccattaggtcaataattaggatattaagtcagaacgttttgggttagtgtaaatgtgtaagaaggttaaatcacaaacttgccataaattaaagttcataatgaatatatcatatttggtagttcagtgattattttgattgacgtgttattacttattagatcagttacaaatattttgtggaatcaaaaattggaaattaaacaaaaatgcaaaaattaaaatcaaaatttgtacatctcaaaatttagtctccaatcattttggatcaattttctctttcatgttctgatttgctagggaattttttcaagtacagctattgataacatgcgggcagtaagtctgcgatgcgttgccattgtcatcaagg

SEQ ID NO: 181385 - DNA, 1372 bp, Cannabis indica
atattagagaggtatgctagtattatatgtatcaaagacatatgtaaaataaagatcctacaaaaagttattattattatttttttattttttattacatttcttttgtactttaattaataatattctatttaaaaatataatatttaaatgatatgtaataagaaattgtaaaaaaagtttatgtatggtatacgtactgtaaatatttaatatgtaaaatagaaaaagtataattttgatgatagagaagaaaagttaacagaagtggtggtgtaaatatatatattatatatgggactttgtatgtttatcaccacatatgatatggtaataaacatatatatatatatagggcgatatggtacaaacctattattcatgaggtgactacgttgcatgtagatttatatatgaactggatcactatgaattttgtaattaactgaacaattcgttgaaaccctttttttgattatgattacaattatatatataaatatataccgaagagacgtacacaaataaagatttatctcactcaatggaactgtctctctcattgaattaatatttataatttgacgacccatccattaaaatgtgataaagattgtatgtttatcaaaaaatcaggatatatattgaaaagttctagagagcacgccttacactactgttatattttatattacaaactatatttgtataaattaatatgagtttcatttattagaatcaaaattaattgtaaaccctatgtataaatatgtcctatatatatatatatatatgaaaacatggcttaattcttgtgtttacttgtcactaaagtattagagattctctttttttcgctggtaataataattaaataaacaccagaagtttcttaagattcatatcaataccatttttcattctccaatacctaattacttataaagttaattacttttcatattattatttactcataacctaatacctaattaattagtacaataccaaattctgttagagcccaaaactaattctatttctcctacagtttcctcttgcttggctctttctataaggggttgttgtgtaataagtgcataatatcatcaattgatgaattaatttcaagatttaggatcggatactcagcttcaaatgttcaatgaattggctgtttgcttgcctagataattattatgatcaatttttaaaagtaggaaattatactctataactctttacctgttttaattttaccttcctttaattatctttgatttatacccacttttctaagtttgttcccgttactagccataggttgtaaaaaagaataaaaattcaattacatctctaaataacctctgtc

SEQ ID NO: 181386 - DNA, 913 bp, Cannabis indica
aatcgtgatgcctagtacaatgtcctgcccagctctataagtttatatgggtccaagaatttttgttaatagggggaataaatttcttttttttttttgcgttttttatttttaaactttaaaaatagtttttttttctatttttctatttttacggaattctacatacaaactcctattgcaactagcgctgcaacttaaattgcaacaaaaaatcatatagaaacttctattgcaactagcgttacaaccactttagaaactcaaactgtaaatttgaaaaaaaaattaaaaaattaaaaaattgtacatggggtaattcttttttttttatatataaattttaaggtataattttacaaaatatggtttattataaaaaaaaatatatatattttatgggaaaatttgaaaagaaaaaaaggttaaaaaatagtgaaaaaaaaaaacaaaataaggcattacccttcttattagctaaggtacatggttatctttttggctacccatattgactttctcatattttttccaaacttttattgaattttttcctataaatatctttttttctaaagaagaaaactccatatttttactacatatagtaaattttttactataaatatattttttaaagtaagaaaactccatatttttaagaattcagcttgtttttaattaattagaatttggagataagatgaatgagattccatctcaaaatcaattagcaataggaggagtagcacattcctgctatatattctattatctttcctacacattagcaatgtgggactctctaacatccccttcaagatggtggctattatatatgctcacaatcttaagctaaactcgatcataagctgctctttttttggcttcactatccctgatcacagtggct

SEQ ID NO: 181387 - DNA, 869 bp, Cannabis indica
ttttggaaatcttattgcctagctcagaaaacttttttctctctgcctaggcaccagaattagccatgttcgcaggactgcaaacactacagcccttaacttggccaaaaaggtgcttaagctttatgaagatgcatgatggattggggatgaagcctgtaccataccttcaattttgtctttcctttaggattacttcttctttcctctcaaaaaaaaaaaaaataaaaaaaaactttttctcccaatcctaattttatcctaaccctaacaaatttgaccaatatcatgatgaggatgccattatattctataattgtaaatactacattcaaaaaaaaaaaaataataaagaaaaaaaaagaaacaatgagtgaaataaaattacatttactctttgtaataataattagaaaatttaatatttatttaattaattatgatttgttttaaattgttataaaataatataaaatatgtaagaagaatataaaaagaagatgaagagagaaagagaaagagaaactgaataaaaatttctcaattatttattctaatggggggaacccctatttatacaaaaatatgactaaaagaatgagaaattaaatcaatgtaataaaggaaaatacaaccaagcattataatgatattaatatccacaatgtattaaaataccaattaacaatatatataataaattaccacttattcatcactataataatcatcatcattataagtttcttttaaattatcaaatttagggttgtgctgattgtcacatacatcttcctcctctgcttcttctttgtcttcgtccattacttcttccatgtcttccttctctacctcatccatttcttact

SEQ ID NO: 181388 - DNA, 510 bp, Cannabis indica
taaaatgggaaaatcccaaaagaaattacaaaaacgaaaaattaagcaatgtacattaataaaatgaatagaaatcatatttataccttaatgaacgtatagattcaacgttttctccactaaaattggtggccggagttataccactaccttttttaacagggtcggttatagtgaaatagggggaaaaaccaaattttttagtgtatagatttaggtattgaaaatagaagattttaaaagaaaaatggggtgaaatggtatataaatgagggagatatatggatttttataggtggttggagtgggttttcgtgtgggttctgggttctgatatcgtgttcttgctgaagaagaaggcgatgtggggaagatgaaagttagggttttctatataaccttatgtcgtcgattattagggaataattcacgccataggagcacacgtgtcaataaaggagtggacctatatataaaaaatcctgaaaattttctaacccccaatcgaat

SEQ ID NO: 181389 - DNA, 573 bp, Cannabis indica
gtgatcgatgatcacctttgcaatcaagattgaatactaagaaatcaatgcaaaagaacaaaactaacagcatataatgttgtagcaatgttgcagcaatactggtacaaaaaccagttaagaactaatgaacaaaaaataagaacagtttgaataatctgaattgttttatttgatcttggagagaattacaatgagagagagaatgtacaaggcttaatcacaccaaagaattagaaatctaactatttatacaatctgaactgaaatgcaaagaatacaaagattacaactaaaaacagttaacagaattaactgtaataacagaccaacaacctcgaccaactaactcctaattgcacatgtgaattagttgacatgagacaaatcataaacaacaaaagtgatatgcccaattaaatcaacaatttttacaaacttaaaatataataaatttggttagaataaatgttgaacggccaggtttttacaaaatggaacaattattttttaataaaaaaatacagtaccaaatgtaatttacccatatattatttacttattttatttact

SEQ ID NO: 181390 - DNA, 633 bp, Cannabis indica
aactattaattcaattgatctgattcaaataaaactgatgaaaaagcacaatgaccacaactatattaaattgaattaagtgttgtggtttttcaagttgatttacagttgcatcattattttatattagtttaattcaattgtttgcaagaatttattttggaaataagaaaaggagaaaacactttgagaaatagttagtttctgaaataaatttaaacgtttcttaatagtttcattttagttttattatagtttattaacagcaataaatataaattgtaaataaacaagtatacaaactataataaaactataaaaaaactaaaacaaactgacaagcagaaacaactctacgaatataaactacaaacatctaaatcgaattgttacctaaaaaagaacagcaaacaactatacctaataatattcccaaaacacatcatacataaacatattaaactattaaaaaactgaaaaaaaaaactaaaacccattaccataaaatattgaaattaaaaacacatatacctattactattaccaaaaaaacataaataagcaactaaacaaaaataggcaaaaaaaaatagtacaaattacatacctataaattcacacaattaaaccaat

SEQ ID NO: 181391 - DNA, 550 bp, Cannabis indica
agatagtatggtcaccgttcaaggtattcgcagtaatcaaaagataaactctacctttgaacttgttattcaagattgtcaaattctattatcttctttaaataatgtaaaccttttattcattagacgatcaacaaatcgagttgctcatgttatagcaaggcactctcaattttttcctgattgtagcattttttagcataatgtttgggctgatttaaaagctctcttgtactctgaatgctaatatttcaataaagttgctattttatcttaaaaaaaaatatatgtatatttaatattctaatgtattatctattcatccctacctatcaatatatataatgagacttttctctctattcattaaactaagaagcatgtgcaaacatagaaatcttttaagtagttgaggagtatcacaaattaattaatatatataacaacttataataaattaattgtataaatagagcattgtgttatgtatatatacaacaacaacatagataggtattcacaacacaatatatatttcttaattctcaat

SEQ ID NO: 181392 - DNA, 596 bp, Cannabis indica
aagaacaagtgagagacacttggagcagaacgtgagacccgtagaccttgtaaattaccaatagcctcctcatgttggaaaagtcttgataaaccttccgcacatataatgaaaagataaggggataagggatccccttgtctaataccacgacttggatgaacagtcccttgcaccgaaccattgataagaaatgagtaagatacactttgaatacatcgctgaacaaggtcgaccactgctggatgaaaacccaaagctaacatcatatgctgaataaaatgccattcgaccctatcaaaggctttgctcatgtctaatttgatggctgcataaccttccttgcctctttttaaatgtttaagagagtgtagcagttcaaaggcaataagtacgttatcagtgattagacgagatggaataaatgcactttgagaatctgaaattgcttcaccataaaaggcttcaatcgtagcactattgacttcgaaaccaacttgtatagaacgttacaagactaattgggcgcagctgggacattgaagtcggttctaaccttaggattaaggtgatacagtttgattgaagcttgaagg

SEQ ID NO: 181393 - DNA, 691 bp, Cannabis indica
catgtgattaaattggactatgcaaatactctttgtggtgagacggctgctttttgcttaagtttggataccgcaaagctcaacggtcataagttcgtcatacgtaaaaagtgattttaggatcgtaatcaactcccttaactgtatttcatcgtgttgggagattgagaactaccctagctctttagatattttaatagttatatttttcttgtattttaattgcttaccttaccaaaaataatcataaggtctaattattttattaatagacgataattaaaaaaaataaaaaaaagagttagaacagttgatagggctgcgaaaaataaaggaaaaaaaaaccaatcatgtgagaaatgtgaggggcagaaaaggacatttgcttaaatatcttggttttcttgatgcagtcttctaaggtggagaatgaactagactgataagaaaaggaaataaaaatgaaaaaagggcaaccttataaatgttagtctcacttttctgttgtgatattattgtaattcgaacaataagtagtggcattttgggattttcactgtgttttggttttggagtttttttttggaagaattggttttggagttatggtttacttactttactgagaatctgactcagcaccatctaatatttgctttttggatcattactgaaacttggcgcaatccaa

SEQ ID NO: 181394 - DNA, 1192 bp, Cannabis indica
atattagatgtagtccaataaaaaaagtagctcagtatacctcaaaaggaaactcttgattttatttagtagtttatatttatttaagataaattattaatttatgagtaatatgtttttttttttttgtaattttaagtaatatgatttttgtttccaaataatatatcattatcaaatcatttcattgttaaaaaatttcttttaacttccgggaattccgttcaaatttgactaacataaatttgatgtgacattgttatgatacatcaatgctacagatatttacatctacagacttttttgtcttcataacatattattttttttttttttgaaaaactttgtaaaattagaaattaggtaactatatatagaaataataaaataaaataaaataaatatttctttttctaacttaaaaaaaattaattacaccgctaatttagtcttaaagattatactattgcaatttaatgttgaatataattattttgagatgtgaaaactatatattttcttatcttctttagaattaaagtaattatttaattgcttataatactaattatatactcattagttttttttttacaagatatatactcattagttaaattacaataatgatacaaataattataaaagtaaaaattttataaacaagtaattggtgtataggattaacttactagttaaaatatcattagtccccactaaaaattccaccatcacaatattttttaaatcatttttgtgctgtgtgtagaaaaaataacatcatagttacttctaagtgtcattttagttatcacaagcaactaaatagttgatttattagttgcatattttttatatgtcaaaatgtctatattcaagagtagattatttctctatttagttaaccaaaaaataactaaatttttaaattaaacaaaatttaatatacaaaccaaattcaaaggttgctaaaatatacttttaattcaaaagatttattaacttaataactaatttatatattaagatgtttacgaataattttttaaagtaattaaaacgaattttggataatatgatataaaaataaagaaaccatttttttttaaaaataaatacataaaaaatggataacaaaatgtgtagttttaatatgttgaatgactacaaagtaattttttgatagcatgat

SEQ ID NO: 181395 - DNA, 810 bp, Cannabis indica
ttcgttacatagcatatatcatgtacatgatacaaatactatatacataatatagagtaataataaatttagaaaatatatatataaatattatgatatgtactctgtagtctgtccctcggagtacccggggtaccgaaaatttaagactatatatacagcaaagacccaacgaggcccaaataacagttatatatagttttaaatagtggcacatgcattttttcggtttccgtgtgtagtactttcatatatacatatatctgtatatatatatatatatgtacttttttttaatatatacacatattatataacgtatattttagaagaagagagagagagagagagaaagaagatcagaaaaagaaaaagaaaagaaaaaagtaccttagcagagggcctattccgaatctcaggaacaagttggcgtaactttgaaaccagttcaagtatttggtcatctgaaatcctagatgaacccgattgcctcgaccttcggctagacatgatgatgatgatgatgatcgatgattttattacttactaactttactttttgggattttgaattatatatatagtatagtaaaaacttgtaataagaattaataatatatagttaatgaaactagtagtagtagtagtttggtaagaataataaaagtgtatatgaatgaagatgatgtaggtaagtagttacaatgaggaagctagcaataaaaactagagtttattataattaagctgaagagaataaggacttgacaaagtagttagctagatttgaatctatatatcaaaaaaccg

SEQ ID NO: 181396 - DNA, 835 bp, Cannabis indica
aatatcgatacaatatcgacatattgtcgattattttatcgactattgtcaatggcatattaattgtttgtatgtgttttgatttttaaggaataataattttatcgataatttgtctataggtttttgatatttttttgattatgtggctaatctttttcccttttgcagatgcctccgaagcttatagttccattccctgagcattttacagatcgtgtgacctacagaggtagtggtatttttagtaagtttatcaaaccagatattgataaacacggtttgactgatagggcaaaggcaaacccttttggttaattttagcaggctggtgctctatccttttcttcagtactattccaccaactgatgctacataaatgatggtgaatgctgagaaggatgacaaaatgcaattttacattgcacggaacgagatgaaatttggtgtggtcgagttcgcgctgattacaggcctcaacttcacaaaggggccaacagacgatgagaaagaagccatgttaggatttaaccggttgataaatctctatttcaaccggttagataatatgaagacagaactacttcagaataagttcctagcctgcgaggtctcgaatgacgcgtacaagctagggttgtgcttgtttgtggagactatcttgttggaccgagagggaaatggatgtattacaactgacatactaaaatacatgtaggaactactcatttgccagattgatgcataaccctcccaaaaatacaatgttgaaatagaaggcaaattatgagaagaagctgaagatggatgttcagcacgactacaagtacacag

SEQ ID NO: 181397 - DNA, 879 bp, Cannabis indica
gacaagtgtaaaagtaggtttcaggagtttaaacagaggttagttaccgcaccagtactaaccttgccgaatcagtgatgagaaattcgtgatttactcgacgctttaaaataatggttaggttgcattttgatgcagtctggtaaagttattgcctatgcatccaggaaactgtaaggagtatgaacaatggtatcccacacacgatatttaattggtagtggtagttgttactttgaaagtttggcgtcattatttgtatggtgaaaagtgcaaaatctacacatgtcactaaagcctcaaatactttttcactcagaaagatttgaatatgaggtagtggcgatggttggaattgattaaggactacgactgcgagatcctttaccatcttggaaaagcaaatgtggtagcggatgctctaagtcaaaaagctccgaagcaagtttatgaaataaagaagatcgcaccaaaattggctgaggatatgaccaaagtaaggattgagtttgtagttgggaaattggcaatattacgttacagtctaattagttggagggaatcaagacaaaccaacaaagtgatcaagtattacaagagtataaaaaaggtttgaagttgagtcagcaaaggatttctcaatcgtcatcagatgggttattgcggtataaaggcaagatttgtgtactagttgacgatagtatcagacaggagattctaaacgagtctcataccacgccatactaattacatctggggacaactaagatgtatcaagatatgaaagccctatactggtggccaggtatgaagagtgatatagtggagacgtgttaaaatgccttgctgtcagcaagtcaaggtagaacatcagagacg

SEQ ID NO: 181398 - DNA, 578 bp, Cannabis indica
tatttttactacattagaagagtgtagctgagcccaattcataagctaaatcaaaggctcatgacaaaatcacacttggagaattgcatagggacaagttgatcatgcaccaataaaaatataaattgatgattgggagagaatcagcacaaattttccaaatgacaaatttggtatgtactaaagtagttagttgtacccctctagtgaagcttttttcaagtgatttagggatcttatgatgcagccataaaataattaagttgatggtattagtaatgattagatgattaccaagtaaaaagtactaacttgatgttctttcaaaaaaaaaaaaaagtgaaaagtactatgaattctccattttcaattcaaaattcaaatcctatgttttgtctaccttaaatgcgattttttggtctaagccaagcaattactaaatattctcaaataaacaaaaccaatgaccagaaaaggagggagggtacacctacaaaaaaaaaaaaaaatactaaagttcaattcaaagatggtcaggaataatctgatactccccatcaaaaatacaagatgaactt

SEQ ID NO: 181399 - DNA, 650 bp, Cannabis indica
atttcatttatatctattgttttaattcaggtttatccaatattttagacttaatattttttagatcgaatcagatccaatcaatatttaaggtccggtatatattggattagattggatctatccattcaaaaaataaaaagtaaaatttaatatgttaatgttaatgttaatgttaatattcatatattctattacatgtaacaacataaaatataattactcatccaaactaaatgaatatattaatatgttcgatttgatgttagatgtattggattttaaaccacacaaccaatgtccgatctgatccaattagatattcaaagataatatccaatctgatccaatcattattggacatccaatatttagtgatcaattgtaattagatcattcgattttcattagattagatggatttatgcacacccctaactaaaactattagggcatctctaatgggttaacaaaataggtgtccaattagcctcacttaacacactttaatttttagcccaataaaaattttcatttttaattaaaataaagtaggacaccgatgctattttgtaaatctttctttacctctttctccttctctcctctaccacatcatacattatggtctaccatatttagaccgtgta

SEQ ID NO: 181400 - DNA, 539 bp, Cannabis indica
ggactcttatgttctaaaaactttatattgtactaattagtattttacaaaatattacaatgaagagcataaagtattttttaaatataacttaaattatttataataaaagttacaccattttggaatttggaccctatatattctacattcctatatttttaaaaatttaatttagatctcacttttttgtaataataataataataataataataataataataaaataacaaataagtaatggactaatatatttggatctcaaccaaaaaaaaaatagtttaaataggtaggtaggtaatggattgaaaaaaaataggataagtcttgttataaatagtggtattttgatcctaattaaaaaaaaataaataaataaaaaaaataaaaaaaaaaaatagaactttagaattttaattctaatatttggtaaaacatagttcaaaataattttttgtaaaaaataaagtttaaattaggtaattatttagaataaatagtaaaaataataagaaaaccatactaacatcctaaac

SEQ ID NO: 181401 - DNA, 508 bp, Cannabis indica
taatttataaattaagacttttatttcctttttattgttatataaagaaaaatgttttatatttgaagcctttgcagaacccaaccaatcccatattgccacatgcataggctttgaacatgatcattttaaacatttatatgtatttatatatatattaaaaagggtaaggattaatcaattttaatcttcaattgaaaaagtttgaaagtaagaaaataaagtgagtacttcataggaatgcattgaatgaaatcagagttgagaaacactcaaaaatgcctcttctcccaactcatcatataccacaaaaggaaaggcttttatatactcttttcccaagctcaaaaaaaaaaaacaacattaataatgagttgaaaagaaaatgaactaataatatgtaattaatttgataagaaaatactcggtctacctttcacacccaaactaactttagaattatgacaaagagaaaagcaatacaagcgccagtgacatagttggtacc

SEQ ID NO: 181402 - DNA, 942 bp, Cannabis indica
ttatctttcatttctcgtatttttgtaaataactcaaaataatatgctgacatggttattaacgtcaatagtcacatttgatggttcgtactaaaatgcaagaaaaagtaatgttttggtacttttgccaaaaaaatggtacatatccaacgtaggtgaggtaacatctaatttatttttgtaaaaattcagtatgatttataaatataaatgatgtggatgctgtacttacaagctataaataaagtattcttatatttattttgacttgtaattggtgattaaataattaatcatgtccaattaattataatattattgaattaattattgtgtgcatattgaaattaaaatttaatataaataaaatttatatataaattttataaattctaaaatatatatacatttttatatcatttaaatttgtaaatataataaatagtatatgtatattttgtttaaaacaataaatacatattgtatcttttttttttaaaaaagttttatttacaattttataaatgtatataaaatttttattttataattgagttggttaggaaaatatagatacaaactttaatttgttgataagtttaagataatcaagaaaattaagattgtatatatcatatttgttgaccgaggttttcggcaaccgataaaatattatgagtttagagagctgtaagaaatttagagaaggaattttacgtggttggggcgttaatgagccttagtccacgagtctttgttatttatggatatattttatacaaagaatgtatttggtgagtgtctcactcttataaatacagagaatgttcttgatgagtatttactcttcttgctcttatgcaacccaagattctcgacccctttaatgagctttgagggggtatttatagtgtttttggtggggtgatccccaaaactatt

SEQ ID NO: 181403 - DNA, 720 bp, Cannabis indica
atagacatccttgtccaacaacacatgaacagaacggattagctgagagaaaacacagacatgttgtggaaaatggcttaaccttgcttgctcaagcatctatgcctcttaggttttgggatgaagcctttagagctgctgtctatatccataataggctacctactcctattctaaataacaagacacctttagaagttctctttaaccaaaaacctgattaccaatctcttagaacttttgggtgtgcttgttttcccaatataaggccttataacaaacataaaatggagtatagatctgcaccttgtactttcttaggttatagcctaaatcacaaagggtataaatgtctagattcaagtggtagaatgtatatatctagggatgttatctttgatgaaaattcatttccctttaataaaacacctactgctactgctacatcaatcaattattctcctgaatttttcacctctggcattataccatctatctctcacaatgatgcatctgttgtcactcctacagactcactcaactctccttctgcttcatttcctttaccaaattcagtgtctccaagtgtgtctgaccaacctgcttctattgacacttctcattttcctactgtttcagtttctaacaatatgcagacttcatctaatgtgttggttgatgtagatgttgctcagaattttgataatgcagctgttgcat

SEQ ID NO: 181404 - DNA, 594 bp, Cannabis indica
ctccgttacgtaaagggtgagatggatgaatgtagttatcttctagctacaaatatttgagtcaatgagttgtaagcccttactccaaagtatgtggatcaatgtgctacaagctccttcatgtctcgtcatgtatgttcttattatgtactttgtttatctcgaggtggacatattatctcgtcaactatatctattaatagttattattcttgtctcgcatatgcttacgtggcagcaagtttgaatatttctattaactttaattaattgtaatgagttatttaaatcgcatttaataatacaatttaattattataatctttgagctgattcatattcttttattgtacccaggtcatcttctggtgaatagctaaattttgagtataacaattgccctctaaacattatttttaattcaaaagtacttttaaatgtctgtagggtacaaccgtttttatcccatttaaaaattgcatgcttagaatttttgcggtttcaaaacttcgaggcacatcatttctcatttaatgctctgattgttccattcttgtaaagttttcatctgttagattagatcttccttgatcg

SEQ ID NO: 181405 - DNA, 594 bp, Cannabis indica
acatcctttaaaatcttctttcacatacataaaatatttaaaagtacaaaatcaacaataataaatttattgttcttagtttaaacataagtcaaattgggggtgtagctcatatggtagagcgctcgcttcgcatgcgagaggcacggggttcgattccccgcacctccacactttttgaccttttattcatttttatgtcaatccaacggttcaaaattgacaaccaaacataattacggtgcaccaacatgcacgagaacacgggtttcaacatttccatctttttaataatcctttcattattacactaatccaacggctcagcctagatgatcaaacaaagttacggtgcaccagcatgcacgagaacacgatcctttcatcttttataattatactaatccaacggctcaaaattgaagatcaaaaatagttacagtgcaccaacacgcacgtgaaaacatggcttcgaaccagtgaccacctctccttcctcatcttcatcaccaatccaaaaaaaaaaaaaaactctttcaaaaaacacagtaaccctttcttctctctctcatttctttaatggccttgagattg

SEQ ID NO: 181406 - DNA, 886 bp, Cannabis indica
ataaacttttgtaggatcaaatttaagaatagtaatgaaaacaccaatgaaaagaaaaacacaaaataaatgtggtgtcaatattcttttaaatatcacaatctatgaggccacaccaagagaatgaagtattagctaatcataaaagtaattgacttgtacaaaataagactcctattaacattactagattagtattagtattatacttagttgtattttagttatgtatattctttgttgtataattaattaattagctttttttttaaaaaaatttttgggtgattcaataaacaatattatttttattaattttttttttatttaagtgttatttataaaaaaacaaacataacaatattcaaattttgttgttaattataattttaatttagccataacacttttaattttataatacttttttttctttttttagaaatatcatacatttttttttaaaataaaataaaaatagaaagatatttttttggtaaatgcaataggtaacgacatcaaaatagtgattatttaagacacataaatactttttctattttgttattttttaaaaaaataatagaataatattttttttagatatgtaaattaggtaaaaaaatgataatagaaatatatttttaaatatgtgcaatgggtttaaatttaaattacaatgttaaaaaaaatactttatattatatagccacatttaatataagataaaaaataagaggaatatgtagtaagtttaaatttaaattgtaatgttgtgataaaagataagaaagatatgtgtagtaagtttaaatttgaattctaatatttaaataaaataaaataaaaaacactttatattatactgccacgtttaatatagcat

SEQ ID NO: 181407 - DNA, 720 bp, Cannabis indica
atatatatagataaaaaaaaagtagcaattctctttatctgtaacgttgtactttcaaacacaaaagttgagcaagaaatcaagtcaaagtatgcctagtcttctggagctcttacaactttcaaagtcagccttattgtgagcttatactttatattttataaatcacacaggtgtaatgtcaaagtcaacgaacacattatacatgtttcaatgtttttattacacgtttacaaacataaataattccttgtatcaaaagaagggaaacgaaaaaatccacttttccgtagcttgatgttgatggccatcttgctgattaccaccacagtataaacataaaaagatttgaaaacgcctttccaagaacttattttgagggcccttcaaactgatctcgaagtaactcgtatttcttaagttcagccatggagagtgaaggagaaagatctctcaatacctgaaaagtcagagcaaggtattgagacatgctcagtttcagaaagcttcaaaaccacatgtgtttcaatgcaaatgccaaagtctctcggagagaaataaagagcagataaatccataatattggaaatctatcaatatgaaaaaggaggaattaaaatatatatatatctcaaaaaaaatgtgtgtatacaatgtactctttatgtgttggaatcataatatcgacatgtaaaacttcactatcataacaacataaag

SEQ ID NO: 181408 - DNA, 518 bp, Cannabis indica
aggcaacgtactggtagaggaaatgatctttacataaaatgaaagaattttgtgtaattaaacaaatattgtcgaatcaaaagtggcgtctctaatctatgataagatgaatgaaccatcagaggctcattagtatattattagtgagaattaatgctaaaaaaaatgtattattggtgtctagtatctttctccgtattatattgttattggtgtaattaagtatcaggtaccataaaattttaaaaatattttttaaaaaatatcgtaaaccaatcataaagtaccacttataaaaaatattcaacactactaatgcctagtataatactcattattagttttaccatcttcacttcaacacatatatatttaagaatctaagctcgggacagttgctccatccggctacatctgacctcgtcaatgattgtaattagtatacactattatataaaaatattaaaattatttcaactatctgaatattgataatcaaagctatatatgttaaagat

SEQ ID NO: 181409 - DNA, 694 bp, Cannabis indica
ttttagctaccaagctaatttttttttttttaaaaaaaaaaccattagcatagtgaacaccctaaccagaatataataataataataatagtaataattttaacttaaaaaacaaatcaatttttaaaatatatataataatcgtttcaaaaaagtatataataataataataattttaaatttaattagatggttatctaaatctaactttgaaattttgacacggccatgcgccagcaaataagcctaacttagttgattttccttttcaaatgatctttgttcgtacattattttttcttatattcaaaaactcaattttcttttctttgaaaaaaaaaataataataaataataaatttagggttttttctcttcagagaactagttagcacgtggtggttacattaaatttataattaatattatagtgacttttgaaagaggaattacttcatacactatttttttaattcttttttttttttttttatttttttcaaattttacagttttggttactccgctagtttctctggtgctatttatgtgggttgttattacggattttaattgcgtttaggttgctccgttaattgctataagtatttctgtacatagaatttcgtaaaaataccaaaaaatatttgaagtaaaaattaaaaaaaaaaaaaccctttttaaaaatctttc

SEQ ID NO: 181410 - DNA, 623 bp, Cannabis indica
accttaattgggtgatgtaatagtgattacattataattacaatttctattacctcaaactaaacataaacttaattttgagcatcatacctattgtaatctatcttcatttgttttaattaattacttaatattttttttttatcttatctagatatttttttaatggtggaccaaattaatttaggcgttacccctctatagattattaatttattatagatatatatattttgaaaaataaaatattattattacatagttgtcatttttcataagacacaaaaaaaaaaaaacgtggaccgtttgatttggacataaagttagggcaagaagggagcagaagacccaaatttcattcatggtccaaaccggttgagattggtgggcccactttttcccaacctcaaaagaaaaattaaataaattcacaaaattattattattatttaaaaatttacacagtataatattgtatttttttttccttaaaggttttatattgtatttatttatgatattattataaatttttaaagtaattttaaaaataaatttattaatattaaaataaatttagcttctctttatttttattgcgaatgtaaaaataaattaagggt

SEQ ID NO: 181411 - DNA, 502 bp, Cannabis indica
gaacgttcttaaccatttggggagcttcgttgttaagctcagggcagcttgatcataaagctgacaacgtgttactttcgtgtttttcttgcatatcttactgagtctgttgactcatcagtttgctaccttgtgtaggtaaaggaaaggcaaagctggaggaacagtgaggcgggactcgacatgattgtacatatcgcggcagtgcaacccggagggtttcggtcttttactattttgaattcgtattttgaaaatgcatgtccgcaaagcttttaaaaaaaaaataaatatatgtaatagtaaagtacttttaacctaaattttgatacctgggatcccgatctatatggttattaatatataaattattaaaattaatttccgagtttattattataaaatgcgggcgtttacattaatcttgagatattgtcattattgtatctcgtctattattatcaccgtatcttactaaaaaaaaattaacgacaaaaaaaaa

SEQ ID NO: 181412 - DNA, 713 bp, Cannabis indica
aggctcagatcttgttattactctacaacagaaaggaacaagggttagaaatctgagcagaaggagacatattattccgctaccatcaatttaagattttctaaactcttatgtgtttaattttattattttagagaattcatatttagggtgttaatcaaatataaatctagatcctagtaaaataagttccaatagattctccttaaatatgattcgaagctctgaggatggtggggagtctagtgcgattagagagtgtgaaaatttgaaagagaaagtaaaagtagtaactgaaagattaccaagaatatttataccctaagacaatagtccatgtgaggaaggagtggatggtcacgatcttttcggaacaaggcacgatccccatccaacggctagggagaccaaagatctatgagtatctccacatttaatgcctttcaaaatcaaggtgcgatgtaatgatgaaaatcttcttttttgattttcatgccagtcagtgaacagacgtcgaaatatagtcgatcctggaagacgactcctcaataactgcatcctaactcacgctcctcgactgccacgaggacaaaccatcattaaaaagtggaagtcaacttccatggtcgagtaatttggaaaaggttcattattttcttcctctaaaatccacacatccagatcaagaggtcaaagcaagcttccatcatgag

SEQ ID NO: 181413 - DNA, 751 bp, Cannabis indica
tgtgtgattttttttagtgattaaaatatttgagattaatatacttcttttctttattttgtagatgttgagttggtttggacggaaattcaccactaaataatcaatttatgccttcatgtttcttcactggttttgatcctacttttgttacttcgtaaaaataccattttcttataagattttaacaagtttcttattggtcgaaggaataaatcatgtacataataaattctaacctttagattataaatttttattgccctttttataatatgctattttttcttatatttactaaatattttatactaaaccattccttattactttgtagatgtttttatggtagaatggaaagttaggggttgtcattttttatattaaaagttttattatcttaattttttttttttttattttttttgagtatattcctttcttatgtcaaagtaacaacaatgttgtgttttaaaggtgttttccatgggagcggtgttgattttttactattttttttcaaattaaattgtatcttatagtttttggaatttttcaaactgtaaccacataataaaatttcaaaactataaaattcacaattacaaaaatagagtatggtacggtaatgaaaaatttacactattgcctaatatttaatcatttaaacatttaaaaacttttagcttttttgtttctactgttttgcctttagcttgttgtcatttgtcttattttgttaaattgggtc

SEQ ID NO: 181414 - DNA, 741 bp, Cannabis indica
agatgccattggcctcttattaagccttttaggagattaggatcagcacaagtgggtattccattgacttgattatatgagcacataacacttgcaacatttccttccaacacacaagatttgaatggtacattataagtttcttcaagatcctgtttgctaacttttgcattataatggtaacgatccacaccattccaattgtcaagatcataagctgtaaagtgcttgcaacaagcagcaaccttaaggcgattcccttctccattaccttggagtcctttcacataatttgctgcatactttccagacaagatgggatcttctccaggagtttcttggcatcgtccccaacgagggtctctcaatatgttcacatttgggctccaatatgtcagccctgcttgtcctccattgtacattgctcttgcttcatcagacacaacctacaataatatttataaataaaacataagtagatacctaaaagcatattacaatggtaatagttatttagggttatttttgtctttttacgtgagttgtattaagatttttttaattagttgtatttttttactttaactttgcaattgaatgaaatcttgatttccctgcatctattttattctttatttgttatttttctctacacaaataattatcagtacttatttatgctcttattatttttctaatatataaagttctatataatagtttaaataggaatctcatcta

SEQ ID NO: 181415 - DNA, 865 bp, Cannabis indica
  modified_base (837)..(837): a, c, t, g, unknown or other
gccatggataggtgacaaggattgggaagtattgtgttctcattttcccttgaaaactttatcacaaaatcataataagaaatcaactttaaaacagtacaacacacaaaggaagtgaattcaaaattcaagcatcttaacttcactttaccaatagtttaaacatttataccaagtcagataaagtatgtactgttaggacagcacataaataaatataagaggagcatttcagcatttcattaaaaaatccacccaattttaccattggctcctgttcagacgtttctgatgtccaaagatcctccaaattgtagtactctctagcattctcatcaagagcatgtattattacttttcctacacaatgaataaaacaaccatcaataattataaagatagagtctggaactttcaccatatcagttgattacaaaaaccatagaaattctaaatttctaatatccaccaatcaccaaagaaatatttttggtatctcatgaagaccctgttggaaaaatcacaatataaatcaaaaactctgaccgcaatggtgtgtacaaggccgtagctagttcgattggagttgttagcggtattctattgagtccaagaagggatcattatccatgagatacacaggtattccatttgaacacttagcatcggcactagtattagttggatcaaatagtggcgcgagatgagggattcttgtaaaaaatataacttcagtaaatctaattatttctctggtggagtgtttcatggcagtctagcaaagtattgcactttctatagtcagaggcaaagtctaatgcagcaacggaagcgttntaaagaattgtcatggatgaagcagttc

SEQ ID NO: 181416 - DNA, 1221 bp, Cannabis indica
ttacaaaaatactggaatttaagttaacttttacaaaaatacagtcacacggaaatattttcaaaaatactgtatttttataaaacaccagtaaaacacaaagcaagacaactcaaaacaacagtagaacaccagtagaattcagtgaaaacttaacacagtatactgcaatacgaaacttataaaaaaatacagtgaaaaagtaaaaaataccgcctgacagtatttttgtaaaaaaaatgataaaagttagtatagcatgtaaaaatctcttactaattagactaaatcggatgaggaaaaaaatgttaaattagatcgaatgtccacccctaacctatacaatatattctaagtaactagtttacacgccacacggctatgccacccctacacacgtaagtttcaattttcttttattctaacttttatacttaacaatactaattttgtggagaaaaataaaactgattagactatagaatatttaatctaattttacttaatgggaatattgtatgaatcttgaaattaattttttttatgctttaagaaaaagaaagtaatttttttaagttataatagacattttgataattgtaatctattgaaagtgatttatttccaaatccttatatctcttatagaatattatatgaaatttccagttttaattgcatttgcataaagaaaactttaacattaaaattaataaaatcataaataagattatttgtgttatattattttataatataataagtgtagattaaaatgtagtaatatatattattatgtgaataatatgtattaggtgtttggtaaataaattgtgtaacatataatttatttaacctaaaattgtaacctacactttataacatggagaagagttacaaagttaattgcttttgtaacttcttttggttgatcataatattgtgtaataaaagagatgttacacaatttgatgataggattcaaatggtttgaaatatagttgttacaaactatattaatgctcattttatgagagaaatgagatggtgtgtttgaatcctaagagtgatcacctaaacactatataaaggagtctaatgtgctcattgagagatgaagttttctatcaagaaagcacattgctagaaaaccctaaggcttgataattcccaaagctatttcctagagagttcccttagtgcttagagatagggggaaagt

SEQ ID NO: 181417 - DNA, 590 bp, Cannabis indica
caaatatgaaaaagaaaaaaaaacaatagagtgaataaacaacttttaaaacccagtaagccatttaaaaaaaaaatacacattaagtagtaaaaaaaataactgtataagccccaagtcgaaacaaaagtcctccttttgagtcaaaaatccgggaggtgtaaacttttaaaacccagtaggcctgcactcagagtcataaaaaaacctttagattttttttttttttttttagaaagaaaggatgtatcacattacattaaatcagttgttacagtactaataaatctaagacaagcatctgtccacaaatcgaccccaacagaactagtaacagattttgttagtgtgtgggccacactattcgcaacacgcggaatggcacaacaagaaccaccaccaacagcagctaagaaataataaaaaacctttagattttagtaggccatacaaaaaaaaaccctttatttaacaaaatataatattttaaaatcaatcaaaaaataatgtatacgtttaatattgaaatattttaaacctttagaataagtgggtcctaggctgggtctgccagcacttaggattctccc

SEQ ID NO: 181418 - DNA, 559 bp, Cannabis indica
gggaaagtgcatataatgtatggaaccgagtatcacaagaatcttgctcttcaatcaaccactgaaggtacctgcaagaaaaacaaagaaactcaatgctaaactttggccaccgcaaaagtaacttaatttagtaaccttgacaatagttcctatgaatcctatctgcatgagtacatacattgttggtacaacacatgaaatcaatatacctttgaaatatctctactttcgacggatcaatagctgcaataacttcatctgcagacaagaaataaatgtgagcatataatttacaaggtatcaggcacgaaaaacaagttcacattacatgcacgtgaaccaaaatctacaagggtaggtcatgtgtaattttggagaatgatttcacctggaggaagttggttttctcgtttttctgacgttaaatctgaactgcgaaaacctgattgatatctgcaatctaacaagacaaaacgagcacaaggttagccccttttgcttgtgaatcataatacgaatataacataagagagtttcaaaatatgtacccatccaa

SEQ ID NO: 181419 - DNA, 563 bp, Cannabis indica
ataaatttattatgtgaaaaatatggattttgtgctttatatatatgcacaaaacaacaaaagccccatcatcaacagcttcatatataattactgtacatagtactatcatcatgtgcctaattcccacgctttgtaattatttggtttttctttcgcttgacaaacattgatcagcaaaagatatatattttttcaaaaaaatgtttgtttatggtacagtatgaacaggcatatatgtccctttagaaaaatcaaacccattactagtagcatcgagtatatataattagcaaaggatttatacatcgaaatatataataccctttaattttcaaaatgtaatgaaataaataaaatcaaatattaatgatgatataatggtgtagatatataagtcgtttacgtattatggcatctctctcatatgatggaaatttaaggataatttttttctataattaatatatttttttaatataaacgtttatacagaaaaatcctttttaagaatattttatttgaaaataaactcttataaaaaaaaatcaaatcctaatttg

SEQ ID NO: 181420 - DNA, 766 bp, Cannabis indica
tattaaataattagaattggcatttaaaaggttaaattggaaaattggcatttttgagaaaatgggaatgaaaaataacaaaatgggaaagttgcaaagtgaggcccaatttccttatatggccgcccactatgcataagcttttaccattttatttttccattattttaatgccatacaattctaacctaaacctagagggcattctataaatagaaagtaatggcttcaggaaacaacacacaattgcatctcattcttttcagagagaattcctgagccgccactttcctctctcttttcttctcttctaaatttcgaaattcccttgagtgatagagtagtgcccacacacatcaagtggtacctcaatcatagtatgtaagactgtggaaaatcagcatcaaagaaggagagaaagagatccagattcagatcttgataatgctctgctacagaaaggaatcaagggctagagatctgaatggaaggagtcattatattccgctgcacccaatgtaagttttattaaactttatatgtgtttatttcattgttttagaattcatattaggatgttaatgaaacatacttggtagtaaatctagatcctggtaaaatatttccaacagatcgcgcttttcttctagaaggtcgaggtagagcgactgcttttcctcgttctgttcaacgttgaaaacatctcttcgtagagaacctgctccaatctcaactggtaccattgcctcgcattcataagagagtg

SEQ ID NO: 181421 - DNA, 1218 bp, Cannabis indica
aatgtgtttttggtggggagaccacagcttttatttttttgatttggacaacatgagttcttccaattttgtgggtcattggatttacaataataataacaaacaagaccttgtacggatgttccaaatcaaagcataaatatttatattactagttaatataatcttagatttaactaattatggccccaaacaaaggatggtctcctcaagaaaccaagtaactaactatacaaactaacttgttggattttggtttctttaggaaaaaataattggcattaagaaaaattgaacaagaaattgaaatatttggattaaattattattggtaattagtaaaattagaaaattatgtttgaattaaattaaatctaggttcttatttttaaccaaattgatttggattctatatattattatcacatcttttataattttttcggtaagtaccatcaaccaactcacaataaattccataataaatccctcaaatatgtagttttacaaaatacaccttaactttttttgttgtttaaacttaactatttttattatagttgtgcttatctagtggtttagctcctactaagataagtatcaaacttttggtggaaggtcaacaattgatttgtagaggggtagactacaaactatggctgctccattcattcattgtttatttattttaatttttcttaaaaaaaagaagtaaaccaaagactatttggatggattagagttgatgataggtcggtgggttcttaattagcttagcttacactttttgactagtctaattccactaaattacactacatatatattatatatatatatatatatatactagtaaaaagttacgtgcgaggcacgtatactaaattttatgctaggtattttctattatattaaaaggtaatacacttaaaaatgtttatctcatcttggttcaacccaactttatgttgttcccataggattgtgtgttagatatgagcttagaagaatagtattcgttagaatgggtgccagcaatggcggtgctgatgtgagttttatcttctgggaaaaatctagctactctaaaattcaagaattataaattgaaaatgatatcttgttacttttggtgtgcccaacaaactctctaacggatgacattatatttcgcatatcccaaagttgtttaaaagtaaagcaatatagcaagggaat

SEQ ID NO: 181422 - DNA, 598 bp, Cannabis indica
caagtactttgtctttccaatttcgatttgtctattgctttgtctggtagttatattgactttaattgtgagttttaattactgttagacatgtatgtatttttaagttctatttaagaacttaaattttatcatctaatagattgagaccttttattttttttaaaagtgcttgttatttatcaaagattaggtaatagatacaacaaaggtagaattaaaccaaaactttgataccatgtaagctggaatcagagaagaaaagaggagacactgcttttattgttaaaaaacaattaaaaaaaaatagcccaagtctgtaaaatagacaaagataggaaactaatcaaaccaaggaaagttaaccaaatcctaaattatctcctcttaaagagagtcaagaccctgtctggaggcatcgcaataaaccaaaaatttctcttgatctgatggtaagactaataccagagttgtaatcaattgctgtttcaattcttgaaaactagcttcacacttgtctgtccaaacaaacctctgattcttccaacgtctactattatggactctaactactctgcattatatctcactttatttc

SEQ ID NO: 181423 - DNA, 843 bp, Cannabis indica
gttagaaaaattaataataaacccaagatctatttgtatataacatagaacacaataataatatataataattaggtatgtgtacctgattgatccatagcaattatctcagtttgatccacagcagttactccaatttgatagtgcaatactatcaactaagtcttcctccctagatctctaaatcagaagcagtttatttatctgattatcaaaaggtatacaattgtgatgagacaatatgtatttatagagttagggaggggacttagctacaaaaccctagttggactgggcctgctcatcaaaggcttcagtcaactagaaaagcccacacttctgcttcacctagactttacacacagatgctaagcccattaacaattgatcaccaacaatatgggctaacacagcaaagaactatccaatcaacccaagttttaataaaaccaataaaagttaatgtaagcccaaataaaaagtctaacaattaagtctcatatggctatcaagtactaaggtgtgtcatgcttactcttttttcttaagatacatagttatatttttgcattttacatattattaataataggctaattaggatttttttcctaaattttaacatgtactaaattatgctcctgaacttttatgaccgggatgatttggtacatgtcaaattcagagagtaaaaatcttaattagccttaatattaatattactgtgttatgttttcttaattctaaattagttaatatgtttttatgcctaatatatagcttgaaaatcgatcttctatttttttttttctatttttcctaatttatttaaatctaaatatt

SEQ ID NO: 181424 - DNA, 708 bp, Cannabis indica
atatttgggcaaatattagggtttaggcaatacgtaagtcttacaggaccttcaattcaccaccttctagtttgataaaattctttccagggattgggattgctttcttcttgcagcaatgtcccaatctggttcagaagttgatcgtccaaaagatatagaaattgagtttccagcagagattgtcgtcccttataaaccctacctttcaaaacacacattcaaattagagttaaacgataataggattagggaacacttagtgaaggtccaccaggaagataatgctagtcgacacaggcgcttcttgtaagaaataattgaaggcaaacgccgtttcttttgagatgcagcttggtccgaaccccatagtgtgtcctctatacctttggctaagcctttgtttttacccgaagtcacaattacttttgaacaaggtgacttggacttcaaaataatgtctaccaagccacgtaaatcaaagactcatcaggatcctaacgtcacctttgaggtcgagttaatagaatcgaaggtgcgaactatctcaagctacataggcgattcactaaggacatgtagaatcgattataggcgagtatgccgagttaggtcagtacgagctggtgagtttagctgttacccgcttgcgcgtatcacaggcgagacatttgaaggggccaatggcgagaccagtacgagtggctc

SEQ ID NO: 181425 - DNA, 643 bp, Cannabis indica
ataattccagtgtcagaccattacacaggccgtgtcacatggcgcggcggtagttattactaccggaagattaaggctaaatttcaagaattcaacctatgggacagggtgagggaatcccctttcaaacagtttttcgagagagagcctatacaattttcaggagcattttttcatcagttgatgcttcacaaaatcaaatctgacaagccggacgaggtacatttttatgtgggaaggaagagatgtagatttggtagggtggagttcggcttggtgaccgggttaaacttgttgcccgaccctactgaggaagacatcaaagagaaaggaagttctgaccggttgattatggaatatttcaacggtaatccttcgatcagcttcggccaactgcgcagagtttttgagagctgcacagaagttgatgatgtctacaagctggggatggccttgtttgttatgggcgtcctcactggtaaggaggagaagattgtcgttcctccttttgtcataagaatggttgataaccttccattcttctacgagtacccctgaggaaagatttcttacactaagctgatggaaacttgtaataaggactacttggatgtgaagaataagatgttgaaaaaaattgaaa

SEQ ID NO: 181426 - DNA, 665 bp, Cannabis indica
cactttcttagtacctttttgttgtgagtgtgacaatattcattggctaattttgctctattataaacaattagaatgcactaaaaatatagaatgtagtttacaagtttttcatttttaaagtgttttcttcaaaagttagtgtgtaatttttagattattacagttaagtagttacaatatatttcagaaaataatgtttgtttgaatatgagatatgtaattataattcctgttatttttttctttcctaacacatactaattactaagtactgactcccatactgagtctgattagataaaataaaataaaaaattcctaactttatgatgttaaatgatgagtttagggttggtatatattgtaatcagcattgggttataaatagttggagttgatatagaagctaaaaaaagggataaatttctataaaagtgataatgaggagacaaaattgggagttgcaaaaggaagagaataaaaaggtgataaagttcgaataaagaagatagagagtgagatagataaaaaggaaaagaaacttactacagtgaagctatgtttggtaggaaaaaaatagagtagtatggatggagagttttgaaagaatggggagtaagatagatggagaggataattactctctctcattttatttggta

SEQ ID NO: 181427 - DNA, 949 bp, Cannabis indica
attgaaaacttctatggtgggcacacctattttgtcctcatactataaagatattttcttgaccattgatatgtatgaccacattaaataaattgtagttgcatgtagtagattaaaaataaaagaaaagaattattatgacatgtgtctccaatacaatgtgtcatgtaataaaactattataatttaaatattttttattaatatgtaatataatgagactcgtttatataattattctcatttatgctcttttttcctttttttatctttctttctcctctctcccatgtattatcacttcttatttatcttctttacttttttttttcttcttccttgatttttttttcttcatctcaattagattagcaaaattttgatgagtaataaatcattttttttgggttagtatgagaatagattttaagatgatacttagaaaaaaaaaattaaaaaaaataaattcttgaaaaataagtttaaacttgtaggtttatgatgataaataaaataaataaataactttgagatgaaaaacataaaatgagttatttttaaagggtagaaatttcttttagtatcaaaatcataagctaagtaattttaaatgcataaatctcattatttctcatttctaaggaaaataacaaatttaagtgggtttgaaaagttcactaattttctctaaatttaaaaatcataatttcaactttgttaaataaatattagttatggccatcttttttttttacttgtaatttttctcaaagagctatggcgttggtttttaagtggctgtgatttaaagcttggaccttatcctttactagctggattacttgggtaggtgttaaaagaacaggtttgttggctaagattattaatataatgacagcataattagacataaaaattagcagaatattattgatttaattaataattt

SEQ ID NO: 181428 - DNA, 735 bp, Cannabis indica
atatatatatatataataaaaagcacatacaacaaaatatattatatcaatataattatttatcattaaagtaaaaaattaagatgacttctcctaacaccgttactatcataagttatatgtgtattgcaatgttgttggtctctggtaagcttttaatcttttttaatttgttagtttattaaaattatatatctatataagatattatatgtaattatttttaatttaataatcttataaatatgggatcttggtaggggcgtcatttttctcctatagttagagaaattatttgaaattgtttttattatattttgaaataatatattgtagttatagtagacacctatcagtttttaaaaaatcatgaataattaacagtgtcaaaatacggcttcaaatagtcagttgtacgtattgtttcttagagcttatgataaaataaaacatacacgagcacaactctttgattaaaccttaattttaatactataaattattcaaaatttatatatatatatatacgtctataattattatgtatcattttatataaaaaaattatacataatctttttacgttgctaataaaataaaaaacacttttaattggtagagtaaaagtgatacctccactaatttttttcctactagtactttattatttttattctataatatttccattaattttttttactttttgtactacatttttattatgtaatatta

SEQ ID NO: 181429 - DNA, 641 bp, Cannabis indica
tcggggaagcggcgacttgtatgttagctttggagacagcggtgacaatgcatcaccctttgttatggtggaaagtgattctaagatggtgatcaagaacctagaggatgtcgaatctttttggcagcttgagagctacgcaagacaatgtaaacatctctctattttttcactagttgtaatttttcttatatttctagaaacttgtaattttgcggcccataatgtgaccaaataggcttttgccaaaatatttctgataaaagtttctactatttagaatattatattttgtaatgatcgtgaggtctgactgttttgttccctctaatatataaacgctttattaaaaaaaatataaacatataggtaaaagtacttctcaaattaagaagttagccgtagttacatataaagttaataattgccgaagacttcttactttttggtgttggcacgcagttatgtgtagctagtaatattagtaacatgtgtttgtagttgtacaactcgtcacttgagcttattttggttaaaacaataagatggtggtgagatttaggtatgagcccaaaaaagaaatgtattgctgtatataattatataacagggacggaaactaaaagaaacaaataagtgac

SEQ ID NO: 181430 - DNA, 1182 bp, Cannabis indica
aatgacttcagttgcaacacaaatagaggaaacaaatccgataattctcatattcttatcaaaaattcaaatctacaaataagattaagcttagccttctaatttaataaccaagtgcgattaagtatatttctattctaaacaaaaattaacaagaaaattatattgattagatctaatttaaattttcgttttcaagatttccacctaaattattaatttaattttaaaattaattaatctttggaaagtattaagcataaatcaatacaagtaatgagtaaacaattaattcttatctataagcatatacaattccattaaatccctagaaaagtaatttagttcatctcaaggcaaaataccaaacaataaaaataattcatgagttcaaaattcaaatacaaaagaaaatatgacaaaaaaaaaagaaaataaaaaaaaatgaactaaaagattcaagttgtagatccgtcttcaattttttaaaatccaatcagtactataaaaaatagttttttatatattattttcaaaattatgaatatatggatattttattttttttcaaaatatataatgtatatattatttataaaataatatttattttaaaaagtggttagttgatattatttttgaaacatggttatgttattctaatttttgtactatgatgtgacatctgactaggtgacacatgtatcacattttataatttgggcaaatgattctattctagcaggctgtgaagattaatatgaaacccaaagtcatacatgaatggtaggatgtccgagcaaggtcactagtggacatccgaccagcttaatcacatgagtaacttgcatgcaccggccaggggtgcgagttagtaattttagagatggacatcgttatttccaagcatgcatgtcacggaaacaatccctacatttgtgggattaattcgtatctcaaaaaaaaaaaggcaagtagcttagatttcctaatctttttatgtaattatggaataactagtttctcatttattcttataggttaagaaaatcatcattcatcaaataatatctataaataatagtgtaaaacctcactattcaggtaacaccgaattaatttagtagagaaaaacactcaagagtgaaaacctcgatctaagagtgaacgtactgagagatc

SEQ ID NO: 181431 - DNA, 816 bp, Cannabis indica
gacgtttagacaaaaaactattaaaaaatttttaaaaaaaaaaaatactaaaaaatatattttttcggccaagtatcatgctccaacaaaactttccagcaacctactagcgcaaaaatgttttgttagcgaagttactgcgccgacaaaactttctggcaaaaatggaaaaattgtgttaggagtgtattctcgactacttagctcaccgaaaaaacattgcagaatcagctcagtcgtcgcagcaatgccagtggctagttttacgctagcgacttaacttgccggcacaagtaacttttgccaacgaaatatctttactcaccggctaaaatacctttttcgaccgtttattgccatcaactattgatcctatagatttaccggcaaaagttcatttcgattgttactttttccgaagcaaaatttcaccaacaaaactcaattttcttatagtgatcctatttataaacagaattattttttaccactgacattgttttctcttgcttgcagatttgtagatgattcaagaaatagtaggaattcttcaaaagtctagttcgagagtggttttagaagagcattgaaacgataatcctctgagattcaacctcgaaagtcttcagttcatccttgagagactttccttggccttagatttcttcaattgcttaatgaagatccttgttaaccctcgagagtctttgtgaattttgtttttagtatttgtaaaatattctgaatttgtatttaaaaattatgtgaggtccactattactacaataaacacacctacttgttacgaagaaaaaa

SEQ ID NO: 181432 - DNA, 1084 bp, Cannabis indica
accatatcttgttctgttgtgtcgacttaatatgagctagcttgatgtttcaaattgacatttctaagcaaaatatacatttgctatgtttttgttcttatataaggtgttggactaaatgaaagtgcgaagaaaaaggtaagtgcaaattacagaaactttggtcttctctatttttgttcttataaggcgttggactgaataagctaagtctaagattattagagtagaactcctatcttgtgagtcaaaatgtagcaactaatagcaagacagcataataacaatacaataaaaggactgtatatattaagaaaatcaagttgtgacttcaccaaataccatcaacaccacatattgttgaaactaaactcaaataaagacaatgcaaacgacaaaaggagatctttcactgaagatattaatgcattgtcacatagttaattttctcttatcgttttgtgaaaaatgagtcattgaatgaaagcaactaccctataaaacaaagatactgctaattttgatgagtaaccaactccaggttggaaaaaatcaggttacttccgtactgatatgcaaatttgtaagcaactattatatacataaaacaaaatctatggcttttgtggtctacccttattatggtaatgacaaccaatactttgacatcttccttcttgcaatgctctgcaaatattctgatactcaagacaaccatcaccctgatatttttttacatatgtcaacttggaccatatattttatatatatatgggaccactaaaaagtgtaagcaagctcttacattacatatggtcaaatgtctcaaatcatacaattatatgaattgaattgaatcatataatatacagtactgaaatggaggtgcttgatgttttgaaaggcttgatatggaaagaaactgaacatttgcttgtttgtaatgtgaggtactagatgtcacacattacaaacacttgcatttgtaatgtgtttttgaaagttttgctgtgatcagtttatgtcttttctttcactttcattacattacattacattgcagcttcagtttcagtttcctttc

SEQ ID NO: 181433 - DNA, 612 bp, Cannabis indica
cctcttctctgacaactgaaaccaagaaccccttttctaattatgcataaaaatcaaacctttacgttttcccactaattttctcgggaaacaaacagaaccccacataaaaaaaatcaaaccttgcaaacaattagattgccttcatcatcgtactccccatcaccggtctgctgttcttcttgttcttcttcttcttgttcttcttcttgttgttgttcttctaggaaagattgaacaactttcttcacgaaagccttgtaaggaggtttggagaggtcgaggttgagttggtcggaggcttgttttcgaaccttgtactcagtgacgtcatccatgttggattgttgaagaatggaacgcaccgttttggtgatcttctcttccatctctgcttccatttttaggggctttgctttgctctgatctcacaacaacaacactgtttcactttcggagaaatggaaaatgagaaaattaaaatcaaaatcaaaaatccttttttttttactttttatttagtttccccaaaacgctcaaataaaaccccctcctctctctctgtggctgtccttattctgtgtgtgctgccgcaccataacatatcttacg

SEQ ID NO: 181434 - DNA, 567 bp, Cannabis indica
cttgtaagtaatatacaagtgctacatttgttttcttagttgtagtttaatctttgtttaaagaagttgagtttcatatggcaaggaaaatttcaatatcagtcatttctgtcttcgtggttctcctttagacaattgattatggttgtttgttctgtctttgactcattcccatgtatttatattatgcaggtgcaaatctgggccagcaataaaatagatatggaggaaaggtcatgcacgggaaaatgggacgtgcaatccctgattaagtcctcatcagaatattatgggcaagaaaatttagacgacaaagataaagtaccgagacatgtgaagtttgcatttaggaaaccagttagatgccggatcatttggataacactacgtcttccacgacctggctcaagttcttttaactacgaaaacttaaatcttctgtctcttgacgaaaacccatttgctgcacaagtaagcagacgtgcctcatttggagggtcactttccagtgagccttgccttcatgccaaaaggatacttgtagtgggaagctcagtgaaaaaagat

SEQ ID NO: 181435 - DNA, 778 bp, Cannabis indica
cgtacatgtgacatgtctcaatttcctaagttcttcgtctaattttagctaaaagacccttcattaaatttagtgatatgataatacagagtgtctatgaaagatactttttttttaattactatcctctgttcaataataatctcaattctatagtcatatcaacctttcccaaatatatttattccaaaaaaataaggttttaatttaggtcattactccctaatttttgtgttaaaccaacactaatatagtataattgtagcatttgtccatttaattttgacatgtattaaattaattttagttattatatagcttcattgactaatgtggtcagtacttgttttctcaaaacgatattcaaatggttgaaacttgaatctaataataagtgtaatattggtgtgtcaatggtgatatgttggcactcatctcgtgatcctctggttttggtgcctgtgcactgttgttcaactcgatccgattttggatccaaattcatcttctgccccatgactactactcgagaactaatgccaacatgccggggggcattggcaggtaaagtggtgacgattgaacttgaggaatccaaaccagttacctgggaagaagtggatcgggtttttggtagaagtggacgtcaacagacctctttgttgcggttgcttcttcaagccataatggagcaataagtggattcattaaaatatgagaagccggggagtttttttgcttcaaaatgtgggattgtcagggttcaccagtgtagtag

SEQ ID NO: 181436 - DNA, 772 bp, Cannabis indica
aaatatccttgaactatttacagtattattataaattaatcattctatcaagttttatcacatatgggaagcaaaataataacatagttacttagtcaattgttacatcagtgctatatcaacgtcacatgtgtaataaattaaaaaaaaaatatttatctttttaatttagttttaagtaattttcttgattattaattgatttttagtaaataaattttaaaaatacaaattttaatttttttattttaaattttacacataacgttgacgtgacaactgactaagcaaccatatcattattttgtttgtcacctgtgataaaacttgacaaaatgattaatttacaacactatgaatagtttagggaccatttgtaacgggctgaaaagttcaaagacacaataatctataagtcatagttcaagacacaaatatcctaaatagccaacaaaatatgatgcaataatattataataacgacttaaataatagtatttgttaagtctttttttttggtcaaattagttgaaaaatattttttaattaatgtgtattttattgaccaattaaattaattttattgtgttaattttgtacatctaattgctctttttcttttatgaaaagttcttttatctaacaggatgtatctttttgggtaatcttttcttgcaagagaagaaattatctttatggaaagttgcatatttttagtaaaaattaaactttttacttttttcttaatttgattgattttcagtttttgtcc

SEQ ID NO: 181437 - DNA, 842 bp, Cannabis indica
  modified_base (46)..(46): a, c, t, g, unknown or other
gaccagatagatagagcagcagccctatatccaatgctatcatagnttccttgctgcacgctcgatattaattctatatacttactatacatatgaatgaatattacacatacatacatctctctctctctttcaccaaaacccaataagttttatgtaataacccttattcaaagaaaggaataatattaccaggattatcgctaccttgtcagcctccttttcaatcattatcttttatcgttttccccctttcttataccttctccttcttcttagttaaacaaaacacattttcccatacaaaactatacactttattatatacaatactacctacagtagaacctctattcaagaatacacttggaccaagtaaattatattctaattgggaggttataactaaatagagttacactaaaaaaaaattaaaaaaccaaaaaatatcaatgtaacaataataacaataaataatcattaatactatatcataatagaaatattttagagtaaatataatttcatacatgtattataatttaaaataaaattattaattttacataaataaatttacaaaatacatgtatatattttattaagatgtaattattcttatatagaggtatactttgttaatacgggacttagaaaatgtataactaattacaatttagaggttattcttatttataactggcccaaatcgggacttgatttttttataacaaattagaggttattttgaatagagtattcttaaatagaggttctactgtattacttataataattaatatgaatatgctaatcacttatttcacacatgcagtttatat

SEQ ID NO: 181438 - DNA, 1204 bp, Cannabis indica
caatgcttttcacctcagcaactatagacaaatcagatctagaacaattgtcaaaaatgcatctgttcctgttcaaccaaataccatagcacacagcagcaagaatggcaatttgaattcttcttatcagactagaattgttcaaagttagccaagctttccaatttatatacctgactggccaagtattattccccagccattcaaaggttcggtccacaactcttcgagagaaggcgcagctgaaaaagaggtggtcatgagattccaagtgatcttcacaaacaggataattccgtgactcaagagggatgtgaaacttgctcaagttgtcacgagtgagaaggtgagaattcacaatttgccaaagaataaactgatgctttggcaaactcaaagagctccatatggctttactataagggtccctgttctgaataagaagactactgtaaagagtggcagctttaaacttaccattcttaccagccctcataattgcatccctcgaaaatttcaatctcaacctgcataactttttctagtaccagctagtgtcaggtttttggttgtaggaccagaaagattcatctttgaggtaaattaggttcacccatttaacccaaagaagatcttttttctccatgatttcccaaacatactttgaaatcattgcatgattccacttagatccttctttgaaatcaatgccaccataagacttaggaagacaaaccttctcccaagaggtcatgtgctcatatcacctttacttccccaaagaaacccctacataattttccacttccttagtaacactttgagggagaataaagatgctcatccagtaactcatgaggccaagcaagactgtgtgaatcaattgagctctaccggcaaaagacaggtgtcttgttgcccaattatggagccgttgtttgattttggtaatgataatcccacaatcttctatctttcattttgtaggtctcaagggcaccccaagatactttagaggaaaatccctctcaatgagagacatatccgctaaaatatcaattttttctctactatctaccccaccaaagtagatatgagatttttgagtattaatgaacaaccatgtagttgtactgaaatcatccaaaactactttgataatacgtaaagattgtctcattcccttgctcaatattatcaaatc

SEQ ID NO: 181439 - DNA, 595 bp, Cannabis indica
tatttttaaaaaataactaacaagaatattataacttaaataaaaaatatatttatttattaattattttattttttaaaatttataaaaacttattacatatattaaaaaaaattaacataatttttgacatactattgattttttttttttttttacaaaagtcctaaaatatataacacttcaataaagatgctattaattataattaaatattacgttaagttaccttatatggtgagaaaaattatttgttatatgaagataaaaagttaaattatattgtgtcaaaatttcaataataatctcaaagtaaaaataaataaaattatataatatttattttatttttttgttaaaaaaagccccgtttcaaatttcgccctaggcctctcaacaccttgagacgggcctggcataaacccataaacccagccacactctaataaagtcccccctcctgactaattctctccctgcactatcagatttctctggtctcctagagtagctgataaataggtgtaagcataatatatttatccaaattagtattgggtttgtaataatttaattaaaaatctcaagtcttcgg

SEQ ID NO: 181440 - DNA, 813 bp, Cannabis indica
atagcctaaaaatataaaaaagaaacaaaaaagtttcttttaatattagtcgtctgtttaggagaaaaaaaaatatatgtttctcacatattaaaataattattttattatttatatgtgtaaaattttgaaataaatttttaatagaaaagttactaattgatatcttattcacatcaaaagtaactaaatggttgtttttcacaaaactctgaaaaagcgaaaaaaatctggaaacgagattttttcaactttttctattttcggtaattattttaaatttcggtatatatgctgacgtggcacaacggtatttgtgcaaataattttcttaaaaagtatttttgtaaataaaatcaattttaaaaaactccccataaaagaatgtaaataaaaggtaaaaaaatattattacatcatcagtcataccaaaagtagatctaatcattagatctacaaaaactgaaattttggtaagtgcacggtggactgtccagtgtgtacacgtgacaagtttttagtggtccacgtaatattaatttttaaaaaaataattataaatattaaaaaaaaattaaaaaatacagtaattttttttcttttttaattttttttaattttaaaaaaatttaaaaaatttaaatttttttacttttaattttttttttactttctttctttctttcttttttctttttttaaaaatttcccctttgtaaagtcaaagcgaacttggggaaggaagtggcttttggatctcttgtgatagcgtcgatgctggggaaggaagttagtccgaccgaagacccaacg

SEQ ID NO: 181441 - DNA, 666 bp, Cannabis indica
gatagttcatttacgcacaaccaacatttaaataattaattatcaaactaaaaaaataaaatatcatatcttatatttcatatatgtacacattactattatatttttaaatgataaaaaagtgaaggacttgcatgttgtatttcttagatttttaaagaggtttataatagtaaaaaattgaaatttttccttgaggttgtaactatacttttcaaaaaaaattaactatcttttctcacttgaggttttgctctctgagtggtcagtttttcttgccattttgtgtaatttctttctagtttgtgttgtgtgtttgtagtatggatgagtttgttggaaataggattagctttgctataatagaggatgagacaaggtgctgcggagatttttgaggctaaaggacggccagtattctggaagggattgttagggagactttttgttacaaaatattttatttgaaatgatttcaaaggcaccatcacccaactttggaatcttttgagtagcttgatgattaatgagatgggagggaattgatttccatttctttttatcacgatgaagattgtatggaggtgttggttcaagagtcgtgaaatttttacaatggtttgttggtggttaagttgatagatgatgtgactgttgggttttatg

SEQ ID NO: 181442 - DNA, 560 bp, Cannabis indica
atgaattttctcctatacagtcataaatatataaaaagagcacacaacaaacgagtaatagtacaaaaaataaagaaaactacatcatagttagagattgtaatatctgatataatgtccaaaaagcatatcatagtaaaagaaaaaaaaaaaaaaaaacagagagaacaatgaagagaaatttagaatcttatatcatcatgaaatatagaaacgaaacaccccccatatgagaaacttattctagctttgacaatctcctctctatttttccaagccattgaaacttattctagctcagttccaacactatttgtaacgccctaatgctaaggcacgctacagtgctttttcaattattgtgcaatctttgctaatcaaagaaatttctcgaaaaacgtgtcaaattaaaacttttgctttaaatattaaactttgtaatataatataatatttacaaatcccgggatcccgatttcaaactttgtaaaatttactttttaaactttacatttcaaaatacataattttcaggtcgcacagcgactttcaaaatataa

SEQ ID NO: 181443 - DNA, 513 bp, Cannabis indica
cagatacaaaaaatgtaaacagttttgtcatagcacttttagatcgaattataattaaactttattttgacaaaaatcaattcaaggtcctatttgtactattttagaaaataaagggtccattttgtcatttaacaaaacacagggtccaattggtaacttttgtaaaacagagggtctaaaatagtatttacccggaaaagaatataaaattagtgcccaaacgaaaatagacaaagtttgggtagccatcataattaatactaaatatacattttgtctttattttacaaatgagtgttgtactctctctcactcttagttgtccaatctccctttcttcttattttttatgttctattttcatttctaattaaagctttattatggacaaatctattcaacaagattaaaatgtaaattttcccaacaacttttacatataaatattgtttttttttaaggaaaatgagagatattctgcaagccaaaattcacaagtcaaaatactca

SEQ ID NO: 181444 - DNA, 634 bp, Cannabis indica
ttttctactattttagtccataattatcaaattaaaaaatttacatttaattttttaaaaagtaatatttttgttagtgatagcccccacattagtatgattgggtccgtctctgtcaacacctagttcttaaaatacacagcatcctaaaatatcatttatttatttgatctctccttcccttaagatttaacacattttcctacaaaaattacattagtggggtaactctaaaaattacataccatggtctcacatacaaatatttaattaaattttataattatatatgttctctcaaaaaattaattggtgataaagtaatttttcttttttaaaaaaataaataatattacattaccattactcattttgaacaataatgttcataaaattagtttgaaatgttgactaaaatatacatgtaacaaagaccactttatgggcaacttttattagaaatgctctaaaccttgatatgacatgaatacgaccctacattaaactcgaattaaatttttagctctaaagtatgaagatacctcctagcttagatgcttctctgattgtatgatcagatctgaaaaacctcatcacacacttccaacaacaataataaccacacacaaaaaaa

SEQ ID NO: 181445 - DNA, 556 bp, Cannabis indica
tttttccatacttttgagtgtcagcctattatatttcaaagcaataaaaaaaaaaaacaaaattcagaaaggcatcaataaggacttaattacatagataatgtttaaatcacaaaatcaaactaaacaaatagcattttagtatctcaaattctatagccaaaccagagatgtttttgactgaacttccttcactacctcctaagagaaacgagactcttttaatataaacaaacccaatcataagatatctctagttttccatctgcatctaaaacaacatttttgatcttttgagtacgaatgttgcaagaagccatgtattttgcgccccagatatcatcttcaaacacttccattagaatctcaccgttcttcaaaaatggtagtagtaagtaacataaatactttaatggtccaatctgctcatatttggtccaaccaccagctacgcctttatccatggtgaagacaaaaaagttgctcttatcaaatgccaactaaataataataatgttatcttcataattgggctacatttatatatatatatata

SEQ ID NO: 181446 - DNA, 741 bp, Cannabis indica
gggctagggttctaatgagcggcagtcaacctttcatagcactcacactgttactggcggtgttttttggttaaggtgacacacagtatgtagtcaagttagctttggtgtaccggagtcactatcctcctaacgaactcactgaatccagttcgacctagggttgtacggagtgacactcaaccattcgtagtactgacgctgtcacttgcggtgtttacgggccctgtgacacagagtatgtagtcaagttagctttggtgtaccggagtcactatcctcctaacaaactcactgaatccagttcgagctagggttgtacggcgcgacagtcaaccattcgtagtactgacgctgtcactcgcggtgtttacgggcgtggtgacacagtatgtagtgaagtttgctgttgggtaccggagtcactcctcttctaacgaactcaccgaatcaagttcgacctagggttgtacagagtgacaccgatgcagtatggcagaagtcgcactatgaatttaggtgtttgggctgagtgtgtactcagttcatcatgaagcgtaccggattcactattctcctgattttatactagagtcacttcttgtcttcaaactactattgtattcataacataaacggttttgttattaaatatctatatttatatagtattcaaaaaaattattgtaatcttgattccaacgattgatcgtaaatgtaaatcttcaaaaatattgcaat

SEQ ID NO: 181447 - DNA, 544 bp, Cannabis indica
aagcacgcttaactgtggagttctttcgagatgggctaccgaaaaacaagatgcaccttgttgatataggtagtaccaatcaatccatttaagctctcttcaactgtgtagtctcatacctacacagtctcagaatcatcccacttgaccttccccaggcgatgtgggattgcacagcttacccggtatttctccttacggatcacaggactactgactgtcacagatcacccataagaatcacagtcaagcccacatagggaattttagctatgcaccccttttaagccaaggaaatgactttttttattatttatttatttatttatttatttaattgtaaggaaaatgttgtatttatttctatttgacttttatactagttaggcatgtcaaaaagatccatttagttggagtgggctggagcttcgattcgacggatcacttctgatccgaaacattcagatactattgaatctcggatcagatccgcaggacatgaaactggaccagacccatcggggatccaaatctggacccaggg

SEQ ID NO: 181448 - DNA, 752 bp, Cannabis indica
tttttttttttttagaaatccaataccattcgttcttaagtctctaaatctgtttattttggaaagaaaaaaagggggattctatagattaatgcatggtaaaagtgagactccgatccacaaatcaagcttcaaaagattcaataaattagctttagtttaaagctctttgaagaaaaaataaattaagcataataatccttttattaagacttactttaaagtcgacttttctatttattcttttttagaaaaagaaaagattatttttaaaaactggaaagacatagaaaaacaaaaaatagtgtagtctgggaacaaaattgtaatcactagtaataataatgtagataatttgcaaaacgagcagtaattagtaacaaaaatttcatataatcattttatcaaattaatagaataaacaattaataattaccatatattttcacaaaattaaagttttttttttgttttttaatcaatctttcctccaagcgtaaagcaacaaagaaaaaccgccattactaccagtactacatgatctagtagaagaagaagatgaacttcttcctccatcgctactctcttcagcccattgaagcacactcgaacaagacggcgaattcgaagaggaagccgccattgaagcagagctacccgccggagcagttgccgacgacaagctcttcctcaacagcctcttttccgggcccaccatttccggccaaaccccaccatcaccaacttggaag

SEQ ID NO: 181449 - DNA, 504 bp, Cannabis indica
aatggtgaaaattgactcttaataaaaattgtcaatttttttagagtttggattgcatccgtcagatcgtttttgggtaatctactataaaaattgcaactatgttgactgcaaatttaggacttgaaatattcaaaattgaaatatgggtgttacaaatagatctttgaaataaattcaaaatacaagttttatcacatcaatcaaatcaattttgatggagttatagtcgctttactagaagttatttagcaccctctggctaggttaatttacaacccagcgcctaggttgacatcctgacgtcaacctagacactgtggtgagcactaaaatgtcccacacttgcatttttgacgcctaagtgatgtgttgacaccacttagttagattcaatgctttggtgaagttgttcactagttctcagagatgtccttttttgtgtaatcgggaagactcaaaacttcctcattttgctgatattccaccttgttagattgggtg

SEQ ID NO: 181450 - DNA, 781 bp, Cannabis indica
tttttttctaacactttttcgctctctcacaaaattttatttttatacatttcatatttctttttctcttttttacattttcttcttattcatactcaaactatttcatactatttttatttaattaattgcattttataagaaaaaatcttaattaacttctttaaattttacttttacactttttctcgtaattttctaaaactttctagctatcttagaaaaaaaaattaagagcactcctatatatttctctcttttacatgattgataaaagtagtaattttttaaatattttttagtttattcagagttaatttatgaataatttgtatattttaataaggttgatgtcttgttatttagagttatctttttgttattttatagttggtttacgttgttgtataggtattttatagttatttttctgttactgttattatttttttttgtacagttattgtttagtttatgtgcatttttttatggtgtatacatttaatttattccacataatttttttgttgtatatatgtgcattagttttattatttttatgttattttttttttttttggttatttttaagtggttttcagaatattttttgttcaacggtcattttttaattattttttttatttcatgtgtatttttttaatggtgtagatttttagtttcttcctaataattttttttggttgtgtgtgtgttgctttgtagtttcgatagacatatctagttttttttattacatttttattaaaatactaatgat

SEQ ID NO: 181451 - DNA, 660 bp, Cannabis indica
aataccgttatttttttttatctattaattaaaaatactctcatattatattttattaaaatatatccacttttatgagtgaattgtccaacatactcttacactctatccaacatactcttacactctatttatgtctagtacataatttatattaacctggagtattagactattaaaaaatactatatgatatgccatagtcacatattttactttgcatcaacccataatgaatattttcatgtggatgtgtatatagaaagcaattcctacacaatagtaaattcaaaaaacgataaagatgcctgtgataattattactcttttgtttttgggttttgcatttttaaagtgtagataattttttttagtttgaataatgtctttttaatttctattaagcgatctgttaattatgttactcactatttgactagagctttgtggttaaatactgattgtatttatttgaattatacgatcataatttgagtagtttaaatagtgttcttttaaatgattttataagttaataaaattgcatttttatttaaagaaaaattatgagggtcccatttatttactttataaaaacttattaattaattataacgacaccatctcataatataagtaatgttaggcaccttgatcccc

SEQ ID NO: 181452 - DNA, 722 bp, Cannabis indica
cttgtactcatggcatttacttgactttcaactggaagatgacggtgaagcataaaaagtggtcctatagtgtagatgttcggaaatataactgagattgaatctaatacttcttgatctagctcttgaaatgtgttgaagattatagctgaagaagttaagcaattccttgcttgtgatcctaaaaaatcaaacattatatcatcagttgataacactctgatgaagcttggtaagtcctttagtcttatgtctctcaagccgggaatccagtctactggtgtgtcaagcgtgccatctttcatgaagttttcatctgaaataaatgatggattaaattattccttaaaaaagtgtaacaccaaataggaaagcagaagcgttagtatatataatcacatgagttttttatccaaaaatgtcaatgagaatatattgtcaataatgaattagttttttttttttttttttttttgaattaatcataatgaatagttgaatacgttaaaaagttactataaattttatgtttctactattttgtgtctcgttcagatcttttcattgtatggtatgaggaaataatcgtaaatgggaaaaaattccaacactaagttatgatcagtagatgaatcaaaaatttgtattcatacagaaaagattaacaaaaaatggagagacatatatagttgaaaaaactacaaaaagaagtgatataaatg

SEQ ID NO: 181453 - DNA, 849 bp, Cannabis indica
atacaacagcacgtcaacactatagactatagtatatataaatttgttatacaaaaatagtatagaaacaacaagtattttatgtatatatataattcaaattcataaaaattaaaaaattaaataaaaaactataaatcttaaaaaaaaaattgatatataatttttaaaatataacatgcatgtttcttattttattactttaagaagttatattccaaatatattgtagttgtaatatacatcctatctttagtcttagtttttcataattatttgtaatatacacacaaagttgatatttttccttggcaggccaaagtctcttgatcaactctattttgatagagaagaatctaatgaacgagtatcgtcgtcccacaaagtttcgaaagaaatttatcgaatttgtaaaaaaattttatgggaggaaaaggcaataccaacaagatgcatttagcatcctgatagttgcttgtaaacagagatcacataaaaaacttgaatttcgggaaggcacaaaatggaacaaagcagccttagctaagtatctttgaactttaactctaaaaaaaaatgtgttattggtaaaattagtaaattgtatctacttaaaaagcaccgatatttgtctcatgagctttgtaaataagaagaaatcatctcaaaaagataggtttgcttaaagtttgtttaagacttgtaaattttatgtaaaatgaagggattgtctcaaatatgatataaatctacttgttttaattaatgaaagtagttattgataaaaaaaaattatacaacctatttatttttgaaaaattcaaaatacgttacaacgtcgaatgaata

SEQ ID NO: 181454 - DNA, 711 bp, Cannabis indica
aacgctaagctatatcattagatcatttcattgtgctctattgagatatttgagactttttttttttttgatttatttatttactattatataaaaattattttaaaaatttgataatgcagtggaaaaaaattacataaaaaattgtaattttttcttacttatttttctgctttattttataaccgacacaataggtgaaaaagaaaaagtgtttcagcaatttatgtgtcattttaaaccgattgatgccaattctataaatgacaattagaaaccgactagaattatactttttgaacgtagtagtgtaaggttacatttggcaaatgcataaaaatagtctttccaatatcatttttgtttgtttttcaaataaggccattgttctaaaattttatttaaagttctaaatgtaaaagtgtgactaaaatttttatcccactttttatttttttcaaatgtaaaaactgggataaaaagtctcgtttgttgtagtgctatcatcattttttttttcaacctttttgttaatttttgtactcaaaaacacatcttaaattttttttttaatttttatttttttaacgatattcgttatagttacaatattaagtttgtaaatttttttaaaaaaattatgaataagacgttttcttattaagagatgctaataaagcttttttgtaatgatttaggctctcttttgat

SEQ ID NO: 181455 - DNA, 589 bp, Cannabis indica
aataaaaaaaaatgaagaacggtttggacgggttaacccgaccaaaaccgacaaaatcattggggcgggtttgaactttttctaaattttcattgggcgggttacgattaaattttgcaacccgatatttatattgggttaataaaaatatgctataacccgactaaaccgaccgacgtacacccctactaggcaccactggtgtcctttagcatttctcaattttttttattgtcttaaaatattaaaataataataaaattgataataaagttattaattttattttttaataaaaacattaatgaaatattaaattttacattaaaaatttataattgtgcattggagcataatgtttaaattttaggtaaatctatcataaaattacttatgtgtcaaatgtaccacaatttttgagagatggcgcttttttttttttaaataagcgtgcattaaaaataaaagttagactttatgatcattataaaaggagattaattgagatggaagagacactccatactgcatattcaacaacgctcacttaaccacattaagtaaatgtccacttagccataccgcttga

SEQ ID NO: 181456 - DNA, 630 bp, Cannabis indica
tcaacccgtccaatgattttatcagtttgttcgagctaacccgtccaaactgttttttttatatatatataattattacggttagtttctagaattcaagtaattaaatttaaaaaaaatgtatatattatttatgtttcaggttaaaaatgttatagtttaaattaattttaagaactttaatataatataaatataattgagtaaatataaaataataaaaaaaaatgataatatagtatatattttaaactttaacttcaatatccaaatacactaaaacttattaactataaaatctaagttttaagttaaaaattaaaatattcaaactttaaatacaaaatagtttcactaataaatataatttatataatataagatatacacttttattaaaaaatatataaatcgttttaattcggtttattcgagttaattgggaggtttagaataatttgtaaaccacccaatatatttattgggctgtttggatttttagtgtattattttaggttgtattttttatcggtttattcggtttggttttgacggtttgtaaattttattgaacactcctgcattgcaacacctttttaattatgtattcctatgcaatgctcaaattga

SEQ ID NO: 181457 - DNA, 818 bp, Cannabis indica
gttgccttgcttggtagcagagtttaaaatttaataaagtttttgattattttcttaaaaaaaaaatattgtgtggtcccatatttaaatttatttgtgagataatttcatactcttacattaatctcaatacctctaaattaatgtccattaaataaaactcttacattacatttaacaccccattaaattttgaatcctatctttaatttattctgcgtatagaattatatatttgtttgtcctatttaaagtttgataccagaatttatgaaaattttgaattaattatagaaatggttagcttaaatttaggttcacctttttgtgcatatttttcatcaaattgacttggaagatgaagcttctgagaaatttccttaggattattagtagttgatgagtagaacgaccctctcaagctgcaaaataataataataataaaaaaaaaccttagtatatgaaagctaaaaatgccaactgtctccaatataatatctaaatatagtactaagtttaacaaacaaaaaaaaaaaaagaaagacaaaatgttatatttcatttcacacacattgtgttctaatacttgataaaatattatcatttaattaaaaaaaaatcattaataattaatcaattatatatatatttaattattttgctgcgctagcacatgccattttgtttttttttttgaacaaagtgcatgtcatatttaatttataccaaatttaacttaatttttagcacattattagaatattcttctaaatattaaactacaacagtacattttattaaagagtgtactatacac

SEQ ID NO: 181458 - DNA, 710 bp, Cannabis indica
ctaggagccatatgggtgcattaaagtagacgacggtgagcaaataatctgtagaacttgcagaccacatcgaaatatgttaaaggccaaaacatttgatgttactcatcattggaaatttttttcaacttctaagtatatttgccatataattccactgaattgtgagctctcaatgaacttaaaaatgttgaggtaagaaactcaatcatagtggtagataagtaccacaagagatcaaatcccagactacctgcaaggaaactagggtctgaacattcattgcaatagttataaggcataaacattgtaagcagagcaatactgcattatatgttactcataaacatctgccatgctgcttaatcaataatcaatatcggaagaaaaaaaagttttcaatggaagaaaaaaaaagttgcttacgtaataatgtagccagttttgtgtgtgtgcatgaatggaagagagcttcagggatgatagctgaatccataagaatgttgggaagggaaacatagcatatctttgctttatatcgaataaaccactcagttaggaaatgggctcgataagctacaacagatggtacctgtgcaagctgcatctccacagcaactgtaccggatgtacatagtgaaaccttacttgcctgcaagttgtttagctttttttttaatataagacatttgacatattgacaatctaat

SEQ ID NO: 181459 - DNA, 678 bp, Cannabis indica
aaccccttgacgaaccaccgtttgagcagcccaaacactacgccagacaaaactgggattattccccaattcagcagagagataatcgctagtaggaaaatatttagctctgaagatttgtcccaccaaagagtccggtttacataagaggcgccaaccttgtttagcaagcattgcaatgttaaaatcatgaaggtgtcggaatcccatgccaccttccaactttggacttgccattctatcccaggacatccatataataccacgacccttgcttgaacttgttttccaccaaaagcttgccataagcttctctatatcctcacaaatgccaatcggaataagaaagacactcatagcataggttggcaaagattagatcatagtcttaaggagaatttctttgccagctcgagataagaacttaccatcccaactattgatacgagacatgaccttattctttaagaagccaagaatagaggtcttatttcggccaataatgttgggtaaaccaagatacagacttccatctgacgcttcaaccatcccaagcacagagcaaataccagtacgagattgggtagtagtgttagggctaaagaagacagaggacttggaaaagttacttgttgtccagacgccacttggaagttatgtagaagagtattaacactc

SEQ ID NO: 181460 - DNA, 696 bp, Cannabis indica
aagttaaagataattaaatatatattattttaatactttattagaagtatcggtctataattgattagcgtattttttttataagatttattaaagtaaaataagtggcatcccatactgagttgtaccaataactatattacactttacaagagttaggcaaaagcacatgaatacatttttctataaataaaatagagttcaacgtaatcaacttactaaaatgatggcattggctagtttggtttgaaccaaagaagtttaagatgatacctaataatttattgagtaggtgtttaaatattcttttttaaaagaatttttaaaaaatttagtttgtattttttaagaaaacaattctattgtatattattttatttttctaagataattacttatattattacttgatataaatgaaaagttatcaatcatacttaccaacgaaaaagaaaattaatttaaaaaaaatgtaatgcattcgaatattttacacataataattatcggaaaattactctatttattatttttatttttttttaatttatgatttgagttgctctcataattttttcagtagtttttatatagattgttatgtagatattgattacgatttaaattaatccattagttgctataaaaaattttatgtaaattttcatacaaaaagttattttaaaatataaaaat

SEQ ID NO: 181461 - DNA, 692 bp, Cannabis indica
aagaaatggcacatagaacgaaagattacattgctaatccgaaaccgaatgggtataggagtttacatatggctgttgatgtgagtgaagaaggtaggagtagacctattatggagattcagattagaacttctgatatggatgtttttgctgctggtggaacagcttcacattccttgtataaggctggtctcactgacccagaagaggtaaattttgttctgattaatttctaatagttgattctcatagtcatagtgaataagggtattgttatagacttttcttagatttgaataatttgcggcgaaacccttttgtgttttaatttgtatacagttaactcctgatctatttttagttggcaatatccccttaatttcacttttatttacaattccgaagtggaattgaaacataagggagtttaactgtaaattactcaacaaaagaagacacaaatgttgtaatcccaaaatagctcttggagaggcttctcttctattctaacctttcaagagagttagatctctcccaagagatttctctcaattctaaactctttcaacataactgaaactgggttctgattaagcaaaaacaacaactcagcctaatgcaattaaacaaagattaaaactgaataaactgctgtaataaaacttatgcttggcgtttatggctattcctcc

SEQ ID NO: 181462 - DNA, 530 bp, Cannabis indica
tgtgcgattaatatgcaatttttaggtgcgattaatgaaactaatttttggtatttttcttgtgcgatttcctgcaattatttgtgcgacatttatgcgatacctatcttactgttttctttgaaacacagcaaattgatgccatggcgcacttattgagaagaagacggaccctctacccagaagtctacgactcgaaaaggtgtagtttggacacatctgctccacagatatttgcctatgtattggaatttctatgagggtgacaagagcaagatgaaatgggatgaggccgttatgaattatgtggaggggatacagctacagacacttgccatgtttggagaaccaggattacatctacgttcgtgttgaacctttccaaagagcaccactaggtggcagttgaggtggatatcgacaactaggagatcattgtatatgattgtgatatcggtgctacccctgaggatgccatggattcatatttgaagccttacgagcgagctatttgcaaatctaattcgagc

SEQ ID NO: 181463 - DNA, 796 bp, Cannabis indica
ttacagtgtggttgcagtttacatttttgccaaatcccacggtgtgatacagtttgcagtttaaaatttaaaatcacttacaaaaatattaattttacaaatttctcttttttatacatgaacaactcatatgtttacaaaactcaagctatacgattaaatttaagaaatatacatataaattattctcaaattttattttattttttgttaactttttattattagcatattattattattgatatatatttaatacaatatatatctaaattaaacaattttttaaaagacaactcatacaataatttaattagtatatatgttatgctgttaaaattttgataggatatattttttttttctaattgttaaagttttattaatagactaaccttttaattttattttaatatatgatagtaataataagtgtaaactgtacagcactataccccatttttataatgtaatttttgcaattttaaaatcttacaggacacttgaaaaattataaaaatcacatatacaattttatttaaaaaaataagctaaacacacacgatccacattccgtaccgcgaacaccttctttatggtgcggttttaagtgccatatattgtttaccgacttttttttttcagctaaaagttggacgttttttttttttagatgaagactaaaaattagactttgtgttcggatattctatttagatcacaccacgtaagaatgtgtgtctgtactctgtaagaatggtttggtccaaaactctgtggtgtgccgcttttcttc

SEQ ID NO: 181464 - DNA, 938 bp, Cannabis indica
gaagctggattatggaagatattatgcgtcaaagacgttttatgaccagaataaggagagaaggatccgtgtggggttggattaatgaaactgatactgaaactgatgatcgtggcaaaaagggatgggcttctgttcaggtagtcaattttgtagttttgtaacttgtaacttgtatttagtaactaaggtttattttatttttggattttgtagacaattccaagaagtgtgttgtttgatgctaagaccggaaccaacttgcttcaatggccagtggaagagattgagagcttgagactaagcagtagtgagttcacagatgtagtggttgagcccggctccgttgtgccacttgatattggctccaccacacaggtactaaataaaaatttatttttatgtcttttactaagaatcttttttaaatgaccattgtaacaaacaacacacatataattcgtactttgcaagtattactgtaaatgaattttgggtatgaaagagaattgctacatgtacaacatttttttcaccccaccaactaaatacaataggtacattaattagtaaaattatgaagtagcaatcaatacaaaaatagccaattaaaaagtaatagtcatatttctaaccctctcatttacagtaatacttgcaaagtacgaattatatgtgtgcagtttgttaaaaaaattatacttttaagaaaatcaatatcaattcataaattcttttaagaaaaaaataattttgtagactatatacatttatatacggagataataattaaaattacaaaaatcaaaaattacgaaccgaggggaataaaagttatattaaaatgagaattttcgcacatccaataaatgtgagatatcaactcacacataataattcactcaaaaaaaaaaaaaaaaaactaacacacataataa

SEQ ID NO: 181465 - DNA, 807 bp, Cannabis indica
ttaagtgctaagtgtcatgttggactgtctatgcgtacatctacgtggacaagatgtacatatgacacaattttattggtcacgtaaaaaattatttaacaaattaaaaaattaaaaaaataatttaaaataaaaaatatatttttcaaaaaaaaattatttaaaaaaataaaaaatttgaaagaaaaaatatatttttttttctttcttttcctcaactttcttcttcagccatcaccaccattacacccagtacccaccaccacccaccaccaccctccacaacccaccatcacccatcacccatcacttgattcacccaccatcagcgcaacaacgaacccacgaacccatccatccccgtcaaaccaagaatattgtccccatcatcaaacaacaaacccacgaacccagaccatccccatcgaaccaccaacccacaaaccagctcccatccccttcaagccatgaacccatcgtcgtcttcatccagcctgacaaaaaaaaataacacacagagagagagcgagaaacaaagagaaagagagagagagggaaacgaaagagacgagttcgtacaggatttgagttttggggcggtagagtctcgatttcgtggtgtaaacacatgccggagtgcatctccaccaccactgacgacttcttcatgagtgcatatccaccaataaacgagagaggggcgaatatagaggttttgggggacgaagattttgattttgtggttcgcttcaacaatcggtcgccagggtctgggatttgttctgggcatatcccatctctctctct

SEQ ID NO: 181466 - DNA, 573 bp, Cannabis indica
acaaatttaaaactttgagtgtgcaaatatcccttaatacttttactaatctactagaagttgaacaaaatattgtgtttcattcaaatatttggtttttagagtacaaaagaaagtaagaaaatcaatgcagggatcatataaacctgtgtgttgccaagggatagagacaagaggaatgagattgttgtgatcagattggagaagtaccctcactgctagtctgtgattctcctcctcgccacgcgtcctgaacttgagctgcatactgcaagttccacagcacatcttcgatcgaaggtctctcttcggggttttggagtagacatctcacacaaacttccatcatcgtcttcaaagattgatccaaacatgtcctattaactgctggatcaaccatgctccgccgagctgctctatcagttgcaatagccaattgtatctggaataaattgtaaaaggatttgatatgttatgtactttttgtatgtatttagcaatgtatttatcctctttcaatgttcatgggacaaccataactatatactaggactggacctgagctaagatgag

SEQ ID NO: 181467 - DNA, 654 bp, Cannabis indica
aaggaacgctggatcggtgatagtgtctggaccgactcgtatatgcccttgctcgatgtatgtcacagcctccttcaagtgctcggcaaacttcaaccgcaccagaattgtcgaaagccttcgtctacaacagagaacaagaaaaaaaaaagcaaaagtaaaattaatataacattacaaaacttaaatgatgaaaatccgataatcagatataaagaattacctgcagaaagcagagacagttaagcgctcgcacaaagccaagctttgcctagatggtatcacaccaatgttgtacctgtgttaaaaccaaatattattccttaatagttaactatgaagatagatagttggttatatgaacactcaaattctcagatatgatagttgttggtacattattttgtgcctgatcccgaattcggaacacatttttctctgcagattagatctaagaagaccttttacaaagtcttatagctacactgaaaataacaaccagaagtggaatgtacggaacaagaacaagcactcgaaaaggtctttcaacgaaacttaacatcatcatcgtgactggattgattaaagatacacgaatctcatgattgttaacataagtacaacaaagtcctgtttttcttttttattaaacct

SEQ ID NO: 181468 - DNA, 606 bp, Cannabis indica
tagttgttaatattgttactaaaaaagtgaaatattacaaattatgtgtttgctattttctttttatttcaaaataaaaaatggaataattttttattattttttatataataatattatatatatatatatattcaactaaaattaataatttaaaataaaaaagttataattttttttatttgttaaaaagcttaaaatgaattttttttaattttcaatatttgaaaaattttgaaaaatgcaaagatatgtgttgctttcatctaaaaaaaatataagggtgactaagaaattatctttaattattttaactatagttaaatgaaaattacaataaaaaattcttaaaaaaataatttttacatgaaatacttgacaaagattaaaaagtgtaaaagatgtgttttgcattcaaataaaaaaaaaattataactaaatgtgcataattaagttcttcaattacctacataaaaataagtaaataataataactttatgataaactaaagtaaaataatagtgatctatatataagctagatctatatcactacaatagtttctaaactatgtgggactttttaaaaataactctcatattct

SEQ ID NO: 181469 - DNA, 961 bp, Cannabis indica
ctcaagattgttacgtacgtactgaccatgatcagttactccagtcctgttataatttatcatatcatatcagaatcagagtttgatttgcatttgcattattaattatctctttgaaaccaataaataaaatgtcaaacaattaatacttgtctggttcggtatgtacgtacgtataatactatatataatatataatgaataatattgatataacaggttgaattcgattcacatataattttgtttatatattacatatcgtgtactgctttctatatataatacatgtattatttattatgcatatcgtatttgagattctttttttttttttttttttttagagagaaagggagcccgctaaggagaaaggaaatccactagattgcaggggtcatcgcctatccaaacagctacttcatctgaacctgaggcccaatgtgccaatttatcagctagagagtttgcagtacgattggtgtggaagatgtgaacgtcaggtagaagagacaaagtttccttgatttgccgaatgagatctccaaacactgagatatcgtctttgtgatgacaaatggcgtcaattacagctttacagtccgattctacttcttggaccagaaagtgctcgtcaatgcaccagcgaagcagagagaggagagccttagcttccaaaagtggcgacagaaccacccccctggatagggttggggcgagggcgtgcaaccactaaaccttcactattccggattacgtccaccaaacccactttccgccattcttgggaactgccgcatccacattgagcttgagagtgccgggcttcgggggaatccagggagcaggggcaggggtcgtagttggccggcctgagagtgacgaggctgaggacgtcaagttgaatctgctaaaaagctttgagccagactgataattgcatgcgattggtctggaggtt

SEQ ID NO: 181470 - DNA, 849 bp, Cannabis indica
agattagcatatcgagtttaatttcaacttgtaaatttataaatatcatttaaccattatttctaaataaaatcatatatattaattaaaatttaagaaggtgaacaataagtaagtaaaatctattataattttatctagatatattggagctaagaaaaaaaaattaaacttgttttcaaaaagtactattaaaggtacaaactcataattacacaaaagaggaaagaaaaaaccacctgataaaaagaagacacattaacatttacatcttttatctaataatggaatctttctcttcttcactaatttatttctcttttttctttaataaatttctttattcaaccaaataataatcccttttgtatataaacgacaaaatgcagagcagtcaacaacttaattatgcttttcttcttttttttttgtttttcctctctcaaaaataataataataattaaaaaaaagtgtcatatatatataaatagcaactaggaaagtagggtatatatatagaaactttaatttattttttatttttatttagcttcctttaatagcttttaaagctggaatgccctctttgtgaagcatatagaagtatagaactaaaaaaatttcactgacattattgacaaagctttctcttatgctcttttattacctttattaaatttatttgtcttatctattttttgtcatttctaatttaattgtgatagttattaagaaaattaccatataatgtcaaaaataaaagaataataacaaaacttaattattaccaaaaatttaaactgggcaaggaaaagtgagtatgtgtcttgttagagataaaaaataac

SEQ ID NO: 181471 - DNA, 670 bp, Cannabis indica
ataattaaagattattaatgatatgtgcatgtgtacaatatttagtaataaattgcaacgatttttccaattataaatcgtgtgttaaaaaaagaacttaatttttcttttcaacaaatatataatcgtattatattgttgagaaaattatatgatatacccattttaatttatttgttttaatatttacctttatttttatattattctttaacatatacccacttttatagatgatattcccattagacccctttatatattatatatacttaagtagagagtggcggtatattgggtaacctacccaaaaaagtaggtacattttaataaaatataatataaaaatatttttaattaatggataaaaaaaaaatattttcaacttacccctatgttaaaaaaaaaatatatgtaaaaatcatgattttgtgcgcacaatggaaacaccaaatctgagaccatgtgacgatgagacatttattccaataaatccaccaaaaattaaacaagcaatacagtttaagaatgagcttgttagcaccaactaaaaattgtcatataaatagtaaacgatttattattatatcaaattaagttatgtaatttatttgagaaaaaaattatagaaatttttacataaaaatatgaccctttgtttataaaaata

SEQ ID NO: 181472 - DNA, 1145 bp, Cannabis indica
tgtggcgagggacggtgtggtggtctgaggcagcaccaccgagggatgagaggaagccaaagatcgaactaatccttctcacatttctttctttctttcaaaaacaacagctttttctctctctacactcgttggtcggctaaaatcgtcaccgcgcgtggatctttcctctctgcttatgcgacgtcatttcacgacgaatcagtgcagatctaggggtgatctgtctttagagaaattttttattttcgaaaacatatattataatgtcactaagatcccctactaaactttaataagttaaataaaaattgacacatagatttgtgcatatcgtacattttttcatttttttagataaggcaaatttgcaattaaaatgtaagaaattccattaaatatatataggccgagagaattgggctgttattatttttgtttgggccatctaattcaatgcaaccgtcaccctcgatttgaaatcaaatagaacgctctttccgtctctgctctctgtgtattattaagagctttcacttctcccctctcttccattgagattattacatttattttgtgatcatcgtgaatcttaatcctccatttggacgacaacagaagcacaaccggagatgtctccaccaacgaatgcggtccgtactatctctcaggaggcgtttgacgagcttgtgaaggagaacatggacgaccttgggatggacccagctgagtcccttcaagatgccatcgaaactcttaccctccagggtgttgatctctcaggtccggtctcacatctaaaaactctcgtattttcctcattttcctgggaaaatatgttgaacctctggtttctctgctttcccgcaacttttcaacatccacacttaccccatttcttacgtttcagatctatagcaaaaatatttagttagaaggtttttgtttatctgtgtttgtatggcagggattgtcacttgcgtaccaggagagggtgggtgtagatgataaatccagtgatacagtgtttaaataaactgaaagcatttcccaaggatcaaaatttggattcagtggcgagattgtttgaaaatctggctgaactatgtagtgtacaaggatctggaaatgcagcaatagctact

SEQ ID NO: 181473 - DNA, 516 bp, Cannabis indica
taagtttccaaaatggaagatacagatcaagaaattgaattccaattatttgtggaaacatatcaattggcagaaccgttgataaaagaaagagatgctgtatatgaatcactcacatattcttctgaattatatgtatctgccggattaatttggaaaaccagtagggatatgcaagaacaaactatttttattggaaacattcctctaatgaattccctgggaacttctatagtaaatggaatatacagaattgtgatcaaatcaaaatattgcaaaagccctggtatctattaccggtcagaattggaccataacggaatttcggtctataccggcaccataatatcagattggggaggaagattagaattagagattgatagaaaaagcaaaggatatgggctcgtgtgagtaggaaaacagaaaaatatctattctagttctatcatcggctagtgggctcaaaaatctaaagagaaaattctagagaaatgtttgttaccctgaaaattt

SEQ ID NO: 181474 - DNA, 620 bp, Cannabis indica
gcattgacattcatcaatagaatagaagaccttgtagaagcttgtaagcatgaagtaattatttttccttaacattcaaatttttttgtttttgttttttttttttacaagaaatgctaagtacatgcttaaaatagtaaagcttataagttgaagctagcttctatacctgaaagtaattaattttccttattcagtttttatgtttcttttttcattttaagttcatcaaatagttatatttgatattattaaaaagaattcggacgagttaaagatagaggtaacggatgtaatctaaggtgattttttcttttctttgttgcgtaaattattttactacggagaaaaaaattatcaatttgtattatttttttacttctaattttttttgcagcaaatcatcttattaattctcaaagccgatcaacatatctcttttatttcattacaaagaaaaaagatagtcttcttcttgaagcttcttccaggttcgtctctcgtacagtaagtgagcagcttggctccgttctcttctcttccctcttcttttctttttctctttcaggtttattttgcattaatttctcctttaatttctccatgtcaaccttaatcat

SEQ ID NO: 181475 - DNA, 515 bp, Cannabis indica
tatattttaaaccagtgatttatataatttttgagggccaacattatttaatatatgtaattttatgtaacacattaaatttctaattttcaaaaataaaaaaatactaacaccaaaaaaaaaaagttaaaacttactattaattaaccgcaatcaaaattaatcttatattttgaaaaaaaaaataatcatcatcacatatcacttatgtttacccaaattttaacgatgatgacgtatcaagagtagcaacacgtggcacgaaaaataccaggactgaattaatgaaaaatatataaaatcatgaccgttgaggagaccgttaatcatgaacggtggccatggccgtcagaatagaagtcaaacggtcaccattacctctagcttgagtaagatggatgtctccaagaaggaaaaacgatggacaaacaccttcataagtaggataaacaacacctacaggcaagctagtcgaaggggtagatgatactaccccaccatagatataaggacgt

SEQ ID NO: 181476 - DNA, 713 bp, Cannabis indica
tctccttgaacattctcgttccccgaatttgtgttttgttccaaagtgtgtctggttgtggctctccctcttcccctagctggtgttgttccacgattaggacatgttctactgttatgacccatctcacagcaaagcccgcattgtctttgtctagaacctgtgccatttgtaggttctccatcccttcgttgtgcattacctgttccttttgttctaaccctagttgggtcttgaatgatatttggattgtcacgatatgatctaggggcaggtgcactacgacttgattcaccaatctcgaacccttccttgaacattgtcgtgagtctagcaatttcctcctttgcgatgttgtagtgagttgttgattgtgatgcgtagtagttcatcatgtttgcatctgaatttagggcaccatatctagcatactcacattgttggctatttaggtctaacggagggtttaactcagtatcttcatcaatagttttagcatcgatgctccaccgttttagaagaagtgaatttggaattattcttacccaacagatcttcatcattgcccaaatgtgacgacacgggtacccattagtctcatagaataagcacgagcattcgaagtggtttgtgccaagtgtacaggtcactttgtgctttgactggccatctcaaaaattgcatacattgaatatagtgcggttggcgtggtc

SEQ ID NO: 181477 - DNA, 537 bp, Cannabis indica
tgggtggtaggtgtgactgtgttggaagaatttcctcctcacccaatccacccattcaaagcccctaaaaactgaactgaaattaaaatagatagtacattcataactttttttttaaaaaaaaacttataatagagcgttcacctaaaaaaatataaagagttgagttaatacgtgcaatatttatgagatgatttcttggattgtgaaaattcctttgaggcagctacaaaacacagatgtagtacataccaattcttcattttacgcctctttacttcactgcaacaacaatacatattttaatatttcatattttatccctatacatatacatctatagatggcgactaacttctataggcaagaaaaaaatcataaattaaggtgtgaaggaggaaggagaggtagggggatatatatatagtacttgtggatgtgattatgatgtgtagtcttgtcacaatataaataataataataaataatattaacaaaacctgatatgacttaacaagggctgatattaccgaaaat

SEQ ID NO: 181478 - DNA, 869 bp, Cannabis indica
catgttactaatgacaatgtacaaactgtgtgattagttactcagtctaagcaattcaataacagttggtgtggccttccgaaacaaatggcatactaacctcaaaccagttattcaaaacctttgaagccggggataataacaagtccataaattccctgtcaacaaatcacaatgatcaaaatgaaagctatgaatctacatgcaagaacatgattaaagcacacgtatataaatatatgacatcaaaggtaaaaagttcttacacaatatctttttggccgagagagagaccttgtcgaagaaaacgtgcccagaaaactgatttgtgtatcttatctttgaatccatcagtaaaagatgaagtatatttcaacaattcaggtggaggggaatctataagtggatccatcaatttgcagaatttctctagctgatcctcatatctagacaataaggagacgaagcttttgagataaactgataataataataatacttcattttcgaaaagcaacttctacttctatagaaaatcacattcaagtggagaaagattccaaattctcaatctaaatcaaaaacaagctatctgcatgaaaagtaattcggtttttgagtaatttaatctgacccagaataagcatcggcgtctcgtttggagaatttggagattttcggagtagttgagctccttatcgggtcctaaaagaagatatcgtccatccaaacaaggagtaaaagatgaaggacttcgcttcaacatcttcaacccatgacgccctaactccagctctctgtaatgccaaaacgagttacttcaaatacactgtatgtattagtgcatctatctatcaatacgtttatac

SEQ ID NO: 181479 - DNA, 731 bp, Cannabis indica
ggaaaacttcaccatgatcatcattctcattctcaggattgttcatcttcttctgctgcatcatatccaaacaaagtcactcagtcacttaacgtaagcattcaaaatgatcagaacaaacacaactaatacttcaaaaatgtcattgtggaatcatatcaaacacttaataagcacgaaactaacacatttcagtgaggaatttaatcaaacactttacaggcacaaacttcatcacaacagaattatcacaaaaaaaaaaaaaactgtattgattacggaaaaacatatttgtcatggaaaatataaacacacaaaaatctgtactggaaataaattaagcactaaactcaaccaaaatactcaccaagaatccctaatcttttatcaaaacattctctttcttgggtagctaagaaaaagaaaaaaaccaattttgactaaaataatttcttacaaaaagaaaaaagtttggtctttcatctgtttctcttcgttttttcaaaaaaaaaaaagaataactgtacagaaatgtttgttatgaaaagcaaaatcatacctgtgggattgaagagatagagaaccgtgaggtgagaaaggagagagaaagagaggcgtgaggtgaagacgaggaagagcaactcagaaaaagcttacatatttatacttattattttaaaaccagtaatttcttgcgtttaactattggttgttgataaataattaaattt

SEQ ID NO: 181480 - DNA, 514 bp, Cannabis indica
ctccctcacatctgaaaggggcatttataggctctaattgcttgaagtacaaggtggtcccaaggggacaatgtgtcgcttttaggctacacgtcgcaggtgtaggaggtgaccttgcgcctcgtacctttgtctggtgtcaagtggtccctggatgtaagagtgtggctgcagtgtaccctaggttggtcctcagaccttgtaggtgtgttgcctccactactcataccttcttgctcttagagtttgcaggaggcatagttgtacgcttctcctttgcatgccttgtccatgattctcctataatggtattcttttttaggcgtattccaatttcacctccactcttcttcacacaaactactcatttggcatgacacaacacttcaacgcttacgggcttgcatgccatacatataagcacgcttccatatgagccccttctagcctcacaccctcacgtgcaagccccttgcggccttaagtgtgagtgcctcacacccttacatgtgag

SEQ ID NO: 181481 - DNA, 516 bp, Cannabis indica
aaacatggtctgatactccaactccaactcctcaaactcagactcagacccttgttgttgttgttgttgttgttgttgatgttgttgatgaactgggttcactaaaatcacctgatcttcatctaatttcaatgtattgctcctgtacctgtttgtaagaccactaaatgctctgtataaagaaacctttctactcaaactacctctaggagttgttgcagtttccactgttgaggttctttgtctaaacctcaaaatctctttgaggacttctttcagaaacttgtagtccatatatgcttcctgccattctggaaccatttgagatgcaaactctttcccaaacttcatcttttttgaatttcaatacaaaataatgaattcccagatcagaaatatagtacttaactaacatcaatgagcatacatatataatatggattaacttgaagaaagttttaatctttctgggtatgtatgaatggttatggctgaaatgttatatatatatatata

SEQ ID NO: 181482 - DNA, 863 bp, Cannabis indica
ttgacattgttggatcttcaactactggcaaaggcaacaagataaaggagatttcaaaacagagaagcaatccaacctaggaaggaattattattttttaatgggttattatttttttaatctttatacaatttgtgcagagtttttacatgggggttcagcctccaccacaccaccagctgttaattcttagccagaggttccagttttacagatggtcttctgtcgaaaaaacaaaaaaaaaaaacaaaaaaggagaaagattttccggaaattctttatacttccgtcctttttctttaatttggttagtgacttcatttgtcaaagctttgtctgtaatgaattttgttgcttcaactgttgcaaagagaagagagatcttccaaatttcttttttttttcctctaaaaccttctagtactatgccacgtggcgtgaaatgggaaggaaaggaatcaccatctttattgggttagggtagggtttactgtttcggtacttttgggttacagtcccgtcattgattgatatattcttagttgttattaccactaacaacttaacaagaattccgatgccaatccaaaaattgcgtaaacattagctcagataattaagccgagtcacaaaatttctgagataatgtttttaatattttccaaaacttcagagtatatatgtaatgttttttctgcatacgttttaattttttttttattctaaaataaaaataatagtatttgaaaactttctattcttatataaatgatgagagaaaaaaagtaaacaaacagtgaattgatagaaattagaaaaaaatgagagaaaaaagcaagttaattttgattaggaaagaatac

SEQ ID NO: 181483 - DNA, 1207 bp, Cannabis indica
cttaaaatctaaatattctcatataatactacataattgattatataataacattatttcacatttatcttaattagttagtaggttgctaatctatttctaaattttaggatattaaaattatcccctccttatagaaattttacctcaaaatttacctgaacaactcaggatatttctgcctcatggcagattctaactcccaggtcgcttcttcgaccttgtagtttctccataacactttcactactgttagtttcttgcttctcaagactttctctcttctatcaagtatctctactgatttctcctcataggagaggtctggctaaagttccaagactttgtaactcaatttatgagatgagtttgacacatacttctaaagtatcgaaagatgaaacacattatgtacagttgcttgcgcggggagcatagccaacatgtactccactttccctatgctctctagaattttaaaaggtctaataaaccttgggcttaatttctctctcttaccaaagtgttttacacctttcataggtgaaatactgagaataccatctctttaacctgaaagtcaacattctcttactttggatcaacataactcttctgtctagtatgagtagcgagcatctaagctttaattttgtcaatcgcctcacttattttttgaacagtttcgggacataagaatttttttttcacctaattcatcctaatggataggtgatctatatattctaccataaagcatttcataagcagtcatctcgatagttgattggtagttattattttaaggaaactcgatcaagggaaggtactttacctaagatcctttgaaatccaatacacatgcccgtatcatctcttctaaatctttgtagacattttggactgtccatctgtctgagatgaaatattttactaaactttaactgtgtatccattgctcgatgtagactctcccaaaatcttaatgtgaactttgaacctctgttagatacaatagactttaaagcaccatgaagataaactatttttctaacatattactcagcgtactgatcaatggagaagttcgttcgaacaagcaagaagagagctgacttcgtatacctatcgactattacccacagagaatcatatttccatgtattcgtaggtagtccaactacaaagtccatagatatcttcccat

SEQ ID NO: 181484 - DNA, 685 bp, Cannabis indica
caagatctgatcttgtgttagaaaaaggtataactgtctgtaggtcaatttccatataaagctaacgtggccatccacatccgcgtaggagttatcgactgtgactaatccagagaagtctttatccggatgttagatagccaaaccaccgttccaatttttcttggaattttgggacgagtactcgagattttggcgaaaggctatctcgatagagataaatgattgagatctcatttcagtaattatattagtttactgaaatatcatttataggtagctaagtgttttaaggataaaatacattgaagggtagaacggtaaatttgtccctattcagtgtagatcatctatagaggatccttgactattaggattgtaacaatggataatcataacgtatctatatcgtggtacatatagagcgttctatataactgagagtgctattcaattccaaatctatagtggcgcaaggcggaattaataagttgagaatttacttggtgaattctagatctacttattgaaagctcggttatataggcccatggtcccctctatgaccattttgccccttgcccacacttaaaacataaaaatcacttaagggtaaattaggtcacttataaaattaccgtaccattcccgaccatcccaactgtctaactatatagtcctgcta

SEQ ID NO: 181485 - DNA, 815 bp, Cannabis indica
taatatgtatatacatataattgaaatcaaacacttacagacattctttatggcagtgtcactgagatgccaaacagatttgttaatgataagatctctttggccttcaacatgttccactagtactgccattaaaggccaatctgggaaagcgtttgttttgattaaagagcctcttctacccttatttcttccttcaagctacagtttttttagggggaaaaaacatttattcatacttcaatatcaccaccctgatgaaattagactataacttgtttggaatatgataaaatttaattttttttcttgactaagatttataatgaggttctacttacctggtttgagtgaaaaaaaccagagcatgatgaacactgcctaagctaaaaaaaaaaaacgaaattttacttaatagtgaaagtcgaccaaaatagagagagcaaataaaaaactatgaagtatgaacaaagttatgtttaccgatctagaacttgagttgaggtctaacttagtagcactttggacataagttaaggtatgaataggtggcttggtaatgcagaatgacattacagcttcagccattgttttgagtgagaaaatgtaactgaatattgaagcttagattttggtttcatttgttgtgtgggaggggagatgtggataagggagatgtggataaaggaatgattcatatccacccttactaagtggacaatatatgtatgtatggtaataaatattaagtggggaataataagaagatgactggctcttcaaaattactgtaaatactaattttttttttttta

SEQ ID NO: 181486 - DNA, 690 bp, Cannabis indica
tttttttaatcttattggtaaaattcaatttgttaggaagaacaataaacttcaagagcagtaaaataataaagaattaaagcaaaacaatttacacagtttattaaaactacaaaaaaaaaaaatgtatttgacttatcacttcaaaaattacatatgttctttatcttactctctctactcaaattctaatacactctttgcttttttcacaccctcactacataacaaactcatacacacttctcttttcataacttaggtttggaaacaactgtgtaattactatgcagtgtaattactagggtagtaattacactgtatagtaattacattgtatttttaaaatacaaggtgtgtttagatgtcaagtggtaattacatgtgaattcctaatatcatgtttgacatgatagttagtaattacacagtaaattaatattataatatttaaaaataaatttcatcaattaataatatataaataaataataatcttttcaataaaataaagtcaaaaactataacaatttagtagcaaatatttaaaataatttttttaagactatctaattgctcttgcgttccattatattttgaagctattatatctctaaaattaaacatatattgcttgtcatcatctgttggcccgtcaccaagttcttcatctgaatctgaatcaaaatt

SEQ ID NO: 181487 - DNA, 615 bp, Cannabis indica
gaagaagatgatgatgatgatgatggtaaggaaaggaatgaagaagaagaaaggagtaacgccattaaaggtatgtgttgaatgtgattagaatgagttggtttataatgggttgaagaagaagactttgcgtgtaaggttcaaatggggctcagattgaaatgggaacagagaaagacaaatcaaaaatcactctgttttttgtttttgtatttagaaactcttttgttgaatttgagaatgttagggaaaatgggttagcgtgggagaaaattattggcttaaaaatctgttgggtttgttttaggaccacaaatattttgttatttatttaagactaatttgttaagttttaataaataattaaatttaatttttaacggcaataatatttaagttatatttttaaattttttaattaaatgtcaaatgaatagtcacttgtcattttttattagtatatttaaattaatttttttataaaaataaattaaacaaatatattttatatcatattcaattaaacattttttttctaaacgaatcctctttcacaattctatagggagttaacctagaaaccatcaaatgcccatttgttgtaaacacattaga

SEQ ID NO: 181488 - DNA, 642 bp, Cannabis indica
atatctatatttattttattttacacaactctatttcaagtgggatggacaatgacacgtttaactaactaaatttgtatattgtataatattgaatgcttaatttttttttttgaaacaaagattgcaactttcattaaagcaaatcagctaacaaaatagctttcaaaccagaaggaacaaaccccctactggaaatacgatcaagacatgaactagaaaaacgagctaaccagttagccgcttggttcccaaatcgtttaataaactgaactgaaatacttgatttagttagccgcttactaaatttgtatattgtataatattgaatgcttgatttagtttatgagcattattattgggcactcagtagaatttaatattttttaaacgtgtcgtcttgtgattagctagcaatactccttaaaaattattatactaaactataaatgacccaatatacttagttagactaatagtcatactattaataagtaagagagtattatagcactaatggttttttttagtatttttttaatttattgacttgggtagtaaaactatgcatattatagtaatatgatgatgaagaacgtatatataagaataactttattttgtttttagtttaattagaat

SEQ ID NO: 181489 - DNA, 649 bp, Cannabis indica
atagtgatttatggctacctctacttttatgcacttagaggttgactcaatttttttggtctctgtcttaatttttttgctaaaaggtttctgtctcaattatgaagtgctttttcattgtctcaaatttttagttgattattgggatgacataatttatgggttttatcctaacaaggctgtacttttgtgcagaaaaaatgtaactttgctgtatcttctcttattaacattattttatcttattcattgtatacaattttaaatacaaaattttattccttttcccacttttaaatgtgacagcagaaggtgtagttacatttgatttttgtttagtttgtaggtatttggactattagtggtactacattaatgtatttattgagtggtttgcctttagttttaagtttttgaatgcataaacactgccagtgtgctttgaattattattattattattttttttataaagttttacttagtttttgctgaaattcttttaaatgaatacatgacttaggggtcgtcatgcatcaaaaataactgaagaggaagaggatgaagaatgtctcaaggaagaagaagatggttagttggtgcaggaactacaaggcttttgacacaaccttcttgtaggcgctctatc

SEQ ID NO: 181490 - DNA, 691 bp, Cannabis indica
agacaggtttgatcctaggctaaggcgagctaggcccgtgcctagcgcccacccaaattcagggcccaaatttttatatagtatatttttttgtattgaaaaaatagtatttttgtaaaaatttgtgaaaaaaagacccaatattacttacactttactttagatataacacacacaaaaatttctaagatccatttatcaggggtgcataaatcaatccaatctaataataactgactgatccaattacaatcgaccgcaaaacattaaatatctgattgtgatcaaatcagattgaatattatcatactactactatgagttctatattttagataataacttttaaaagatatcgcatacccaataaaaatgctggtacttctgatagcagaaaatgaaatcctattcaaaacaaacaattctttcatttttaatagtaatgtttaggaaggaagaataggagcgctatacgtctctaacatatgctttagtaccactctccaccaaactgactaattataataaataataaatattaatattatactattatgatttttatataattaaataaaaaataaaaaataaaaaaatacttaatctaatttgagtttggactgtgcgcataaaaacgttaactcacacacttcatcagaggcatcaatattttctctctctctttctcttt

SEQ ID NO: 181491 - DNA, 1187 bp, Cannabis indica
ctagagaggggatcggtcgaaaagcagctaagctaagactatactattatctaagaattatatattcagagatactgttgtaagagctataagaaaaggaatcttcttccttgatcttaagttaatacaaataacgaggattaggctattaccgaactgctcggggctgaacctctataaaattcttgtgtcttattattgctttatcatatatctgttactacatatcgtttatcgcttataaaataaactcattgtcgttggctaaaagtgaagtcaacagtaccaatcaattaaattcttgtttctatttgacaatcgaataaaaaaattttgaactaaataaactaagaaaaattaaataaaaaataaataaaatatttaacaatggatgtgaaattagggagatgatttcaattgctttgattgcccaattgttaacactaattaaccattcttcttcctcctatgtgatgacagattataaattaacctaaactcttttcagaccataaaggtcctaaattgcatgtcaactactgcatctctgagatagaacaacatacaattcgcattaagcaataatctaaaagtcacataagctatgtgaatactctcgtttcacatcaaaacatatgtctattcatttagagcattctcaatactcacttttcagattttgtattgagatcatatatcatgcataaggtgaccaatcaaacacatgtaataagcacaaatatgaataaatcatcataatagagaaagaaagaacaatcaaatatcattaatccatagaataatctcagttaatatccatcaaatccctaaatagtgagtttagctcataattatactaaacacaaataaaaacataagaaatcaagagaagagaaagaaactagatggaggattgtcgcggatcgcccatgctcgctctaagagccttcttcttgtgtttctagggttccatatggtctctcctccataattcgcgattcccttcattaaaatagagtttttcagcccaaaaacgagaaaagacgaagttatccttgacctgtatgaagtcggcgccacgacggctgtagaaaagggaaaaacgggctttctgtagtcccccgccgcggccactagacccattttttttctacttcgacatctttcagtaaaataggcataacttt

SEQ ID NO: 181492 - DNA, 589 bp, Cannabis indica
cttttttaaaaaaaataaaaaaggtgtaacacaatgtttacatctgccttatcaaaagaaaactatgtggactgcatttagttaattttttatataaatgtatgttaaatcttgttttgactatatgctgtattaaccatgtgactatcatgtcagctaaattatttgttacttaatgctattgataaaacttgttgatttacaagttagttaagttttatggtatgtgacttttgatgatgttgtactttttattctaggctatcacactttatatcagtggtaccaaactgtggagagtgagcactttccagatccaactggtcttcgagctcgtatagaacaatggacctttggtctttatccagcatgtattaagtatcttatgtctgcatttgacgttccagaggtataacaaaccagtgatttttcttttctattttagttttgccttctgttatttttgttatattttgtatctatgattactttattaggtaatggctgtcacacgaagcaacatttgtaagaatgggatggcctctctctccagaggaggtgctgtcatatattatgcttctgtcttcct

SEQ ID NO: 181493 - DNA, 723 bp, Cannabis indica
tccataatgtgcgaaggtacggcagcaccagccttccgcctggattgtctgcgatgcaagtcaaaagttgatcccgaccaatcgttcacatggagtgaagtactgagaggaagactcgtgtacaagagagttgacccttacgtggagaaggaatagttaaaaggcctttcgaaggttccatatgcccagctcactaattgcagtagttaattttagggtttcacttatctaggtttagaagaaactatcaaatggacttggggggtcacattggaccagcccattcacttgagtaattggggtaacgtatttgatgatgtgggccaaatctgaaacataaatgggttgttttgatattttcttacatggaccatatatattttattattattactattaatttaattactaaacacaacatttacctaattacgcaaactttatcatggagttaaggcttcatagctgctaaggttaatatacgtgatattatcttatataggtcatcgttgaaacaagagtaagtatgttggacttgggccttaagcgatagggttttactcaacccttggaggaaatcacacttcctaggaaacgaccttcgtggactatggtactcgtaccttctccaacatcaaaatcaaccatctcgtcgatggcaatgaacccacggaagttatcttaaacccctgcgccattgaagcaatttatttggtccctaat

SEQ ID NO: 181494 - DNA, 790 bp, Cannabis indica
tagcgagtcatcaaagaataaagaaaaaccaataacaaaataaaacaaaataaaattatgtcacacaaataaaattaaaacacttaaaaattatatcatacatacaagataaaaacactcaaaatcatctacaaaaaaacaaaattaaccacaataataaaaataaaattgtaataataaaatacaactacgattaagccacacttataccaaaaaaaaaaaacaagaccaacaaaccaccgaaaaacaaaaacaaccaaatataaattaagaaaaaaaaaaccctaatttttaatttatgcaatgttttatataataaaatgacatgttaaaaggatataaatatctgaatattatattgttgattggacaaaagtgtagataaacctagaacaatccaagcttgtttagaaaattcttatgatcaagtagctagtgccactttaccaccctatatatattaaaaacaaagaaaaatattccacacagaaaccttacaacaccactgctgacgtgtagcttctacacccctccacgtcatcacaatctcacacgtggcaccaccaagccacccccacaaaactaaaatacaccacactcttccagctcttcagtctcacctatatcttactctagaattttcattatacttgttgtttttgaagatgggaatttcttgattatgtatcagatttctatgactggtgttgtggtagttattataatcacaggaaaaaagctcaaaaaacgcaaagaactacaggtacgtacgtacgtagtaataatatat

SEQ ID NO: 181495 - DNA, 743 bp, Cannabis indica
gaagacatttctaatgaaaatctttataaggttctttactctcactctgtaactgtatatgttgattgtcgatgttggtcttttctctgcttattaattagtatcatcgttcacacctttttgtttgccctttttgtaatattttattctataattcttcattttgtttgtttttataattttaaattgggaaaattacatgtggacacgtttttttttccatttaattctaataataacatttctttttaaattattgaatataccgttagttttaccgtttttcattttatgccatttctttatgttttggcttcttgagcacgcttagtggatgaggaggtcatgtcaaagtgggcgcgcaggcacgtttttcagtttttgaatttttttaaacttttacccaaaaagtgggttgtaaacctcccaaactgcctctatttctatcaatataagtgttattttattttttttcctaatttcatttcttctctctaaatgtttagtaatggtgaaaacatgttcgtctacttctccatccgcgtcctccaaggcgatgaatccgaagaacaaatcaaaagaaacaatgtctgagggtagtgatagtggagagtctgatctttcttcgaagaggaagaggaacaatgctgggtctaagaagggaaaatctgcagatcgtctgttgaaaaagatgaagcaggtggttgaagaagacgatgttgaatatgatagtgacgatttgg

SEQ ID NO: 181496 - DNA, 546 bp, Cannabis indica
aaataaaaatagaaagtatttttggtgtgatattgaaaactgattgagcacttaaaatggaaaaaaaaacttaaaataatataaaagtaaataaatgaaagaataaaaaagtaaataaaaaataataaacgtaaaattaaaaataaaaaggcaaattaccgtatagaaggtgatttcccaaatcttaatttttttttttgaaattagcgtgatgacattaaaacaaaatagaaactagacctcacggtcattacataacaggttctccggtaacatagagaccgggatagatccaaacatatgatgagcaaaggcccatctagccacattgtgagcggcaaagttacatattcgattaatgaaagaaaaattacagctaataaacgagtgagaagacctagtacaaaatgagacgtaattttcaagcgcccatcgagattccaacccattgaaagtattgatcaccaccctcgagtcattctcaactataataaacttgtaacccatctctaaggctgtcgaaactgctaaacagcacgcctcagc

SEQ ID NO: 181497 - DNA, 730 bp, Cannabis indica
gctagtgtaaatctagatgactagattggctttggagctgttgtgactggggtatgtttgtaggctgctgaaattaattatgaagttgatcatgtttttatacaaaaaaggaaaagaaatacttgtatgaagtagggttgtgtggttgtactaaataataaagatctcatataagacagttaaggactatttgagtttcaaaactcattttttgaatgaactttagacaacagtattcaccaacactaaaccgtaagcctttcttattttgccgatgatttgtgtattaaacttgataccaaattgatatcaatgctactgcaagtgcaaagaaaactaaaaacgtgccaaaacaaccactttacatgcattgattgaactccagatgtgatagaaatgttttatcaatcatccatcatagttatacaatctccacggaccataaggcctggtggggaataatttcagcaaattttagattcatacaattttaacaaatacacagaagcttgatattttgattttcataactttcacaagtacacatagaagctcgaaacacacattctgagccttttccttcatcttcttcttcctgccttgcttcttttctacaaatcactctgattcagtgaaggctttcctttgggtgtttggtaggcgataatgatccccaagttcgtttgcgtttgctagttgcacctgaaagcgatgcatttgtcgttatgaa

SEQ ID NO: 181498 - DNA, 825 bp, Cannabis indica
attaaatttggtgaactgaatattagagttggaagagataattggtgcttacctccggttgtttggtgatatgccgtatctgaattgtgagagcagatatctacgaatgggaaaagaacacgatctaagcaccatatctgcttctgtactgcacttctatgttcaaaaatgggatcagaaagttggcccattagatggatggacaacctcaatggccctaagccggcccattatgcaataataataggaaaacccaactgaagagaaaattataggaaaatacaaaaaaataatgaaaaaaattacaaaaatacgatttcacagaactttaaatatttttagatttttttgattttatttactaaaaatacagtctttttatattgttatcttgttaatttattattgattttttgttatctgtatgttattttttgttgttatttagatgttattttcatgttacttttatgtagttttcttattattttcgtgctttttctatagaaaacagtaaaaatgaaaaaaaaattctttaaatgtaaaaataaacttttttacaaaaatattgtcttatgtaattatctctatcaaaaggatgaaattttaaaataaattttaaaaatgaccttacctattttattataatagaattagcgtttattttctagtttttatttcggtccagtgtataccaatcaaaacttatctgagatttttagaatgtttgaaaaagttttttttctccttttatctctaatagtgtatatgtcagcttcctcttcttttcaattttttttgtccttttatttttttttctttttc

SEQ ID NO: 181499 - DNA, 709 bp, Cannabis indica
gtatttaatggcaataaggaaacgaaatcggacttgcaaggtgaagcaccggactgcagatcttttagattttcttatgcttgttttgttatattaacctttcaagatgcattatcccttaaaattttaagaattcattgatgatgttgttcttttttggcatcagattacattaataacctggacagagtatttgtgtgatatgttagagatgattgacattcctgaattagttagttgcacatcaactattaaaagggggcattatggccttttagatacttgtttaaaattaggaattcttcgggaattgatcgatcaggtggttgagacatgtatttttagagagacaatggatgagtttgttgaacaaaggcatcttttaggggcttccaaaagggaggaagctttggaggaagggagaaagataagagaagcgaaaggacaattgaaaaccgagtcagatatcaatggagtgacaaactcagagtgtgtagaaaacacgtcagctaatggttttcacacaaagcagtacgggaacaaagttaagaaaataaagggtgaggactctccatcggaacatgaacaggatgatgcacagggcaagaggtctggattctatttgatagcttattacatataattgcctttaattaagaagtttcttctgtttgaggcttacattctctccaacattaatttaacagtg

SEQ ID NO: 181500 - DNA, 596 bp, Cannabis indica
agtaaaaatgtaagcattaccgcctcacagtatatatgtaaaaaatgacaaaaataagtatattatgtaaatttcacttgattattgggattataacaatggataattaatagcgtatctatatcgtggaacatatagagcgttctatgtaactgagagtgcaattccaagttctatggtggatgcaatgaggaattaataagttagtgaatttacttggtaaattctagatctgcttattggaagctcggttatataggcccatggtccccatactagttgagacaaactgcttgtaagactcagttaattgattttaattaatcaattataattctaaaattagactatgtctagtttatgaatttttcactatgttatggcttgattgtgaagaaatagtgttttggggtttatttgttaattaagagactttatggagtctaattaataaatattataaatgacaattttatttgataattattttaattattaaataaatagttttggcatttataggtttgaattggaaaatatggtattattgaaaagaagaataagtggttgaaataaagtggcaaaattgtaactag

SEQ ID NO: 181501 - DNA, 1066 bp, Cannabis indica
acagttatataggaaatcaatgctcgaacttttccaaacgtacttggccaataacagctgtgcaaatattaaaaaaaaaaaattgcataactctatacttgttgtgtcagcttatttcatttagttcttttgtgcatgctttctattttaaatttctgattttatctcttgttgctaaaagattggggagctgaagaaacttgttgaggagggcaaaataaagtacattggtctatcagaggcctcagcttcaacaatcagaagagcacatgctgttcatccaataacagctgtgcagcttgaatggtccttgtggtctagagatgttgaggaagatataattcctacatgcaggtaaagcttactggaaacaacaagtatgtcttttaggttagtaattcaacacaatcttatgctctttttttgtatgtatcagggaactgggcattggaattgttgcatacagccctcttggacgcggttttctttcatctggaccaaaatttgtagaaagtttgcatgatagtgattttcgtaaggtttgttgattcccacacagaactatatagcttaaaaatgaatcatgtgtgcattcttgtagtatctgaaactgaaaccttcatgaattgtgattcctaataaatatagtctgttggaacttgctgggaaaatattatgttcgggtactgaaagatgtgtggcagaaattcttattttttcttgccatgatctcatctactatcatttttcagttgtttttcaatgcaggtgcttaggtttgcttctgtttttgtttttgtttttcttcttttgcagtatcttccaaggtttcaaggtgaaaatcttgaacataacaagactatattcgagaaagtcaatgaaatggctgccagaaagaaatgcactcctgcgcagctagcattggcctgggttcatcaccaaggagatgatgtagttcccatccctggaactaccaagattgaaaattttaaccaaaatattggagccttatcagtgaaactgacaccagaggaaatggctgagcttgaatcttatgcttcagcag

SEQ ID NO: 181502 - DNA, 757 bp, Cannabis indica
gatggtaaaaatacttaatgttacaatttcttacactgttactaccacttccgttattaatttataaatatggacacgtagaggatccaaatgcattacatttatttattttattttaaaatttaatattcttaatatcaaaatctaaatattacttggtttttttcttaaaaaaaaaataagagagatgcaatactaaattaccatagctgagtgaaccagtgtggtatatggaacatgattatcaaattaaaatgtcaatatcatgtaaaaattattataagaacaaatttttttttagaaacaagtagcatttattttctgatattaagaatattaagatttaaaataaaataaaaataaatgtaatgcatctgaatcctccacgtgtccatatttatgagttaacggaagtggtagtaaggatgtaagagaattgtaacatttagtatttttatctccaaaaataaacattaggtatttaagtgtataaaatctaaaacattaagtatttatgccgcaatttacccttaatttttatatactattaacaataggcaaagaacttttatgagtatgtttattagatttttttttttctttttttcccattatatgatagtagtaatgtagtcagtcagttaagtaagtgcttggttttgctacaaagacaatgtcgaagtagtcagcgacaacatcttgatttcaaaactttaggaccgtaggaaagttttttatttttaagtaggatgagaat

SEQ ID NO: 181503 - DNA, 616 bp, Cannabis indica
ggactacaaatgttaactatactatttgggctcaggacaagcacttctacaatggcgattggctctgtaatttctctatctcttctcttttatggtcttagattcatttacctaatctctagttttctttacttaaaatctcttaaccacttggttttttttttttgttcttctttgttggctctttctaagcttactgctgtagttgtttacatttagatctgaaaatgggttttctattttaacttgttactaaaatgtgttttattctgtgaaaaaattgaggctttattatctgaaaatgtaagatgtgttcttaatttagtgttattatttgttgatcttttaaatgcttttagtaaactaaggattaatttagtgtggttgttttgaagttacattggagaattcaaggattccattgttgtagctgagatttaacctattctttgtttagtaatcaaatttgatttgcccagatctaaaatgcttgctactctctctctctctctctaatagttaaaagtaggtacaaaaggactatttctttaccgttgaactacttttattcttagtaaatttttgaattattcttttgtgaaaaaaacatataatt

SEQ ID NO: 181504 - DNA, 730 bp, Cannabis indica
atcaattatcaaaagcagtaagactagcaaaaaaatggacatggttttcactttttgtcgacactaccatattcaatttatcaacgaaaaaatggacaatccagatatatgcggacccggctataatgaaaaagttcaaaatacaaaaattacactattgtctctatcgaagcaaatgaagattgaaatctaccaatgactatgattagttttcttatctacaatttttagacaaatgctatcttcaattatcaataatttagaggatttttaattttctttttatcttacacccatttaagtaatgtttctttaagtattggaacatcaatttttaatttatttttggattaacttaagaacatatttaaatcatcaagctttcttaaacactaatatattgcattcggtattcacttttaattgacaacattataaaatataatatttagatacacataataataatctcacctaataattaataatattttttctttaatttttaattgtatcactttcaaataacatagaaaaaaactagcataaatttagtatacgtgcctcgcacgtagttttttgctagtatatataacaaatgaaaattaggagaaagcgaaggaacattaacagggcatatatagagtggggaagaagatgcaacggacaaaacaagagccattgtgtgctgtgcgttttgtccgtgactcaacacaactcatattttggc

SEQ ID NO: 181505 - DNA, 726 bp, Cannabis indica
gtaggattattatcccaggtcaagcacgcttaaccatgaaattatttcgtgatgggctaccgaaaaataagatgcaccttgttgatataaccaatcaatctatttaagccctctttaattaattgtgtactcccatacctacacagtctcgaaaccatgccacttgaccttccctaggcggtgtgagattgcacaacttacctggtatttcccttacagatcacgggactactgactatcacaatcttccctttacggggttcaacgttctcgttgatcacatttccatctggatcaaagctctgataccattgtaatcgtccccgcttcaagccttcattgagcccttacacccacggaataatggcttcttattacacgagtatgtcaactctaattgcttcatagattgatggctgatcctacagaccaacatgagtgtttcctgcgtgctttgtcctcactggcacgcttcctgtgaaaactttctaggagatcactcatcctgaaattatcccaggtcaagcacgcttaaccgtggagttctttcgtgatgggctaccgaaaaataagatgcaccttgctgatataggtggtatcaatcaatccatttaagtcattttcaactatgtagtctcatacctacacagtctcagaattatcccacttgacatttccaggtggtgtaggattgcacaacttactcaatattttctcttacagatc

SEQ ID NO: 181506 - DNA, 1026 bp, Cannabis indica
ttcacaatggggtaaacattttgtgcagggctcacagttgctacattttgctacttgcagttcttcccacccccgtatcacgaggaaggtaaagtgccaggccattttgtttaccagtttgattttcaacagtagttcctaaaattgctttcaccagagttgttatttgtttttatttcaaaagcaatttgatttttagaatgatcaaaatcaatattttgaggctggtaaatttcactctcttccaaaatgatggaagtatctatcacttctttccttgtatagtttttcttgaaattctatttgtgcacgtccagcatttgcacatgctcaaagtgttctcaatttcagttatgtcaaatcttttctatgccatcacttttagaagtttcttcatgtcaaagtgccttgtaggtgttagaaagtgacagattgcattatgtattagtctaaattttaactgtttctagatcggtggagaagatatggcatcatcatatgttttcccaccctttcttgcacccgtttctccaaatttataacctcattgaattactcaaacctaagcttctttatgaaccggaaattttctgtctatggttcaggcctgtctggtaggtatttgtgggaggtaatcccaaaattttcaaaactttcttcttttcaaatattatttcgaaaacaaagttgttagctgtgtaatgattcaatgtcataacttcagctactcattcattgagagttacaactatacatgagttggaggttaaactgtatgattttgtgtaggttgggggccatatgcatatttccgggtgttggaggagtcacgtccaagtgctcaagcagcgaatatggtagatatgcgcaatgggcgggcagcacaggctgatgtggtaaccaagaagaggaaggaagcagccatggtttcatgggtctacatttagcagatgatcaatctgctttgaccttggaagaattggaaactgggaggagatagctagtgtggatttgttgcttttagtt

SEQ ID NO: 181507 - DNA, 768 bp, Cannabis indica
cctcgtttagaaaccacatacatctaatcctagcctatctgttcttgcttcctctaatcctgcccgctatcccaactacaaagagaaagaagacggctactctctaattagttaattagttattatctgtcctagctggatataaagtcgttacatccagctcatagaggacgcaatgactcagactagctacctatgcctttcctttctacatgagggagacagataaaagcaagaaggctaggtccccactaaaaaaagtttcttaaggcttcttgccaatagtgagaaacacctcgcttatctatcttgagaaagaggatatatagaaagaaaactcgatcaatgttttccgtctttgtctgctataaccttcaaggaagacaagcggaagatgcaaaaaggcaggacagatgagttgacgatgcatctttgcgtctttttgtctggatctatatatagaaagaagctcgaatgcgttataactccttctccttctatcctagtcaagctaaggcgaagctttgaatggctcctgcctagcttccttctttctagtgattagagtcttctgtttgcagttttgaatcttgctatggctatgagttccttttgtgtcttttcccttctctaatagccatacgactgtgctatgaggaaggcacttctaatgcttcctccttacttttatctcttctagtattttaaagtattttcacccaataataatgttttttgcgttcatctttttattccccttctttacgc

SEQ ID NO: 181508 - DNA, 1244 bp, Cannabis indica
gaacataatagtcctttggaggagttccaatcccaattttagcatagtaaagcctaacaaaaaaaaaaaaaaacaattttctaattctactcagaactccgaatcaattcgaaaccaatcaatcattatgcacgctaacacacacatgcaacacaagcacacacggaaatagaaagagagggaaagagagaaacccgacagcatcgggacggccggagccgcccaagggaagatcaacgccggcgagaattcggagctggcggcgatcatcgtgtgctttgagagcagtgagagagggttcttggccggcgtacttgtacttgacgctgaaaacggcatggttaagagaagaagcggcggcggcgttggcggcagtggaaatgagaaggagaaagaaaatgaggggcgatgagggagagaaagtgaaagaggttgtgagagtaggcatgaccgccgtggccctcctcctcctccgggggatcgagttgagttgggagatgacttttggaggagagagggcaaaaggaaagacgacttacgctctgctaatctgctctttgctatttcccaattcccagaccaatcacctcccaacacaactcctctatgtcaaatgtccctgccttaacttttttttttttaataaaaagattagagttattttgaaaaaattatacattattttttttgttttttttgaataatgattagcttcattaactcaaatcatccaaaactaaggatgcaattatagaagctaaggtatccccactgaaagtacggtcagcctcacaaagagaagatcgcgccaaagcatgcgcaaccttattagcagaccgcttaacaaaattaaaagaaacatcaacaaaaccagcaatcaaattcttacaatcataaagaatatggccataaggagaaaccatatgtttaaacttttgcaaatcattaataactcttatataatccgacccaatgaccaccttaggccatctattcgctttactccaagatagcgcctccttgatgccaatagcttcgaccacatgaggctgcaaagagccacttttggaaataactctcgctgccaacaccaaacaagcagtagtccgtgcagcaaaccccacaccataacgcccctgagtagtaaagagtgtgccatcaacattgactttaacataagggagatcaggagtagtccaatggtcaccactttggacattcaggccatcaacgagtgcagtagt

SEQ ID NO: 181509 - DNA, 565 bp, Cannabis indica
aaaagaatttgataatacattacattttgtgaaatttttgcgttatttttatttctttctcattagattttttattttttgattctcatatatatatatataaataagaaggatgttttcttgttaagaatagatagcccctaatttcatagtgtgaatatctccttttcttctcttatgatttatagattattaagtgtgttttaccttttttttttctctaaaggttcttggtctgattgttgggtactccaatcaagagaatcactctaccatctctaactgtaaatatattttataataaatatctttttgattatattgaaatttttttgtcctttcttatgtcaaattgaataacgcaattcttatggcattacaagtagattgtttgtcctaatttcatttttatctcctatttttatttggtcttttaattatttttgtcattcttttttgctctattcattgtctttttgaagttagaaattttttcataataataggaagggaaatcaatgaataccacacttaaaaatagttatttttatagagttattgagag

SEQ ID NO: 181510 - DNA, 809 bp, Cannabis indica
actgagtcttacgactccaaataactaaggcattagccacaacattacaatctcgaggaacaaaggaaaactgaacgaaagtaaaatgtttccgcaacacaagaatttcccgaatcatcattccccagtccgaaagagaattaggagaagcttgcaatgccgaaacaactcccaagcagtccgctgcaacatgaacctttgttagagaccatttttgagccaataacagccccattcgaatggcataagcctcaaccaattgaatagaaaccatccctggtatgaaacgagactcagcaacaattaattgaccgttatggtctcttattattgcacttaaaccacacccaggattgtcttgaatcacagaggcatttgtgttaattaacacatggtcaggaggaggaggttgccaggatcttttggggcgaatattctgctcaggccgactctgcatcactgccccaaattgctcgtgcagaaactcctgcgcccaattcacccaagcatggtcctcttgaactttatgttggaagaggaacttattgcggcgatgccataggagccatgaaaagccaataaagtaaagcatttcagacttggatagtttgttccactgaaaaaaaaatacatcaggagccgtgggataaccttcacaaaccaaataatgggccccgaacaatttccataaccttttagtctttggacacacccaaagagcatgacaaatatctcttttcctcttacaccaagcacaaatagggtcaatagtcatacctcgctttgtgagttccactttcgttgggtag

SEQ ID NO: 181511 - DNA, 527 bp, Cannabis indica
ttaaaattgtgtatataattccagcaaaaaaaaaaaaaaaatacctatattatattattttttatttttttagtttttttttttattttttacagtttgagttgctttgctatgtaaatttccgtaaaaatatatatataaaaaaaaactatttgaaaatgtaaaattaaaacccccaaaaaaagattaatttttttagttgtgattaaaaaataaaaacaataaaatcttccaatgaattattaccttgaggtgacaaatttagttataaacattccaacacttatgagggtcatagtttttacttatgcaattatgcttagacatataatttcttaatacgttttttcttatccctttgaaaaactactcaaaataaatatatattctttttgttttacacaaaaacaaaactatttcttcctcatgatactagtgaaattttggcatttaaaagcttagagatatagaaaatgaatatattttcatcatcaaacaaaacacactcatatcgataattgatgtta

SEQ ID NO: 181512 - DNA, 709 bp, Cannabis indica
agaaagggaacattaataaattgccgaaaataaaagcatccccttatagttagaatgatcttattataaataaatcttcacatatctctactatacatacatatatttattaaatcagtcacatactattaatgtatagaaataaaattatatatataaaattcatgaactattttctcattatcaattaatttaagatggaattacatccaccttaaccaaacacttccaaatactaacatgacattagcagttatatagaaatattaattttgtttttatggtagacacaatattagctcttagaaaaactataattaaaattttcttatataattatattacattgtaattataaaattagatgctccccaaaatagttttttaaaatgtccaaaaatatagatatgcctacgatacacataaagacactccaaaactcattatttggcacttgggaaaatatgatgctatgcttcaaatgattttattggttcaaaagtgtaaagtccttttttggcaagttaggtgacaaaataatttttccttttatggtaagattgctatgcattcattttcgaaatcttacctcttttattcggttttagttgccattttccttgtttggaaagttgcactttcagctgaactttcctttgttgaaaacttctcaaaagagaaggaattctcttttggaaagttgtccttt

SEQ ID NO: 181513 - DNA, 822 bp, Cannabis indica
atatcaaaccagaaaaattgagagaagtatagagaaaaagctttaagattacatgctggtttatggcaaggaatctccaaaaccttgtaacctgagtttgacattgatagtggagaatcaagttgcttagagggtcgcctgacggagacgtacctctatttttagagggaactccaaaatcaatcgttgtggttatttactcttatttttttgttgtttttctttcttttttgttctctaacagacaaagatcggtctagatatttgtgaatttttgtgtatatctcggcttggttttgctggaggtttgaaggttcggtttgggagctcaagattagagcttggagaagaagagtagaagaaggatagtggcttggctgttagggtttcaaagaagaagagagagttgttggctgctagggttttgcagcaaaagattggtttatatactgccttgaacgacagagttttgagggaaaaagtactcttgatccgcacaagagggaaaggtcatttctgaccttgttttctgcctttgggagttgttggggcaggagcgatctgggtagtgcatgatttcctatagtggtatcagagctcggtgaagtaagaagattcaataacacctggaaacaaagtcaagaaactagaaagatcatcaaaaacattaaaaaaaaccagatttgtgattatcaagaaattaataaaacatgaaaaactctaacctaaaaatctatcttgctacattctacttttaatatctgttcaaatttgattaacatgagtaatattagagtggatgttgtacaagcttgatggatc

SEQ ID NO: 181514 - DNA, 732 bp, Cannabis indica
aatccattgaagatatcaaatgggcaattaagatggttattaattaaatacactaattaattaaaaaaactcatgatcatgatggctctgctgatatttttggtgccgcaatcctatccaaatcatctaataggtaccttaatccaaccattagcaaaaccaatggctaagattacaaaaggagttgacataccaaatatgataatataaggaagtggggttttcattggattttctccttctctttctcctgctgtttgccaatacctacaaattaatttcaccaatatgaatctaagatacaatcaacaaagtgggaatattataagctttagtttttacttactgttcaggctcttgttctctagttataaatttcttcttccctcctttcttgatatcttcatctccactaccttaattaaaaccataatctaagcaattttttcacatggaatttgttatagaaataaaacccatatagtaaaattttgtacctagttctgcatggattttgaaacgatttgctctcttctttggtgaaattgcagagtgaggaagaggagagagtagtgatgagaaggattgaagtgggagtttgatggtgggtgtagaagagagggccaaggtggttgccatgattgtggtatttgagctttttgttgggtcatgccatataaatatatatgtatgttgtttgtggtggtagtgtagtgatatggtagtattaaa

SEQ ID NO: 181515 - DNA, 690 bp, Cannabis indica
gattaactcttgaagttctatgttcagactcacatttgagctttcaaaaagttgttggaagtaattgttaagaataactcccttctccctctctttaaacacgtggtttccatgatcatccagaagagaccatatgtaattacgttttctcctgatctgagtggaggcatggaaaaagtttgtatttctatccccctgagcatccaagtttcccttgatctttggcgccaaatcgattcctgacgaagccaaatttcagcgatctccttctcaattaattcttcttcttgagaaatcgacacagtcacttctctactctgaagatccatcagtttagactcaagtaatttcaatttctcgttacagtccccaaaatttctcttactccaggttagaactttctgttgcaccttttggagtcttctcacaatgtccccccggatctccaacatcacgagaatggtaccatgccaacttaatcacttcaaagcaactttcttctctcaccacgcctcatagaccggaagggtcttctccccctcctgtttaagaagattcgaatcaaagataagagggccatgacccgaagctagaattggaagattgcgaactcctccattgggaaaaaaattcacccaacttgaatcaaccaccaccctatccaatctttcccttattaacccgccattc

SEQ ID NO: 181516 - DNA, 554 bp, Cannabis indica
tgagatgagagatggaagggctctgccgggagaccctaaaactgcccatcaatccatcattttcagctttaatcagcatccgagacaggatctcattgcacataataaacagatatggcgagaggggatcaccttgtctaagccctttctcaggccgaaattgcttcagagggcccccattgagaagaaccgagaaggacaccgaagacacacatttagccactaatcgcctaaattgagggcaaaacccgaaagcctccatggtatgatcaaggaaattccatttaatacggtcgtacgcttttgacatatcaagctttatcccaacatatcaagattcttaagttgtgataattgcaaaagagcccttgaacgagtccaataataaatcttaaacattgatgaagacacgtacctttgtcatttaccatcaaaaaaagagtttctcctctttgaattctgagcaggagtgacgtgtcatctaattccccacccattttctcacaccctcattctaaattctaaattctaaattagaataaaacaactatttt

SEQ ID NO: 181517 - DNA, 512 bp, Cannabis indica
ttttattttattttctacttactatttttacttattaaagcttcaaaaaaaaattatctttctttatattttttcttgtcacctttaactgtacttttttttaaggtttttttttcctttctcttctctctctctttttttttcttttttttttttcctaattctctctctttctttttttttttcttcaaactaattttttttaatctttgtatatatataaatatatatatataataagtgtatatttttatatctcatttctttaacacttttttctctcttaaaaaaaattaagagcactcctcctatatttttctatcctttagaggattaataaagaaaagtaacaatattacaaaaatacttccagctggccaaataaataaatatgcaactcaaataaaaaaaaatacacaaataccaattacacacaccttcaacccaggatacatgctttatgggcaactatcgcgcaaccacgcagcaacccaaccgcaatcgaaacaaac

SEQ ID NO: 181518 - DNA, 624 bp, Cannabis indica
atgtgccaggttagtgtccacgtgtcactacgtgattagtccagatcatttaatttttattttttatttgtaaatcaatttaaaaactaaaaataaaacaaaaatagtttaaaatcaaaataaaataataaatatttaatatttatattttaattaaattaaaataaactaaatcattaattaaaatccaaaacctaaaactaacaaattaacacaaaaagaaaattgaaaggtcatccccttcatcgtcctcttcttcttcctgcccttcttctttttactgaaaattgtacaagcgagggagaacaccgtgggagatcaaagaaggtgaaacagagtacaatgatcaaaattttgtacattaatatccccaaagctactgttagttccaaaattttggatatcagcgtacaatgatcaaaagtttctttttggttctaatctagctaagttgtaaatgataacaaaatagtatttttttgagattaataaattgagtttaccgtggataactgaatatttcagttgatgtttgattttatttttttttcattttgagaataatgagaagaagaggaggaagaaggataaagcctcggtcacgtgggtgtgttgctcgaagaa

SEQ ID NO: 181519 - DNA, 510 bp, Cannabis indica
tttattttatttttaaattctttttttttatttaatcattaaataatttttattctactttttttaattaaatttttaattttgtcaaaaaaaatagatattattaattaattaaaaaataaaaaataaataaattatataacctgagggtggatgagacaagggtggcagtcaccctgaataaaaaaatagaaaaaaatattcatatattttagttactataattaaaagtaatattattacataatataagttttgatgtaatagttaaattatcttattctttcaaaagaaaatagttaaattatcttattctttcatccaggaaccaccaaaatgtatcaagatttaaagccctatttctggtggtatgggatgaagagggatgtagtggactatgtcactaaatgcttaacctgtcagcaaatcaaagctgagcatcaacgaccggcggggttacttcagccattaacacttccggaatgtaagtgggaagacattgcgatggac

SEQ ID NO: 181520 - DNA, 687 bp, Cannabis indica
tatgtaattcatgtgtttattaattgacctgaaggtaagttaatatttgacgagtttcatacatgtacatatggtgataaatgtgggatcattataaagtatttttgtgtgaataatatgttagtccaaagattacatattatttgacataatttattgtcaatgtttgatcgtcgcaacaagaataccacttacaattaatattacagtcgaaagacttaatattaatgatgtgtttggtatcttgagatgagattaatcattatttgaatttattgctttatttggattcttatatgagcacattttatgtaattctattgttcttttcagttattgctagtgtatcggctaaccttaatgtggtactagtccttaatgcaaatggaaagagaacatttaggatggatggatcttgaccttgcattaaggatggatggatcttgaccttgcattaaggatggatggatcttgaacatgtggtaccagtccttacattttcattgttcttgattgcatggatcttgaccttgcattaaggatggatcgacctgctcttcttacggataccagtacctccgagcaaaggaggatttatcagaagtgagactgttcaaatcgcatgagtcttatgatcatcaagtgcggcatacttgaggcttttaagggtgctgtgtttgagagtca

SEQ ID NO: 181521 - DNA, 712 bp, Cannabis indica
atttaaaaaaaaaaaattgaagaacacaaagaggaggaaaaatagtgggatcgtggagagggaatgttcagcaatggaggttactaaatttttttaaaaaaaaaacttaaaagaaatggaaaataaaaggaaaaagaagaaaaaaaaagaaagggaaatgatggatggttgattgcttgatagtggtcacacacatgtttgatgcatgggaaagtgtgcatgtggtaaaataataataaaataaagatgaagggtataaatgtttagtttaccgtgtagtggtatttacagggccggccctgaaacaaagtgggccatagggagaaaaaaaattttgggcccttatgttagaaaaaatgtggtatttttcaaaatcggtaaaaaaaatgtataattttaaaagaggaaaaaaaaaatttgggcccctgagctgggtgggccctaggcacaggcctagcccgcctatgcccagggccgggcctgggtatttaggtaataaagttatcattttatatttttgatgtaaaattttctaaattaaattgaaattaagaaatatatatatatatatatgacaattgataaatctacagaaactaatccggttgttatcattatattttcattgtactcgttattacattcaaatctgatataattatcgtatcttacttgtaactgtaaatatcatttctaatagatttgtttagta

SEQ ID NO: 181522 - DNA, 602 bp, Cannabis indica
aaataaacatgagagaagtaaagaaaaaaaaaaataaataaaagcaaataaagtaattttttcaaataaaaaaattaaaaaaaataagagaattaagaagaaaataaataaagctaaataaaataattttagaatgttacatcactttctcatacacttcctttatatatatatatattgttaatgtagatttttcatttaccaataataagcctttttgtaataaatttaaacacataaattataagaaaaaaagtataattaatatataagttaaccatatatttttacatggttttgcagttaaatttgcatactccacgagtctatcttattcaagatgttttctgaatattcaatacaatatataattaatcgtacttatgttttttctctccaaaattctccctcccttttttgtgggatctgcccctatttataggaatataggttggcagttatttaaatttaaattcaaataataattgttaatgaaatgtggttaatccacatttcattagatcacgtactggatagcaattaataactgcatatctgcttgttattcttatcattttcaatggttaatgctaattggacaa

SEQ ID NO: 181523 - DNA, 707 bp, Cannabis indica
atttctagattatttgacaaaaattaaattaaatcaaataaaaagattgcaacatcacaattaactttaaggctacgtttggtgggaggaagaaagagtatgaagaatggagagattaaagaggatggggagtaagagagatagagagaaaatacaatagttgaaattatagtagaaaattagaaagtatattattcatttcgaattgatattaacatactacattgaaaattcgattctaattttcttatcaaccaacaccacaagatagagtaaagctaatatgatatccataagttcacaagttgaagtgttcgaccaatttagtaacacttacacaaaacatattaagttccataccattgctttctttctcaatctagtcagtaacaaatcgcattcataagataagatacaaaaatatagtaatcttatcctgttttactaaaattaaataatttatgatgtaatacttaacatataataaattattattcaacaattattaattttgtacgaaactaaacaagaaaattcatgtccaaaccaaactcttctaaaccactaacccaaatggatcttaatcttcactctcactctcacttgctagcaattccaggtctaggactgttgttgttgcttactctgtatctatggaggaaatcaatgaaaattcccaccaccaacttagccccagagctctctgg

SEQ ID NO: 181524 - DNA, 650 bp, Cannabis indica
tgtgttgggcctaattagagggggcatgttgttggctccaatgttagctcaactttggggaaaaataataataactgtcttgatgatgagagtagagctttagccaaaaaaatttaagctcaagaggcatttattcaggaacttaaattttttggtgagtttgatctctctgaaattcgtaagtaatgaggtgatattggtgcccaacctgtctctaagaaaaatgaaagaactacccctctcaagaaaaggaagcttgttgatggcttgacgtctgcatgctatagacttgtgaaaatgatgcgccaacatcctggtgtcgtgcgtgactttccttgggacattgtcgggccaaaccatgatgacgaagtgactagccagtcaaataatgatttgtttgggttgagctggggttttagattactggcaaaaaggcgctctcttgataaaaatggtagcaatttggtgttgcttgaagactttggttctcgtgtgtcggatcactctacccctgtgaaggaggatggtgtacctcctccacaggagccatgagaatggtggcttagaactgtagagggttgggacagacctctacgattcatgaacttaagacctcgttggtgagtcagatgcattttagtaatttttaa

SEQ ID NO: 181525 - DNA, 756 bp, Cannabis indica
aaaatacagagctacaataaattacaaaaaattaccaaatatctcattagaaaaatatgtataaatttttgtaatacatatatatatatattttaatgatatttaagatatcattaaatttttgctacagaaaaaaaaagatatcattcaatttgtttataatattttttattcaaaaaaaaaacttaattgaaataaacttataaaatgagcttatataaaacagatgccatatgataaattttagatatgaaataacaaatatttttctataacatataaaaataattgacataatgaattttattggttacttcttttttagttaataaaatataaaatagacaataaaataacttttgattccaaacatttatttgatgataatgaaaaaatctctctttctatatatctaaatgattatttcaaaaaatagatgatactagtactagtcttgagctgaaacgagtagcggtgtagctacaaattattttttttaattgcttctttataagttattttagaatacaatttaattatttttatttattgaataagaaaataattcagtaaaccatgaaatgtggttggtatatttaattttttagtaaagtttgtttttatttttttatttttaatgtaactcatagatactatttggtttccttacaagttattttataaaataagattatttaaaatatatattgtaaaatctaatgatagataagaaaatactttttaataacttattaa

SEQ ID NO: 181526 - DNA, 965 bp, Cannabis indica
ctattatttttccatacattagcgatgtgggactatctaacacttatcgatcacttagtgaatatgatttcttttttatatcaatcatatataataaatgtataatatataatttggtcacattcaaatcttattgtgtatttaattttatttttgtgtttgttaatttcagtaaaaactaagaactaaggattttaagcccatacaacctaaggagtttataatgagatgttagttgaattaattcttggtttatagcatttttttttttaaaatgtcagttcatagcaaccctaatctccaagtacaaaacatgtacattacgtttttttttcccgaaaactcattattacttgataaataatttcctgaataaataaaacaaagactagtgacagttttaatttcaggttataatattttaaaaaaaaaaaaaaaaggttataatctatatatattaaactcttaatactattgaataattatgtttaagggtgttcactaagtatccgatccaatccaatccgcacgatccaatccaatccaatccgcaaaatgcggatatccgcacttgcgcggattggattggattgaaaaatctaaaatccgcacttgtgcggattggatgttgtttgacctcaaaaataaccgatccaatccaatccgcacttaattatatatatttttaaaaaattataatatataatatatattaattttctagtaatattaaaaaaaaaacacaaaacttctaatttattaatcttttttagtaatatattgagttagtgtattttatttgttttataataaaaaacactagaaaattattctattcacatagacacatacacacaaatttaaatatatatactaacttatttattttaataataaatacatatatattttagtgtaaattatatattgatatatatatatatacatggatttgatttatatat

SEQ ID NO: 181527 - DNA, 608 bp, Cannabis indica
aatgtcaattgtgtatttatataataattgtacataacattaatattaatgttatgctatggaaaactacgaaaaataacatttcctattctcaatattaattaacatctttttatattttcaaaaataataataataataataataataataataggcccctattattttggggccctgtgcaactgcccaggttgcacaggctattagccgcccatgctcgtcgtcagccataaaccgtttaacctccatccttgctgctagccacaaactgttgaagctccatccttgtcgtcagccacaaaccaggtgttgtccttcgcaaatgtcaactgcgagttcgtgtatagtggagaactgctacggcaaaaaaagaacaactatggcggaggaggacgccatgggagctttggggttctacgcgggttctttttcccttagcccaaatattcgagatctcacctagatctgtgagatctcacccaaatttgtgagttctccatgatcaaatctgctgctttcaagatccccgtgaagctttgtgtgttgcgtcagaaaaattcatctactgtactcggtaactggcactattgtttgtttgtggtggt

SEQ ID NO: 181528 - DNA, 726 bp, Cannabis indica
cgaaacaaatcaaaccaacaaaaccgaaaataacacatgatttgggcaaaaaaacaaaatgataaaataacaaacattaaaaccaatttgaaaaacaacctaaaaatgaaaatcataaatatgggctaaagagggatactaataataaagtctacaaatgaaacttgaatgaaaaaataaaataaaaataacagataatgaaaatgcccaaaaaaaaacaaacaatgaacacaaaaaaattctaaaaatcgaaactacctaaatcaacaaataaaacacaaattaaaaaccagtttctagtacttactaaaagtttatacctaataccaacacaaaacgtactcaaaaaaaaaaagttaaaaaaagacaacaacaacaacaacctgatgcttaaaaaattaagaaatcaaaactaaacaacaaaatactaaaacataaaaccaaacccaaaacaaaaaatactttaaaaatcaattatgaacaaatacaaaaacacacaactcacttcggatgaagcatttttaaaaaaaaaaacaacaaactaaagatattgaaatgctaatcacttaaaagacataaaaaatgaattagggaaaattttataacaacaatgaaaacttcaaaaaacaaaaaaaatagaagatgaaaaataaaaccctaaaatcagtgaatataaaaaggaaaaaaaaaacacataaataaccttgaagaacacacgagaaatag

SEQ ID NO: 181529 - DNA, 536 bp, Cannabis indica
gttctagtagttcaaagctctaaacatattgctctaatttccattaatgtatgtattaactttatattatttatgtgtagtgctcttgagaggtactaccttgagaaaagaaaccgacggtcagtagcaataagcttcactgagtacagatgtccagagcaaccagatggcaaccagtgtgggtattatagcatgagatttattaaatcattcatgactgaaaataatcctacacgaaaattggaaacagaggtaaagacactaattattttcacaaatattaaagtttttaagtacttttattatgacctattaaattaatgatttgtttcgtttgttgcagtttaaaaggaacatatcatcctcttacactaacaaagaaatcaatgaaatacgtgacgaatgggcaaagtatgtcatgcagatgatagcagcaggcaaatgactaataacatagagtatgatgaccaatgatcgctcatggacgatccccatgtgatctaagaaaatgattgataggtttgacatcgatctca

SEQ ID NO: 181530 - DNA, 783 bp, Cannabis indica
catacaacttgaattcactctatgattttataagttcaatggatctttttggtccattgatattcttttctcacttgtattactccagtgaataagtgtctagtatttctctcgttccacacttattaaagtacctaaccgatggtacatttaattatcatctttagaaaagtactccttaacttttatcaattatgttcacaacctgtttctaatattccatttatcctcctagaatacccatctttcaagaatgtaacatcatactatttttgctttaatctccataattctcaataactttctttaactcttaacatcgtcatagccaaagatattgtaaagtcctttttttggcaagttagatgccaaaatattttttcttttatggtaagatttaattgcattcataaccgatttcttaccttgtatattcggttctttattgcttttttctatgttaggaaagatgcattttacagctgaacttttcttgaatggaaacttcttgtaagagaagcaattctcttatggaaagttggtttttaaaaggaaactttgattgttgccttttctttattgaattcgattgtgttttgatacaatcagaatatataaactgtttatggcaggaatcaagacttaatagaagattggactcgattatagcaagtttcctttttctggtcagatttgctgcgttagcttccgattctgatgctacagattgtgtttattttaggaaaaagtttttgtaccagctgtagattcgatcttgtgtac

SEQ ID NO: 181531 - DNA, 616 bp, Cannabis indica
aaaaatgcccctgaactattgagattgttgaattaatgacttttgtccaaattctgtagaaaaagtctaacatggatgaaagttgggggcataatttagtacatgtcaaagttcaagaggcataatttggtagatatcaaagtcgtggggaacatggtttagcacataaataatcactgaaatagtaaaattgaatgaaattagacaaagtcattaaatctgacaatctcaatagttcagggggaatttttaacggcctattaagttcacgggcatgatttggtacatgttaaagtttacgggaaaaaatcttaattagcctaaatattttatctgtatataaatatctctttttttattttatattaaaaatgtctatttaacaaatagttgaacagttttatttcaacttaaatgtaatataaccattatttaacaaaatattattagttaacttttaaatgaataaatagttttttattcataactttttctctaagagaactattatgaattaagtagggttagaaagataattaaaaactctaaaatttttaaaacagtaatttttatatttgcattatttaatggtgaaatactaaatcaaaattttggt

SEQ ID NO: 181532 - DNA, 833 bp, Cannabis indica
cggagcagtggatgagtatgataacatccatttttatttttatgcgggtcgaggacaatgatcgggttaaatgtgctatttatatgttgtgagaagatgatcgtatctggtgggacatcatgtctcagggtcatgagctgagtaacatgacctgggatgcttttcgagcactattttatgagaaatactacaatgagtctatccgagcaacaaaaccagaagagtttatatgattgacacagggtagcatgacagtgacagagtatcccactaagtttcatcgattggaaaaattcgcttcagatgaagtggctattgaagctgctagaaaagaaaagtttattcgaggattggatgaacatactccacgggatgtgatagtggctcccaaacaacctgggcttgttcgaagttatgctcagatagttgaattggccctaactggtgagagtccagaagaccagatacgaaagaaaaatattgcgagaagagattctttgaagcacacatctagtgctggttctggtagggataatgacattggtgatcgcaagaaaaggcctaatgaaccatcagttgcaggtccaaatatgagatttcaaggtaaccaaggtttccgacgtggtgggaacgaaaactggcagacttttcctgaatgttcgaggtgcaacaagcgccaccagggtgagtgtcaacctggggcttgttttcaatgtgggatagtgggtcacttgaagaggaattgcccacagctactgcgactagaacaaaagaaggatgatacacctgcccctatttgagtgtttgctctgacacaggccaaggttgatgcc

SEQ ID NO: 181533 - DNA, 562 bp, Cannabis indica
ctcttcgattagcgaagattgcactgtaattgaaaaagcactgtagtgtgccttagcattagggcgttacaattaatgttttatttttgtaacttgatattttggtgtagaccattctttttctttttcaataaaacataacacaaaagaaaacttaataaatgcattaataagaatattataattatatgtataatttaataaaaaatagttaatctttatatctttaatttttactttatcaatttatacaaaattatttgtctagctacttttaaattagtattataaaactatctctataatttttttaatacgatcaatgctatatttttttgttaaatattattagttcacatttttctaattcattctattatcatttatggatagttctttttttttaatattaataatcaatatttttttgttcagttataaaattatgaattatcattcatttttttttcgttctctaatttagttaatactttttatcatcattattaagtaaattaattgaactcttatttttaatactcatagaaaattcactataaat

SEQ ID NO: 181534 - DNA, 584 bp, Cannabis indica
atatctttagaatgtgattgtgagttaggtgagcgagagtacggtgtcaatttttttccactagatttaataggaaatcacttatatatagtgaaaaatatgggatttaaacaaatataataatgtattcaatttaaaatttagatattttaagagagaaaaaagattttttctctaatattatcatttaaattataactctctataaatatctttcttatcttttataaatatataacattaatttttttttaatattacaattcaaaataaattttttacagatatttaaacaaaagcatttttctattattttttttaacttgcgatgaaatcttttttttatttattttttctgtacatttatatacacgtgtgtcgtatatcatattcatatttcttttctttctaaataaaaaaaaaaaaccaaattaaaaattagtaaatagttgatgttgtacataaaaaatgtaaaaaaatttaaagaacaaaaggacttcattaaaatatagaattacacattaaatagcaaactattctgccttctgtttcctttttcctatatccaaatggatggttttaca

SEQ ID NO: 181535 - DNA, 631 bp, Cannabis indica
aaataaataaataaataaatgggcggatttttttttctttaatcgaggaaaaggaagttttttttgttctcttttttaaaatttcaaattggtttcctttttgttttttcttcatattcttatttataccaattcattttttatttattctcacaatctctctctttctacccattctctcttcttcttgttgttctctctcttcattttaattctctctttcaaaaattcatggctaaaataaagaatttaaggcatccatggaagattattgatacagagattgctccttcaaatacctcgtttgtggcgtcacaatctcctcctgctactgcaactgcctcaattccagttgattcatttccacctcggtgtgaatcaaagagagctccagtcaagaaagcttcatctttaactccttcttccaactagagagcacccaaaactcttgctcgaaaatctgtgaggcacacccaatttcccaagacttctaggtatggttcaaagtcttcttctgcttttgctgagggctctccttctcgtagttctcagtcaccacttgctgcaactggtgatgcttttgcagcatcaaccccaaaaggtccttcatctcagactcgtgcccaacagc

SEQ ID NO: 181536 - DNA, 892 bp, Cannabis indica
gtacattgttcttccttcaatgagaacaaataatattataagagttgttggcatgtttgtgtggtatttatctaatttgttttttagtactatgatgtcctacgaaaagaaaaataccatcaattggagaatcttctaagcaatgtcaacgtcgaatgatcaagtgtaaaaattgtggaatattgtgtcatattttaaaagagctgcacaaactaatcaattctatattctcatgctgctagctgctagctaacatttatatttttttttgctttagagatctatatttaacaatgcatggtttggaaattgtataaacacaattattttaatatttataacaagaagtttatgttttgtattctttcataagtgtaccttttgaattaatttttcttttgattaaagaaaatttaaaattataacaatttacattttaagcattcggatttacttttccgattaaggtgtttacttttttgaggttcattagtttgcttatttaaggacatgatgaatcatgataaaaaaaaaatgttttaaattaatttttgaatgtttgtgaacctagaagtcttataatttttgtatagtaaattagttgacccctaaaaaaaatacttaatataatatttttggagtcattagtgttatgtcgaaagtttctcaaggggagctccatgcgcctgcgtctctccgcgcgcccgcgctcctccgcgcacccgtgccccttcgcgctcccacgcacctttgcgtgcttgcactcgcgccctccgcacgcctacgcttccctccgtgcgagtgcgaaccccgctctgcctgtgcctagcctcctgcaccccgttgatcttatttgcactcctgaccccaacagtgtaagaaaggagtattt

SEQ ID NO: 181537 - DNA, 793 bp, Cannabis indica
gctgctctctccttctctccccattgcccttaataaaattctagtacgcaagtatatgtagtgttcttgtaacaccctaacccttagggaagccacatgtgtgcgtttataaaatagtttatgataataaattattggcttacataaaatgtgatttaataaaattttgctaactaatctgaattataaaattatggcataatcttttttacaattggagatctcctatttgaaatattaaaagacatgccattacagtattatcataaaaatacatttaaaagttcataaaaattgaatataattcctaacaactcaacacaacttgtcagatcaactgatatgtacacttgctggagatgatttctaactcatggttttcgaaacgttattacttattacctgcaccacatagcacatgtgagtcacaaggactcatcaagaaaagtaataacaataatcatataattcaccacacaatatcagcaagtaactcacatcatcagaatcaaataatcatacattgctcagatattgaaatttgggccagtatagatatttaaacatgatgaatgtcaatataaatatatatagttatacataattaccaatccaatgataataactataatcattacttcatatagtaatctttctcactattctcctagcaaagtaattctaatacattacctggcatactaatgtacttgctgttgtttaataaaattatcctgatacttaaaattgatattcaaatcttaccgtcattgtcaaataagacaactagaaa

SEQ ID NO: 181538 - DNA, 777 bp, Cannabis indica
catcttatcagttacaagttacaactatactacacaacgcacgatatataataaaagaaaaatacttgagaggtggtttgtagggcattgatccttaggctgcatgtgacaagtatttaaatcaactcaattatgaagtgagcttccatttctagttatgattttataattgacatatgaatagttcatggcaataccctatttttgataattaggtttacttacttgtcatacaaaatatacaaaataagggagtaaaaacataccacaaatagcaaatataatctcttaaaaaattatttgtcaactaagatttaagaccttacattattataccaaataagtattaattgagtatgctaattcttttccaaaaaaaaaaaaaaaaaagactgttttttaaaaataaacatagaaacatagataattaattataacaaaaaacagctattttgcaaactacaaaactaaaagtcaaaaaagaaaaagaaaaatatggtaggtatgtgtaattatttgacatcgtacatagaccatgtttaaaataaaaaaatgtaaaattatgttatatttgacaaaaaaaaaaaaagttatatttacattaattttagtatcgtaccccaatacacaatataaaatttgattcaaaatttaatatttttattaaaaatataaaaaaattaatgactctaggattaactaaattatataaaacaataaaaaataaatgtaacagatttataataatacaataactaaatttaataattgttattc

SEQ ID NO: 181539 - DNA, 596 bp, Cannabis indica
tggtgtcagcatagattattattattattatgttaagaataaataggattaatcctccgaactatgacccttgtagatttttgtttttctctgttgcgaaattttttcttttaactataaaaattgttgcaaatatttccctacagttgccttctgctcatttcgttaaataatttgttgatataacagtaacacaacgttaatttagtcctactcaagagtccagacaaaaaataaatacataaatagcagtttaacgatgaattatgagagtatgcatgtgttttattgaaagctataattaaattttaagtattaaagttattaaatactgcaccaataacttatagcaacataagaaaataattttaaaagatgagaaaaatgcaactagagagtgatatttgtaaccataattcaggtacctttgatggacaacaatgaaagaagaatagcctcctttggtgatggtggcatcagcatcaacatgattgaaaagtgtaaaatgatcccttttggcaattattttcaaggccttgattacagaagtggcaatctctacaagaagtttacgtaatgttccaaacaccaacatg

SEQ ID NO: 181540 - DNA, 883 bp, Cannabis indica
gttagaccaaaattaaaacaaaaattaatgaaaacaacacttaaaatgattttttcacagccctctctccttgatctttgtccctctccctcttcgatcttcttcttcttcctcaacttctcgttcctccttttcgttcttcgtccttatcctttaccaccatgcgcagaggggcaactcctaagtgacaagcttcacacttctattgttctttacagtatttaactaataaaaaaatattaattaccaaagtgtgatgtttaaacttatgaatttacttttttttttattcttctaattaactaataaaaaggtagtacattaactaataaaaagttcgtgctcaatgacattattttgttggtatagctcacatttgaactaaatttactttgtctactaatgttaaaactatttggtggccatgtttatttacttgtagtaggaaccttttattgtggctgatgccaattatcaatgttattcttagtcctggaccacgtttttttgaagtatttgatctaaagacaatattctcaaaggcttttaaaaaaaccttataagagtatcaaaaaactaattgcattaaagaggaaaagatgaagaaaaattctaagattgctccttcaccgagatgtccatctacatcaacgatctcaaaaattactcgcaccgaatagcgagcatcagtgaaaccgtactagtaactgttgattaaaaattctataattttactattttcccgattatttcttttatggctaatgatctatttctatgtacaattaataaaaatcacaacgtcatatatgaataatgaattttttatatttatatattaattattaataactaattcaatattcaaccatatatcaaattg

SEQ ID NO: 181541 - DNA, 899 bp, Cannabis indica
tttgaggccataggaggatatttttacttgttgaattacgaggatataaagtaaattatgtgcccaaagtaccactacaagaactatctagagtatatatattatatatattaacctctttatatatatatgtatttgtggaatgatttgtgaatattcctttttgtaagttaatacgaaaaaaaaaaaaaagtatattagtactgttatcgtcatttgctatataatgcattattttaaaaaattactatcggtgcagaatgtgaggaatcatttttgccaaatatatttattttattatatatcgatgaaaaacatcacgtattatttttgccttgtaccaatactttggcaggttgccaattccccaaacctaatgacatatgtgatagcaataagttaggttagtaagacgaattgactcttaagttttcagacccaggattgtttcgtttcattataaaatgaaaatatatatttttttatatggtacattcttctctttaaattcaatcctacttatataaatatataagaaaaggtcaagtactagacttgttcgaagatgaagttagttgcttcaagttccaaacaacatttctgtgccgaaattgatgccataaaacaatcctagatgttgggaactttctttataccaagtaaggtccatcactccctagaataacattacttcatgaatcttaacctgtatatatgtatagataaatatatattcatttataagtgcacacgtctattttaaagtgttcagcaattcaataaaaaactacttagtagacgagtgggtgataacatgatgtgcttttatcttttttaagtcaatgccaattgggtacaagcattaatttacatatctgtaatgtcaacactaacgattg

SEQ ID NO: 181542 - DNA, 655 bp, Cannabis indica
ggacgagggtgttggaccgtgggggtagtaggtgggggaagtactgtagcatgtggtccttgtgttgatgtattgtcttgtccctcagtagtcgaagtaggatgagtgatgggagagtggataacaccagcattagtagatgaattattgtattagtctgaaaactaaaatttggagattggtttaaagacaatacctgattggagggcacacttggtgagggtgacatggcagggaaatgtccctcattgaaaatgacatttcgtgagatgtagaccttgccatttgggtgttcacacaaataacctttgtggtgagaagaataacccaaaaatatgcactcctcagatctcaattcaagcttatggttgttgtatggcctcaaatgaggaaaacagctgcacccaaacacttttaaaatattgtaatctggcttaatgccaaagagacactcataaggactcatattaccaagaactggtgttggaagtctatttattgtgaacatagcacaagacatagcaaaccaccaataatccatgctcaaaccagcttgagctaataatgtgaggccagttttagtgatgtgtctatgtttgcgttccgcacggccattttgttcacttgttctaggacaaggatgttgaaaatgaat

SEQ ID NO: 181543 - DNA, 726 bp, Cannabis indica
aggcatccgtacagggactcccttctggaacgaactacaacaggaaggagccgcaagccttcaggacttccagaagagagtccaaaagtatatcaaccttgaagaggcccaaatagtggcctatagaggatattatcccaccgcgatagcagggtacatgcctggagcaccgccctcgggtaccgtcccgaccacggctccaccaatgagcgacatacagttctctactactcccagatatagtcagggccaggccttggcaccagcatcatcccattttggaaatctctcagggataaatggacaagcttcctcgcactccgctccaaccgctagcctggcaggcccttcccagggttcaaggagtaaacgatcctccaaaggcagcaccaggacggaggagaaacgccaaaagagggggtacactccacaatacacccagtacacggagctgacggactcccaagagcgtgtgtactttgctactaggcaaaatacacactatcggagaccaccacccttgtacaaggatagctcccggagagatcccaacaaaagatgcgaataccacaatgacattgggcacagcaccaatgaactgcaaaaaatctcaatgatgagattgaaaacctgatccgattggggcacctctacgagtggatcaagaataggctgcctcaccttaatccgggtcaggcgacaggggttgtgcagcaaggagtattg

SEQ ID NO: 181544 - DNA, 683 bp, Cannabis indica
gaatataacaatttttatactgcttacaaaaccacagtatataaatatagtaaaaaagtaaataaaaacgcgttacagtataaaagtaaaaaataaaaaaaaaaatagtacatcatgtaaaaatctcaataaaaatgtaaagtttaataaaaattaataaaaaattagtggtaatataataaataaaaaattaatattttattgtatattaaatttgaccgaataatatattattttatattaaatttaatataatttttaacatatactaaatttaacatattttttaaaatacatttctgcactccactagaaatgctttaagattatagattttatcaatgttttgcattttatatttcagcagtggtctttaaaaatgattctcaatataaatagagtactgaaatgtgcacacctaaatattaattaacgatttttacatttatctatgtagggacattattgttttaagtgccacaatatttaatcagatatcattactcctaaaatatatagccaattccagtatttttcttcatattttcactaaaaaagcacaggtatagctagtgaaggctagtattttgcctcgttttactcgattctaggtaggaacaaaacaagaaagcaaagagcatcaacaaaattaggtagcatctctctacccccccaaaaaaaaa

SEQ ID NO: 181545 - DNA, 635 bp, Cannabis indica
cacaaattttttaagtgtacaaaaatatagggagagtaattcattgcatggctcataattaaagctcctctaaatatatgttctttgcttaatttttactgatttttttattcacccacacatatataattcttttcagataattaatcatgactcaagttaattgggctataaacaagagtttagaaagaaaaaaagtgcacttatatatttttgagtaatataagctatcattcatgtcaatatccataggtgcatctttgttttttgacatataaaaaaattaatataattaattatatgacagtctatgttgtaattataataaaatatttgactaatttttccaaaaaaattataaataatttatgatactaaaaccataatttagaaatattagaaaagcacttatgcatgcaactaaaggcttaagtcctgtttttaatatcataaattatttaattatttttttacttactgaaatgtctactattttaactataacaaattagcattattattctacagtaaaaaagaaaacacttatcaaatatagtgacaaaaataatgcttttactatgtcctataataaaaaaataaaaaaaaaaaatcaattttgtggttgttactggcta

SEQ ID NO: 181546 - DNA, 573 bp, Cannabis indica
tacaattataaaatgtgaaaaaaagaaatttatgcaattatttatttggatgaaatcattcacatatcacaaattataaattttaatggcgtttgataacatttttttttaatcagttttctattttttaaattaaaaaagtgaaaatattttttaaaatctataaaattgttttcactttttaatttcttaattgagaatcaatttttttttttttaaaaaaaaattacactttaaatattttttaaacaaatttttttcttaatcaatattttagactccgactagaatcggacccaaatccctcccatgaccctagcgccgaatcagacctctaacctgcactcgtatacgacccagacctaaactcgacttaaataaaattaaaaataaaaataaactttacagaatacatttttgtattttgtgtttaaaattgaaaaacaaaagtagttaccgaaggtattttatttttaaaataaaattttataaaataatattttatttgtgattaaaaattaaaaacaaacatattaccaatcaggaccaaatgatttttcattttttttaaag

SEQ ID NO: 181547 - DNA, 514 bp, Cannabis indica
aagtgaaaattcaaagatacatattgattttgcctttatttgcagcattattagctctgatgaaatctcttcgaaaatgcattaattccagttgattgagtaaatagttacatagccaagtctaagaaggacatgtgatgtgactactacacatgggccattttgctccatatatttgtattactaattttgtggacagttgactaaaaaagtttaatttgactgactaaggaacatttgctttcttctcaatcttaatttacacaaaactagatctttctttgtcattcctcaacttgaacgatgaggcaaagtcttttttaattaaaaggttagagtatctaccaatggagagccaactgtgttaaacttaactactaacataatagtacttgtcccaaatttagtatacaataaatataatttttaattacattttgccattaatcactgatacattttaactataatattgttattaataatttttcaaatatttaatttaatagtgata

SEQ ID NO: 181548 - DNA, 497 bp, Cannabis indica
atcaaacaaattatgaatagacaaattgttttatattccaaatcagtaacactatagagtaaatttatcatattattcgaagcttgaaagcgttcttcttcagaggtaccatttggagtaacgatcttcacccataagccaattgcgattttgatatcttccaaaacttgctgcttgtacaaaaaaaccaagcaaacatttagtatagtaactcttactccctcctcaaaaaaatcatattgcataatgatcataataataattttttttatactggcttatcttgcatcaccttagaacttggatctttttgctgaaagcagaaggcccgaagacaatgtgctgtagctaactgatttgtatgtccggttctatagctactttttccacccgaactcaattttttctttctttttttctttttttgatgagatccaccagaactcacttcctgcagcaatcatgtcaataaaaaattgatctcacgaaataaaaaa

SEQ ID NO: 181549 - DNA, 650 bp, Cannabis indica
atatagttgacatttccttaataaagagcactgctttcttcgtaaaaatgtgtaagtggaatgccaatgtggtacattttttgactaaaatgaacaacaggaaattgggatttgagaatttataagaaaaggtgtggtaaatgtcacatccccagatcaccctgcatacgctctagtttacatgttctctttttgctgatgtctaatcataatggcatgacatagggtggttgagggggaatcctgtcatggtgactttgacatcccctgagccagcagagcattttgtggtggttgaacttttattaaattaattgctcaatgcaattcgcatggggtcacttggggtacagacaaggtctttattacataattcaaggtagtccttaataagaaatcttatttttgtactctttataattaagattctagatgcataagagaaaatttttgttgtagggaacactaagacaatgtactaaggctctttctgttctgtattaatctattttgaaacaacatatctttcctaagcatgataatttcactacaacctatggttataaatactcataagtattaataattcctatggttataaatgctcataactattaatatttccatagatcaatcaaaaattcttttcc

SEQ ID NO: 181550 - DNA, 792 bp, Cannabis indica
aaagtacgtcttggatctgccgattatgttatggtcggagccctactcatggcgacctcgtcgaattgggagaagctgtaggtattattgcgggtcaatctattggggaaccgggcactcaactaacattaagaacttttcataccggtggagtattcaccggaggtactgccgaacatgtacgagccccttctaatggaaaaatcaaattcaatgaggatttggctcatcccacacgtacacgtcatgggcatcccgcttttctatgttctatagacttggatgtaattattgagagtgaagatattatccacaacgtgactattccaccaaaaagtttgattttagttcaaaacgatcaatatgtagaatcagaacaagtgattgctgagattcgcgcaagaacatccacttttaattttaaagagaaggttcgaaaacatatttattctgactccgagggagagatgcactggagtaccgatgtatatcatgcaccagattttacgtatagtaatgtgcatcttttaccaaaaacaagtcatttatggatattatcaggaagctcgtaccgatccagtgtagtccctttttcaatccataaagatcaagatcaaacgaatgtttatttctttcggccgaaggaaaaatattctagccgttcagtaatacagtaaataatgatcaagggaaagggaaattcttagttcagatttttctggtaaaaaagaaaagcactatcctgatattcagaattaatcgaattatagataggagtcattggaatttaat

SEQ ID NO: 181551 - DNA, 894 bp, Cannabis indica
ataattataaattattaaattattaaattgttctctttcccttactttatggaaggacaattggtctaccaatattctctttcatattgggactcactgattggattttcaaaagacttttgtacctccgaaaatacgtttgaagttggttgagtttcgagtatactttaacttttagctaaaattcattaaaatttttgagatatttttatactaaaataaattttttttttttcaagtaaattaaaaattatgttttaattctaaaattacttctcaataatccttttaaatgaagttaaggaattcctaacacccatctctccaaatttatttttcagagggtgatatgtatcaatttacattctacttttatcttaattttctaacacttcatctgaatttcctgattcacattttttggtttatttataaaaaatttacacaaattaaaatatacactatccaaaaaaaaaaaacgaaaaaagaaaaattaagttagccaaattaatcaattggtttcgttgtatgtattatccgatattggcctcctcttatttatccgctatctacacaatcaagttttgtataaattttacttttatttctaatataaataatttctatgacaccttaaatttaacggtttagttaatttagttgaattttacttactaaaatttagtagcttagaaaattaaagtagcaagttgtagagaatttaaccgtccaaaaacctacttaactcacaccaaacttttgttaactttgaatgaaaattttaactataaccccacttcattcactcaatcaattcaattcttgtgaagaataatgaactacaacaaactacaatcaaagaaaatgatcatacaactgttactatattatata

SEQ ID NO: 181552 - DNA, 511 bp, Cannabis indica
ccattattctatacttttgtttcataccattattcaaggtgcagtgctttttttttactttttcaaagaactgtgaatgtatgtagcttatgaacctgcttttgatattagttatgggtattagtttttagtttataattttggacgataaaatttatttttatgaatctggcattttggttttcttacaaaattctcattgttatttttggtatgaatttgtctagagttgatttttgatgcacctcagacctaccacctatggagtacaatatttaattttgttggaatttaatttatatgtatatgtattgatatatattctttttcatatatattggcgtggagggggcgtatttgggtgattggtaaactaagttaatgctgtcaacttggtcgttgttttccaacttttctgaatccataagatctaaattgatatatttaagcaggtcagctatgtcaaatcattggagcaattgtttttgctaggtgctttaacagatgaatg

SEQ ID NO: 181553 - DNA, 553 bp, Cannabis indica
gctttattatagttatgtttggacattgaaaccagccaatgcattttcgtaaatgatgcagggttaactgaaacttgtggaccaacaactatatcctatcctgatgaaatgagcctagtaggttctgttggaccagtgtcagtctacaatgagatgcgcctagaggaagttcctgaaatgggttacaatccacttggaaatcctgctcgcggtgagatatgtcttagagggaaatctgtttttgttgagtaccacaaaaagcctgagttaacaagagaagcaattatagatggttggttccatacaggtgggagaagcttgttttttttttttttttgcctagtctcttttaagaaacttcagttgtaaacaaactttaaatggttaattgtgactggcattttcaggggacataggggaaatgcttccaaatggagcagttaagataattgatagaaaaaagaatcttataaaactgtctcagggagagtatgttgctcttgagtacttggagaatgtttatggtatcactccaattgttgaagatgtaagt

SEQ ID NO: 181554 - DNA, 666 bp, Cannabis indica
aagaaagtattactaaacgcaccatatatgtattgagattttttttttaatctttgaagagttgtttgacaaccgaacgcgaagcgcggatcgttttctagttttttgataagggatcttcattcaacaaattggtagtcttcccttgttcagctttctacctgcctaatatttattgccacgtaaacaatacaaattttgggtgggaaatttgaaaaaatatgcataaaataccctaaatattttctctaaatccataacatcccatatttcccatatatgaccacattaccatattctccataatacccctctcatttgaaattccaaacccaaaccgcctcctctctcttcctctcgcccaaacccacggtgaacccatcccaaacccattgacggcgccccctgctatcgacggtggacccaatctcaaaccgactgtgacgccccttgctctcgacacaatgtctaaagtgtgtcccttttatttattattttttttttttgttgagaaagtgttaaagattgatttagtttgtgaaacctaaattttgttagatttacaaaaatttgttgtctgatctgtggggaaaatcgcgatttggacctgtgattttcgtcgggctcaatgcaggtccgatgatcatgctaatgggttggggaagg

SEQ ID NO: 181555 - DNA, 826 bp, Cannabis indica
gtttatgtgctaaacgctccccagactttgatatctacccaattatgtccctcgaactttgatatgtactaaatcatgccccctgaactttcatcaatgttaaattttttttactaaaattggacaaaagtccttaaattcaaccatctcaatagttcaggaggcatttttaatgacttaaaagttcaaaaagcatgatttagtacatgtcaaaattcaggagaaaaaaacctaatcagtcttattattattattattatgaaaagaaacaacatattatttagattgtacattttttaattaattaaaatgatcgatatattcaaattttcattattggccccaccacttggggttgtaattaaatgtcaatttagcaggagacatgcatgtggaatttacacttgatcggtcttttaactattagcagaaactactgtggcaccttcctatttttttttttttttttttgatgaatcagaaaattatattgtacaaaccactttacatcctaagagcactctaaaaaaaaaagagcctcaatgattttaatctatacaaatattgtatttatattgctacaatccataaaaccaatccctatctttactaactcaatttcttaggcaaaaacatagtcacccgagccttggtcctccaccgaacagcctgcatgattcttacacaatctggctgcttcattttgccattcaagtttatttctagcctcccaaatgctgtacaccagacctgcaattacagctgccaaaacattcttcctaaacttacttattttagctttcctaatccatctcaagatcatagg

SEQ ID NO: 181556 - DNA, 1085 bp, Cannabis indica
gtgagataaacatgactaaaaccttcaactcctggatcattttctccaagtttgcctgttcagaagttgacatttgcagcttctgattgatcatagagtatgcctcagccattctctcatgttccgctgcataaatgccaaagatgcttataaaattattgaaatagtgttgccaatatttgcaaaaccaacgtggatacaagtgcaaaatcccagttatacagcgcagtagggatcaagtatccccttcacctcctttttcattatctctggaattttacatagagggtttctctttttcccctagctatttattcttgtcctattgctccttatcttatgaccgaaatcatttagccttatcttatgatttgttgtattttgttatctttttctaaagttaaattactaagtttagatttttgaagtatttattctcaattagacattgtggttaattttgcatttgtagtaagcatacccaactatcttatgaactacaattagcatattaatttttcttttccggtgaaattattctaaaatggtttaaattccaaaaaaaaaaatcattaccatgaatctatggcacaagcataatattagttttgtgacaaataaaaaaaaatgtaacagcactgcattatgaataagctgtgattatgcactcgctttagtaagtaaatagtaaccagttaacttccacacttttaaacccttcccacttctttcctctttgaaccacttgaacatctttgttcttatttatgtttaccaaacatataatgtgccttaatctatgcctttttatgcttagattatttacaaatgtagtgtacatccatgtgaccagacctagtttctgacacttgaaaactcactagcaaaaagacaaagtatcattattgaaagaaaaaataaattttgggtagccgtttggatgttttagactaaggattttaacagaattcttattccaatttacttatagattgtttggtagttcataatttaagctgaccccacatcatcttgaattgtagttaaagataccctcctttgtaatccttctgtttctaataaaa

SEQ ID NO: 181557 - DNA, 757 bp, Cannabis indica
aatacttacctattaagattctcataaagaaaaatttaacttgtgaaaggtaaatgtttaggagtgtttggcgttcgggaaagcttttatctttaccaaaattcctatcctggttttaccttttttgtaatctgcattctacaatttatacattaaagagttcaccttctcgaaatatcaggtgcatcacagctagctacttctgagcactaaaaatgcaaacagagaaatatttcacagcttttggagtatgaactcaagtttaatttagttatgttggttggttctattttacagcttaaattatcaccaggtgaggtggactcatttaccttgaacaaaaatattgttttgtttctaatattattacagatgactagaaagcttgtaagaccgtaagtatgtctgtacaccctattactttttcgtttgcatctcagcttgaaatgctgtgttcattcttaacatcttcttggctaggttcctgatgtcttctttgctagactccattgatattcgaactagctcgttcacccctccactggatatgaactccctagtattgtcatctgcagagcaaaatggtcattaacttctctttacaaagaaaaaagaaattataatatataaactaacttcacaaataaatattagtcattacatgtctagtccaatatctattttctacaaggaaaaacaaagtatcttacaaaactgtcaaaatggaaaaatgcatatagtaaatctcacttcccta

SEQ ID NO: 181558 - DNA, 587 bp, Cannabis indica
atatttatactatattcatgtcccatctcccccatcttttaaaacctctactgttttccctcatttttttttttttgaacttctgttttccctcatctttgtctaaccgttgattgtaattgatcattatgtcgaaatacgtataattgtgttgtcgtttgcgtatttcgatgaaataattatgcttgataatcttttctcgatcttgctctcttattttattattttttttaatatattttctatactctcatcttaatctaattaaaagaaagttttcatttttttaatatatttacttttcttccaaaaattcaaattcttaacaaattaagagtctaaaatgagacattcattaatcaaataaagttgtatacatttatatttatggaactacaagggaggctagaacatatctgcatggttagaaactctggcactcttagccaaccatctcccatgttatgtatggatatgatattgtcttcatcattaatgaaattaaaattacattggcgactgtaaatttactgcagagctcactaagacttggggctgatcctgtaagttttttaacttaggaaaaa

SEQ ID NO: 181559 - DNA, 1056 bp, Cannabis indica
atttaacccgcttaatgatttcgtcaatttagtcagatatattcgtccaaactaatttttatttttttaataataattattgttagtttctagtattcaaattattagatttaaaaaatgtatatattatttatattttaagttaaaaatattatagtctaaattaatttcaagaactttaacgtaagataaatataattgagtaaacataaaaaaaaataaataaacagatattcatcaaaaaataacaagaaaaagataataatatagtgtagattttacgtgtcagctttaatatccaaatacaataaaaattattatcaataaagtctaaatttcaatagttaaaactttaaagttcaaattttaaatacaaaatagtttaactaaaatataatttatgtaatatatcatatacctttttaatttatgagaaattgtgttatattacataaatcttttagtttggattttttgtcacgctttagctgattagaatcggacaaaaataaaactcaaataatataataaccatgacaacaaacttaaaaaaaaataaaacaagtttctagactcttcaatagtaaaaattaaacaaaaaaataaaatacagtttcatcaataacataatgaaaaaaaaaataacaaatgcgagaaattataatcaaaaaataaaactaactttaaaaatcagtttcatcaacattaaaagaaactaaatatttcattataagagacaaaaaaaaaaaacaagtttcatcactaacataatgaaaaaaaaaaatacaaagaaaaaatataatctaaaaatcataccaagttaaaaaaccagttttatcaacattaaatgaaactaattatttaattaaaattagcagaaaaaaaaactaaatttcatcaacaatataatgaaaaaaaacacaatgcaaaaaattataatctaaaatattattatcaaatttaaaaatagttttatcaacgttaaagaaaactaattatttcattaaaagtaatagaaacaaaaccagttcatcaacaacataatgaagaaaatac

SEQ ID NO: 181560 - DNA, 676 bp, Cannabis indica
  modified_base (629)..(629): a, c, t, g, unknown or other
gtttgtttgtgtggattgttggtacctgtaaggttttttggtttgttattgggtacttataacgcgatacattagtattaaacactttcaaatacatgcataatatcaatgctctttttagattggtgttattctcattcaattaattagtgttgtgatgtctcctttagagggcaaaaacaacaacaacaaacaataataacaacaacaacaaacaacaataacaacaacaacaataataataacaacaataatgataataactaattatgcaatcatctagacgtatattctttttagatataaaaaaaaaaatattttattttactttttgaaaaaaataaaagcattaatatttaaataaccaacattaaacatatgatttaaatttaatttaaatattcattggtgtgtattatagctgtacccaaaaaaaaaattgataatattatataaaactaaaatatgaagcaacaaatgatcacttgcaagaaacaataacagttctagtaagtagtaaccattgccacaagttggaaatacaatacaaaattatactccatctgttttgtcctcaaactaataaattaaatattaaagtttcacatattttaatataatatttattntaaaaaaaaataactaaactatttataactaataactaaatgtttgt

SEQ ID NO: 181561 - DNA, 958 bp, Cannabis indica
gagtaactttttctgtactgttatttgtaggcaatcaatttactttcatttaccaaatataattttaataataataatctttgttcatcattaattatttttttttcatacaattttattagtatctttcctttttttttttaaaaaaaatcaaatttataattagtacctatacttttactcatttatatcatcttcttttcatttcttattccaagaagcaaagaaaagaaaagacaaataacaccacatattataggctccctagaaaaactaggtgcacgttcgtatagtcatcagagaagtgttaatacacaataataatagagcacatgacattaatatacatatatcacaactgtcaacattgagttttatcttatgtatttattacatgtggctatagagtttggttgtatggctttcatttctgttcttaatatttcattagagaaatcctattgggtaccaatggtgcctagcactctcttatgtgtcaatatcgctattggtccaactaagtatcgggttacatataagttaatataataacttttagagagtatcgctagccaatcacaacgcgacatgtcgaaaaggtactaagcactactgatacctaatagcaatactatttcattaagttctctctttaaaaggatattccagctcagaggtatatttaaaaccaattaacatgtccattaacagtgctatatgtgataagattaaggtactcacgtagctttatattaatttagggtaagcttacaacttatatttttataaattatttatatataatctggtttgctttgatattgtaattatggtcagagaggtttattgtagccagacaaaaagagtattgtgtatttatatattatattttatgtaaggttgggtactaccaatttcgtacttaaaaagactttgtggacaaagagagagttaaaat

SEQ ID NO: 181562 - DNA, 744 bp, Cannabis indica
acaacgatgcttgtgctctaatgaatgccatgcaccttggggtcgacatgtctacttatccccagccaccacaatagatgtagtagtacaacacatatgcaactcaagggactaatgatgaggcaacacatgacatgggagatgccatggagtgatgggaagcgttgttcaaggaattcttgtttacttttttggctcttttttttttttctaaataagtttcattgaggacaatattgtgtttaagtgtgggggtgtacctcccggtttactttatgtgtttttttttttttggtaagtatttattttgatgtcttttcttattgttggatttattttgatgtattttcttattatttttttgttttgtttttttttttccagttttatgtagtagtttttttgtaatgactatttgatcggttgagaaatagctttaattaacagtaatgagtcaatgatgagacttttaattgatctaaagataatgctaggaagatgataaatttctcactgattgtgtgcttagctgtggttaatgattgctcaagcttagtttttttcttaaattttcacgataattgaattatcaaatttgctaatatttgaaaagataagtgcatgtgtaattgttaatttctcatctcaaccactctagaacttgtttgataatcatttgaggtgaaatcgataaattacacatagttttgggatatgatataggcaattttcttatatcgattg

SEQ ID NO: 181563 - DNA, 746 bp, Cannabis indica
atcccattgtattccagaagctcgcagcattgggcctgataaaccccaatttattacgtcctctctcccaataatgcctactccttcaactcgttctaaaaaataggatttcgtgtaataagtttttgatattcagtaactcctgttaaaaaataatcgcaaaaatctaaacatttatctatccagccatgaggtaaatcagccgctactcctccgatacgaaaataattatgcatcattctcataccggtggcagcttcaaatagatcatatactaattctctttctctgaaaatatagaaaaaaggagtctgtgctccaatatctgccataaaaggaccgagccataacaggtgagaagctatacgactcaactccaacataattgctctgatatagctagctcttttaggtacttggatatttcccaacaactccggtccatttacggttattgcttcggtgaacatagtagctaaataatcccaacgcgttacataagggagatattgtataattgttcggttttccgcaattttttccattcctcggtgtaaatagcctagtattggttcacagtcaataacatcttcaccgtcgagagtaacgatgagtcgaagaacgccgtgcattgatgggtgttggggacccgatatttactatcatgaggtctttctttgtagctggtatattctataggtttttccttcgaatcatctttcatgatactgaaagcaaaacaaaaa

SEQ ID NO: 181564 - DNA, 638 bp, Cannabis indica
aataatgaagctgaatacaaagctctaatcattggattaaaactgttggaatatattttaccaggatcttagatctactcacaagtatgttgtttaaacaccctaaatatgaactttctaaaacgataaattaaacacatataaagttaagaaaaccttacattgatgcagcggaattaatgtctccttccactcagatctctaacccttgtatcctttctgtagcagagtataatcaagatctgagcccgaatgtccttcttcttcaagtttgatccttcacagtcttccaatctatgattgagttactgcttgctgtgtgtgggcacttactctttcactagggtcacgaaattgatgaaggagaaaagagaaagaggatttcggccaggtatagaaagtggggaaggctcagtttttctgaagagagaaatttctgtcagaaaactaatgaaagcatgtgaaagcatgtgttgtgactgagccatcactttctatttataggcaactactaggtttaggttaggaattatttggcattaaaataatgaaaatattaatttgaaaacccacattaagtggccggccatggtgttgtattgggcctcacttgattttgcagttttatcaaattttat

SEQ ID NO: 181565 - DNA, 413 bp, Cannabis indica
agatcctaccatagtcttgcccttaagcataacaaagaaaattactaaacctcttcaactgtatgttttatatagcacatgcaccaaacaactcacaaattcagattctagacaaactaaaaacattgtaaagctgagctctagctttgacaatcttcttcacctgcctactaatgaacccagccaagctacagccatttttgtcaaaaaaataaatactgaatctatgtcaattgccaaatataccattattagtactatttattttcagtataggtaaatctaacacttatttagaaaatatataatttttttttctggtatttattaaaaatttccactaaaaaccgtagccacattaaaaagattacatagccaataaaaactaaaaatacaaaaacaatagctctaaa

SEQ ID NO: 181566 - DNA, 805 bp, Cannabis indica
gttttgttaatggctttgaaatccgtaggaagtattttggggaggacttcttcttttgtgtgggaatgatgttgtaaatattattaattactctactaatcatatagattgtattattaatctctctagtaattatatatggcaccttacttttttctatggatcccctgttactcatcaaaagcatattacttggaaacttttacataatatttactataatgctgctaatcttccctggttagttattggagattttaacagttacctttcaaattctgataagtctgggggtagttctgctgacgaggcctctatggactgttttcataactttcttcatcagtttactatggcccctctttcctattctgggaataaatttacctggacaaataagactattcgtgaaagacttgattgggctgtagcctctgatttttggtacgatttttttcctgaacattccttgcatcatctaggcttctatgggtcagatcatagagttcttaagctagtcttaacctcttctaaccctcgagctaatcctacttctgttcataaacgttttaggtttgagaatatttggttagaggatcccagtttctataccacggttgacactgcttggaaggaatggtctaattctcatcctactggtagcggtttccatagtttccttgctcagcaagacgattgtgtctctgcccttaagacttggaataagatagcgaccattcgtgtcagtccagaaatctagttgttgatgcaggaaatcaattacctgcaaaactaaggaatacac

SEQ ID NO: 181567 - DNA, 658 bp, Cannabis indica
cagaataaaataaagtatacacttggagcaatatattttaacttaaatatgaatagtggacaaaaatggtaactaaatttaataagtaaaaaaaaattacctcatatactatttttttaatattttttttcaaatttacggtttgggtttctaaagtggttgcagtgctagttgcaataggagtttctatacgattttttgttacaatttaggttgcagcgtgtcacgggctcaccttttcaggcagcggaacacccgtgcggcaccttgacttctctaagccaaggtcagccttccaaccatccgagtaacaatgggctcatttttcgcgcgaccgtgtgcctcgtgcacacttccgtctctcgaacaactcccgccgagtcatgctcgcaagcatccatgagtgcattcatgcatcgaggctctctagccaagatactcgcactgtccataggttcccaccatggtaagacaaatcccaacaccgacgctcaccttgtcactcgagaccaaggtagcatgtgtggcaagatgccaacaccaagctaacgtgccaacgcctctatcatgccccatttgatactgtccgaatagtctccctcgtcgcctaaggactcccatacgtccatggaccaatcctcaaggcgccatgcctcca

SEQ ID NO: 181568 - DNA, 566 bp, Cannabis indica
ctccctttcttcttcttcaatatttcaaaatccttagtgattagagtagtgcccacacacatcaagcaatacctcaatcatagtgaggaagatcgtgaagaaagacattcagcaaaaggagtttcaacatcaaagattcagagaaagagatctaggttcagatattgataatgctctgctacagaaaggaatcaagggctagatatctgaacggaaggagtcatattattccgctgcacccaatgtaaggtttcctaaactttatatgtgtttatttcatcgttttagaaagttcatatttagtatgttaataaacatacttgtgagtagatctaagatcctggtaaataaaattccaacagtagtctatgtctactatggcatactttacccctccctttccaagttggtaaggacccaactgagatactttccccaccaccgccaaagggccaggggcgtagtcattagtagtaatttacgtttggtcggggcgtctcggtatgtttgtctaatctttggtcacgaatcacactttaggtacatagtctacacaatctttcttc

SEQ ID NO: 181569 - DNA, 720 bp, Cannabis indica
aatcatcatggaaatgggggacataaagcaaggtgtgattcaagaaactcaacaggaaaacaatgctagtactataagaaagaaaagcatttttgagatgattgtcttgctctcaaagccaagttaaaaagagaacaaaacaagaaaaaaaagtctaagggagaagttgatctagctgctgaaggatatgaatcagtagatattcttgttgcctcaagtatgaattctagtgaagaatggatcttggattctggttgctcttttcacataacaccaaaaaaaaatttagtgtaatgtcaaaagagcaaggtggaagtatcctgttaggtaacaacaagtcatgtaaaattgcaggaattggttttgtccaaatgagaatgcatgatggtgaaatcagaatcttacaacaagtaaggtatgtacctgaactaaaagaaacttgctttcaattggtgcttttgatcaaaatggctatactgtcaagatagattatggagcccttaaagttactagaggatcacttgttattattaagggaaagcaaagaaatagcatatactatcttgatggttacactgtcattgaacctgctgcaccagtaatagacaagtcattagaaagtagcattaagataaggcttcttaggttaggtcatgttagtaaaagaggtctaacagaacttgataaacaaatgagtattcaaaatgtggtctcaaggac

SEQ ID NO: 181570 - DNA, 651 bp, Cannabis indica
tggattccaacaattaaaaaagcttaagaatgttcatttggtagaattgccgacaaatttcatggtgttaaaaatttttaacatcttccaaagtgctggagcacacattcgccttgattacagagtcgatggaaaggggtgctggtgtcgattggttatgttgacacctatcttttgttaacatagttcactaatcatagttagtttattgttactatggttagttattagttaaatctgttgaggccatttcctatcacttgtaatgtttgttattactgttttctattctgtataaatactggtacattcatgaaaataaagtgagctctttcaattgttttctctctttgttttcttctctgcttttctctgttctacatggtatcagttgtcttgactttagactatgtcttcgtcaaccaccgatcctcaggcccatgcccccaaccctacaaatcgagctcctccggcacctgccgtacaaactgctgcactaggatcttggaatcctttctccagttctttgtcctcatcgcttacggtcaagcttgatcgtgtaaacttcctttcttggaagtctcaggtcattcccacggtgattggacatgatctcatgagatcttgttcactggcgtacctcctcctgct

SEQ ID NO: 181571 - DNA, 627 bp, Cannabis indica
actaagaaaggaataatctcatctagtcttaaacaaatcagtttcgagatgcatttctaaattttatgtagcaagcaatcagtctatgttcaatagcactagacggggactcagtctagggaattaaagatatggtcatttcattaaactcctttggaatgctacttgttgagaagaagctttgaataccatacaaaactctttccccagatcaggccacatatgtttgcaaaactccaagccaaaaccatcaagccctgggcttttggtgctagggatgctgaacagagcctttttaatctccttcatggtaaaaagtctaacaagttggagttgatgatccaactcaaagtgttaccaaacttcaaacactgaatatcaaaatacgcagcaggattagaactccccatgaagcttttaaaatggttaacaaattgattcaccacttcagcatataatcatcaataatttccccttgattgttcatgaagctagctattctattttcttctcttatttttttaatacaggcatagaagaaggttgtattatcttcattttttttttccagccgattagctttgctcctttgaagtaaaacaatatgaagcattttatcttgatcac

SEQ ID NO: 181572 - DNA, 622 bp, Cannabis indica
tgtgaatagagggcaggaataaaaattaaaatagttaacggttttgggactggtatgcatgatgcatccctcgctcattaacctatatgtaacttttttttttaattaagttcttaaatattatgtagtaaatgtatacttattttaaaatctagttatttattttaaagtgtgtaatctttgaatatgatatgtgttcgtatcaatacatattaaatatagtcctattagttcgtgtaaattactttattatcaaagtactgctcaatataatagaaaaaaaatccaatgatggaagaaaaagtaataactcaaagaataattcgagagatgctaaagtactattagcgataatcagtataaattataaaaattatcgggaagtataatacataccgtattattataaaaattataactattttggacacaaaaaaagaagcaaactgtgttttttttttttttttagtcaaggggaaggaaacaaacttcaaaattaataatagaaagaaagggtgagatgagaataatttggtgtgtaaaattattgagtggagttggtttgcatgagcagggaacgattaatactattaaaacgacgcttttatatatcaatgcccac

SEQ ID NO: 181573 - DNA, 599 bp, Cannabis indica
ttctttgaatcaaaacgttgaatgaaaatcgattctttctttttttaaataaaaaaaaattagaaaatcggataggatagatggatggatctatctttctattcatatatattactaaaaaaaaaggatttttttttgcggccccaaatccttgatttggccaggaaagtactgcactgctttgggcctaggaagcgaagggaatgagctcggctgcttctcctccactactttttttttctccgtgcccgttccgcatgcgcttcgcgtgccattggcgctttgctctcctcttattcttcattggacggtttcggatggacttcgccgttctttcccaactaaaatgaaaaggctgtatcacatcgagatgtcaattcgttttccgccccccaatgagatggggaatttggaacccccctattttgactttatggcccttcatcttctgaatcgaggcccggcccggctcgcgtcgttccaacaaccggcgggtagcacctcgagtatacgatcgcgcgcagtaactgggagtccctattacacctaaggccaacttcaattcaccaaaccaaggttcatctcgtgtagtcgattgt

SEQ ID NO: 181574 - DNA, 701 bp, Cannabis indica
atatcaatggtaattaaggcactgtaaaatttaaaaatgcatcaaaaaaatttaaaaaacaaaatttattaaatttttttttcttgttatattagaatgatttattttttcatttttaaaatggaatagtcattccactaaaaatagtgaaaatagtattttatcgaaatgttatttcaatactttaaaatgcaactaaacaaaaaataaaattaaaattatttattttccattctattccagtttattacttctaactaaacgataccataagtataatcatttccatttctctatatatataatcatatatatatctttctccattaaaaagaccaaatgtctcaaattcatgtgtcaacatgtgatgaagaactcgatcaaagtagtatagagtggaaaattaagtcactatatatttatagtgaaaaaaaaacatatatatttatatgccaatatgatgagttcatgacaaaaaaatatttcaaagaaagtagatagagacaaatcaagtcatatgcactataataattaatatatagaagaagtatatgtatagtgaagtgttataattatttataattgtcttcattttagtttcacaaaacaacaaatgaaaagataataggtgagatagagatgtatctaaccctcacaatattgtatcggccatttatatatatatatatataaaaaaataa

SEQ ID NO: 181575 - DNA, 693 bp, Cannabis indica
cattggaagatgactttaaataaattgtttccgtaatctgaaatttccacagggaatcgacccttccagtggccggacatctggttgatgaaagtaggctagtgtatggaagcttcaaaaatgacagtggcaagcataacgtggagtggaggatgaagttgggatggttggacatcgtcagtgaaggcaaatacagaggattcttcatatgtcaacgatagtgttgaatggatcgagtgtgtgagagagtccatagggggggttacggtgtgcaatggggggaaaggtgaagggaaggagatgtagatgaaagaaaacgaacccagaaagcagttagagtgatcacggaacgagggagggaagaaaggaatttgaaaaataggtagttaaaacccaaagaagtagttaaaacgcataaatgctacagatcccaaaatgggcaccaaaagaggtgtgttttcatgctatagatagatagttaaataggtttatattatgtgttttttcttatattagtcatgcatgtccgttcaattatgacctaatatagaccattttgttataacatatattatattatataaactgatatttctattgtgtgatcaattagtagaatgtcaacggttagttcttctcattcataatattttcttattgtatctactatatgattataatttttttgttttt

SEQ ID NO: 181576 - DNA, 683 bp, Cannabis indica
actttgctgcaaatcatgagttttttcttgtttagatatagaatctgggacttattgtctgatatcgtggtcaccactgttgacacttcagctgggaaattagaaaacgtcattgttacctttcattaaaacatgaatgtgttgtggtgatagttattagcttacagtgcgttattaaggatgcaaacagatcccggcaaaactacaaatttctttgtgtgtcttgttcagatgtttactaattagtgtgtagtttttggtttcaagtactgcagtgttgctcagtatttctcacatttgggatagtatctttttaatgctccatcattaataagtctttcaaagaacaacgataatcaaccgactcaaaatttttgatttgtggggcttaattattataacaatatttattatctattttatattaaaattataattattttgtagggtttttttttttttttactattttgttgtataattatttaattaaatagaagatatttaattttttttactgagttcattagtgcgtcatctctgacgataattaactaaattttaaataaaatactcgaaatgaatgaattatatgaacatgaaagaactagaatataatgctgttgggatagatcctaacgtgttactctggggtttaagtattggtgaaaaatccagtcttt

SEQ ID NO: 181577 - DNA, 568 bp, Cannabis indica
aaaaaagaaaaatacttaaaaaataaaagaacttataaaaaaataacctgttatacaacataaaataaatcaaaaaaatcaaaaataaaatggaaagtaaaataaccagttataaaaattgaacaacaacaaaatgaagaaaaaatacctccagggacaatgaaaccggtaagtcaacatcattgccaccgacatcaagattcacaaaataagaatcttcagccttatcatccacatctttaggcatagacgacccacacttactcttcaaaagcccaataacttcatcaaacttaataccaaactcatcactcaaacttttaatactcaacataatcttcttctggtcttcttggatacaaaccaaagcagactctacgttagcaaactgaaaaccaacataccaaaaaaatataacaaattaaaaacatcaaacaccaaaaatataccttcccattgaaacatggaggtttctttgatagataaaatagttcgaacttaaggttttgcattgcagatttcttaagctcacaaccaacaggatagaaattcttcacagtggcctgac

SEQ ID NO: 181578 - DNA, 692 bp, Cannabis indica
agagaaaaaagaatgctatcttaaaaatttgtgtagatgctatacagtagcattgatactattattatttttttaataaaaaattattgttactaaaaaacttaaataataatgtgtgagattataattatactatttttaaagagtgttgtactattgaattaattttaaaagtaaagattgctaaaaataatatgaaattattttatttttagataatgtatagatttgtagtatctttaatggatgctagcattggactctggtatctctggtggttttgcagtgtgtatcttaaactggttgtagtatctctttttaaactcttatgttctgtcgcgtgaggagcatggtcatatgcaagtcaaacttcacttctctctctctctctctctctcttgtttattatttatatatttatttgaagaagtgaacataggtagtctttagttggggttagtaaacgtccttttaatgctacaaacattaaaccttccctaccttcaaagcaaacagtcagaggatcgtgggtatttcatgttgaccaacgtggtactttttaaactttttctttctttctttctggtcttctgctatgctacctatattaattacttctattctatgttctatggaacaaaaatatatatagtaaaataaataactcttcttttgtttttctttttgtaact

SEQ ID NO: 181579 - DNA, 678 bp, Cannabis indica
actattttattatttattgactttcaaattttactttaaatattgagcaatttgaggtattgcacaaaaccctcttttttattaggctgaatttctttcttttttttttttattttattttatttttttttgaaaaaagaactatttttctcatttttttccctataatacataaataaataataaaattataaatgaaagtttaaaagcgaattcttacgattattttttttttaaagggtttattattaaatttttacacaagacccttaaaaaatttaggttatcttgtgtacacagtgcttatttagttagtatttaaagataatatttaattgatgtcttaaatttattaaaaaagtaaatttaaagagattttaacaactaaaaaaaataaaaaaaaaattagtatataaaaattaaaatatgagaaggtttcacataattactctaattgaatatagaaatatatatagtaaacacgtgaataatttccctatattttgtttgaaaacaatatttcccctatatttaatagtatatcaccctcaaaatatgtctattttgatttttgtcttttttgttctttgtttttttcttacacgcacactagtttttttcatttattttcaacacactttatgattttctcaatatacattaattactctctaacct

SEQ ID NO: 181580 - DNA, 715 bp, Cannabis indica
aattcatatagctggaccatttttgggatcatatttttaggatttttggaaagcaagttttagaattccttaaaaaaatatttattttttaaatacgaaaaccttaagaaggatataatgtgttttttttattaaaaagatgcggagtttttgggatttccgttttcagctgaagtagaaaataatcgagtcgttccacaagaaatacaagaattatgtagctttgataatttaaaaaatttggagtaaataagagaggaaggcattatggtgggttgcatgagttgtcgaatattcattctttaggaagggtgaagttggagatattggatcaactatttaacacctcaaatggagcgtggaaagaaactcattcaagaaaagtttggacaatatgatttaactaggtaacgtaaccgcgcgttgcgcggtcctttcaataattgacaaaaaaatatatataattttattaatttataattaattttatataagtttaaagtataaaacttataccataaatagcaagactaattactccaaaatacacagcaacaaaaactattaaattagtatacactaaattactccaaaatatttgtgggatagtcttgctaaaataaccaatgaatagaaatcaataaaaaatcatacaaaacatatccatagaaagagaagaaacaaatgagaaaaacacataattgaaaaatactat

SEQ ID NO: 181581 - DNA, 525 bp, Cannabis indica
gaatatctgtattaaatacatccataaataacaaagactcgtggactaaggctcattaacgccccaaccacgtaaaaatccttctctcactttcttacagctcaataattttataatattttattagttgccgaaaatctcggtcaatactatcttaatcaaattattattattattattattattattattattattaataagagagttatttcgtatactattttttaattttttttttaatttacggtttggattgcttcaataatttttatgtgagttactatgtgaattttggttgcaatttagggttgtccagttgctatgtccgtttctgtaaaatataaaaaaattactatgaagtgtaaaaatgaaaaaaaaaaatactttattattactattatttgtaagaatatttgtggcataaatattttatttttatttttttgaaagtaaaatattttatgcttttagtttcaaatgtgtatagctttgtctatgttgcaagggattcaatatttcttg

SEQ ID NO: 181582 - DNA, 728 bp, Cannabis indica
gatcaagtagctagtgccactttaccaccctactatatattaaaacaaagaaaaataattccacacagaaaccttacaacaccagtgctgacgtgtagcttctacacccctccacgtcatcacaatactcacacgtggcaccaccaacgccaccccaccaaaactaaaataacacattccagctcttcagtcttcagctatatcttactcagaatttttattcatacttgttgtttttgtaagatggagtttcttgattatgtatcagatttctatgactggtgttgtggtagttattataatcacaggaaaaagctcaaaaaacgcaaagaactacaggtacgtacgtacgtagtaataatatatatcgtaatttttagtttattatgtactgccgttttttgtgtttttaaaaacggtgtttttgaattcttattagaaagttgagataaaagtgaaaatggattgcgaagggtgcgagagaagagtgaagaaatcggttcaaggcatgaaaggagtgacggaagttgaggtggaccccaaacagagcaagctgacagtgattggttacgtggaccctgataaagtgttgacacgtgtcagacatcgaacgggtaagaaggctgagttatggccgtacgttccttacgacgtcgttccgcatccgtacgcaccgggtgcttacgataagaaagctccgcctggttatgtacggaacgtgttggttg

SEQ ID NO: 181583 - DNA, 593 bp, Cannabis indica
ccatctttacgaggctataaatacctccaactacattcgattaagaggtcagaaaaaatagggagaaacctttttaaagaactactgcatttataacagtgactcctggactaagacttattattgcccgaaccacgtaaaaatcctttgtattaaactacttataatcattggaaacaactctaattaatagatgacaaaaatctcagtcaatattttggtgcttttattgagaattgtaggaagctttccatacaaggaaaatcataaataaattcctgatacgatggtgttgaccagaaacaactcgcatcgaccacatctgcatgaatatcctgtgggtcctgatggagaagaagtggcttcaagggtagatgttaaagaacaagacaaaatggaggaccccgagtacgaggaaaactaagaagagtatgaggagtacgatgatggtagctatactaaactaattgcgctgagataaaaagctactgatcacgaggctgagttggcagagcaaaaagagcaaaacaagcgaatgcaagagatagaattgccatgaaaaaaagtgatggaggtcgtagtgttggaattta

SEQ ID NO: 181584 - DNA, 853 bp, Cannabis indica
tttgagttgtatctattgaagcacttataaatttccaacaaattaaacaaaataagagtaatgagatgaagaaggaagaaaaagagttgaccctcacgtagtgaaagtccttttttaacttcatcaaatgcccttcatacaaatgaagctgcatgattgtattttttttatttatttatttttaatatataaggaaactgcatgtagatttaaataaataataaaaaaaaatattggataactatagtatgagaagaaaatacatatggatgtatgttggaaattctgagtttgaatctcaaataaaatatggttgtaatatataaaacccttaaaaaaaaaataccacaaaagcaaaaattggagattgtgggtcatataactgtttcacattataattattgaacatgaacatgtaaaagcttatcacttatgcattattcattggctgcaaagaccatatgaccaagtcaattggctctacttctttcagaaaaaaaataaataatgttatcgtgaatagtagcatcctactcccaacgtggcattttggacgaataaaaaatgccacgtaagaataagtacagtaggcgaatttctatggtcaatcattgtcaaaggcaataagggccgacacataaataaaagttaccaagttggacacgtatatatattttcttttctcattagacggtagtccacctagttacgtccaactccataaacgtcaaactttatttatttgccttttatatttaattgtcacatcataatcgatcatataattgaaaatgtttttacttctttttttggattttttttttgttttctatttaatgaggtttttttcgag

SEQ ID NO: 181585 - DNA, 643 bp, Cannabis indica
gagtttatttatcatttaacaaaataaatagtccaatttaataatttttataagggatttttttaggaatatactatattaggtaagtttttacaaaaataacgttaataatgtatcacacacgaaatgacgtgacacgtcatcatctccttcacgattacctgcaaacataaacacaactgttaatcctaaaaataaaaaattaacaaaaaaaacggcaattatatatacaaaaacttaacataacaaaaacaacgttattttttaaaaaataattgccaaaataaggtggcccatgaaaatttccctttttataaagcattggatccaaaatagtatttggacatactaaattggtttgcgtgctttccaaggaaaaaaaaccaaaaagtaattcttttttcattaatctccaccacatgtacccgtgtacattcctcaatattatatacatttatgtttccaaaagggggttgatagttgatacagcttcatagtaggtccgtcaccactgaccaccccattgtttatttacaccaattaaagttaaccctagcttgtattaaaataaggtgaattaaaatttttatctctcacccactttgacatgtattaaattatatggcctttaaaattttgagat

SEQ ID NO: 181586 - DNA, 563 bp, Cannabis indica
ctagcaccctcctacgtgtcaatatcgttattggtgcaattaagtatcgggtcccatatagtttaatataataatttttatagagtatcgctagccaattgcaagtcgacacatttaaaaggtgctaggcaccactggtgcccaatagcaatgctctctaataatctggctgtgtgcctgtgagtctgcaattcttgtcgaactgaatctgtggtatgacaatattaatcacactgaacaatttaatactgtcagaggctgtaaatgcaaactgcaatatcataaaaatgttttttttttgttaatttttccctctcatgaaattattaatattaatatgattgcttcacaggaaggaaaccaaattaaccaataaagaaataaaaacgacaattgatatgtgtgcagagtagagtgaaattactaaaaatatatataaggataggagacttgattaatacagaaaaatgattgtaaatcgaaaaaaatttgtatataaataattggaaaatgtatatatacataacacagttgtcccatatgacatatatatatccactatc

SEQ ID NO: 181587 - DNA, 1065 bp, Cannabis indica
gatacagtgatgacaatgattttagaaatcatataatgtattttttttttcttacatagtatttatacaaatttaaaaaaaatctccattctatgtgagaatctcaaattatttttttcttataatgtttgaagatagtaagttatttaattagagtaaaaatataaaattttagtaaaatagatacacatgctaataaaaaatacatacaaaaatatgaaaaatttaagatttgatatagctttattatttgattatcaataaataacaaaacgcgatttgttttttagtttataatacaatgaatagacttttataaaaatacatattttaatataaaattattattattattaagaagtaattagataatataattttaatattattatttatattagaataatttttttaagttattattcattataatctaattaaaagattacaacattcgcatcaatagttgtgtatatagtaccacatagaatataaaaaaaaaatctaaaatccaatagtttataataagccacgaaatttgagtcaaagggtttacaaaatttaacaatatttatttttagattctaattagaggatttggaatgaatttgatgtctgtactagcaaattcgattgtaatataattacgattttaattaatcaaaaacagttttttcttaattaattaatatttttgtaacgtgtcatgtctacttagagtcgccgtgtagttgagggaggtggtgcagattatgaaattgtggcagaagagacaaaacctgtacattaatattaattgtatagcttattagggtagcattatcaattattcttaattacaatatatatcattacttataagtataatccgtgaattactgcttttatttaaccagcccgccacctaattaattaaatctatacctttttttgtttctcaagaattaaatttgtaagtttaaaatctcatatatttaaaatatagtgataattttaaagaaaaaaaaaacacaaaaaatcaaaaacaacacaaaaaaataataaaaataataattagtacgaaaa

SEQ ID NO: 181588 - DNA, 852 bp, Cannabis indica
ggatagatttttcagttgaatgctctgccgtgtaagacgatgtttaaaatagttcgtcgcagagcttaggatgtgataggagtgattaaacttaggaactcttctctgccttaggaaaattaggactttgtgaatgtcgtttttccctattttgcaatacgaataaataagtgaggttcgacaaggtttatgaaagcattgtcgtgattggtttcttttgtcagagatccttgtgtcggatggtttaacccttgaccccttttttatttttatgttctcgatctatcatcctagatcattttccaatttgctcccacatgtaaggtccgacgaggacctcactaagcaattattagagaggattctcttgttcccttgctattttctttagtgtgggtactgactgcttggcttccttttttgattttcaatcatggtcaatgaaaatgtgccctttgaccagatctggaatgaccaagaggaggaacaagctccaaccgatgaagatccgactctctaggaaagcaatccatctcactgggagatggatcatatcaaaaaaaaaaaattctagaatcaccgaattttggaaggtttccaagagaagtgcaatctccagaactctccagaacatcccatgcttgttctggagtaggctttgttagcccaagatatgtttgcaagaagggggtgaattgaaaatttaaactaatttcaaaatttaaaaactccaaagacaattcatgcaaatattcaaatttaatgcaatcacatagataaaacacaaagtataaaacaaataacaaaacttgaaaatgtaaagaatttagagatagaaatcgcaaactctcg

SEQ ID NO: 181589 - DNA, 864 bp, Cannabis indica
atctcattactttaatttcccacaattatcaatttttatactttgtccaccaataaagaaaaatcgtataatataactcagctcgtgttaatgtttgtactatttattgaaacgagtatacaccttatacaaagttatgagcactctcttagatgttaatattgctattggtctaattaaatatcgagtctcatataatttataatgaaataatttttaagaagtattgctaaccaatcgtaagatgacacgtctaaaaggtgctgaacaccactgatgcctataatagcaatactccaaaattaagtagtttagtttgttatcattaataattttaaattagtttgttcatcaaataatttaacatctcactgcaaataaaaaatagaaaactttgatagaggtattttttattatttgtagttattgtatcattctcaaaacaaataatagagcaaaaagaaattagaaaaaaaaaaaggaaacaaagttcaactagatatatcaatcaaaagacaaataggtcaactagatataaatttcatattttattaaatatttgatatttattttttatttattttgtaggtgttttattagtgaatcagaagttataacttgattagtttaaattttttctttttttgatattaagattttattgtattgttcggtatttctatatacttttattatagacaataaacttttaaattgataagtatttttattttgatttttgccatattagatttaataattaatactttttttttactattattatctttttttgtttggaagttatttaaaatttattttttactaataaatattaatttattctattcttgaccattagat

SEQ ID NO: 181590 - DNA, 559 bp, Cannabis indica
gatcgaacaaattaaacgaaagcaccgacagacacagggagaaacaaagagaggtaccgccatgtctagatctgtcttcacggaagcttgctctttcaccagtttctctaaaataaaaatatctgacgaaacagtgtaaggaaacatccaaattttctgagaaaataagccaaacaaccaacaattctcagataaaaatagaacctatagtgctcttcaaattcgtaaagcttccaatatatagtaggaacaaataaagatagttcctaaatagaaaatggtcaaataaaaatcatgatgtgagaaatgtatagtaggtaacatagattgtaaagcctttgattactttataagagtggaaattctctgtttttctccttttttctgcaataaacatgaaattttggtgtctgcaatggttataaattgggctatgaaattcatatttaaacaaaaacaaaaaaacagaaaaatctatctaattaaatcacaaaaattatattttttttggcaaagaaaaaattatcactaaaattatgagtagttaacaacttttttt

SEQ ID NO: 181591 - DNA, 939 bp, Cannabis indica
aatattaccaactgttgtaacagttggtaatataacaggtatgggtccccattttgcatcgtatcaataattttacagagttcttgaatccccatcatcaggaaaataaggtttaaaaggttttgatgcaaaattggaagatcataccaatcaaaggtcgattctatggactccggtacgcttccgctaatctatattctattgtttgattctcatgaattaattagggctatattctgagtttacagtattataacaataagtactaagcaaacataaatctacaattaggacacttcttaagtctactatttaatatatcttgcatgcactcagggtgaaatatatgaccgcaaggaaattttcttacaatcgctccctcttcgtatacttctaaacatattgggcattcttctccttcagatgttgtgttatctccacacagatatttgtcttcgggaaatgcctctatagtaagcacaggtgcaatttcttcgggtgcattttgtgcagataaatccacggccggtgcattattttctggtgcattttgcacagttaattgcacggatggattttcttcgtcaccgtgaaaattagcgctatatacggtatgcatgcatttaattatcaaaattaagaaaaatgccccgattaaaatgagcaaaatttctgtcttttgattcaaatagtcatcatggatattttgtgctagtacattaggaagtactatacagataacgaagtaaaaaataagtgtcattgctgcaaaaaaacataataataattagtataaatataaaaaaaagaataaaaacaattacacaaacaatttaattaaagaaaaaaaaattactcattgaataattaaatttttctttcatcaccacttatatatttttatatataaatatataataaaaatgaaattagttgtgc

SEQ ID NO: 181592 - DNA, 647 bp, Cannabis indica
gtttatgtttcaaaccaatttttcatgcacaaacttccatcaatcagtaatggatgatttttggtttgatatttttattcttctcaggtaaattcactaaaattaatggtgtttcttagtctgtcagcgttgattcattgttttggtcctccttatattgcatgttggctctaattctcttgtgcgaataatgtgcggcttcaaaattagagtaagaggtaattttgttttgttatttgggttgtataaatattgattaggtcgactcatagtatatttataatatttcttcctttttgaattataacagaaaaaactccgaccaaattaaaattgtaactacataatatttgttataaatattaataattatgtggatgtccaaatcttttatttattaccattaattgtaatcaacattcttctttttcttagtttccctttttcttagtttcttaatatctcactcttgtatttgtataaataggggttcaccccattggaataaacaactcagaaattctcattcactttctctttctctcttcatcttcttcttctttcttctcatctactttatattattttatattattttataacacgttatcagcacgagtctctgcccaagcttcaagcatgagtct

SEQ ID NO: 181593 - DNA, 564 bp, Cannabis indica
taatggagaaggtgaaatacttacatccaagacaacttttatttattcttctaatggagaatggggcaggggtacgaggatgattttttatcttcgaatgttaaacggtggaagggataacactcctcacccctacgagaatccgtttagtattttattttatatttctaataatattttaaatattaaaatttatgtttgtaattttttagtatattagtatactttttaaggattttgagttgtgttttagataataattagtttattaaataataattaatgtgtaatattttaatttttatatattcaaatttttgttattaactttattttttttattaggggattctatccgccttgtcccgcccctattaagggatttctcgctctatccccgatgggaataaacagggatgagaatttaaatttttaaccgggatgaagacaagtaaagtactccccgccaaatttcttgacccgcgtgtacccctaatgtagacattataaccctacagccacatgctcccacttcgattatctcaaaccttaacaaatgtcaac

SEQ ID NO: 181594 - DNA, 714 bp, Cannabis indica
tagtataggcgacggttttaaactgttgggtataagggcctaataaattcacgaattccaattcaaatcattgcctattcctgtaaattactgttataaaaccttcgggaacactaaattttttcccgacagttttaaaacagttacttaactttttcaggacggttcccaaaaaaaaaacatttttaggaccgtcgcgaattctgacttttgtagtatagtgttggtttttgttcttgatttatttgtttcgatttaacttttgtttgtttaaatgtaatcttgaagtttggaattacaaattttaatttttatgtatcagaattaaatttcctacaaatcaaagctaaatttttcttactataaatgtgaactagagaaaaacaagagtcactattcatctaaaccttatggttttgtgaaggaataatttgttttttatgaaaataaagtcttaaagcattaagttgtcatagaaagaaaacaaagtcgtgtgattggatatgtgtcttatataggggtaattgccgaactatttgaacaaaaaataggcgttcatatgtaaattaataataagcaataattaattaagttttgggtatactataaatatacataaacactatagaattttcgtgatcaaattaaacatttagagaatgtaacgagtctctgtcgcgggagagatggcgccactgccacccatatataact

SEQ ID NO: 181595 - DNA, 1011 bp, Cannabis indica
tctgcaccgagctcaaataaatatataaatacacacatcatatgggtccatcttcttatgtcttccaagaagtgctataacagaataacattacttgcactaaataaagaaaaatattaaatataatattgctattgatataatttaatattagattgtacttattttattttaataaatattataaaaaattattaaataattataagacaacacttccttctagtagtgcaaagtgcaagacactatgagtggctcgtactcataggaatatttcccaaacacattatctttagtcaaattaagctaaatagataagtagatataccttggaagtgagacaatacttggtcctctcatttcctggaaaactgtcagaaaccaaaaacttcccttctcccaaaattctaaccccttcttctgcacaatatgacaccagatctccagacctcacaaccttcagaaaaaaaatcccaaaacattgcatcaatcaccttgagaaaaccctcaattatgcattaaaacataaatagtaatagtttaaaaacacacacacacacatagtacacacctcagtaacagcatctttggctggtttagcaatttccttaacaagacactctgcaattggagctttgtgttccttgagaatagcagccgctttatgaagaagctcagctcgtttccaaagaggagtctttgcccatgatttttgagctgattttgctatctccataaccttgttcacttcctcttgtgtacaagctattataaacaaccatatgcatacagattatatatatacattaaaaaaaccaaagaaatctaaacaatcaaacttagtgattatgataatatcttatcaccttgaaccttgtattgggtctttctagtagtggggttaataatagcaacacttttagtagaagaagattttttccactctccatcacagtagtacttgtacacatctcctcaattcatctgcaaaaactccagtcccagccataa

SEQ ID NO: 181596 - DNA, 808 bp, Cannabis indica
agcaaactcggggagaaaatcacaatcctgagtccctagaaacaaggcccaacgcctaggttgacctagaactgggcccaacacccaggttgacaatcaacttggaatgctggattcaattgcttaaatgccgaatttgatgcaactattgaatccagaatggtcaaaaccagggtaggagacctcttcctcaagtttagaagccttggaagtatcaaaaacaaaatcataggagctgaggagtaagtacccagcgcccaggttgacaaaaggcttggtatgctgggttctacctttccaaacctaatgtcgtttcgaacattcgtctagtttttcacattaaaatgatccatgaagttagagaaatcaaattcacacctttgcatttttgatttctagttcacctggaaatgaagagttttgagtctctcatttccacaaaacaacatctccgagatggtccgattgatcgagtcttgcaaagcaaacgaaaagatgagacaaagtgctagagctatggtgtgaagggcgaaagaaaatgtgaaacttaaaaggtgatgaatatcgtgggtatttattgaatacaaggaggggtgcaaggaggggtgccttccacgagaagtgaagactcagatcattcaccaaaatggtatatgaagatctgacggatggggagctgagaagatgcatcagatctgaacgtttaacatccatcataacatgcattgtgaaaagtacttattaaatgaagggtttgctcaatcggttcgtcgccctttcggtgtctccccagacacacaccttgcac

SEQ ID NO: 181597 - DNA, 612 bp, Cannabis indica
gagctacaggtgaatagtgggtaggctatgggttccctgtgtgggagggcctcagttggcaacctagtgcacccctcgtgatctccaggattaagctggaggagatgacgatatgatgtaccacttttgcctcccaaagattatagggttcatgaaatagtatgagcccaaatgcgtattaaagaaacaaaggggaatagtcgtttactttcgaacttattttgtgattcttcaggacggtaggctatgccattgttaggagcatggggcaccaaaatgcttaatgccactatgagatggcctattataattagttagcggttttcttataacatttattaaagtaaaatatgtggggtcgtgagactcgatattgaattatagtaacaattatattaaacatcacaagggtgctagacactatgggtgtcctttaacattttttcattgttagagatagagcttaatggaaggtaggtggtgtctatagtgactcaagagagggatagagtatagattttgagccaagtgtaacttgtatttaatttcttcctacccctttctagataaatccattaaatccttggtgatgaatgttacatctatttcttc

SEQ ID NO: 181598 - DNA, 701 bp, Cannabis indica
  modified_base (548)..(548): a, c, t, g, unknown or other
taattagatttgacgttgaacattgcttatatatatagacaagatgagatgatgagtgtaccaatggaacaaacaaaagagtactcgtgtgtatgagtctttctttgtcagctaataataagcttaaacatccaaaattaagccacaactctctctctctccctctctctccatacatatcttcttattttctccagcaataataactttgctcaaagttatctatccatggcggagggttttgaactttttcatgtaccccaaaaggtagtgagaacagaaaataaactccaatattctgcaccattactcttccaaaccagtcctactcctactactcctcgctcacaacaaccttcactctccattttccccccaaacgacgccgcttttagtttcacaatgaccaaatctcattaccgtcttctcatcgccatgcaacgcccaccaactcaccaccaccatcatcatcatcgaatccatcacaacccctccaccgactttctccgacgacatgcgaaacggtgtcgttcgttacggccgctggntcgtttgtcgtttccggactctagattgagaagctgcgttccattgggtccgttcactggctcgcttctattctgaagcgttcgagtttttttgaagcccgcacacaacttctggaggagtttttgcgggtcgggtcggcagggttttggcga

SEQ ID NO: 181599 - DNA, 824 bp, Cannabis indica
gcctttatttgtctatttctttaagcagcgaagccaatggatgagctcctggacgctcttgcccagacctacagtctcgaaccagttctgcctcagacacaggacgtggcggtgactcccgagaggtcttctatcagcatacccctagaccaagtcattttaatcgacgaggaagaggaagtagaagaagaagaaggtgagattctccctaccttggaccagaaccgcaaagaaaaaaatggtggagactaaggttgctaaaaagccaaggcgagtagacactccagctcccagctttgactcagggattccgtccgaggtggacgagtatattgttcctccgggtatcgtcctaacccccattcttgctgatgaggaaagaacccaactctagatcgccaagcacaactatgccacggcggagtacacaaaggggaacgccgaggtggaggccctgaaaaagattctgagggaggctcaggatatttttactcgtagtgagtacgccggaaatgtttggaatttaaatctggatctcttgactgactggttcaactgcttcattggacctaccctggctcccttagcctcagaattgatgagccacttcgctgctggcttggttcagctcccgatgaagagatacgcggcctatgcttctactaatcatgtctatcaaatccaggacgtgagcgtagcccttaccgacggtaaacgtttgtttagagatattttctaagcttttttgtacgccgactatcacgtatctatatatattttttaattcgtcaaattgctgcagagatcggtcgtcttcgtaagac

SEQ ID NO: 181600 - DNA, 1192 bp, Cannabis indica
cccaccccatatattattgtactaaggtagggttgggttgtacaatgaaaaaaaattgaatggtttatagcttatccaaaccgcaatcattggattggcctattaaaatacctctaacccagccaacctagccatgtgcacccttagtagccgtggccggatgaccctccaaaatttttaaaaacaaagttttatttatttattttttgtattttttcttattttttttaagtttatagttttggtcctttaattttaatttttttctttttgcccccttaatattcaagtctacctccgtatataagtcaatatttatatattaatatataaatacatgttataaatttcgcttattattattatttaaaaaataacaaaaagataagccactaaggctagcttagtagggagggatgggaaaaagggagaggtcatgggttcgaacctaggaccttgaaactattaagctattaacagattgtaaaatattatgctacactaaactaaaaaaaaaaaaaaaaaaaagaacaaagtgaaggatgaataattaattatctctaagtatggatagtgcaccattaaaaaatgtaaaacataaaaatcattggagtgctttttcttaggtactcatctttttatatgttttttcttttaacaaatattttcatatgttttgaaagtacacatatatattttacattatctagtaattaatttgtggtgctattaagaatattattatagattttgcgtcagcaaaaattaatagttgtatgtgatatttggctcaaaattcttcatcccactaagacaataaataaataaataatttcttaataaatcaatatttccacaaaaaaataaaatgaggagacatatatggaatttaacttctccttcccaatgatttttattgattattgttttacttttctttttattaataattaaatatttggtatatactttatcactcactctcaactcaactagtagtgaaatgctaaattaatgatggaactaaagtttttgataatgtattatacgatagtattgttattattaggtatagtattgttccataaataaaaataggtataagtattgtgaatagttaacggcttttcaagaataattattgaattaaaatatgtaaaaaaaattataccaaaaataataagattcaata

SEQ ID NO: 181601 - DNA, 740 bp, Cannabis indica
gaatatcatttttaatagaaagtcctttctgccattttggtggaatgactattctaattttgaaatagaaagaaaagtcattccaatgcaaaaattttgaaaaaattttaataatttttttaattaatttttgtattatattttaaattttattcaattccattcctattctaattcttatggatattcctattcctatacttttattccttcaaaccaaacgcaacctaaacatttttattaattgaatccaaagttacagaggaagtttatatagtgtcacatggcaaaaatagttcattaggtatggaaataactactaaaacagttagggacaactaacatgagtgatacaatgaatctagacataaagagtacaaacactgtataaaccatataaaccacttaaacttaataaaaaagagacaaaagaaaaataagatgggattaatttaatttgacacacaatttgagaatatattatatatataacagcaattatctgtgaggtttgatttttttttttcatataattattataaaagattgtggaaaaaataacaaatagggtagttaatttgaaaatatttttctattaataatgaataattatacaaatttaatttaataaaaattatgaaaataattaaataataaactatatatgcaattttttttattaagaaaaataaacttagtacgcatagttcaagttttttaaataaaatattaggaaaaat

SEQ ID NO: 181602 - DNA, 316 bp, Cannabis indica
aggccaggttcaggtccaaggtctgtggctaggtctaggtttggggttcgagtctgagttttgggttgaggtcgggtttgaggcccaaggtctaggtccaggttcgggtcgggatcgatcaaggtccgagtcccgggtctaggctccgggttaggtctgagtcctagtttgggttcaggtccagggtctaggatcaaggttcggttcgcgattcgatgttcgggtctgggtcgaggtttgggttaggggttggagtcctggtttgtgtcctggtcggggtccgggtccagttttcaaggtctaggttggggtcaga

SEQ ID NO: 181603 - DNA, 668 bp, Cannabis indica
aagtttttatgccatatatatactaaaacttatctttattttcccatatttttgtaaatagtaacaaaaaaaaaaaacagtataagataactagttaccgtccttaagttgatacttttttttttttgtttgataatttccttaagttgatacttgattaccgttacttgcttttctcatgtttttaaatttttccttcaatttttttcataaaataacttttttaaaaagaaaaaaaaaaagtcataattttacaccgaaagtataaaaatccataaaattatttaattttctctcttttttttttcttttatagttttttttattattattatttgaatgttttatttttttccatatagaaatttctattgttgagctaattattttttaaatttatttccttgattttcttactgctattaattatttatttttttatatatatatatttctctatttgtatttttttttttcttcatttgtttgaaagagtaagtactgttttaagttagagaaaaaaaaaatgtcaaaaagccagggtgaaagaatttttcctatctaaaaaattttattgtttatcctaagtgtatactaaactaatttataggttgcaacattaatgttgcgacatacataaaaaaagatatgcctccaaaaagctatac

SEQ ID NO: 181604 - DNA, 698 bp, Cannabis indica
gtaatgaagcctcttctagctcttgctttccattaaatgcctttcgccatgttcgaaatttatgtgtactacgcaaccactttctatgtcccatgtaacaaattttccttgagcgtttcaagtattcagaacaagttttctcttcacaaacaggacaagctctatatcctttcacactaaacccagataaatttccataagtaggaaagtcattgattgtccataataatgcagctctaagaataaatgcttccttcttgtatgcatcgtaaacattaacaccttcatcccataaaatttttaagtcatcaatcagaggggctaaatagacgtcaatgattaccaggttgtttcggtcctgatattaataagctcaaaagtataaactttcttttcatacacagccatgggggtaaaactttaaataacaagcataactggccaacaactatacttgctgctaagagaagcgtgaggattaaacccatcagtagaaagacataattgaagattacgagattcactaccaaagacaggaaacttcatatcaagtctctgccaagctagggtgtctgctggatgtcttaatttaccatcttttattctctcgttagcataccacatcagatttttttgctatgttcaacacttctaaacaaccgaatgaaacgggagtaggaggaaggtaccacaaaacc

SEQ ID NO: 181605 - DNA, 709 bp, Cannabis indica
caagtaaaacactcaatacctaactatctattactgtgaagatccttaattagtgaagataacaactcattaagctcaaagctagcccaatccaacagttctcaactgaagttgtgtaaatattgagtcgttttttattccttctttgccatagcaactataaaataatcataaattcaagaaaattagatattggcctacctgagaacacatgaagaataaactccaaggggtttaaaagaaacctcgaaaagtagtgccaaagcaaaagcgtttccacaccttaacaacagtagggcaaaaccagaaggcatgggggggatagactctataggggacttacactagcaacaaataccatcaatcttcatacctcggtgtacaaggacagaacttgtacagcttttacaaactctccaagtaaagttcttgactttgggaggaacttccaacttccataatattttccaccacaccagcagatattcttgagaactttcaagaactgaatggacattatagctcacttcataaccacttttaatcgtataaaggccttgagatgtacagtaccaaaccaaatcatactcatacgttgaggtacaaggagctaaacccaatatgaggaacatcatttttatgaaatatggtggtaatatgagattcattctaggaaccattcacatttttaagagtggcccaaacttga

SEQ ID NO: 181606 - DNA, 854 bp, Cannabis indica
ctacttttatatgatagtgtatataataatcatagtaagctatttcttactaaagttttttttttaaaaaatattgaataatttataatatttaattttacgtgttgcttatttttatttatacgcgtacaattaattattttaaacactatttcagtatcttaaattattttatttaaaaaaaattagtaaaaagaggttatataactttaatataagttgtcttataaaaaatgagttgtaatttctcaaaatatctaaaaaaaaaatcaataagggctcgtttggaacgccgtattaggtcgtattgtattgtattgtattatattgaattggattatacatcatatttttatataatactatgttaaactttaatttatactaaaatattatatatttaggtgtccataaaagttaataccacatatagttttacataaaaatattgtataaaatacaattcaatataatacaatacaatacaatacgatttaatacggcgttccaaacgagctctaaaagtaaaagtggcacttagagagatatagagaagaaggtaaaatttgagagaaatcatcatcaaggtggtggggtgtcatcatcaatgacctttagctcctacaataaactttgtttgatttcaataaaacagaataaaatacaaaccttttttttatttatttttcaatattattcatatgaaattttgtaagtgtaataacaataatgttccttttcttgtgctagatcacaaatgcaaagctaccaccgcacctaaaaattaaattaaaggtgatgagttaggacttttgttttgtgcatggcagcctttagatttttggttatctaca

SEQ ID NO: 181607 - DNA, 754 bp, Cannabis indica
aatgagtactgccctaaaactgaaactgaaagggaaaatatgagaggtgtaccatatgctatggctgttggatgtctaatgtatatcatggtcagtactagacctgatatagcacatgctctaagtgttttgagtaggtttatggcaaaccctgggttagagcattggaatgctgtaaagtggctgattagatacttgaaagggacaatcaagtatggtctgatctatcagaaagacacatctgatgtgaggttagaaggctatgttgatgcagattatgcatcaaacagggacaatcgaagatctaccactgcttatgtattcatggttaacaaaagctgcatatgttggaaatcacaacaacaaccagtggtggcactgtcaactactgaatcagaattcatggccaccactgaagctttcaaggaagctatatggttacaaggaatactgcaagagctgctactgctcaaagacaaagggacagtctattcggatagtctgtcatctattcacttgtgcaagaatcccgtataccatgagaaaagcaagcacattgacattagattgtattggattcgagagaagattgaggacagggttctggaattggaaaaggtgcacacaagtgacaaccctgctgacatgggaacaaaggttcttacattcagtaaactgatgcattgtctcagtttgctgaacatggttcttgctgaacatttcgagatatcacatcatcaagacttcagtgaaa

SEQ ID NO: 181608 - DNA, 1381 bp, Cannabis indica
gctttctttcccaattccaattttcaattacagctacgcgtaacattaataagaagaggagataagatcaattcatttgaatttggacctttaagaaaaactacaataaaagaaaaactatgggtccttttgaaaaagacaagcgtgtcacctttggaaaaatattaggaaaattttatttacacccgaaaaaatttctaaaagcaccccattttaataattttaatttaatataaaatttatatatttaattatactaaatttttttaacttttttcttctaattcatattcttaaaaaatatacctatcaaacaaaattaaattatattttaaatattatgactaaaaaattaaaataaaaaaatttataaaattttcttaaaaaaaataaaaaataatctatacatgagttagaaaaaattatgaaaatgaaatcaaaataagtattgaaattaacataaaataatgtgagaaaaaaaattttaaaaaaataatcaagagtaatttttaaaaattatttaagtttatattttcttaataatgggatgcatttataatttaatggggtgcaaataaaagtccccaaaatattaatatcattatggggataaaataaattaacaatttttttgttgggtattgtagactaatgttaaaaacgaaaagaaaattcttgacagaaaagagaccggaaggcctcttgactcaaaaggttttggacagagtcggtttaaatatgaaaatttataaaaaatactggaatttgagttaatttttacaaaaatagtcacacgaaaaagttttcaaaaatactagtgtttttataaaataccagtagaactacaaaacagaacaactcaaaacagcagtagaacaactaaaaatcactagtagaacacaagtgaaaacttaacacagtatactgcagtatgaaacttataaaaaaacacagtaaaaaaataaaaaatactgtctggcagtatttttgtaaaaaaataacaaaagttaatataccatataaatttccctctgaatattaggtagtttgagttattgtgtaagactctcatttttgtaaagatttcaatttttttttttctatcgttacatacataaataaaaattaggaaacttacaaaatactgaaatttaggttaatttttacaaaataccgtcacaccgaattttttcaaaatactgtgttttattaaacaccagtaaacacaaagcagaacaactcaaacaacagtagaacactagtaaacaccagtgaaacttaacacagtatactgcagtatgaaacttataaaaatacagtaaaagtaaaaaataaccgcatacagtattttgtaaaaaataagcgaaagttagtaatccaa

SEQ ID NO: 181609 - DNA, 615 bp, Cannabis indica
aatggtcccagatcgctattgggatcactataatcaagtttctgtcaagatatctccagattcagtaattaaagacgtgttaaatacatgatattcttgacccagtaaaagcagaaaattacagctatacgattttcaaaatcatacaccgcatttacatttcgtgatatgtaatcaaatcccacgattttagggataatgactgtaaacatattctggtcaacattgtaattagctatcgctatgcaattataaatagtggcaaacaatctcaaaaaagaaaagaaaaaactcttatgaaagaggctctgaaaaaatactcagaaatctgaataagattgactcgtggactatgtagaattttaactgcaaaaccacgtaaaaaaaccctgtgttcatatattatttttctatagcttttatgttttttgtgttgaattatcatcgtgaggctcaaatttggttaacgaaaatctgcattaacagtttggtgctttcattgagagcctctgaaaaagctcagaaaaaaccttccttcttttaaagaaaaaccttctccttatggctgaaaatcgagagaatatcaacacagcacatgaggaaactaaccatcgt

SEQ ID NO: 181610 - DNA, 542 bp, Cannabis indica
gatgctataccattagagataaaggaatgctattctttaaatttgcattgatgctatattttttttatacaataaaaaatttaaggtggaatatacatacatatatataatagtttaataaagtaaaaatatgttgtatatataataatgagtcagaccataattataatatttttaaaaggtactgtaatatcaaagtatctttataagtaaatatgccaaaaataatgtcaaaaaaattaaataaaaatattatatatttaaatgatgtgtagatacagatcatcttgctaccattagagatgctagtagatgccatactgtgctaggagagctctacctacttgggctcacgacctcccaagtctaaagtaatagtagggtaggattgtgggggcatccaaggccaaaagccatctacaattacaaaagcaaatgtaataataagcttatcgcttttggcttccaaagctacttcccgcattcttatcgatatctcatccacctttatgtaaatatatatatatatatatatatttata

SEQ ID NO: 181611 - DNA, 588 bp, Cannabis indica
gcgaccacaggacgcgcggccacgagcgacttaggccacgctggcatcgaggagcagcctgatgtgggaaaggagatttgaggacaaaggaggtaggggccatcctttgtctccttttgcttgccttgagcatcttgaattattcattctttcatttgttatttataaaaatacttactttttagatttttgcggttaacaatatgtatttaaaattaaaatataatattaaataaaagattataactaattttaattaattaattatatgatatttatattgaaatttgaatttaaaataaatattatattttattttatagaattaaatgaaagtgtttgtttataacattatatatttatatgatatattcagaataactggagaagagaaaaaagagagatcagtttcaggtttaaaaatcaattgaattttctaattctctctctctctctttctttaactcatgcaagcctctctatctttctctaactctctctcttacacacctctctcttgtggtggtgtgtgagtgcgttctttcctatttaattcacaatgtctcgtgagttgtagtacacattgtc

SEQ ID NO: 181612 - DNA, 657 bp, Cannabis indica
tcttaaaataatttctttcatctttaatatcaagtatttttgatagttagaaattatttatgcttggttccatattttattaaaaataatattctttgattttttgtatttacattaaattgtttcacatttaatgcttagaagttataattttaaagcgaaggaaaatctattttttattagaaaataattggtttgattactgattaaattatgagaatcaatataaacataaatatttttatatacacttaagtggattctgaacccttaataatatcctaaaatatttctgaaaatatctgttactgtcatttttatcatttaaacactttattttattttgttaccaaaaacctcaccattttcggaactaggttagagttttattagcttagattaaataagtattttcttcgatttcacgcaattcccatgggttcgacctcgttcttcacaatctccatactacaataaagattcgtgcgcttgcgagttgataaatgtaaaacgtaccatttcggtatacaacagtatcatacctaaccaaacaagggataaattacatttaactttgtcaatatatcaattaaataaatttttgactttaccttaattttttttaaaaaagtaaaaataaatataatagtcaaacaa

SEQ ID NO: 181613 - DNA, 743 bp, Cannabis indica
agactcgatcccaaaccccagtcttggactaaatcgccaaccctagaccccaacccccgaacctggctccaaacctagatcttggacccattccggaacctcgactaggactaatgaagagaaaaaaataggtatacgaaaaaaaaaatcaaactaggaaaaacaatgttcccggattttttttaactcagttttcaaaatatatggccaaacacccactattggtttttaaaatcaattttatagaactatagtcaacatttttctttcattttctacaagttttggtattaaatcttacataacatagtaacatacttaccaacatttgcagcagaaatcataccaagaagcgaattgcgaaaattacttgcccttcttcttctgttgctattgttattagtatcactatgagtactgctgtcctgtgagtatggttccattgcatagtcactcttgtgctttgaaaggtccattggtgtttgatagggcattggtgatgcattattactatgatcacctctactttgaaacaactcttttatgtcttcatggccttggtgatcagccaaagctcttggtgtccatccattgttatccggtttatcgatgttagctcctttctccaaaaggaaactcactatttcggcatttccttcacaaaccgcagcgtgaagagctgtggttccgtcgatctttggcatcgtcacatcgtagccataatcggcgaacattcttagcaa

SEQ ID NO: 181614 - DNA, 786 bp, Cannabis indica
tcaaaaacgcttaagttgaccacacatgccttattaattcaacgaatacctcacaaatcaacgaagcaaagccacgtcagatcctaaatacgaaaataaataaaagctatctttgatagttaattttgtttagaaaactgaaaaggttccacctttagcctccacatgtctgcttgtacagattgaagcaataaagaaatccacctcctcatagtcaaaaataaacaatacatgtaatacagatctttgtaatgaagtacctaaaagaaacaaaacttcagttagcataatcggaaaaggtttaagtgaactaaataatgactaagaagatctaaattacaaaatgaaaataacatgtctatatgagtatgattctattgctatatgagcataattgatctaagagaaaatagataaacttataaacatataaatatacttaatattaattttgacaaagaaacaattcaattataaacaattctaaatatcagcttgacaatttcaacacactaattactcattaaataaccataatgtatacatcatgataattttattttatttgatatcaaatgatagagattattgaggttttcagccatggaaaacacactatgatcaaaaagtaatgctcattaattgtatatttcaaagaaaccctaatttccatgaatgtccctaataatatataaacaataaagttgtaaattaaaaaaaaaaagtagcaaaatttcatttaatataagaaatagaacaaattgaagatttatacaatactggaat

SEQ ID NO: 181615 - DNA, 621 bp, Cannabis indica
tagaaaaaaaaaaaataaaaaagcaatcaaggcattgtcagtgtaacaataatttgcaacataaaaagacgagagccaaaggcattatccactagaatatgctatatgtaaatccaagccagtgtagaattcgtaagaatccacaaccttggtattcctacataaatgataagagaccaaagtgcaatattttctgtttgccgcctatagttgatggccattcttaaaaatcacaaatataggctgcatatacttttgagttgataaccttgtgattaggaccttttggttactaaaataagtaagctaatccaggagagatgggcaaaactaatgcaagtaataggcactgagaaacttttaaataggaggtacgatggaaagaaacacctcacaaataaagaaacaaatgcatgtttcgagtgttggaatgagatcatttccctttccaagttagtaatcttgtaataaagttttcaaaggtcacgacaacatatggtgggatgcctaattcaaatagtcattgaggcaaaactatgaagcaccaagactgtgcaaaaccattacattatagtgcgactgcataataaaggactaaagccactttttaacggatgataa

SEQ ID NO: 181616 - DNA, 702 bp, Cannabis indica
acaagcaatgggtaatttttttttgtttgtgtaatcttatttgttgttgttatatttagtttagaatgttgttttgatgcttgatctgtggattgttgctgttattttgttgttttttgtgttaaaatatttgttgcctgtgaaaactggatttttcctgatttctgttaattttttttgtctggcctgatggggtccgatgctgctccgatggggggcccgatgccctgtcaaaatagttgataggggtgaaggcccgatggtaccctaaattttttttaggttgttgttttgggggtcaggtccgatggcaccctaaaatttttcatttttgttgttttggggtcgggtccgatggcacccctaaaatttttcagtttgtttttttttggaggccgcgtccgatgggcccgatggcacccctaaaatttttcagttttgtttttttttggggtcgggtccgatggggtgcccgatggaaccctaggatttttcagttttattttttgtggtgggtcgggtccattgggcccaatgagggtccgatttgggtccggtgggaccccaaaaattggttttttgtttaatttttgggatcgggcccaattttgtctgatggtagtgttcgattttgtccgattgttttcatatttattgcaatgaaagattttgggtaacttatcgatgagatttttgttctaa

SEQ ID NO: 181617 - DNA, 649 bp, Cannabis indica
atctactatatattataaataagaaaacggagctacgcttcacgcagcatgtaaatgtatttaataaattacaaaaaaaaaaaaattaaaatactgaaatgggagaaccataaattactccttcaaagtaccaacatatttaagtaaaattattctattaaagattacttagaacaaatatcataataaaaaataaagattataaagtatataaaaaattaattaagatatggtcataacaattttagcgtggccaaacacaacaggaatgttttgtttaaaaaaaataagaaaaaaaatatcaaaatttggaatatacggtttgttagagagatatgtggttaagatattttttttaatttaaaaaaagattgtttaattttttgggtttaattattgggtttatttattaacgagagatcaaaccttaacatcgttaaatttaacagaatattcttttatttttaaggtatattatgttaaaccaagaaatgccgttaaataggcacttttaatatataaagatatatactagatgagagttacgtggtgagccacgtaaatattagttttatataagttctagtggtttttgtttaagaattcagtaactaagcaacgacaacaacaatggtagatagatctattt

SEQ ID NO: 181618 - DNA, 826 bp, Cannabis indica
catcaccttgtaaaaataaatacctttgtcaatttgaaagctagtgtgctcctcattcgcgacatgcattttaatttgattatacctgaagtaggcatccatgaaagtgagaaacttgtactcggatgtggcatctaccatctgatctatctgtaggagtggaaagaaatctttatggcagaccttgtttagatcggaaagtcaatgcacattctccacaagccattgggtttcaaaaccaatactgagtttgcaagccatactggaataacaattcacgaaggatatcattggtggtcaacctatctacttccattttaacagcttcaacccttaccgaatctaaaggtctcctcttcttgcggacttgcattctgtcttcttgaatgtttaaagcatggaagatggtgctatagtcaatcctggtcatatcaaaatggctccatgccagcacatcctagttcctttggagtgtgtttatgatattctctcttatggacgggggtaggtttcttcccattctaatagtccccgtggggtcttcataactgatgcttacctcttctacctcctccattggttctaggtttctttgattcccaaccatgggaaaaatcctcctagacagcctcaatgtccattagatttgtcgttctgggagacgtaagtgtctcttcccggatcatgtacacggctcgtgttttgaggttgcagtaattcctcacactcttcatatcacctttgtttgtgccaatacatccattatcacacgggaatatcatgcataaatgcctgatagaagtcattgccccaaaacccattagag

SEQ ID NO: 181619 - DNA, 723 bp, Cannabis indica
gtcgtactatctttaataaggtagaaactctcaaggtacgtactaataactcaattaaaaaaagataatgtataagactcttgtaactaacatgtggttctcgaaattgtttaaactactgaaagagcgaagaaaaatccccactacctaattctttttctattttttataaaaaaattgtttgttttttttttcttcacaaaactaaatttttattttagggaattttttataaatatggaatttcttaaaagcattttgaaaaatatggacatttaatgaaaaaacttaaaatctggaaaaaaaaataaaaaacttaaaaaatggaaaaaatagaatacttataaaaggatatttccatttataaaattcacacccaaaatatccaaattcactaattccctatatcatgcgattctttcattcctcttgcgattctcctccgatttcttcccttcttctctgatttctctctgaaattcttggttctcttgtctctgtgcagctcatatggttgatctcaggtttcttaatgtatgaaggtcaatggaattctcatgttcagcatagcagcatttggattcgtggttaattttgttatggtcatttgaattctccgatttctctctgatttctttccttctcctctggtgtgattatcattcttcatcttattgttcatgctcctactgccgatgaaaaaaaataataaaatctgaagtc

SEQ ID NO: 181620 - DNA, 514 bp, Cannabis indica
ttagggaattttttataaatatggaaatttcttaaaagcaattttaaaaaatatggacatttaatgaaaaaacttaaataactggaaaaaaaaaaaacttataaaaatggaaaaaatagaatacttataaaaggatatttccatttataaaattcacacccaaaatatccaaattcaccgatttcctatatcgtgcgattctttcattcctcttgcgattctcctccgatttcttcccttctcctctgatttctctctgaaattcttggttttcttgtctttgtgcagctcatatggttgatctcaggttttcttaatgtatgaaggtcaatggaattctcatgttcaacatagcagctatttggattttgtgtattaattttgtttatggttcattttgaatttctccaaattctctctgatttctttccttctcctatggtgtgattatcattcttcatcttattgttaatgctcctattgctgatgaaaaaaatcaataaaatctgaagtc

SEQ ID NO: 181621 - DNA, 847 bp, Cannabis indica
aacactaaaacaaatcaaacaaaagaaaggaaaacatgattaaaaaaaattaaaaaatgttctgcacaacctcaatactcaatgcaatagcagttatttgcaagtccaatcttaaaaaatcggaacaaaaaaactgctaaaacaacacaaaaataaatgtaaaacaataagcatatataaccacttagaaaaacataaaagaaccacacacctcaaaactttttttctaatgagctggtcaaatatatttgtaggagaaccaaaataaaaaagtaaccacaaaataaccatagagaaggaagaagaaatgtattttatagccagcatcatccacacacacggatagaaccaccacagcaccacgagaacacctagaaaataatcattaattccagcaagatggagcaagaacagtgaaatcgacattaaaaaaataaattatggaaaacaaccgtataacaacactaaaacaaaaaaaaactaaaaaaaaattcagtatactgcaatttgaaacttataaaatacacagtaaaaaataccgtctgacagtattttggtaaaaaaaggataaaagtgaatataccctataaattttcctttaaaatttgcaaaatatttctctttgctattatttttttttcccaaaagcctctttgctattataattcattaaattcttaaaatttgcaaattaatagtgtcgctgggtaagattttttttaatcggttttttgtttctaaaattggaaaaagcaagaaaatatttttcaaaaacatgttcgataaaactgtttttcactattttaattttttaaattaaaaattcaaaaatttctaaaaattttgt

SEQ ID NO: 181622 - DNA, 694 bp, Cannabis indica
aaatactcatccaataacaacagatgtctaacaacattgactcaatcaattgtactctaccagcaaaagagaggtgatgggttgcctagctatgaagcttcagttgaatcttcttgagaaaaaattacaatcttctgccttccattttattagcttcataggaaaaccaagatactcgaccatttagcactaaataataagttgacccccctgaagcatatcatgatccaatcaatgaacatgaaggaaaatagataactcttctagaagatcttataaaaagtacccaatcgatgatgtcataagccttacataagttaatcttcatgagacatcttggagacatcccttttctattgtaaccacggaacagatcttgaagaacacgcacattatgagcaatggatatgttcttaatgaatgttccctgattcatgttaatgattgagggtaaaacttcagacaacttactatacatcatcttagagatgcatttatagaggatattagaacaagcaattggcctataatcaatagcttgagatagtttatatgtcttcaaaatcaaagagaggagagtattatttagctgagcatgaatctttcctgttcaaaaaataacagcacagcttacgagatttcctcaccaatgtcaacccataacactttccattagggcatgggcttttcaact

SEQ ID NO: 181623 - DNA, 1134 bp, Cannabis indica
  modified_base (165)..(165): a, c, t, g, unknown or other
gttgaagagtcaaaccccggatctggaaggagaaataaagagagcgttgcttagggatgagaaagcgggttttagtttgagaggcatatggattgcctaagccttgtgcttgttgatgagccacactaaagtagactagactatactcatatatatctttatatnttatataaatgtatgattaattcaagattttgaagaatgtttcttttccttttaatattctttttttttcacaatttaattggaacatgcgcgctaggaccactcgaataatctcatgggattattcaattaatgcatatatatattaaccaacggtgttaccaattactgagcttgttgcgttacgtgcgttcagtttgatataagtaattaaaactgttattagcctcttagagcaagctgagtgagtttgatgcagcagagagagaacgaagaacagtagaaaagatcaaaattaatggaagttaaatgtggaaagtgctcaacctcacaatgcacaatgaggaagtgtgtttagcaactactcataattagacgttagagcataactgtaaccaaattgataaaaaaaaaagtgattagcgtctaaccaaccaactaacaacactaacacctgatcactgtagaataagagaatggctaaaaggtaccattcgtgtttagcacacactctttggtatcatatctttattactgtaattaagtcgtgagtctcgtataaacttaaaaaaaaaattttaaggaacattgctaatcaatcgtaaagtatcacttataaaaagtgtgacattattagtgatagtgcccaatagcaatactcataaaataaaaagactttttcatatgcttttataattaattttttattcgtttataaaaatagaatcaacataatctaaaaatagaaacagctaaatttcgaaatgaaaataattattataaaatgaaaatagcataatctcgaaatgaaaataacataactttaaaatagaaacaactttcgtaaaaatgaaaaaaaaataaaaaaataacaagtatacatgacaatttactaaaataaatactacttgggttgaggtacctagctaataataggctaataaatgtaccgataaattttttaaattc

SEQ ID NO: 181624 - DNA, 504 bp, Cannabis indica
ttcatgttacttttatattgttttcttgttgattttatgttgctttagtgttattttctgaaaaaaccgtaaaaaatagtaaaaaaaaaaaaactttctttgaacgtaaaaaatgtaaatattttacaaaaaatagtaccttatgtaattattccaattaaatattggttcccatataacttcacaataacttttagataatttcgctaattaattataaagtgtcacttataaaaaatattaaatgccactgatagccaatacaatattctttcactaaatactatcattcatattcaattaaagatgaatatttttcagtatattagaagtatatgtaactttactaaaatatattaattattacaaaaaaaaataaaataattttttctgttaagttatttttggtcaaattttacaatgactatatgccaaattaaaaataatgtttatatatggatcataaacattaattagtgaacctgctcccctttaaaaaaatcc

SEQ ID NO: 181625 - DNA, 418 bp, Cannabis indica
ataaaggagttagtgtggtggggctagcgtgatgactcattctcacatttatcttatgaaaaagtttctaacctttctttctgctaatatacaattggtttacattgatatttcatattgtattcttcttaatagcttcactccaccacgttggctcttgccatttcaacacaagtctttatcacaattacaatttacaagtgaactttttttatttgttcgtaaggaagggtttattgaaactatacttctctctctcttatatttttttttttttgaactatttccttttttgagacattattgaaattgtacctttttttattattatttgagatattatttatttatttatttatttctttttgagatattattgaagccatacttgcttacctttttgttgggctattggggc

SEQ ID NO: 181626 - DNA, 584 bp, Cannabis indica
aatacaatacgacttaatacggcgttccaaacgagcccttaatgttttatttagtatagattaatatattgcaacttttcacatgagagtttaatgcacgtatatatattagccaatgtatttttagtaaattttagatacatgacttgcttaattctgttaaaaaataataagtgaaaaaagtctattttaaaatatatatatatatatatatatattcacctaatttttttttttgttggtagtaattttagttatagtatacgatagttagaggcagtttttcttagagattgaatttaaatattaaccatgcgaaaactggatatgcatatggttattttattttcttattttattgaaagaatagttagttacattacagtattactatattaacgtaaatatatatataacgacataattactagtataaatgaaaatgaagagtcagttggtcaaatctcttaacaatttataggcataatacatggatttttttagtaaaacgactaaataaatgaaatttctaacttgttgaatctgtccaatatttctcctacagtactgtcatgagaattcta

SEQ ID NO: 181627 - DNA, 513 bp, Cannabis indica
cataaataaatatataatttttgagttatcctttttttattacacataattaattaaatataactacaaatagttttaattaataaataccttattttataatcaaaatactaaatatataatctcatataacttaaaaaactaaatataaattaaagagtaataaataaaaataaaaataaaaagaagtatacaatataaattctttattttaaaaagtaagacatggcatttcctttgcacaaaaattgatacccaaatcttaggcccaaactggcttaatttgatagtggttatatatttaaattagatgatgatacgaaatgaaataggtgagattatatgattaataaattaaagcatgcttatatatatatatatatatatatatatatatttgttttgaaggttattggttggttatataattgattatgttatgtactgtgatgtgaagctgatgatgactacatgactagatcatattggtgcatgtgacagcatcttatacgt

SEQ ID NO: 181628 - DNA, 653 bp, Cannabis indica
ataaatattaatttcttcactacaagactttaagaattcttataaataaaagtattatctttcctaaaaacaattttttttaaaaaataaaaatgtaatctctgtttctctaatcataaaagataaatttctttttcggagcacattctgatgattcttagaaataaaaatgtaatttttccaaaatcattttttggaaataattctaattaattttgtgattctaattccaaaataaaatcataacaaaaatgtaataataacaaaataatctcaattttctaattataaaagtaatttctacaattttctttatgtaaaaaaaatgtataatctttcctaaaatatttttttaaaaagaataaaaatgtaatctcggtttccctaatcataaaagattaatttctttttctagcggcacttgtaataattcttaaaaaagatacaatatttcttaaaaaaaaaaaaatcataatctcgacttccctaattataaaagattaatttcttcggcacttgtaataattcttaaaataaatcaaaaaatacaatatttcaaaaaaaaaaaaatcataatctcaatttccctatttataaaagattaatttctttttctaaccgcacttataattcttacaaaaaaaataatatat

SEQ ID NO: 181629 - DNA, 1049 bp, Cannabis indica
gaccaactgtaatttgataattaatttgctgaaaacggacgccgccggttgtcagtcagcatactgacatattgatttttcaattaataataataataataataataataataataatatattttaatttccttaaacaaaatatgatatggacatatgtttagatcaagttgtaacctttcccaattcaaaaataattgtaataacctttcttgttccagctgtttgttgataagaaaaatatcctagaaagggtaagaaaaccaaactaagggcaacattactcaaagtattaaaacaaaattgataactcaaaataatatctgtttttgttgatgtatatctcttccattgaacagctagcttgatcattaatataataaattaagtcaatcaagttgaataatctccactatgaatgtgtgtataccagtatagtacgtgtgttgaaaaaatttatattttgcatgtatatattgtaatatgtatatttgactatgattaaatttaaaattgtagaatttgctataatatattgtatgaccagctgatactaaattactatttaaaaaaatatccacacaaacacgagtactttcactctatatacaggacttaatggagcttattttttctacataatataacaagttaaaatttgatgtaaagttatgttttttataatgttaaatatagtttaaaagtaaaaaaaaaaaaaataacaataaaaaaattgatttcaatactaaagatcctcaatgcaagtcttattatttaagcaatggaaaattaaatgttatttcttaggtttaatttctctctcacgttcccatcggctgagttttcttctttcttcgtccagattagactccgccgaccctataattgggtttggttggggttttcatcgggagggttcgttgctagtttcgagggaaaactttgtcgatcatgctctacaggtttgatggtcttctcaacggtttcttcgtttcagtttcgatgagatcctagccacaactacaaaaaaaaatactaattttagtgac

SEQ ID NO: 181630 - DNA, 756 bp, Cannabis indica
ataaaactgtcgtatatagtgtgcaatataggtcactatttaaaatcgtcgcatatagtatataggctataattttaaaccgtagcttatagtatgagctacgggttaaaatctaaaaatatattcttcaccgatagttttttttctgacgaaacattggaaaaaaaaaaggtaaatttcatacatattttcactatattaattttttagatttatacaatttcatataaacaggtaaaatataaaatgttagtaaaaaaccttaatcaaaaaatatcacaatgtttgaaaaaaatactcatagttcttagcaaatcacctttactttcacgtaatctacccactgatcacgtaaaaaattaatttgactgtttgtgtatcgggtgttgaacccgctgatggcatgtaaaataaaagaaaaaattattaaattagtaacattgaaattatcaaaataaaagaaataaagtaattaaaaaacttaaaattacttaataattgatttaccttttccgttaatcaatgaattggatttagttcagtcatgaatttttcaatgaacttcattacgtagtatgcacattgtaacccatctgactgttgtggacataccttagttatccatgtaatggtacaagtccgtcggtttgtaattttattgtacacgttcattgaactacacaaaaagtaaaagttaaattagtgttgactgtggttttagccaatcgacgcagaatctgactaggatcattgctt

SEQ ID NO: 181631 - DNA, 519 bp, Cannabis indica
tttaaatcttaagatttagtggacaccacgtggtagccgtagagagatatgctcacttaaataactaaggagaatatctaatttttagcatagcattcacttgctttagggaaacgattaaaggaatcttaatttatatttaaccattgtacacgtggtggtggacatcgataaaatagtagacttgatcatggtagagtaagataggtgaaggattattagatagtaaatgtattcaaattttaaatttgaaattggtattatgcggttgcatgggaagtggggagctttgttatcacctcgactgattgtgtgaagattatcagaacagttaggatttaaaatgagtattagcatattattcaaaattcaaaccttaactaatggatacgacataagtaaggtgggggtggggtatgagaagcctataaatagaaccttaatattcattcatctcaacactcataagacctagactcaaaaaatctctctcttcattctgaactgtcatctctcaag

SEQ ID NO: 181632 - DNA, 728 bp, Cannabis indica
ctccaaaacccttgttgcacaatacgaaatccaagaaattccaatccactcgatcataggctttttcaaaatctaacttcaggaccagcccgcttttgcctttacttctgtagtcttctactgtttcattagcaatgagaaccgagtcaagaatttgtctaccttcaacaaaggcagattgagtttcatgtatggtcttctccaacacccctctaagtctgatggacagcattttagcaatcatcttatagacgcttgttataagactgattggtctgtaatcttttaccctacagctgtttagttttttgggatcaagcatatgaaggtctcgttgatgctgccttggatgattctttctttctcaaatgacttaacaacttccataaggtcttccttaattacctcccagtgagattgaaagacagccaagctgaaaccatctggtcctggggccttgcttccttcgcaactaacactgcctccttcacttcctctatctcaaagggcctctccagatccgtggcggagtcaagagggatcctttgccagtcaataccttctatgcttaagctccgtcttctttcagctttatacaggtttgtatagaaggacactatctcatcgactatatcttcttcactatcaactgattgaacctacctccttttcaagtcttgatatgtgttcctggcttttctggcattcaagaggttgtggaagaatct

SEQ ID NO: 181633 - DNA, 748 bp, Cannabis indica
caactaaatttacgttttttttaattcactcaaatcgatcatgtaaattgtaataagaaagaagtcttataatattatatgtataatatttatatattatacattaacgattactaaattattattattattattattattattatatatgagaaacccaatctttacaaatcttcatcttcctataatgtctacctctcttattaagtgtaaccctttctgttattgagttgtaagcaaactgtcttaactaccttcagttagtgcattagtctttagttagcctataaagactagttcttaatactcactgtaactagagtgaaatacttaagacttgtaaagtattgcacaatcaataaacagaggaattcagtaacttaggtggcgtttggttggaaggaatgaaaatatagaaatagaaaatgggaattggaataggaatggaataaaatttaaaatacataaaaaatttgataaaaaaattattaaattttttcaaatcttccattggaatgatcttttcttccatttcaaaatggaatagtcattccaacaaaatgatgaaaaggtcattccatctggtattgcactaattttaaatgcaaccaaacaaatgaatggaatgaaaattgttttctttccaatttcattacttccaaccaaacgccacgtgtgaggttgtgtctgggttctgtggaatgttttcgggttgtgttctagttggagtatctcttgctgtgtgtag

SEQ ID NO: 181634 - DNA, 863 bp, Cannabis indica
aataaagttaatgtgtataaatgttagtttaacagtgtgaagatatatatgtaaaaagtatctattttgtatttttttgtgtaaaaatttcaaaataaaattaataaggtgttttaacaatttacaagactttaccaagcgaaatatataaaataaaactaaacaacatattactatattcgaaactagagaaggtagaagggccccatttttctattatataataataaaagaagaagggcatattggcatcaagacattatttcatatagtatagagtataaatagttgaattgagataagattgtaatttaacaatactgaattgaagactttgtcaaatgtaagcaactcttctcttaagagtcaaaaccaaaaagctaacaagagaagataaataagttagctacattggtttcttagtattaatatattaatatattaatatattaattatttttttaggtggattgtcaaatcttatactatctttaacaaatttttacaaattgaaatagaaggtctttttgtaagagattgaaaaaccaacttaataccaattaatactaagtggagtaacttaatcctattttttttttaacaacttaatccttatattaagttataatgtttctcatatattctcaatatatatgggtactatatctaattcaccttcctcaagtttaagtataaaaatatgagtataataaattatctttaaaagaatataaggccgaatatgacatttaaaagaatactcacaaggctaaacttaaaaaatttagtgggtagtacacactcaaaaaaacttaagttgaaattttttttaaaaattaaacgttaaaagtaacgccgaaacc

SEQ ID NO: 181635 - DNA, 556 bp, Cannabis indica
attaactaactaactctaaagtattatttctagatggtattgagtaatagtggtgtgttgaatactcatttgaaaagcgccgaagagattaattaatatatacgaagtagagggtatcgattagaggatggtgcttgaggccttgacggatcgatcaacatctacgtacgaaacatatttgactaattaatatgttggctacttatattgacatataattagaggacttaataatgctatcaattaccaccgtcataataatcatactaataaattcaataattgatgtatatattattggatatataagatcatgataaccatgtatcacatttctacgtttttatgatgaaagtattatttaattacgcacatcattatacaatgtttatatactatatatgttttatgataattaattaatttatttcgtaataatctcttaccaaccccaagtttagaataattaagtcaaagacaaaaaaaaaactgaaaaaaccaaatcatcgaaataaattatatataagaatacaagatttataatatagctcaaacc

SEQ ID NO: 181636 - DNA, 507 bp, Cannabis indica
tatatatttgactccaatattattatgatgatgtcttatataataaataagcatgtacagaaacaaaaatgtgaacagttttcatcattattaattggcaaacttctttacaaaatatcacttttgttgtgttacactattagtacctaataacaatattatttttattataaggtgcttttagtgccatctttaacttttatagggtctacagtaaactttaataatatatattttatttgagatataaaatgaaattcaattaaatatttaaaccgtatttttaataaaaatatttttagactaatgttaaaaaaaaaactcttaagaaaagagatcaacaaaaggggctttgagcaaaggccagccgccctatcctaaaaaggatcctgattataatgcaaaattcacaatattattggagtaataaatattagcatttaaaaataaaaagaaaatagtatatatataaatattatataaaagaaaatagtatatacatatata

SEQ ID NO: 181637 - DNA, 623 bp, Cannabis indica
aaggggtatccgagtttttgtgcttatgggtgaggactcacacacttgatatcattaattttttaggtgtattcaacggtgctacagtgtagtagggttccgatgtgccgcaaacatcttagagaaagtgacctagtccgcgactcaatccagaactttcattcagtaacatcgttcctcttttattttttgctagcagattactcaacaattttaagacgttcattctactatgactactaccgatagattttctagttctactgctaacattaacaagccttttcactttaaacgttagagacagaagatgttgttttttctgaccatgaaaaaagttacgtttgtgcttaatgttttgaggactcacacacttgactcacttcgcgcgcgctctgctcgagctgggttgtgtggtgtgacactttattatttttacagaaaaattatttaataaaataattatttttattttttaatttaagagaaacatgtttaattgaaccaactcaaccaactaccccacgattcaaaaaacattcatcttgctgttatgatttttcaatcaattcatctatataatacgattgaattgatggaaaggatacatctttttcacatcg

SEQ ID NO: 181638 - DNA, 680 bp, Cannabis indica
ttccctgtgaaacaaaacccaaagttttcaccctttgtcatcattattgtcattacagaaaaatgtcaaccaaattttcacatttactatgatatattacactacaaatttttggtaagagtgaaatttcatagttggtgagagggtgtcggtggtctactgctacctctttcctattttctttcaaaagttgtcattttccaggaaaattacaattaactcttttttgtccatttgtggaaaaaaaaaccatgaaaaatctttccaaagtaacggatataattccgttaaaagactaattttaacactatacaagattctacatgtcatttacatgagagagcactttacaaaataacaatatcactctcaatatttttacaaaaaaatttaatcataataatatattaataataataacaaaagaagattataataaaaggtgtagtcaatcaattctttctttttccattgcatgttaccagcacatgaaataaaaaaacagaccaaatcatctttatttgaaaaacccttttcaccaaaatcattcacaccccactaaaaagctctgtttcaatgtcatagtcattcatttgtttgggcacataaatattcatattataccaaaaaaagaactaacagagcttgaaccaaaaaaaaaagtgacagttagagaattt

SEQ ID NO: 181639 - DNA, 626 bp, Cannabis indica
atctacgggggcctgcccctatagagtcctttaatggttataatgttgggaatattttaccaggatctagatttactaacaagtctgttgaattaacatcttaaatatgaatatctctaaaacaatgaaattaaacacataagagtttagaaaaccttatattggttgcagcggaatataatgactccttctgctcagatctctaacccttgttcctttctgtcgcagagtattatcaagatctgagcatgtgtttctttctgtcctttgagtttggttatcaccgtcttacccactatgattgagtacttggcttgctatgtgtgggcatgacactctatcactataggccaactatgaagaacaatgaaggaagcttgaaaactgtataaaaggtgtctctcatctactagttgtctgatagagaaaattaggcttgatttggttgtaggcaataattcagttgaatagttggatgagatgagagcatcatgttccttttatagtgtttcaactagggcttaggtttgaattatatggattaaaaaagaataaaatattgggcaaaaatcactagaatggttggccactaaaggaccactaactagttacaattttgtcacttt

SEQ ID NO: 181640 - DNA, 834 bp, Cannabis indica
atcgttttcaacttttatggctaaaaagagcgtggaagaaaacgatcttcttccggcgagtaaaagagttaaagcaacatcatggatcaataaggctgaagacgaggacagaatttcgaaactacctgatgcgattattctacacattctctcgtttcttcctagtaaggatttggttccgactagtcttctttcaaagcgttggaaactcatgtggtattcagtcccaacactctctttcttagatactaaacatgctagattgccatggcactatgataggttctgcgattatgtggacactagtttggaacgccgtaagagaggtatgttttttatgggtgattctgtcataactagttttaagcttcagattcatagctatgctagaagtattgctcatcgcatagataaatggtttgcttttgcggttcagaataaagtcaagaaaataagtttaagctttagcaaggaaaccgaatggaatcgcgatcttcgctgcttcgattattactactactgcttacctaaaacactagtagtaaacgcaatgcatttaactattttggagttgggtaaggtggagttgaattctcgttactcatttagttttccatgtttggaatcattgtcaatggatcttgttaggcttgctgataatgatgtgttagataagttgttgttaggttcccctttcacttgagaagtttcggttagattgttgtagtttgagaaactgatcatcagctcaatataaatagtttcagtctcaagttcttgcaaattcaacttactaaggatatagtggagcaaattagagtggcaaatctgtaa

SEQ ID NO: 181641 - DNA, 673 bp, Cannabis indica
ttgatttttttttttttttgatgcaataatatatttgattttgaaataataaaaaatacttaattcttttttttttttttttttttgaattactggcttttgaagaaagcaccaaaacacgaaacacaacgcacaaagtcggatcggagaagaccggccaagaacaaacacaaggtcccaaaggaccaaaaaccagaacacaacaaaaacgaaagaccacaaactaaccaaacttaagagaacagacctaaacaaagaaacttaaaaaaactaaagcaaacaaacagccatctgctcaagaagaaagcagggaactgtcaaaattggacagatcgatagtcccaaactggtttgtgtaaggttattattgtaaataatttcttaatttcaattttgaaaaaaccactcaaaaaaagaacacggacgagtattatgttgaatatacggtaggtggaatgttaatttttaataatggcttgtgtaaggttattattgtaaataatttcttaattatatatattaatgtaaagatccctttaataaactaagggaaggtttaggcccgtttggcacaattttgaaaaaattaaaaactattttttaaaaagggaaacttacaaaaatactgtttttttacctaaatgttttcaaaaatactggggtacggcaaact

SEQ ID NO: 181642 - DNA, 794 bp, Cannabis indica
aaacctattatttttttttataaagcaaccactttttttttagccagaaaaaaataatcctatgtgtacatattatcataccatgtaatttttatttgattttaattttattggtaaaaaatctacccaagatacaaactaaaggtcctacaatataattatcatatatatagaagtaatagttaaaaatgcaatattgtaaaatatgatttgtgagtgtgtcacatattttatcataaacacaaataaaaaatatatattaatagtacaaatacaatgttgtaaaatatgctaaattcaacactacaatagtacatacctaatttttgaatagtacctaagtaattctcaaaatttcattatctctattaaagttatatttaccctaatgtaatataagtttagtattcaactttattataatgttggattattaatttatcataaaccatgtcaaaaagtatatcaatattccatccatgaaagttacatatcatttttttttctatgcacatgagactatgagagaatattaattaattaattaattaattctttgatcttatgctaaaaatatttaattcaataaaataaaactacttctttccagctagtcttccacattcccaaatcaagagccatttaaatagtaggcctttaaataccattgctttgctcaaatctttcccattctcaaacccaaaactcttagtttctatctataaaaccttatatacttctcttcaattattttcttcatagtgtcaaaatcaataatggctcatagaacatta

SEQ ID NO: 181643 - DNA, 740 bp, Cannabis indica
attttctttgtacgagccatcatcctatggctgggtacaaggtcagaagagtttctttcactagaaggaggactaccatgaagacgaggatgaacctcgtgcagaagttggagcaaatcctggtcgatctgatgcccgagttcctaagattcacttgggttcatctacaaaagaaaacacacaagatgagtgttggacggagtatcaaacgagaaacaagcaaatatgccgaccaggagtactcaacagattaaagaacgactatgtttaaagaaaagtcaaaactcaagaagttagaaagttttcttgagtaagggcaaaaacgttcatgaagcttagaataagaaagatggaagacacacataatgcggttcaaaaataagctctacggttgaaagcccacatgaagacatgggaaagaagagttgcagaagtttctaaccctagggtttcctaagcgttctttctacaacatagttgcattcaaagcgtaaacatgcaaagaaaagcataaaggaaatccaaaacttactcaaagatttgaatgtccaagttccagcataccatgaatcgtctgaaggcacttcgacaactttgaagccagaaaactctcttttcgctctggagtatacttaacaacgaagggttataaaatgatttatatgccagtacgatgagtatttataggcaaaggggtaactgtatcaaaaggaacctgagacgcctcgacttcccgcctc

SEQ ID NO: 181644 - DNA, 867 bp, Cannabis indica
cttgtcctgccagcttcaccaacttatttttggaatatgatttggctttacttttaatcgagacctgtttgcgagtgcatgtcgccccctctttctttctattttcacttccagagcatccatgtgagaaaatgatggaaaatattttactaggatctagatttgctaacaagtatgtttattaacatcctaaatataaatttctattacaatgaaatttaaacacatataaagttgagaaaccttacattgactgcaacggaatatatgactcctcccacttagatctctaccccttgttcctttatgtcgtagagtattatcaagatctgggtcagatactccttcaggtcgttggattcttcacagtcttacacactatgattgagtactagacttgctatgggtgggcatgcactcattcactataggctcgaaatttatgaagaacaattaaggagattcaaaatagaagaaagaagaaggaggtctcaatcactctttagttgtctgacaaaatgtaaactagattatgagagattaggttattagataataagaccatcgtattccttttataaaatttcacttaaggttaggactaaattatatggaataaaaacattataatataatggtaaattatacactaagtggctggccatatagattggccccactagttataatttttgccattttttcaaccacttatcttttatttcataaatgccatattttctaatttaaatcatataaatgcaaaaaaatatttattaataattataaataattatcaaataaaattttcatttaacttatttattaactacctgtccctagcatggacgcgggcttctataagag

SEQ ID NO: 181645 - DNA, 533 bp, Cannabis indica
tgattatcaaagtagattaattagtagcatgatctatatctattttagaattttgcatttggttttgttttgctgagtgtaatactatcccattgtgttggaatgcagaaatatactatgtgggaggaaattcgtttgtctcaaatgaaagatgtatcatcatcacagctcttgcttgccaaaacgtgacttttatcgtccacgaccaacccagctttcatttttatctattattttaagctcgtatcaagaaaaacagaactttggaaaaattagtatatttttgtagacactaacttataatttgcatatactatatagtagtccactgtaaagaatgaggctattcttttaaacgaaaagccctctgtcctctcattgaagttaatttgaactttcataatttgactaagcgtttttaaatgatgataatacaatatcatttaaagtcatttaaagtcaatttttccctgtaatcaatcatctcctggagtgctaccacagaaacaatacagcatcagcaaacacccaac

SEQ ID NO: 181646 - DNA, 793 bp, Cannabis indica
attgaatgatcactgtattgtgtatatgcaacagtaaaacttcgaagtcgatacagtaatccactaagtatttaatggtaatatctaactaacataccttaaatttgtaaagaaaagtaaacttaaagggattttgcaacaaaaaaaaaaataattaaaaggattaagtatataaaaattaaaacataagaaaattttgccgaaattcattctttttttttttcttaattagttatctttgtgaattaagtatctagtaactacttttagacgtttttctttattgagcaattgaatagggttctttgtatggaataataaaaaaaaaaatacaaattacaatattttgaaaatctattacttggcttaactcaattgtaatattatctacctgttaaggggtgtgcagaaagtcatccaatccaattctaaccgaccgatccaatagaatcggatatccaatcataattggatcggattggatgcaaattttaaaaatccaatcggatcggattggatattggatgagacatccgatccaatggataaccgatccaatccaatccaatatcatccaatgtccatccaatcatatttaatatttataattttatatatttaattattttatttaatattttatatattattttattatttattaggttttaaattatgttttttcatatatatatttttttttaatgaaattagcctaaatagtggttaaaatggattggattcatccatgggattcattggatggatccaatccaatctaataaaaaccaag

SEQ ID NO: 181647 - DNA, 997 bp, Cannabis indica
gtttaaaatcttgaaaatgaaaaaaaaaatcactttcaattttttaaacaatattttctttaatcaatattttagactctcatcccaacttagcccttgacacccgagcccaaaccccagccccagccctaacccggactcgaaccccagaccccagaccccagaccccagacccagaccctagacctaaaccttgactcagacccaggcccggacttgaacctaaacccaaacctcaaattcggccatggacttaatcgagacccgaacttaggcctgaacctgaaccccgaccccggccttggactcagactcgaccttaaacccaaacctcgaccctggcccgaaccccagaccctaagccgaacctggaccctgaattcgaacccgaacttagccccagactcggaccccaaccccgacccctacctggcctgggttctaaaccccactgtacccgaatcccggctcccagacatggaacccccgtccccaaccctgactcggacatgacttaaaaaaattaaaaaaataaaaataaaatttacaaaacatacttttgcttctctatttttaaaattgaagaataaaagtggttgtagaattcatttttattttcaaaaataaatttcatttgaggtatggattcttttagatgtgtattaactactggaagttgcataagctgacgattaagaacaaatatccatagccaaaaattgatgacttcttcaactagcttcagggaaagattgcaatttagattagacatggccattatgaattcttggtgatgttatttggtttgacaaatgctttgtcacccttttatggatcttatcaacagtgctttcaagaattttctcgatagctgtgtcatagtgtttatcgacatccttgtaaactctcaaacaaaagcaaaacaagaacaatatatttgaatagtttgggaatgacttagagatcacaagctgtatgctaaattcaagaaatgtga

SEQ ID NO: 181648 - DNA, 1106 bp, Cannabis indica
acggaaggagtcataatattccgctgcacccaatgtaaggtttctaatactttatatgtgtttatttcataatcattttagaagttcatatttagggtgttaatcaacatacttgtgagtagatctaagatcctggtaaaataatttccaacaagaaatcggttatgaattcacaagaatcttaccataaaagaaaaaatattttgtcaactaacttgccaaaaaaagactttacaagattaaattcaagttctttaaaattagttgaagaccataaaagaccatgatagtcgcataatgtaagttgaaggtcgtttatggtcgttcagagcaaatttaagttctttaaaatttgttgaagaacataaaagaccacgatggtcgcataatgtaaatttaaggtcattcatggtcgttcagagaaaatttcaagttctttaaagttgttgaagaacataaaagaccatgatggttgcatggtataaattcaaggtcttttatggtcgttcagagtagagtcaagttctttaaagtttgttgaagaatataaaagaccatgatgatcgcatagtgtaaattcaaggtcatttatggttgttcagagcaaattcaagtttatccacaaaattacaaaaattaaaataatgaacaaggacatggttaattaaggatctgcactacccacatataattgaactgcatctaccttcctgaatgttactatgttgtcgtcgttgagaaatattgtagctgactcgttgcacttaccatcaatgtgcatttctattgtcttaagcatgaatacaccataatctctactataaagacaaatttaactacgttagcattaatattaacaatttagatttaaaggcgaatatattaaataaaacttacgttctcttgttcaaaagaacagtatttgtaggagttacttttatactcatgagatgactacactgataatggaggctcccaatatggcaactatttttaagtaaaaaaggaaaatatgttgcaagtggctccatagattttttcgagtcataaatcaatattgtccagctatgtctgtcaactaccactaacatccagtgtgtatcatc

SEQ ID NO: 181649 - DNA, 917 bp, Cannabis indica
aatggcgatttgttgtattgtttactcattcctttattgcacatacccgagagaccgcgtatcgagctagaatggatgctttggtagagtcaaaattgcctcgacaagatgaagatgaagatgaagatgaagaggaagacaactctctttcgagagcggaatcaagtagaatttttgttgcaaaagataagggatgtgtggttgaagatggcattggtcatgaattagatgataatgagaagtattttctttctcataagctaccacttctttcaaagaaagtataagaaagaaagaagttgaaataaggtttgtatttttcatttgtgtacatttgatgatgatcaagatcaacaattcaacatttgattatgatatacataacaaataaattcaatgctttaatattgtaattaaatttgtgatgtgcataaatttgtttgttattgtgttctaatatatatttgtaaatgttgatataaaatttaatatgtgatttagtgtttgtgtaataatttttaaaaaaatataaaataataataatgtaaaagtaaatataaaatttaataataaaataatagtattattatttgacactacgttttatgattggttagtgatatttttaaaagttattgtcttaagttatatgagacctaatatttaattacaccaatatcagtatgattgtgttagacactagtggtaccttttagcatttttcaaaaataataataataatgtaagtcatttaatgcaaaacgagcatgttaactaaaatttaataataaaatattaaaaatgacataatcgtacgggtaaaagcataatatttattatgatgcatattttacatcatgttatattgtgatttaaatttggattactttctgttatgtgataaatttgtatcacaa

SEQ ID NO: 181650 - DNA, 683 bp, Cannabis indica
tatatatatatatgttaagttttacatttggatgatattgtacactttggtctcatatataatttttatctacttttcaatgtgggatttaagtgataccccaacaaatctctctcaaactaaagactagagtctcccctccagcaaaatcattttatgccactttataacttcagaaactcaatttagtacatgttaaaatttaaatgaaaaattactaattagtcaaactgtaaagtacattccatttattattattattattttaatttttacataccgaaatatttcaatgaaaaaaaagaataaaagaaaatatatttggttgggtatcagtctctcacacactcaacttaaccatagagaaacctctttgaagaccggaacaagcatctccttgttcgagttctggcggcatcttcttctcaaaggtgacattttcaggtacccatctgctccattagcttccttatcgtcttggtcataatagggtttcattgcatcaattacactgaagtcttgtcataatatgttactgtaattagttttcgaaagattcattttcaggtgtttatttctgctctagaatggtttcgtgatcgtaatttactattttcgtaaatggtgctccgattttgaatgtgaacaagtatcttatttatttattttctctgtgctgatct

SEQ ID NO: 181651 - DNA, 533 bp, Cannabis indica
actatttaccctgaataaaaaaatcttaggtaaaattcaagatccaagcaaattagcctaatattaaatttggagaactatttttcttattcatttttttcttacttatttttctcataagcgattttcttggtaaaatgcaagatccaaacaaagccttgggacctctcagcattgtttctgttttgtgtttttaaaattacgcgttttagaaaaaagaaaaacaattttttttgttagtaaaaaaaactagtgtttttatttgatgttttaaataataatttttttagttttttctttgaaaagaaaatagctaattaataggatattacataatatatattcaacagctaattaaagtcatggctataaaatatttttatatggtcaaaactttaaaagatatgctctgaagatctctcacgtctctttacaatatgaggaatccattgaacacctcaaaggcttagctgttgcccgcaatgctctatcagctacacatcttttatttgcagataatagtttactttttt

SEQ ID NO: 181652 - DNA, 741 bp, Cannabis indica
agttagtcgtagaccatatttttgttttttcatatcgatcaagatgcagtatatcttgtatcaatattattttttttaaaaaaaacttaatttagtgtgtgaatgggacgtgaattattaatgcattttataatataaatattattattttatgatatatatttgatttttgtttctttatattacttaatttataaaaaatttagagaagtaattaaatttggcatatataattaagtaaatgctctcaaagttggattaatctaactgatgtgaaaatattataggcacatgggtctctatcattatatgaatgtagacgttctcatggaagttatgcatttctttggctaatattataatatataggaaaaaatatatatattggatactaaaaaagaattggaaaacaattactctcaatttattattagttctaaattaaagtctatattaagattttcattcattgatataccaaactgtgagaatatttacatagctagctatgatacacatatataacttttcttttttagttaatattatacatatatatgatcttgctttgctaataaagatgtatttactttttgtataagacctaaggggctgaaagttaaaccccatatgctatttattaatttatccactaatctatttatttatttattttttttaaaaaaaaagacatgcatacaatacaaatattctagcttcatacatagagaaaacatctaa

SEQ ID NO: 181653 - DNA, 525 bp, Cannabis indica
aaaaatatttttttttgagtctctggattgagtgggccttaagtacgggcttagtccgtcttgattcaaacccaaccataatggtaataaacttatataatatatttttgaagtcttcaagaattttgatttttttttaaaaaaaaaaattgataataataaaccatgtaaccccaaatcttagctttaataacattaacattcacaatttatgtttagtaaaacaaagggttggaggatttaagaatcaaatgatgatcttaatttaaaactttgtaaatatagaccaaataaatattgctcacatgtaaaataggatatttgcagtataaatatattttatgtttttaaattttatatatttatatactatatgttttttttaacgaattaaatcccataagttagttttttattaattctgtcactaagtgttgactagactcaacaatgctaatgtaaaatatattattagtccaccttatatattttacattaaacgttataattaaatcatttttaaat

SEQ ID NO: 181654 - DNA, 835 bp, Cannabis indica
aatataacacatcagatgttctctgtaattgataactttcaataatggaaataaaaataaataaattgtagtttttacattaaagaattttatatgtgacaatatttatataaaatttcatattttattaatatttactatatattaattttttttctttatttcataagtaatttattgttgggtcgaaactcaaaattcataactcccaattttgaaattttattttatgatattaaaattttattctctaattctctgaatatctccgcatgtctaagatagacaataaattttttataaatgaaaaaaaattatccactataactttcataaatttttataaatgaaagaaaattatcaactaacttttattttaacctggtttccctttaattttttttttttacagtatatataaaaatattaaaatttaccttatttgatttgaaaacccagtgatgtaagtaaaatacattcatgttataattttattataattagctaaagatcttgtactgttaataaataaattaattaatattcattcaatacattttatataaaaaaatgttaaaatgagatcttgttatgttgattgggtttttttttttaaataataaaaagggaacttgtttttgagtttgagtggcctggatttttctaaatccatcttatgaaaattgatgagttatacatataaatatatatgataaaatctatagcatgaccataaaaaaagacaaaaaaaacaattaaaattaaatattactgcaaattaggccggtacttacctacaaattagaaagaaaaaagaagaaaaacaaaagaaaat

SEQ ID NO: 181655 - DNA, 683 bp, Cannabis indica
actttttattgttttttttttaccactaccacatcaacatacaaaaataataataaaaaaacacaaaatatcagtaataaaacagctgattaggattttcccttctaaattttgacatgtatcaaatcatgtcctctaaacttttttagccgttaaaaattccccatgaactattgagattgttagatttaagaatttttgtctaatttcattcaattttactgttttagtgattgtttatttactaaatcatgctccccaaattttgatatctacaaaatcatgtccctcaaactttgatatgtactaaatcatgccccctgaactttcatctatgttaaattttttttaataaaattagacaaaagtttttaaatctaacaatctcaatagttcagtaagaattttaaccaccttaagagttcaggagacataattcctaattagcctaaaaaacattcaaagaaaatggctgccacctagattaataggaatttgtacagaattagcctcattaaaaaattgtaagtttggtggaattttttttttttaaaaaaataggttaagatataaattagtcatctcttattaaagtctttcgtaggctcgggaggagttgcatggatgtagggtgtgtaatggagctccggttagtttttctacatgctctttgcggatgatag

SEQ ID NO: 181656 - DNA, 652 bp, Cannabis indica
aatttcaatccacttttccctcctagtaggcaacaaacacagaagaagtacgtacaaaataaatatgttggagggcataacggtcccacattatttggttcttcctttttaaggtcccaaaattctttatttttgtttactttttattcgaatttattgagataccacaatatattccatcttatttagaacttatataggctcggggatcccaattacaactatcgatatccatagaattctaaattccaccaaaggtgcaataactcacacggacaacatttcttttttctaaaaaaaaaaaaaaaacgacataaaatatatattaatttttttttttgcttttatatgcataaattgttacacaaccttattttacttgcggaactccaattttttaatatgctttttttaattttatttattaatagttctctcgtaatacaataacaagaaattagttcaattttcagagactaaaagttatagcagaccacttttcgaaaaaattggctttatattaaataagaaaccacacaaaagacttgtgtggtggcctgagtttcttaattgtatccgattgaatcgattctattttttttgtatgatattaatttttatggtatattttgtgttattattaatttattca

SEQ ID NO: 181657 - DNA, 552 bp, Cannabis indica
atcaacatttgagaagacggcagacaagatcgaaattcgtcgattagaagatctccacaaatgcctaaatgagggggagggagttagtttacactatactctttttcctttgaccaagttttcagcaagatttttaataaggcagttattatggacatccaagggggagtgttataaatattaataattatgtggatgtccaaatcttttatttattaccattaattgtaatcaacattcctcttttccttagtttccctttttcttagtttcttaatatctcactcttgtatttgtataaataggggttcaccccattggaataaacaactcagaaattctcattcactttctctttctctcttcatcttcttcttctttcttctcatctactttatattattttatattattttataacattttattattattattattattttcctgttgtattttttgtgcgacattaagcgatattattttgtgcttgtgcgattattgtgcgacattatttttttcttattgccacattatgcgattattgttgcg

SEQ ID NO: 181658 - DNA, 1305 bp, Cannabis indica
gtgacacacgtccaaagcaccgtcagtacaaccagtacgatctaacatcgataaaggccacatggaaaatatgccacctaccaatccaacggtgaggcttcatccttatgaaattccatcaacgacgatctttgcgagggaatcgacctataaaaaccctcgaagacacacaaggcaggggatccgatctgaacctcgacttcctctcctttaactcgcctttcgactctccaccttaagatcgaaggcaaatcctttgtaaacacattattataaccctactattaactctaaaatattcctactaagcttcctcttcttcaagaggaacatgtagctaggtcagagtaaagtccattctttttgtatttgtatcaacattcaccggccaaagaacctaataaaatagacttgtaaattaaggataattaacgcctgaactacgtaaaaaatctgttgtctatattcttacgatttgtgtttttattactttcttaagctcaataattattcagttactgaaaaactcagtaaacattattattattgctttcaatacgttttactttgtgtttaatctatacttcatacaactgaacactaaagtttaatttaaatatattttccaaatattactatacaaaaagactatttatctttgtttcatcttttacttttaaaactcataataaaaaaacctaatataaaacatagtatatttgcatcataacctagtatatatatagggttgaatattaattagatagagtgttgttctgtaccataaatagtaatttggctttggaccaaattataattattcattcaaatggacgacttgccttgtccatatatatcttttttcatgatgagagaccacatgaagttattagttattaatttgaatgagatatttcaccaaataaatctctaactgtattttataaggaaaatttgatattatatgcttaaaattaatttatccactaaaaatatgctagcatattttgcatcatgcaaaatatacttatattgtttttctcatccaattttacccctaaataaataaaaaccaaacatccatctctctctctctaggatactcacaccacacacacgcacacactctaccagttggacgacccatcaccggagctagtgttgttcggccgccttacatttcaaaaaaaacttctctcgttttttgctattttttcttctggtttacctagtttttttgcgatattttacgatatttaacgatgtatttgcaatgatagaacaaatctgaggtcagcgatgaag

SEQ ID NO: 181659 - DNA, 570 bp, Cannabis indica
aatatacattttatatatatacacacaaatatatatattttttacatatacatatacacatatgtatacacacttatatactttttacatacaattacatatacacatatatactttttacatatatatatatatacatatacacatatttatacaaatacacacatatatatatacatttacatatatatacaaatacacatatataaactattatacacatttatatacacatatacacacaaatttataaaaatacacataaaactatataaaattacacacatctataaaactaaaaaaactaaacacaatataaactaaaaaactaattaaacacaaataaactataattattatatttacacaaataaaaaaaataaaaacaaaaataaaaataaaagaaaatataggttaccggagaggcggtggtgctcgtcggaatcccgaaaaatagtttttttggtaaaaaaaatggaaaaaaaaagaaggaaaaagagagaaacaaagtttaggaggttgaaaatggagttttgggaggttgaaaatggggtttgatggtgaagaaac

SEQ ID NO: 181660 - DNA, 1161 bp, Cannabis indica
aaagagtggtgtaaacaagaatagggtgtacaattgtcctccccaagatgtctaataattattatgtatgatttttatgaaatgtataatattggcaaaacaacaaaaggacttcatatgaaatatatgtataaatatatataatggtgattgttctctatcacttggattttcctgaaagaatttcaaccacgtcgatccctatcaaatttccaacttgttcttctagatttttaaaaattaataaaataaaataaaaaatctaaccctttcatgacaatgattatttatttatttatttatttatttattttaagatgtatattttttttcaatctaataatcatattgtactgtttttcatcatattatacttcgacctgaatttttatgtatcttttgcttctcattattgtatttaataatgtattcttgaaattaacatatgtactcatatactgacgaaaatatttgaaagaaaaaacaattaatataaaattaaattatatttttttgatgttagtttgacatcaaatttaagttttaccgttagtagtgccctaaattaaaaattattcaatcaacctaattactgatcttgttattgggggtgaaccaaatgaaatttctaaatggtacatttaaagatttatagtattactattagaaatttgttagtttgtaaagttaattattatcaattgggtgtaattattagtaaatacactttttctctacaaaagtattttgtcaaattcaaaattccctttctccaattaaaataaaaaaaaaaaagtcaaattaaaacaatatagcttctcctttcgaacataataaaaaatagatatatttatgtatattctgcaagtgcatatatatatatatatatttatatatatatatatatatatatacatgatgagcccacattaacagttgtaaaaactatatattagaaaggtcagagtcagacagaattatttattagttgaaaataataaccaactttttcttaatttagtataccaaattgaccatttgtcgaatgattcaaatttggattaataaataatatcaaaacatgttgcccttacactaaatacaaatgcaaaaattaaagcactgtgtttcctcaacgttatcaaaaataaaatatatata

SEQ ID NO: 181661 - DNA, 606 bp, Cannabis indica
aagtttgtacgttacacgtataagtacaatagaaactcatgttattgtgaacgagaagttcacaaaccataaaaattcatttgttatttggcatgattgattaggtcatcccggttcaatcatgatgcttagaataatagagaactcacatggtcatccattgaagagccagaagattctattattcagtgagttctcatgtgctgcttgttctcaaggaaagttaatcattaagtcatcaccggtaaattatttatagaaaaatttattactagaattatatttttttaaaaaaaataattatttgattttttatttttattaataaggtgctagttgagtgccacatgctcaatatgtgcttcccaagaagtcccatatcacttttatttatttttttagaaaagacaaaattaagaaaacacttttttaatttatatattgtacatgctattccataataaatagtttaaaccttcaaaaatcaacataataaatgactaataaaatgtcactatcctatgaagacaaaaagtagttcctatatatataacatcaatgatcctaatgttaaacctactatactatcgtcaagtggctaatttt

SEQ ID NO: 181662 - DNA, 795 bp, Cannabis indica
aggtataataattaaaaaaaactcttaatttttatatataattatgtgtttaaaataattttaatattgtattgaattaatattgtcctaaatctattttagaattttaatcctatgcatgccctgtacctgttagggtaattttttcattaaaaaaaggtcctagtaaatctaaattcagtattagaattgattttgacaattaaattcatttgtgattttagaaaaaaaaaaacaattaagaacctttattattctccaactttttgatttggttctgatcatgcctgaaagttaaaaatccaataattgtgtcaatttacattgttcattttggttacaatcttcttcttctttgatctaccaatttggttagactatttattgggtgtttctgcttttcaacaattttgtttgtctctaataatgagaatattttcctatgaacattaagaaaatcttatccaattctcaagtcaattcaacaaaaactataacttttgatcttaaactaataatgccttaatagttgcttattataaagaacacataacatataatttatagacacaaatggaatcacagtttcaaattgaaacataatgcacattgtgaacttagcataacagagctcatttagtaccaaactaagactaacaaaagtatataaatatgtacttatacacttcagtttgccaacaccattgattgaactgaacaactattccctgcagaagaatcaaacattcaacttaaaataaggtactaagatagagagttcagtaaagatcatta

SEQ ID NO: 181663 - DNA, 561 bp, Cannabis indica
catttgatgtggtaaacaaacctttgagcatgcaaaatcataactcggattcaagactctcagatgattcggcgaaacaggctagttctttggcaccctcatcgccgtcttctgaagcttcagaaatccaatctggttgaggttctattttttgtttttttttttatcttcctgttattttcctttttttggtgcatgtccttcattggattagtaatttgaaggaaacatcatctatcacatgtaccttctgtcccccaatttcacctgcctgaggagtgaatgaataggttgtttgaaatcagtggggtgatagaaggcaattttttgaggtgaataatacgcaggtgggaagttgtaagatctctttttttttttcaacctttctctttgggattttgcttaccacttatttattatttctttttttttttttttttttgtaaaaagtattttctaaaatggataaaacacatacttcatatatgccgagtccagtttgctaaatttattttgattgctgactgaatggatttgagtattcaaaatatttatatatat

SEQ ID NO: 181664 - DNA, 666 bp, Cannabis indica
gattaatgacaacactaaacaaaacaacattctcatatgaaaatcatttttcaatggtagaacatcatcatctctaataactacacatggttatagtaagctttccatattctcataataataatacaaagaacactcacactacttttgaaatagaaacagtagaattttcccattagtcccaattgctaaaatatatattattattaaaaaaagtaataaacctatgtagcgaactctaaagaattttttaaaaaaattatcatgcaatttcttatataaatacaaaagtacccttttttttaaatgtacattatagaagaaaaattagaaattgaacaatccttacacaatatagaaatttgaaattatatatatgaatattaattgaataataaaattatatgatataattttaatatttttatgtataatttttttaaaaaaaaataaatgtaaatctacatagattactctaaagatttttttaaaaaatatcatcatacaattttatataaaacaattttatataaaagaaagtatataaaaaatatacttcaaaacaaatgttaatcaccatatctcatttgtagtcaccactacattaaaatcgatatcatcaccatactcacatgtagtcatcaaaaatatatattgttatatatt

SEQ ID NO: 181665 - DNA, 859 bp, Cannabis indica
tgtgtgcctttgggggctgactatatagtcagatcaacagttgaaatatatatgaccaaaagccacaaatccaattctcacctgagcttcttgataggtccgagcaaacgaaaagatcaagctctatatacctttgaaaacaagaagcgtttggtcatgaacccaataattttgacgatactaaatgcgccaaagaagaactagaagatataagcccaatcaataataataataagaaaacctaatttataagaatgcccctcccccaattagcaatgatcaaagaaacccattgatcttggtttattattgtttattttcagaaccgattgatcgtaattattatttgttaattgaattgaagtagattaatgtgattatttgtttgaacattcaatggtggtggtacatatgtagaccttttcaattctaattaaatatgaatttctaacttaacctcaagtgaccataggaaggtgtgttggaggtcctgggttcgagtcctaggttatgtattgtgtaatatataaacgcttgaataataaaaaaaaaaaaaaaaaaaaaaaaaattaccaacttaattgccctaattggcgcgggaaattaatattgtacgtaaattgcattattgcatattataccaataatagagtacttacgtaactatacctttcagcttttatgatttctttctcctcagaaagaacaaaaaaaaaaaaaaaaagacaagacatatatagtgcaagtcaaacaaacaagtagcagaataaataaagttacagcaaaaatacaaaaaccacaaaaaggagcaattgaaaattaaaataaataaataaggatgtcatcatcaattaatatg

SEQ ID NO: 181666 - DNA, 799 bp, Cannabis indica
attattggagattcttcaattttataatcgttctaatatttttactcataatttggttaaacttactttaactcttgacattactttgattatccctttttgttttgagtccttgtgactcatattttggcaatggttgtttgatgagaatttcatacttttcaactaaaaaaaaaaatggagctaatattctatatgattgtaaaagtagaaaaatatgtaaaaccacaatatttattgtcgaagaaatttggacaacaccaaaaaataaataaataacaaatatttaacagaaaacaacgagtactcaacctagaacagcgagtatttgaacaagactacccagacaatagaacgaaaatggaaaagtataatgaacacaaatatgtatagtagttcagtcagatcacggtctgcttaatctactgttgtaaattatttctgtctcgtttattcatgttggatcactcctttatatataaaacaagactgtccatttaattacacataactgatcgattataaaaccgttttacaattaatattgacattaaattaaaataaacgtaataagaataaatggataacaattttaaatgtgtttcaataagtatagcaacgtatgcgacctgtagggtgcgagttgcatgttcatattctcacacaagctcgcaggctttgtattggagaacattgtcccacatggattaaatgtaatagtattgagccatatataaagaacatgggctactccactcattgccaattagtttttgagatggaaacccccatgattctc

SEQ ID NO: 181667 - DNA, 929 bp, Cannabis indica
ataatatatatgtaataaaaaaatgtctctatataattaaaacacaaataaatcataatacaataaaaataaaatgacttataatgatataatttttttacataattaagaagcattcatttttttatttattattataataaaattcaaactttaatatagtaaaatatacattttcaacatgatttcattatttgaagccttttataataactgaaaattgtatatataaacaatttttataatttgtttgggtattaattgtataagaaaaatattaatttgagtgtacgtattttttttttttttttggtaaaaagtatgttagaaatttatacgtaataattaatttcataatttttcctaaaaggaagattatgaacatttttattaaatgataggtacatcattcttttttagtgttatgtacattagttttctgtacaaattaaattacttattattattattattaatatttataattgttttttaataataagttaacttattattaataatgacagactcagaatttaaagtgagggagtgtaatttttttttaataggaggaaaagtaaacttaaaaaaaaattattagtggaatttgaacctttacctctaacaattatgtaacttatcttaaccattacaccaagcctactattatgtttataaatataatcttttattacaaatatatgttgtaactaaataaaatatatatacattttttttcctatatttttttactgtcctcacttgctacaatgtgggtccgctcctaattattaatataaattattttaattgatagattattttgtgtctacagttaagaaaaaaagaggactattaaaaatatgtacaaaagaacttactttaatgactgtgtatatccaagaaacatatcaattttttttaaaaat

SEQ ID NO: 181668 - DNA, 1367 bp, Cannabis indica
taacaaatacatatgaaatgagttgagtgcattaatgaagatatattattgagaaaagattatgaagtgttgttcttaaatgttggtcttttttgagtaactaaaaggattaatcacgagaaagcaaagtaaaatttatgccagaattttacaagtttcatttgcattagaaacacattccaaccaacaagtgtttgggttgggtaaagtgtaactcttactaatgaaatcaaaatattaattatagtaaccgattttgaaacttaatcaacatcaatcgattacgaaattacagattaccctagatcatgagtaacaattcaattaaaaagtacctctaactaccttttaaactcgcatccctcgattcaagactccagatccccttgagtatgacagttgaatcctttcactagcaagattcaaactcccttcgaattggttcaaatctcacactagctttgtatgagaacctcccctgcaacaatggtgaatcggtaacaaagagaagaaagaaagaaaacaataagagaaataacagaatttattttctcgtgtaacaaactattaaaattaaaaaaaaaaaggttcggtagttaacgaacaatattaaactatttacataaaccctaatcactaacaacatactaaacatatttaacatgtttatcaacctaagagaggtgacatatacttagtaaactacaataaacaagggatgatattagacactctcagtagttcaaacataattatataacaaaataaccaaacaaagactaaacacctgaacctacatatgaaacaatttaaccatattttgacattaaataatgtgatcgatacaaattatactaactaacaattttgtggtgtataaaaaattacatatattacattgtatggcatgatttttattattatttttttaaggtatagcatgaaacatcaactcaaaataaattttacaatttggtcataaataactaattcttatacgatatcaaacatattgttttgctcagcataaaaatgaggagcaaattttggttatttgttccatagtaataagattattctttcaagttcattgttaaaaaaaaaataataaataagattattctataactctttctctataaattatttatatttctaaaataagattataaataaaataattaaaattgctatctcacttttctactcactcttatttctaaattatagtgtcatagtgagcaaaaattgtaaatacaatgcttattttattgcaaagtaattaatcttgactctaacttttaagtagaatattatcttttaaccgttatgaaaatattatatttcgtcgattttcattattttta

SEQ ID NO: 181669 - DNA, 774 bp, Cannabis indica
tctctcgaactttgacatgcaacaaatcatgcccctaaactatcgtccatgttaaattttttttttactaaaagtagacaaaaataacaatctcaatagaaatttttaatagccttaaacattcaaaagtataatttagtatatatcaaaattcgagaaacaaaactaaatatttagaagaacaagacaaaaccaaataaaattacttgttcatattagaagaaaataaaaaagtagcacttactaaatttttgttaaagactgttttcatgggattgaattacaacttaattatttttaaaaaatataatttaagaagtaattaattaattacctcgtggccattgctgcctgaatctcttctaatatgttttctaagtttctttccaaatcttctaacagagctagctcttagcatatcatgctcagttgttcttcttattggaattgttccttctgggcatgattctcctgataaactccataactgataattttcattttctgactccatatcattaaaatgatgatctttttgagtttttggtctatctggtggatcctgaaatttatacattcaaacaatttatatacatatattgaaatttaattaaacactgaatatttattattactatttaatttaccaatggcttttgtcctttcaacttgaggatggtcaaaagctggttgttgtatgagacaaaacacaaatctataatatcaccatctggactctgaaaatcatcaaaattcagtatttattattattat

SEQ ID NO: 181670 - DNA, 716 bp, Cannabis indica
tgcctatataactaaaattcttggttttgggtgacttttaatttttatttaataaaataataaaatattatttatatataataaaataataataaaacaaatctcattaatatttgaactgatatttgggtgacttttaatttttatttaataaaataataaaatattatttatatataataaaataataataaaacaaattccattaatatttgaactgatatttgatgctaaatattcgagaatcacaacacatttaaaaaaaaaaaacaacccgggatttgatactctgagactctcaattaaaaaaagaaaaaaaaagtaatatgctcatcaaatttgtatttatttttaaacatggtgaaaaaatgaattatctttcatattattcaacagagtaaaacaagttttatattgatttactattcaacaaccttgtcaagaattcttgtaagttgtaaccacaaaattgccaggtcaaacccagagccagccaaagggtggggcagccggggcctcggccccaggccccacaattttggaggccccgaaaaaattaaaattaaatatatgtacatataaaaacgtaataatatataaatatttaacttcaacaaaaacaatgaaaaacaatgtagcacaaatggtaagtaggagtctttattggtacttgatgttctaaggttctaatcttccctcactacttttattacttt

SEQ ID NO: 181671 - DNA, 974 bp, Cannabis indica
acttataaatttaagatgtagacatatacaaatagcgcaggaacctttttgaatctgaataattcatcgtctgaccgaagaacttactttgtcaaaccataaactgctaaagtcagcgagcgaaatgagacaaaactactctcgaaaatttagacaataaaacagtaacttcttcaaacagtacacccaaaaagctagaactttaacttatatcactgaatactattaggccaactcaataacatatcaagaatagtccccaaaacatctacaaaacaaaataaaataaaaatgaattaattcccaaaccataaaaaatatattaaaaaaagtcttctttgattatgattacaacacatatattgatatttcttcacatctaattaccctaataattaattacaataataattgttctttccctctatgcagctgtaatgaaagaaaatcagactataagattgtacttttttttgctaagttttaacatgatccttttaaaaaaaaaacacaaaagggttgaataaatagtcaaaacttttaataaaagtgactttttaagatgctttcccactgtcaatttatcatataaatattacataaagtcttaccttatatccattacttcaatctttcaatgagacaataataattcatattgttttcttattcttctcacttggaccttttttttttgcttttaatacattgtatattgtgaatgtttctagaaccacattcaaccttacaaaataaaaaataaaattgattcttaataatttctttagtcatttaaccaattacacctacatcattatacaaagaatattcttttgaatttgttatgtagcaatacaagcaacacaaagctgggatttttattttttatgatttttaagatataagtttgtaaaaatatagtttttttttttttgaaaaattattttataagaattcttttaaaaaaaataaaa

SEQ ID NO: 181672 - DNA, 1040 bp, Cannabis indica
ctccccacaaagagggcaagagacgtcctcaatgttcaatcttctagcgaggagagatcgaataggtaaagcgtgtgagaggatgctccaccagagaactttgtggcggtctaagatttttgagttccacaatttattccacagagtaggagcaacactacacaagggggcacgctgctaagcttgaatgaggtaagcgaattttgtcaaaaattgaccatttgattcacaagtaacaacttgcaattaaatgttatgttttagtcacaagtaacattttgttgtgactaaaagtcatatttagtcacaaaaaatttatgttgtgactaaaaagttgtcactaaaaatagctgttttttgtagtgtatgtagagaatttttttttttttgaaaaaaaaaacaaatataattataggagaaccattattacctattgttttccctatgtttttttacttctttctaacattttgtcaaattttttcattaatataatttttttaaaaaaaaaaaagaaaaaactgtatttttatagttttttacctataaaaccgtaaatgaaaattactccttaggataattgaaaaataatactgcattcggtagctattcttaccgatgctcagttggtggcgaggaccctggaagcgaggcggtgtcccgcttagacaattcaatggcaaactctattgctaagaaggctagctagagctgaaggtaatttcaatggtctttgtattagggaggggtcccctggtgtgataccctattttctgtttcaatgaactctttgtgtttttaaaaaaaaaaaaaaaaaaaaaacaaaaaaaaaaaacttttaggaaagagagaatctaacttaagattttttttaatagaaatgtggaactattaggtttgtttatacaataaacttgtattttattgtttttgtaatttttatggtattatctggaaaaaataaaaaataagaaaatattttaaagctattttttactttttaagcctcattagtgggagccttaggcatccacaagagt

SEQ ID NO: 181673 - DNA, 1013 bp, Cannabis indica
gttgaaaaaaatatataaaaatagaatatacattttatctattaagtttttgcaatataattgtattatatgtattagacttttaaattactattttctttacattaaaatgttatttgtatataaaattttttaattttgttataaatatgtgtggattggattggatcggttacttttacatgtcaatcaacatccaatccgcacaagtgcggattttgaattttccaatccaatccaatccgcacaagtgcggatattccgcatatgattggattggatcgtgcggattgaattggaccggctattttatgaacacccctatgtaataggttaaaaaaaaactatatgtaatagttatttttcaaatataattgttttacacattactaaataaatttaactataatattaattttaaaaatattaaattattaaaattttgatttaatgataaataataaaagaaaaattttaatatttatattaaatttagttagttaattaaataaatgtgaaaaaatattttttttacatacatcaaactacaaattttttttaattaaattttttgatagaaaaaaaaaatcttaattttttttctagtccatagtccaacttcaactcatataaaataaaaataaatatttttctaattagataaaaaattaagcttaaaaacacaaattttcctaatactatttatatatctattaagagtgtacacatttttagtaaagtagcatctgtgtggtatttctattatatgttttaaaattatgccaaaattcaatatgtagtttaacaaaattgagttcttttagtataatttttactaaatatatctacaggcgaaacctaaacactaagattagataatagagttaaatgttgtttgtgatcattttcattctgttttctgatttttatatcccatgcaatgattacccccatatagagactttactagtatgttgcattgcattttctgttattgatagaatatgaatatg

SEQ ID NO: 181674 - DNA, 902 bp, Cannabis indica
aaacaatgacatgctagcatatatttaattctatttctttaattaatttataatttaaatattttttgtgttactttaagtgttgttacgttattatttgacaacaaaaaattaacaattaatttatgattaattgtaacaaaatagtaattttttatattattaccgctaaaactaaaatatataacaattgaaaaaatttagtattatgaccacaataaccctaatgtgtaattatatatataactaaagcagctattgttgttgtggaactggaagtttgagatagcttggtggaattaagtgtacgtgtgtgaatgaccatcctagaagggtttatttgcagatgctatgtatatgtcaatgccgtgaaaatgaaagttatcaaactccaaatcattaatttattacctatatcccaagtgtgttatagatttcatttggcgtttaattgaagaactttcttttcgtaaatttatttttatattattatttaataattaaatcatttgccacactcgcacacaatctctaaaactccaattgtaacaagtgtcattttttatattaacaatatattataaaaaaatatctctctatataatgattttcgttataaaactattaacaaataacagttatatgcttaattattttgtttataaccaaggcggctaatatttttctgtcaaattccacattatggtcataaaatgtcacatataattattaaattagaaacttgataaaaaaataatattggtgtctaatttttttagtatcaaaccgacgctattgatgtaactaaataagaaggtacttgctatgcctaataataatagcttattaagttaataatcgtaaattagttcaatagacttaatattcatgtctaaaaataa

SEQ ID NO: 181675 - DNA, 511 bp, Cannabis indica
cttctcagcaggtcgcctgataattacatccacaaaacaaaagggtattctttagtcaattttgtaatttacgtcaaaacagactgccaaataacagagtacaataaacttactctactctcttcaacatatgctgcggaattgggccaagaacacgttccatcatggcaagatgctccaaattctcatgggtttgaaacaaagcctcaccctataccaatgacaataaaaataagcatatgtattatagttggtatagttacactttttcttactttttgagcaaaccttgaacgtaaagagcccaataactacaaactcaggaactaagttatgagactctgcaatccttttcaagagcctgagccatggtccaattcgaggattgggtggcgcagcccatccaggcttgccaaatcaccatataagcccacaaatcaccatatcccattacccccaaatcaccagcaacatcctcttcacgcaattgagggacccctgtaccaaatca

SEQ ID NO: 181676 - DNA, 897 bp, Cannabis indica
tattagtttgttaagtgaggaggttaattagtagaagaagttagttaacactacgaaaaattttatttttactcacaataaaatttgtgattaaaagtagaaaagttattattaatcataaattatcatttttatgttatgattaaaaagtccgtaactaaaagtatattaatttacaaaaattataatttattatgattaaatgtatttttagtcccaatacttgttgtgacaaaaattaaattagtgacaatttgtaatattatatatattttagttacaagtaatttttgttgtgactagttagtgacaaaaaatttatattataattaaaaagttgtcactaaaaataattttttttagtagtgtaatggcagctatataaatatgtattagtcgattgaggtgattgttattaattagagtattcattcatgacattcgatcttgagctctcagagatgaaagataccaagtttataacacgaaaaatggactatacatgtttaattaacttgatatttttgctcagctcatcatcttgtagttaatatttaaaccatgatcgaactaattcatttcaaattatattaaaaaaataattatatttccaattcgattgctagtttacgggaatcgattcattcaataaaagagattacaaacaattaggcgagtcccgtacgtaaagcaaaacttgcacaaaataatcaacccaaattaataaagttacaattatttcaacaatatgctatatatatatatattatttgtatgttatgtaattaaccttgtagattttttttaagaaattaaattcatttttttaagttgattagtatacatattgtctatatatatatatatatatatatatatattctggtcttttaacta

SEQ ID NO: 181677 - DNA, 747 bp, Cannabis indica
aaaaaataatttacaattagttaccgaattttttaaaaaaatcactaaaacttaaataaaactaatatttacgtggctcgccacataacttttatctagttatataaaaaagataaatcattttcagatatttataaaatattgacctatatatacctatataatactgagagagtactgagaaaagaaattgagaaatagagagctaattacgacaatacaatgagcatgaatctaacataggtacattacataagaaaaaaaaaattgagaaataaagagagctaactacatatttgttaaacataatttattgaaactggttattaattcttattgcaccatgtttattatacttgttttcacatcattttaaatacaaaagttaaatattctttcagttgtgtttcctatgtgggatattttaaaatattttgttttgaatctaataaataattgaataactaaagctaagattgtagattgattaatttggatcggtttatgtgatactaatgtaatagccctcattagatcttagaaatgataatagaatacattagttgttttaaatattaaaatacaagaataattattgatttattaatatttatattaataaattaataaaaaattaaaataattagagaattagagagagaattagggaaatttttgggagcattgacaaatttttttaaaactaacagttagttaacaacagtaaaacagaaaagagtaactaac

SEQ ID NO: 181678 - DNA, 1143 bp, Cannabis indica
ctaagtctctgcctgcaacaaaatttgaacactatcttagcatcttaaaaaatctcagattcctagtctaaaaatctagattacacattataccgttcaaggtggaaaattgttagatcatatgccctaaaatgtgtatccaacttgtcaagtgtaggcttctggttctatgttgtaagcccaaactgtcataacttccatctcgataggtatgacagttggtcctccttggtgtttaggttgctataaatactattagactctattttcttatatagagaaccaagtgtaattcttagcttgtaaaaacttactcaaaatcaataatacagtaatttctcaacttaagtttgtgtggttgtgcttttagttctgtggagtacttttgtgtgtgttcattggagtttccttgctgtgtatgtgtgtgtatgaatacattttgtcattggtgtttttcaacatgaagagacctcacacaacacgccaaaagcataccgtataatatgagtattatatactgttagataaattaattaaatgattatatatagatgtagataagtaataaaaaagtatttaggatttctagtcaatgtttctcaatcatattgatattagtatatatgtttattattttttagcaaaacataaaataaaattatcactgatgatattttgtaaggacaattctatttaccccacaaaaaattatgcgtacgttctaatatttttaaaaaataaacttaaaataatttgaaaaattagtattaatatcttttgaatttttttattatgttattttgtgttaatttgaatgctaatttttatttaattttcataatttttttaaaatcatctatatatcttttatatataaaatttgatataatttttcatttaattttttgtcataatgtttgaaatataatttatttttgtttgataagtatattttttaagaatataaattagaagaaataaaattagtataattaaaaatataaattttatataaaataaaaaataaagtgtagttaaaagttttgagagtctacataaaactctttgttaatattactattaagcactttaaaatatccaacgatatatatccacgtggcacattatgagtgataatagttt

SEQ ID NO: 181679 - DNA, 887 bp, Cannabis indica
acacattattataataaaaagttactactataattttatccttgtttgaaaaacacacaaaaggtaatacacattctaattagttgtacttaaaataaattcaaatagatttggccagaatttaaatatattatgtttaaccactcaagaaactgaacttaatgtaattaaaaaaatgaatcgtagacgaaagagaaattacacatctataataatttggttttgtattagggattcacacaaattaagtcctaaatggttacaagttttcttgacatgcctaatattttcttatgtaaaacttggggtgcttcctttcagtaatcttttactttatttttctcttaaattatctatagatataatagatttgaaattttaattattcgtttcagtgcaataaatttagggtgtgtttgataataattatttaaactgttattttttcttaatttgaaaagtaaatatatttttaaaagatatgtttaataaaactgcttttatttagaatttgtttaaaataagaatcatatttttttaaaaaaaaataataattactttcaaatttatcttaataatttttttactcagagtctatttggtacttttttattatttatataaattcacttcattttttcttttctcttaaagtaaaacactcacaataatatttttaaaatagttcaaaagataaaatataaagaatgtgtattattaaagtaggatctatcaacactcagggtggatggcgaattagtttggatggatgattttgctccatttctctatgatgtactaaactctgattctattcaatgaaagttcactgtcaaaagaaaaaagtaggatctatcaagccagataaaataattcaaaaattgtac

SEQ ID NO: 181680 - DNA, 515 bp, Cannabis indica
atacaagatacctactccatttattaacatacaataatacgttgaagaccaataaataatttatctcatgactgtttaaattaaaacccccccttaagtcctcacttcctctctattaatacttgtcattattttggtatattttaatttttatccactatcatgtgttgattaaacaaagcaattttttttagaagtacaaatagaaaaatgttcaactaagatatgaagagagaaaaaaatatatattttgaattcataaattgtattattttaaaaataataaatttaaattatcaattttttattttaaaaaagtccaacaacttggcaaaacacgttgtctaaaatattatttatctaaaaaaatgtactattatcatcaatttgtcaccaaaagaaaatatcaaactcataagagaaaaaagaaaagtgatccaaaagtatataatgaagtgttatttttaaacaataagaagaagaacaaacattacaatttcaagaatttctcatac

SEQ ID NO: 181681 - DNA, 545 bp, Cannabis indica
cactgtgatgacatcactgtaattgtgaataactatatgttccgaaatttaataaaagttatatattaaacatataatcatgtataaaatatgtgaacaaagcatacgataatgtcaagatatgatttttgatctttattgaaagtaaataagattatagtgaattaaattttacttagggcataaaattccaacatatgcgtaggcctcaacggattctttttctggggcttagtcattttggctttccctttgtcgtttgcagaattagagggcctgaccctagtgtggttgaactttcccgcaggtgggttttcattgttgaggtttcccttggctaccatattttgtagctggagaagggtgtcttgtatttagcgggttgcttcttgttacgatatttgcctttgttggcatgctaccacctgtcttaacctcaccacctcggggtctttctcataatactcatcttcataatttttgtcatattctttgccacaatcttcttattgatcctcactctgatcttcttggtcatcttcatt

SEQ ID NO: 181682 - DNA, 597 bp, Cannabis indica
aaagtaaaatgttacttttgattttggtcatcttcttcaataatggtaaaaaaaatatatgcttattgcatattaaaatgatcacattaaagagtagattgcagtgatgtaattttttaaaccaaaaaattagatgtgtagccaaaaaaaaaaaaaaaaaactttaaaattaaaaaataaaataaaaagaagaaatactttaaaataaaattagttttttaattaatattatttgttttatttacatatgtgtgaaaaaaaaataaaatttgatggcatgagaaaataaagagtataattagtatatatatgatgatatgtcatgtatatgtatattgagagagaaaaaaataagtcagtacacatgcattgagaaaaagaaaattactataaaaaaaaacaaaaagtaaagaataatgcgtcagtgtaatagaaaaaaaacaatatgcattttataagtatacacgtattacaataaaataattagaagaaacgatatatgtgcaaattaattagaacaacaataattgttggtaattaattttaaattttaagttgttagatgcaatttttctatttttattatataattctaaa

SEQ ID NO: 181683 - DNA, 731 bp, Cannabis indica
gctggccgtttcaactactaaatatttttttttttaaaaaaaaaaaaactttaatttatttattattttattgtaagatgcactaataaaaaaaattattaaaaagtactatacattacatatttaatttattaataattatataaaaaaaaccgctaatcattaataatcttatattagtattagacatgatgtttaatatatattcatacaagaatgtaagagcttaaattaccttttaatttatttgtttaatttgatattctttatatttatatatataaatattattccaaatctttggtgacaaactttctaaaattgtattctcttctttctttttgtatctaatcaaacaaaatttgggtcgatttgttttaatgctttttcttaatatattcactctagtataaagaataatattgaataattcttaacaattttaggcatgaaattaacttaattaaggatgatggattttttctatatcattatttgtgataaaaggaaagtgtcatgtgaataaaccctaaatgaaagggaaaatgaaataataattaagtgatttgtgactcatattatgttactattaacttcaataatatcatattggagggtgagcaatataggtttagggttgactaataggataatattgaacaatggacaatagagtatagataggaccgccttaaaatttagtgaactataagaaaaaaaaatatttttag

SEQ ID NO: 181684 - DNA, 988 bp, Cannabis indica
ttttagtatggcagactgtattctgtacctatacggaaaatacgttgttcactctctctctctctctatatcttacttcattatatatatatatatatataaatattaatcaactctccctatatatacgggggattccatttatttgttttctttccttaatttaattgagcatgcatgcagactgcgcagttcaactttcaaggaagccatatatattatatgagaaatgctaaaatagcaatggttcatattattatataaatatataatattatttgtgactagaaagtgtgtcagattttagttattcatagcttcacacttatagcttgaaaggaattattctgtttgaattcttgatcctatgagcttgtgggttagccatttcataaaagaggttaagtacagatgagttgaattaattaaaaaaaaaataaaaaaagtacagatgagttgaattatacaaaaaaaaaaagtacagatgagttgtcaatttcagtttctatactatgcgcttactaattcaaaatttactttaaattaataaaatgcgtttatcttttagtattatttgttttcctttcactttcagtaaaacttttttttatatatatttctttcagtcttatagaacaatcccaatgatataatattaaaaatgaagaatttttgtaaatattataaagtataaaaactcaaattttattagtaaattatttatacatgatgtaaatgggggactaaggcgaattgttgtgtttataaataacaatttcgaactttttttttggttttaaagcactaatgaccaataccattaaaaaccaaataaaatcatacatattaaaatattactatacattcaaaaaaaaaaaacctcatctagtcaaaaaaaagggtaaaagtatccacaattaatctatatacagttatctattaatcgttccaggtgcatgaattagagagagtattcataaaaaatcta

SEQ ID NO: 181685 - DNA, 530 bp, Cannabis indica
ttgcccgcatcacgagacatttatagtgcttagcactataatgaaatgttattgtcatttagttattttttataatatttaatttattaaaataaaataattagaaaagatatttaattgcaacaataacaatataatttaatagtaaagtgatgtgtgcgcttaagcacttctcatataaatataatatatatatacaccccacgtacgtgataccacttatgagttactatatatatatctacgtacattaattatgtagacgtgtacgtaactttatacgtacgtacctgcatgaggtcgccgacgttggccacgagaacagagggcaagggcggaacatcaacccaccggttgcgtcggagaacttgaaggccacccatttggtcctgaagaagaagggtcaaggccgaggggtccgaatgttggtagttccttgggtcaactcgggttccgggcgaaagcgggtaatagtgacccaccaaaactctcactcttcatacactctatttttccttaagtactctttg

SEQ ID NO: 181686 - DNA, 1067 bp, Cannabis indica
aaagctcactgtattcaactgaagaagagagtatatatacagatacaaaaacagagcaattagctcataacagaaaacagttgataaccactaactaactaacagaaaactaacagaaataactaactaacagacttgaagtgtgttaacaagcttagcctattagtaagttaattagttttttttttttttagtttctaaaatggacaggtataaatacctcattcattctctcctttatcgagatttataattcagttttggagggttatatattgagctggagtatctgatcttcagactcacagtgtgagatttactttgtaatttgagagtggttttttgagttgttctgtactcggatccatcttcatcatcaataaagatttaaccattataggatttatttgttcatcttcttatttgattctaaaactactaattatgtttttcttttcattttaattcatttatgtttttaatccaattcttgtttcattgtaatttttaattttgttcttgagtgtgcatctttgcacaacaaatggtatcaaatcttaagattcgctggaatatgttttactaggacctaaatttacttacaagtatacatcctaaatatgaatttctaaaacgatgaaaataaacacataaagtatgagaaaccttatattggttgcagcggaattaaatgactcattccctcagatctctaacccttgtatcctttctgtcgcagagtataatcaagatctgagtgcgaaactccttcagttgtttggattcttcacatgtcttacacactatgattgaggactaacttgatatgggtgggcatgcacttaatcactaaaggctgaattttaatggtaaaaaagactgaggatttcaaattagagaagagaaaaagaagaagtcgcaaactctctagtttctcacaagaagaaaactaggtcatgagtcattaattgaattattatgagaccattcttttctttttatactaattcccttagggttatgattgaattgcttagaatataaaatgataaaagaatgacaaaaat

SEQ ID NO: 181687 - DNA, 817 bp, Cannabis indica
acgggtgaaattgtaaggaaaagagttttctaggtttatttatttattaatagactttatatgtctaattaataattaaattaaatgacaatattatttaataatgtattttagttattaaataattagttttggcatttaaaaggttagaattggaaaattggcatttttgagaaaatagagataaaatttgataaaattgcaaaattaagtgaggcccattacaacacctatggccggccacttataaggctttttcaaattattattttcattattttaatgccaaataattctaaacctaaacctagtaagttgcctataaatagaaagtgatggctcagtcaaaaacaagttttcaataagcctttctgacagaaatttctctcttcagaaaactgagccttcctcactctctaccttggccgaaatctctctctctcttttcccttcatctttttcgtgaccctagtgaaagagtaagtgcccacacacagcaagcagtaactcaatcatagattggaagactgtgaaggatcaaagcttgaagaagaaggagattcgggctcagatcttgattatactctgctacagaaaggaatcaagggttagagatctgagtggaaggagacatttattccgctgcatcaatgtaaggttttcttaactttatatgtgtttattttatcgttttagaaagttcatatttagatgttaataacatacttgtgagtagatctaagatcctggtaaaataattcccaacacgtgaaaatgacagtcttatcagtttgcttccttagcttcaaaagcttct

SEQ ID NO: 181688 - DNA, 584 bp, Cannabis indica
ttgtatacttggcttgttagctgaaagtccataaatcattttacttttttgtaattcagatcactctaaaaaataaaaaaaataataaaataaaataatccttaatcatccacatagagcaaacagagaaaagaaagcccaaccgttggagccatcaggtccaagaataacccaaaccaaatattggtcataatgaagtaaacgcaattgctttcacaaagctggccggttattattagtctctctaattatagcaagtgattgactgtgtcaattcagaggggaaatggttcattctgtaataaatctggagttttctctttttgagcaaaaataataatactaatgtggttgctacaacttgctagttggctcatccaaccaagcaaaatttggtgttgtacaagctcagtcagcacacaaatgaatataattaacacatgttttcttaatttcttttttctgaaaagaacataagacactgaaagttttggaaatgaacgtaattaaacaatgttaaatatgtaccattttggtgttagaatttactgcaacctttattaaaaatacatttacaacctaaa

SEQ ID NO: 181689 - DNA, 580 bp, Cannabis indica
ataactttccaacttctttgaaagacgggtgaagaattacttatacgtgaactctaaaggcttcgtgtacaaagtgatcgcaaagagaacaatctaatatttggtacctttgtaagcaacgtattgatggtttggatatgagttgggttgggcacccataggggttagcatgctcaagtgtccgtagggctctacacgcccgggtgtacgatcgggtctgcaggcgctagtgtctgcaacacccttgtttgctttattcagctttgagccttcgttcatcgaatctcttggagtaatgaaaaatttttgccattaaatatctcacttcaactatggttgtttttaattttttatatttatactttttttctttttttattattttaaaaattacatataaataaaatatattttaaatatttgaaagaagaaaaaaactataagaatttgaataaaataattaaagttattcattatttttatttaaaacaatataaaaacaaaatgcttaaaattaagggattttttttttttttactacttcataacaattttttttttagtattttatagaaatcta

SEQ ID NO: 181690 - DNA, 874 bp, Cannabis indica
aatcatatcaggattaagatcatttgatctaggatcaactaggcgatattgacttgaatagatattacggtaagtttaataaatctaagtcaaagttcaatatcggtcccttccgatgcatactccatgcatccaacctgagctttactttaaccaatgctctggaaagaacatagcacttctccaaatgcaagtaaactctgttgtagattatcatatcagtaaaaccctatgtctgataaatctaggaaactttattcacatagtcatgtttactttccaatgtgttgacggcacaataaacaggatcaagtatgtgaaaagggtttcagatgaatttatacattatgtacatataatcatgaaataaatcatgtgaaccatgcaacattaaatgttatttctgatctatattaataagtaaatctgattatattgaaatgagttttatttagggcataaaacccaacacaaacatgaaaccacatcctcttcctcgtcaacgttcaaattgtccacctgttacccaaatctaacatcatacgactgctaaaagtcattgcaccaatcactcgccactgaacttaccacgcaacaaactcaaacttcacataacatacatgtcaaaagataagactctaatagaaagtttttaataatcttattgttttacctttaagctctattactctagaaaagtacatattaaagtttttaagatctaaaaaattgactgatttttaaataaaataaaaagtacatatcacattcattaccaattttctagtctaatattgtgacatgagaaatttttttcttaagtctaatattattggactagaaaaactctacaaaaaaaaaaaaaaaaaaactt

SEQ ID NO: 181691 - DNA, 754 bp, Cannabis indica
gccaatacaaacaaataaacttctccaagataagcacaaccacaaagcctactagttacaaatcaatctttgtagtaaattcttctccactctagtacctttcccatctttgatcaataagagcctatacttcacatcatttttaattttgttcactatacaaatgatagaattatagtaaaaagaagaataaataagtgtttcggttactccataagtggtaaaccacggctgccaataaaagagttctcacactatccacaatgttagaccttgtagtgcccaaccaaaccgtccagctatcaaagttccttgaccaaccatcaaaccccagccaattaaagagcatagacagcacctgttgggaaaagatgcagctgaaaaagaggtggtggtggctctcggcttcactgtcacacgccacacaatttttgttggggatgggaatgttcaaacggctcaacatatcccttgtcagaagcttggattgagcagcctgccaaagctgaaacgcatgttttggcacatttagcctactccaaattgccctagcagccgagaaagcatcctggtgaagcatgcttctgtacaaaattgttaaatggggaaaaagataaaaattgttaagataaaatttgtcgagacaagatttttcaggcaaaaacgcactaacctgtcctaagtagacatggtaggcgcctagcattatcctatccctatcagatttaatgtttaggttaattaattatttaat

SEQ ID NO: 181692 - DNA, 649 bp, Cannabis indica
atgtgacagtgttttcttttaaattttctgttttgtggatgtgtatgtgagcaaagatggttgaagtgaattctcaaacaattcaaaaatggcactaagcttctatactcaccgctccaattggagtgaagaattttgattttatgaaattatgatcaaattttctttcaataaatttttgaaaattaataaaggtttctttaacatcagagttgatttttaaaagataaatccatgtgaaaacactgaactcatcaacaaaatggacatagtatctatatccatcttttgataataattgtgagggaccccaaacatctgagtggatgatggtttgttgattgtttttgttgataagtaatagtgtttatgtttggattttctaatatggcaagcatcacaaaattgtggttgaactttgaaacaaactttctcatcaattaacatattttcatcacacttaagcttggatgaccaagcctcatatgccaaagagtgggagtactattactaactgactgaacgaacgaacaaagactgagcagtaacacgctcatttgattgactcttataactagatagtgaggttagactctcttggaattcaaacaagctaaaaaacactgagattgatttgagatttggctgg

SEQ ID NO: 181693 - DNA, 611 bp, Cannabis indica
tcttaagacatagtcttcatcttgaatattagtgacaataataaatttaaacaaacaaaacatatacacagaattgagggttttcactacacggagacatcatgaaaataaattcttacttccttaaggccgcatatgcctcagccttctcaagaggatagccattggagtggaaggcaatcaagcaatcacatatgggccatctgaaacaaagaaaatactgaaacaacatgaataaagtcacaagttactgaaccaggatatcaacaatatctctacattgtcgtacatgttcacgtaaagatttcacaccatgagaggcatacttggtagatcacatttccattgaattgaatagattgtcacaaaactttatgatccactaaaagtacacgcgctaacgtatccatgttttgaataatcatttgataatgtacctttcaactggctcttcaagaatgaccttgtctccgaaatgaataatctaacaatatgcacacaaacaaacttaaatcataacaaatcctaaatgatttagatttaacagtgaaaacaaatcacagattaaaacaaacatctacctcaaattctccgaatgcctgtaatctatc

SEQ ID NO: 181694 - DNA, 839 bp, Cannabis indica
caaaagaatataaatttcagtactgattattggtcatgacataacaaagtatctaactgtacaaagaaataattaagcaaacatcattctggagtaatgaaaaattggaccaaacataaaaaataaataattacatccattttgagaagggaaaaaaaacaaaaacaaaaaaagccaattgttaaagcctgattttaaagtaagaactactaataaaactagaatgaattttgaaagagaaggagaaaaaacccagggaaaaacaaactgcagaatacgaattccacccccaaaaaaaaacacagcagaaaagcaagaccgtgcaaaacaaaaacgatgaatttttacacaaaaataaaaggaaaatgtgaaaataatagtaataataataataaaaaaaaaaaagaaacgaccgaccgaatcactaatacatctctttcaacgtttttataccatcagaccagcgaaaaaatacgagacattaaccaggctcaaaaaagcatggtaataaagagttgcacaattttaaaattatataattgggtaagaacataaaagcgtttgagaattatacattagagttaagagcataatacttgttaagaaaacaagaccccttaaaattattatagtaataaaattttaatccaactgaacaagaaaaaagaaaaaaagaaagaagatgaagaagaaaatagctgactaatattgtactgtaaatcagatcttctgaacacaaattacaaatcattgtgatcactaatcaaaactaaaagggaaagcgaaaacaataagtgaacactaaacaaaatatttaaaaaaaaaaggtaaagaaaaag

SEQ ID NO: 181695 - DNA, 562 bp, Cannabis indica
tcttatattaaatcgaaattaagttcacatagcagtcacaggactttagaatttgatgaatattgtccagcttgaaagcttaattaaatataaaatatttataaaatgcctcaaaattcaaccattcattattctatagtttatattatatgtggtcacaatttcatttgggttaaccatgatactgttctatatgataatttagtcgtattgttcaacagctatatcatccttgtaatataatatattgtatataataaaaatggtacggcaatgtcggtttttctatatatttattttaataataataatagataaatattatttgaaattttatattttacaaaaattatttattagacattttattttatctaatgacaaattaaatttattatttttgaaaatagtacaaataatactctcgccttcatattttgtcataaaacttgaatccaatttctaacatagaggcaacaaaaataatcaatttgctataaaaacctctatgtctaattattattatcatcatgtactatttttacgaaaattgttcacaata

SEQ ID NO: 181696 - DNA, 675 bp, Cannabis indica
aatgtcctctaaatcttgagttgttcctcctttggatttcttcatcgagcaaacaaaccttcatcttgtcttgatatttgtctgaaaaccttttttcaaattcaattctgcatctcttgacctatgggtgctcataacattttccagagttagagtatctcaactgtacatcttcccgaaagtactacattacattaattaattcaaaggtgtaatcaattttgacactttttcttccaaaagtgagacaatcttttctatttttaaaatattatttatttattctaatttcttaaataatagctttatattataattattaaacaaaattactatttaaatatatttattaattagaccttccaaggtctcctaattaataaacaaaccctgcattatcttttcttctcaattatgcccttagtaaaattcataaataagacatagtcttacttagaattctaattgattaaataaattaattaattgagactacaaaacaatattatcccaattagtacggggaccatgggcctatgtaaccaagctcctaataagtaaatctgaaatttaccaagtaaattttctagcttatttattcctcctgactctactatagattcggaattgcacttttgattagacagagcgctctatatatcaaatatagatacg

SEQ ID NO: 181697 - DNA, 707 bp, Cannabis indica
acgttgatggtacagttaagtacactaaccgctccatctgtagctcgatgggcttatggagcatttggccttttttaatgatgattcgtagtatatactatatcattcgttttttgtttttttttttttgataagtcgatcgtcttaaattaattggaaactagctgtagtgtgtaactgaattaataataaggttgagatgcaaaatggccctaaatttggtaactaagttagtaaatgtccactttttaaaaaaattaagaaaatggccaaatctaataaattagctaataaaaattataaaaatacatttatcacatatttttttaaaaaaatatatataataataaaattaagttacataatttttttagtattgcatattattatattgtaacaaaaataaataaatatattagatcatttaaatatatacagcagtattagatatatcgtagtacagaaaattaatataccgtagtaataaaattatataccacaaagaaattataacaatgctaaattaatacttaaaaatataaatatatatatatcatgctaacaaaattatatataccaccattaaaatatgaatacataccaaaaaattaatttatatataataaaatagaaactaaatatcatattaaataaataatatattatagacaacaaaaatcacataccatacaataaaacgtatatac

SEQ ID NO: 181698 - DNA, 579 bp, Cannabis indica
aaaatatacaaatcattcataaaactcaaaataaactattaaacataaaaaaaatactatttttattaatcatgtaaaagagagaaagatataagaagactgctcttaattttttgtaggagataaaaaatattaaaaaaaatataagaaaaaatttgaaagtaaaagaattatatttttgtgttaaggtaaaaagaaattaattaagacttaattcaatataaaatatgatcaattaaagaaaaatagtatgaaataatttgtgtgtgaatagtaagaaaatacaaaaatgaaaaaaaagaaatagaataagtgtctttattttttaagaaaataataaaataaaattttataagagagtgaaaaaaatgtaaaaataaatataaaaatacacacttatcaatatatatataaaggaaaataataagacggtgacatgacactttaaagataaaaaaagttagtgtgagaagagagagaaagagagttagaaaaaaagatgaaaaagaaaatagagagagaagagaaaaaaaaagtactctcatccctatctgaaaaaaaaaaaataaacaaaaaaag

SEQ ID NO: 181699 - DNA, 611 bp, Cannabis indica
ataagtaaaccttccagggtccacacttatttcttacacacgtgacctcacaatctaatatatgtttatataatatatttgtagggcatctttggagcgtatttgaattccgagaatttatataatttaattatacattatcgtgtatttttttttttgtttttcgttttgatacatagaatgtactaattatttatttattttttctttctaaatcagcattaagcttatatttcacaaaaactttcacatatacaatcaacctgcaccaatcaccggcctgaaaaaacttttcaaccatgactatacccccttttacaaattaaacttcccaccaaattatatccttccttttcatttttttagcaaaaatcatacacattttattcttcacatcctgttatattctatatatatatatatatagtagaggtaatggtcaataatttgattcccacaacacagtatttaggcacatccatacatgataaaccatgcatggttgtcatggctaaggcaaaaaaatttacttcttaaacggacagaaatcgccaattcagcaacatctgcatattagttctgttgtaatccaacccatcaaatcttaatga

SEQ ID NO: 181700 - DNA, 628 bp, Cannabis indica
aagtggccaccaagatgagatcaattccattgatcaattactcatgcatctcattatagccaaaaccacacccatcaacctaggctatcttattttaaaattcatacttgatgtggacaagcctaatatgattaaggcacttccctttggttttcttcttagctacctttttcctctcttaggaattcctaccctacatgaaaagaaaaatgatcctacctctagtgacattctaggatccaaaactttcaaggctatgggttacaaattccttaacaatgaatgggtgttcacacccaaaagagggcaaagaatgcaaattgatttggagagtgatgatgaagaaattaatttgcccgcaagtgaaagtgaagaagaagaagaagaagaagaagaagacatgcctcctcaagctcctcccatgcctacttttccccaattcaaccttgaggaagctttcactcgtcttcacacttcggttgacaaccaatttcaaaccttgcgaaatgatctcaactcacaactctccaacctcaacaatgacatcaacaccatgaggagtgacatggtgcatgggtttgctaatgtgcaagaggagatggcacaatggagggcatacatggatcgc

SEQ ID NO: 181701 - DNA, 683 bp, Cannabis indica
actaactgttatgttagtcataaccaacgtgtgaaactgcagatcactcattggcttacttaaaatcaagaagcttgtccaagattgtactttttggaattggctggtgttctcacttataaaaggatgttcatttgtgaggtatagatgagagaggtgtcaacacacgagaaagtgttattgaggatattgctgtctttttcttatgaatataccatgtgctgcaatgttatactggtatattgagagcagtaaacccttgattagtgagtataaccttgaaatatatagtacatttgactagggagtatatccctgccttggatgtaggaccaccatgatctgaaccatgtaatctgatctcttgtttctgttttatttttgttgtttgcactctgaaattaatctggttttgtttctgtcttgttcttgtgtattgatctgagattggaggtgaggagaccaatcctcaaaaactggtatcaagagccaggtttcagattagagtttgaagaaaccagttgagattgacagagtgttcgaatgaattcctcaaagactgaagaaaggtaaccagcaagggaaacgcttactggccataagtttttctttctttctttcttatttctttcttctttcttcttattgttcaataatgtctttggtagaagtatgaggaggta

SEQ ID NO: 181702 - DNA, 539 bp, Cannabis indica
aattgatcacttttataaatgtatttgaaaggaaatatcattacctaatttgatattacgggtgttccattaattcgggaatgaacaaaagaaggtttcgggattgatcaaaatctcaaaaccaaacaatcttacctaccaaatttgaaaccaattgagagatacattcattaattcaacaaaatagaaagagaaaaaataacaccatatcaactatgaatgagaagccaaggatttaatcacacagccacagtttgtgaatatatatacataatacataatatatttattaacatggcataataaaagtaaaaatcctaacgtgtgtaaagtgtaaacctaaccgtctcaatttgataaattaacacaataatgttagttcctttttcgttgactctctcaaaagtaggtttttcttttgggtctctatagtagttgataacatatacaaattataaatagacagcaataataataatttaacacttaaccgtactatattcacaaaataattacaatccctattgtataatgtaccg

SEQ ID NO: 181703 - DNA, 914 bp, Cannabis indica
gttaatatttttatttatttattggtctacatgtgttgttatcgtagtaacgtaaatttattgaattataaaagctattgcatgatctaattgatctttagctaattaaaacataaaatgattgaacggtacattctgcccaaaagacattgctaaagaacaatgatttctgaacatattgtactttaggggtggtcgtccgacctgattaccagttgtttttccaaacctttaagcgaagtcggctcagaaggccacctacttaagagtaagtgttcgagcattgtgcacttttggggggtcatcagaccttgtacacttattggtagtattttctcagatgttcattgttccaataccttggtaccagaaccagtttcatgttttcatcatatcgaccaagtttgtatgctccagagtttgtaacttctgttatttaatatggtccttcccaattggtccgatcacgccagatgcattgtcttttatgtttaagaacactctcctgaggaccatatcttccacaaaaaaactttttcttaccctcacttggttgtataccaattggaattggcatggtgaggaggaaataataccaataaagagcgacagatctaatagaggaagatgagatgatggatattgttagtgatattatgcaacacgccaacaatgtagatgaagagaacgagcatgagaagatttctgagcaaggctttaagggtagagttgattatagtgatttatttgagaagataagagctctattattccctggatgttagaaatatacatcattaaaaatttacggtgaagatgatgcatttcaaagtcttagggaagattcctaagaaaaatatttaaatagaatattagagttattacatgatgcatttccagccccgaaacaaagc

SEQ ID NO: 181704 - DNA, 547 bp, Cannabis indica
cctttgttaaaattaagaagaagatgatgataaaagatcagcggaagcactaacctgaagccattgttggagattgcagagaaggttttgatcttccaagaatacactattttctaaagtattttctctgatggggaaggagagaatacagaaaccctagtgtttcttggggaccactacctatttatagagtcatcttagaataactcttgggtatttataatttggcccctcaacaaattataaattaacttatggtatctacacattaattccatgacactttaatacccttttgatacccataacataattggtcacttaattttgtatcacactttataatagcatatacattatacatatgtgcccacaaaggatttttaatccaacaccatacacctgcaattaataaatatatccaatgatcaatcttattatacaataattaacagaatatagagatgatatagttagttaccttattgtcaatgaagtcagcccagaaccttgcttgggatctctggtacggatcggatggtaggag

SEQ ID NO: 181705 - DNA, 620 bp, Cannabis indica
aattatatattaaacaaaaatgatttaataatttaaaaattcatttaatgattgtttattcaaaatttcaaaaataacattaattaacaaaatggtttaaaaggtgggtacttgttattattgatatataataatagttattagatttaataggatttagatagtagactgagataaagacattatgtgaagatatcatactaaaagcaagaaaataaataaatgtgtttaagaaaaaaaagaaaaaaaaaaactaaaaatgttccaatcaatatgtgattattagaccatagttaatattatgtgatggcattcaaaatttctgttatcttgaaaagagtaaggtgggaagagttgtattatattttagacatatttgtggcaaaacttccaaaacattttaattaacattttaaattgttacccatcttaaaagatcctcttgtttctagtttattccagctgtctgttaaatgccaataaggatttaagtgacgtcatataatatttgtccacatatttgctgacatgttaaaaaaaatgcatgacatgtgtttaaaaaataaaaaatatatttgaagtgataaataataatgttataattaaattgtaaaaaaaaa

SEQ ID NO: 181706 - DNA, 570 bp, Cannabis indica
atatatcttagatgattgccaccatactttttatagtgaaacctttttttttttttgaaagtatagtgaaacctttttatttatttaaaaagaaaaaaaaaatcgttgaaacaaaaaagagaaaaaacctaattctctgtttctcttggaagcaacatagccgcctgaaacgagaattttccctgataattttcttcctaattcgcttctactcgttcctttctctgtcgtatcaccagtatcgggtagttatctttgttagagcattcatggggtcgataaagaggaagttggatgaaaacccacctggcgaaacaccccagaaacagcctagggataatggtttggaggaaaagcttaatgatgaacccattgcctgcttacatgatgtgtcctatccagagggttatgttccttctgcccgactttcttcgactccaatcactttggagcctgccaaagtattccctttcactcttgacccttttcagtctgaagccatcaagtgccttgaagatggtgagtccgtgatggtaagtttttctttttcctgatatatatatatgtata

SEQ ID NO: 181707 - DNA, 469 bp, Cannabis indica
ttatttttcttttttctttctaaatatatattgtattgttcttagttaattactaaattgttcgtttttttttttcatatatattattcttttttttttttttggaacaaactattcatatgattttttatcttttgttttgccaacttcatatatatggtcgttgtttttaataaattagtagatttaagttatattacttgatctcttatgatcttgttatttcaaaattttgatgttgtgtgtattatatatcatatataaaaaattgtacttttaaaatgttaatattgtaatttttaacattaatttagaaaaaagtattaattttattgaaacatcatatatgatatttattttattttagtattttttatttctagaaatatttatttcataaatttataaaatagtactttataatgaacttagtaatcaaatatatatatatatataaatataaatagac

SEQ ID NO: 181708 - DNA, 556 bp, Cannabis indica
acattatgtacatataatcatgaaataaatcatgtgaaccatgcaacattaaatgttatttctgatctatattaataaacaaatctgattatattgaaatgagttttatttagggcataaaacccaacaaagccttgtttggtgtagagtaaacaaggcttgtctggtgcctccggttgtctcattgatttcctagcacgttcttcagacgcgtgggctgcatttatgacaatcatcattaatatttattgctttttgcaggcaacgattcgcttcccgtccattaatgatccgacacatttaatcggtgtcagacaaatactcaagcatttttagcagccctgatgagcatctatcctaaccgttggatctacagaatgcgaatcgattgagattcccactgtacgatggcacctgatcacagctgctttgcaccctttttggcctataaaagccagcttttctcattcattttgttactttcgccactttgccatttttccacaagaacacctttgagaaagaatatcagaaaccatagatttcttgctgctat

SEQ ID NO: 181709 - DNA, 782 bp, Cannabis indica
caaggcgattgtgccattggtttacatttgatgtatgtaaatcgaaatgagattgactggaggcagcagcaagtggtttatcttgagagatgaggtacaatttgtcatatctcttagctatccgaatcaccaccttccgagagaaggatcctgtataatgcatgaattagttttaaagagaacattgttgggtgtattggaaactaaatcattgatagacaagaggtttattcagaagttaggcacatatagaacattatgcagaactagagagttattaatgcaaactgtaccacattttgtgacttgtaccaacccaccagtaggcaaaaccacatgtttgggaaatgatgtgttattgaaagatgtaaaacaagatatatttgaacacatatggtgggtggcaccactatcaagaataaaatcaaaagaaagttgtgagatgatattaccagccatattcgaagcagcaggagtgttttcagcagttggatttgcttgactgagctactagctgaggagggaaattaactgttgacattgtgatgtaagatcagcagggatattgggggctgttgtgtgatctgcagaatgtttagaggaagtgtgattggcttgagccttgcctttatccgccttttttttgtctccataaccaggtggcaaaccatggatgaaaaagcatttatccacaaggtggcctagtttgccacaatgagacaagagacggggttttttgtttctagggggatttgtagatggtgggcaaactgaagaggcaa

SEQ ID NO: 181710 - DNA, 521 bp, Cannabis indica
aaaaataaaaataaaaaatccatttttcttttcaccacctcaagaaatatcgaaaaaaaaaaaattgaaaacgactgcgtattggtggtcttgggttggacttttctaatctttcattggttgttgtcaagatcagacaggtgtgatatgactgtgacaataaaatatcaatatgaattagaattagttatgtacggaattggttaatcccttctcttcctcatcctttaaacaaaccactaaccaaaaacctgaaccagaatccaaagccatgactaaatccatcgtcttctgcttcttcgttattctcattgtttctgcttcttctgaaaaccctaccccaactccttctgcggtccacgccgagctcaaaaactttggcttgcccatcggtcttctaccttccaccaccgttctcaactacaacatcaaccagacctcaggcgatttctcagtcaacctcggaggcgcgtgcaagatcactctccctcctgataactacctggccacctactccaaga

SEQ ID NO: 181711 - DNA, 517 bp, Cannabis indica
agagttgaaacactacctcaagcttcaagcaagaatcaaacataagaaccacaaaaatccaagcttgaactccaactaatttttcaccgaatccacaaattggaacaaaggattatagagagagagagaaagagagaaagaggcagtttcttgagaggaaaaactagaatattaatctttattttccaaaaatttcccttttagttaataatcaaataataattccaaaagaccaaaatgcccctagggccaaaataaatcataagcatcaagggtaaaaatgtcattctcacataacaccattaaattaattttcagattaatcacatattaataaaataccaataaataatcctaaaattgtatttcggcccaaactcggttcgttccgaaatacccgattgtgactatactgcgccaacttgtcagaacacacctgaaaaaagacaaaacaggcatgtatataatatagtccataagcacacaataatataaatttctcagttttacccttctc

SEQ ID NO: 181712 - DNA, 988 bp, Cannabis indica
aaaaagaaaaccattgttccaaacaatctaaccctaagaacaaaagagtcaacaaacaaaccatcaacagaaagaaagctttttccttcctttttgggggaaaattttccactcaacgagggttgtttgggcattcccgagcaaaatgtccagtcccaccacagttgaagcagtttccaccaccaccaccgccgctaccaccgccgccaccgccgtaccttcctcctccaccaccgcttgatcctccctggaagcaatccctggccatgtgaccactttcaccgcacttaaaacaaccgccatcaccaccgcctctgccgcctctaccaccaccgccataaccaccgcgagatcctcctcttccaccgcctccgccacttccaccgcgggttccctgaacgggaccctcgttaggaccggtgacatcgactgccttggtacgattattctccgtctcgatctgaaactctacggtttctccgtcagcgaggcttcggaaaccgtcggatcggatggcggattggtgaacgaacaagtcttcggttccatcggaaggggttatgaagccgtaacccttttgatcattgaaccacttgacagttccgttcaatctctcgctgcccattgtttgagttctctggtctccaaacccacaaaaccctaaacctaactctcttctctttctctctctaaattcactttctctcactactgactctcctctttattattactaatgttatttcttctcttcttaaccttcttcttcttcttcttcttcaaaacgctgtcgtttttgacctcttgttgtcctcaaacttcttttcctaaacactgtcgtttttgttgttgtttcaaacggtgtcgttttgtggtgaagagtgttgaaagctttgctgtctcaacgtgtcgtttaactctttgtttgcaaattttctcttcaaaacgctgtcgttttgttacaggaatagtattagctgtcgttgtt

SEQ ID NO: 181713 - DNA, 580 bp, Cannabis indica
tctctctctatatatatatacactagtggagagacacatacaaggtatgtgtatcccatttgaataaattttgaacataaaaatagtgcataataagtaataaacttttatgtattgcttatttttttaattatttcaaaaaaaaaaattacagttgtacggaatttgaaataattttacagttttaaagattttatttacataaagtctagttttttgatgtatttttatgctatactattgttattttgttgttgattttttgttatttatatattattttttatgttgtttcgatgttgtttggatattattttcctattattttcatgtgtgtgtttttttattatttttataaacaccgtataaatgttaaaaaaatttgttttcttttagaaaagatttcgttatataaatcaaagagagtcgtttacaacaatagaaagaatagcctagggtaattcctcaagccaaatacaatcattatcctgcactaaagcatgtttcgctaaaccatgagcagcatgattagcatctcgtctaacatgacgaacataagctaaaggaaaattagataaat

SEQ ID NO: 181714 - DNA, 623 bp, Cannabis indica
ctaaaaatagtacaaataggaccataaactgatttattgtgaaaataaaatttaataataacctcgtttctgaatcttcatctaggctcaagtctcaaccataacgaagtcctgaagccaaagggctatctcttccttcctcatatatgttttgctcatcttctccttcttcacacagatgaggctagaagtagaaggcgatggttgccttgggctttttttcctgggctgagtaatacaaccaactcttccttgattgtttcttgatccaatgatattgggcctagattttgggctactccatcattttgacttttctagacatggtctatctcattttaggtttaataatgggattattttaaaaatacacaaaaacaacgctaaacaaaaaattacaaagatatggttgtaagaaattttaaatatttttacggtttttaatattttttttacaaaaatacagtcttttaaaatttccatgttatttttatattgcactcttatttttttgttgttgtttgtatattatttttctattgcttttatgtagttttcttgttatttttatagaataccgtaaaagtatatatataaatctttaaatatttttacggttttta

SEQ ID NO: 181715 - DNA, 519 bp, Cannabis indica
ctactttctttttggagttttttttattaacatatgattagattttaagttgatgggtttgataatttgtaaatttttatttaatttttaaatatatacagaattaaagataaacaattgattatatttattttatttattttttataatttttaaattatttttaaacatttaaataataaataaaaaaaattaaatgacggggacaatgaacgagtgacacatggacactaacctgccacataacggagaggtacctacggaagttccagagtagtgacggaaggtatttttacagccaaaaataggacttaggtatttatctgctactcggcataaaacttaagtatttatgccgcaaattactctaaatagaagcataagattttagaatgtagtaattttatgttcgagaaatatagagaaaacactataggatagttgataatttttttagttaatttttgttatgagtttttaagttctcatattattaaagtgggcgataaaatttagtat

SEQ ID NO: 181716 - DNA, 517 bp, Cannabis indica
actatatatgatcaacaacagaaaataattaacggttaccaacgactaatataccatagcaaattaaattctttatattttcgctcaccaaaatcaaattaggagctgacctctagggtttacagttgaaatacagtaagtacattataattagtttatatatatagagggacacgattttgtcccattagtacgacaaccgttaaatgtggtagttatttaatttgaaaattgaggttgatttaggagtaattaaggttaaaaaatgataacataccctgaggacttattacgtaccctgggaccgacctgtcgtacaacagaatacattcggtgttttgttatttctgggcacaaaatactgctgtatgtatatatatatatatatgtatatatatatatatgtagtaaatgcttctatttgcggtggttgagtaacatttggttttcacatgatgcacatacacgtatattatatatcgtgattattaatttataactcatatctaagatgtgg

SEQ ID NO: 181717 - DNA, 599 bp, Cannabis indica
attaaaaaattaactactcactaaactacacaataggcttcatttgactcacataagatctatcagaatcctttcccaatcaattacagcaaatgtctcaaactctcttaaactaaaaatactcgtgcaatgcattatcagtgagggaaattggattaaaaaacccagtgagggagaataaaaatggaaagatgtagggatgactcgtaccacttgaaaatgcaacaatgagaaaaagaaaaaaaaaataaatgagagcagaaagtacttactcttcaaggagtctttgtcatcataagaagcaatattagccgttgctccaaatccttcaaccttccttgcagatttcttcttgtctgggagtcgctggtaactgaaatccttattgctattgttctcaggttccctgtcatcatggtcacgatttctcctatctctactctccttttcgacacgcctcctttgatccttgtgcattttttagggatttatcatcatccaactcaggacgatcaacactaagatcacgatctgcatggggagcaataatcctatctcgtcgacgttgctgctaagaagatataaatttcagcaccacc

SEQ ID NO: 181718 - DNA, 614 bp, Cannabis indica
tacaatttattcgttatatatatatatataccaccgccctcactataataataataataataataataataataataataataatggtcttaattttgttagtataccagtcatgaaaaattgtattatctatggatatttttagtattttctgtgtataaataaatattgtaactgtatttataatatatactatagttacaagagaaattaatttttcataaatttttaaaaaattactattactttataaatatgtcaaaattatgattcaaataattattagacatatgtttgtttattaattctattaatttagatattttaaattattttttaggagtttattaaaagtttatgagactaattacactatatatattatcatgtaaaataattaataaaattattataaattactcatgaatagaaaataaaataaaataaaataatgataataaataaccaattctagctactagctgtataaaatatatatgtaaaataacattgctttaaaaaaaataaatacattaaggtaacatatatgtcatgacaacgatagtaagttaaatgtcttccagtaattataataattaaaaaaatccacatgt

SEQ ID NO: 181719 - DNA, 1129 bp, Cannabis indica
ataaaaagagaaattagcatttttctatatgtaaatattttgttcaactatataatttaatatattaatttttaaaacatattactaaccaattacaaaccaacacctttaaaaaatactatactctataacaaaagaaataggcaagaatggatttatattaaatggttttatatattaatgaatatcctgtatgcttgaaaaagtgaaacctggaaggctcacatggattgagacagtattgatcacttttcgacacgtgtataatcatgcctctgtgcttgtactgctgcttttgtttcccaaccctttttttaaaaaaaaccattgcaatcgcttccacaccctcttcttacttaattaaccttttttttgttcattaaccataataataataataataataataataataataataataataataatacactcttaattttacacaaccactttacctgtacaatgccaaattgtgtgtcttataataataatgtaatgtgacatgaaaatatacatataatattagtacctacccatatatttatgctatgcaaaatcttttatcatgtcgtttggtctttttatgtttcgattatataaatagctttgctcaaaattaaataattaaatatattactacctataacaaggtcaacattaattgattttcaattccaatataatatatattattagatacttttgtaatgcaatacaaaattttgagagatttagaaaaatttaatatatcaaaaataaaattcaaccagacactctattttgaaatctatttttaggatgttaaattttttcaaaattatgtcttaaattatcttaaatatttacaatgtatacaaatataaaaaaaaaaaaaaattaagactaaataattctatcaaatgttgaaacaaataggagtgtatcgatgacacccttttataacatctcaaatagttatatttgggtagatgtttgtttatgtgagttgtttattcggcaaacacaagaatactgtactattggaattaaattaaataggtactatcatagaaaattaatgttgatgccactacatgacattgatgctatctttttttttaaaaaaaaaaacttaagtaaaggt

SEQ ID NO: 181720 - DNA, 660 bp, Cannabis indica
ggataataataaggagatgagaaagaaggtgacacatttggtggtggaccaaggtctttgtccagggtccgaactagccaaagtagtcattggattcacccttcatcatattctccttaattataggtaattcatcataatcatttatttaaaataataaccaaaatcatcttatacatcaccaaactaattaatactatatatgtagtctctcctctccttgaaatgacataaatatttattaattgcatggaattactatgaggcagggtttagttttgtgaatccctcctatttctttgtatcaatgtaatattttaatttaactaatatcttacacatactactaaattaatttcaacctaatatttaattaatacgaatacatatataataataacaattataattaaatgtgtcaatataaaatatatctatatattttaacataatgatcatgactggccactacattatcattatgagtatatatattaataatatataatattgcaattaatttgtacgtacgtaggtggaagataaaagcagatgaatccccgcttgcttacccttatgtggaatttcgaagaggtttgattttggagattgaaccagctgaaaacacatacataaatattacaaactaatcatatatat

SEQ ID NO: 181721 - DNA, 635 bp, Cannabis indica
actcaatcaattgcaataataattttttttttatgttcaaaaaaaaaaaaaaaatacaattgcaataatatgaaaaataataaaaaaaataaattaaaaatagtatagtagtgaagagatagtgaagagaaaatatataggaaagctatgaatctgatctgacacatgccaatctgccatgaatgtccgtacaatggtgtttattggatgaagattcaattcaaccactcttacctcaattatgccatcatctctgtggtccatcctcctcctcttcttttttttttttttttatctttcaaaaattataaaaaaaaaaaaaaactctaaaaaataattgaataattgaaagttaaatattattttagacattctattttaaaaaagaaattaatgattgcatctgtaacgttctcgcctgaagccttcattgggcccttacacccacgtaataataactcttatacacgagtacgtcactctggttgctttatggaaaacttctcaagaggtcacccatcctaaaattgccccaggccatacacgcttaatagtggaattctttcgagatgggctaccgaaaacaagatgcacctattgatataggtagtattaatcaatccatttagggctcg

SEQ ID NO: 181722 - DNA, 564 bp, Cannabis indica
agagagagagagaaatccaactgatccaagtggcagactataactaagaaagatttgaaccttttttattatattgtacagtatgatgtctatatcaactatacctataactcaaaagataaactgataagtgataatgtgattaaacaaaaagcatgaatgaaaggactttactgtgtcattgtcatgagttccagtgtacacaacttgattcctctcatgattatggggtaaatgaggattagcagcatcacttccaaaacctggaccaagaaagtataatgtagtacatgatcaaagtgtgaacattaatgtttgttcaatagcgaacagtatagtaaactggcaatgacttaataccaaattggaggaccgccattccaggtgctccaatggaattcctaagttcaatcacatcctcagttataacaccctgtcaagtaagagcaaatcatgagaaaatgcatccaaccttaagcaaatgagtaaatatcttcaaactctattcacaagaagaatgagtatatatatatatatatatatatatatatatacaatacaacc

SEQ ID NO: 181723 - DNA, 851 bp, Cannabis indica
aacaccaaaaaattgatggaaatggctaattgctaacagaacttgggtttaggaggttttaccaccaaaattttagaattgggggttaattgtaaaaatttcgccacttaaagaagttatgtcgtaaattactcttttaaaaatatattttttttattattgttttatttttataacttttaaattattttttttataatattttaataattaataatatctggagcactaaaaatttgtgtgggtattgggtagtctaccatggtacttaataaaagtttttggatggaagtgtaaaaattaaaacaaaatgggagttcaataaattttattgtcaaaagatgaaatttatggggttaagtgttacaaaccataaaatttagataattttaccactaataccccatatataatatatcttgtttgcaatttttatttgcgttgttatggctcccatattcaattctaatctccaccgtaataaagttactaaaagttgattggtttagtattagaaaataattttatatttttaaaacttaaaaaaatgggttctacataaaaacatagtgttctgcattctgttcggtttggtaagaagtagggataggtagatggagagagggagggagagagtttagaagaggtagaatcctttgtttggtaggagaggagaggttcaaggagactttctccctctaaattataaatatctaatcctccattttaggaaaaatttgagaaataatacactaaatataaaaattattcttttaaaaaaataacaaatatttatactaacaagatatatgataatttaatgactaatttctctctatccttcatccttt

SEQ ID NO: 181724 - DNA, 1074 bp, Cannabis indica
ataatttttcagagaaacaacacgaaaataacaagaaaactacataaaagtaacatgacaataacatctaaataacatcaaaacaataataaaaaataacatacaaataataaaaaatcaacaataaattaacaagagtacaacataaaaagaccgtattttctgtaaataaaatcaaaaaaatcgtaaaaatatttaaaattccgtaaaaccataagtttgggggcccaaaattgaatgaaagggaactggtcgtcgttcggaaaggagctccaaaagactagcttgtccatccggaagctggttgtcgtctggaaaagagttctagaagggtagcttttccctcaaggaaggggttttggatagtccgttcgagtaggctttatgcctatccgggacgtccttccaaattgcgcttcatcagtttgggacgtctgtccaagaaacgtgatacatgtctatgcaatttggaccgagaattcgagcaattaaaaccgatcgatcgagtctcaaaacattatatatagcagaactcaccttctctagatagctagcttacgtactcaaccacaaaatttaaaccagaaaagttactaattaatttgaaactaatatatattatatataaagagatcaaacaagtccgcattaaaatcaacagatcatcctaattaatttgtggggattggttttctgcagaaattaaaagaatctgacagtacgtaatcaatcaatcaatcaatcaaattctaatggtactcttactatatattggtatcatatatatatacatgagttaaataaattaatgaatcaacaaattctaattaattaattaattaatggtattggtctaaaagaatatataagcttaattttaattatctgaatctttacattgatcagaatcatatatattcaatataaataaatcaaaccaattaagtgtggaaccataaaataaagatagatatttaaattttctatttaaaaataataattttttttttttagtactgaggttaaagttacaaaaaataatacattagtaccattagatgactctaatgtttt

SEQ ID NO: 181725 - DNA, 618 bp, Cannabis indica
atataattgttttctatgttatcataagtacttgtgttaatgtctaccatttatatggtatttgattcaacttctttatataaaccattttattgtttatttttagctgtattaataaataaaataatgcactttctttttacccatgtgttaatgttgtttgattaattataatataattgtagtaaataaaaggtttattatagtagtacttcaaggattctcattttgatagaataattaatgatcatttaattcaaaaagaaaagtgttatattcgaatatgttgcagtgattacaaactcattataaaattatttttcaaaaatttggagaaagacataataattaactggaaaataataatattctattgaataaataggctccacgcaggtgtttacagggtcagttaggttaggtccttatttagggtctacatttttttaaatccaaaataaaaaaataaaaaatttgactatgtttctatttaactaaaattaagtgtattgtataacgcatttagattcgagtccaatgatattcttttttaatattcattttttaatgtatatttttaaaaatgagaactccaaaatttaattgacaacatacata

SEQ ID NO: 181726 - DNA, 660 bp, Cannabis indica
gcccttagtcataattatatcaatgcctcagccaaaacaaaacttaagttgggattccataattttttttttgttatcacacactttcctcatctaaactacacaagatttcaacaagtaattgttagaattatcatcgtggactaatataattttagacataattttataacggcaaattaatcattaactatatgcttaatatttatcaacaaccataatgagatagttaataattattaatttcgttagaggcatatgaaaacacctatatgactataattgacccagtaagttatagtctaccattaattagaccttattagcccaataaactacataaccatcttagggttagaagggtgttttagattataagtatgcatgagttttgttaatgctatggtaagatactgagtgggtagctcttcgtttggttctctcttctattggtgttcaagttgttttcacacattttttagaatggctcaaatggatggaatgactataggaggtatgttgtggatttattgctctaaataaaatatgtgattttggattatatacagttgatctaaatcactatagtccaggaaattgccaagattctgagattgaaaggtacagtgattcgtggctcctgagtcagggtacgagttt

SEQ ID NO: 181727 - DNA, 557 bp, Cannabis indica
agaggattgttgattagaaccactcctaagtgtatcgagttgaaacttcatcaacgtctagctaaaaacgatagtagctcttaacaaccctccaaaaataaatttgataacataagatagtaaatgaagttaattgtattttaatttatatttatataatttcttttaactttatttgtcaaatcaaaattttgtttgtcaaatttaattagaaaaatttgattaattggaaattaaatagctagcaatcatcgtgaaacaaaatctaatatatcagtacttttattggttattttaaaggatacatacatgataagagtaaaaatgatactcttagctaataaactacactttatatattttaattatagttacatcaaatatattaccatcacagtctttttcttttgttaaatatattacctatcacagtacgtttgagtattattaaacagtttaaaataattaaaaaaactacctgtaacctagattataacctatactattttatttactatataataatttttgatatgaaagaaaatatttacaaatat

SEQ ID NO: 181728 - DNA, 718 bp, Cannabis indica
atatatatatatagataagatttcaatttgtatttattatttattctttgggaaattaaagagattaatatacatgcgcatttatagcaaataaatacatgagtatggatgtaataaatgaagttgtcaattaaataaagcttaataaaagaattaaagaaaggtcacccattgaagacctgaatgttcttggtcttgacatgactgatggtgatattgatatgtatatagttgacttgacctatcctttctcactcgaaaaaggacaaacattacacaaaaatgaagtacataaatagatatttttaatgtaatgtaatgacctgtcctgcatcttctctcaacactagtacccacaacaagttgaagtagcacagtttctagagagaggagatgaattagttaaatggattgatgatatgtgttttggtttgggaaggcaagtaaagaagaatcagaaatattgaaattggaagagatgttttatgtgaaatataatattaagtggagcctcctctgctgctccttcatcgtcttcttcttaatttgtctgacacctcatccctccatggctcaaactcaaaacgccacaacagatctttctgaaggtttgtatacacatatctatctttctttaccttttactacttcttcttcaaatctctgtctttcatattataagtcactttttagatttttttttttttagaaaaaggta

SEQ ID NO: 181729 - DNA, 582 bp, Cannabis indica
tatatatatatatatatgaagttcttaagtatacatttgagaaaaataattttttaaaaacaaaagtctaatcaattataatttgtgtggaaatctcaaattttgagttatatatatactttctttccatgtatagttattcttcattaatctaatccttatatttataatgattatatttagtactattcatgaaatctccattctccctaagcaatacatagtttattggtttctataattttgtgctaattttattttatattttttatgtgccaattataaagtggtaaccgtatatatttatatatatatatatatctcatattttctcaaggtagagtttatattcaatttcatatattggctaattgttggtactatctggttctactttttcgtaattttcgattatggtaactgaagttttgtttcttttagatactctattacaaagatctgtaatacatgtattatttatttttgactatgaggaggtggatttctttattgggagacatatagcgtgacaaattattgttcatatatttaataattatttttgattaatgagattcatat

SEQ ID NO: 181730 - DNA, 651 bp, Cannabis indica
atttttaattgtttcacttacaaataacatagaaaaaaattagcataaatttagtatacgtgcctctcacgtagtttttgctagtagagatataagtattgataacttacagtcagagacagagatacaatattgctataagtttttaaaaatattaaaataaattaagcacattaataaataaaattagaattatattagagcgaatggatactctaacatttgttttaatcttgatttttttctattttgcttttgttgttttcatcttttattgtttcttcattgaatcattcaaaattaaattagttggtcagataaaattagattttattatttggtataattaattgtttcaattacttgaccactgtattatttatttgatttgtgcactaacatactaaataaattttgccaatacgactgagacgagccaacacaaaagtatatggccttgtcggcacaaaaggctatttttgctttgcaccgtcaaaaaaagcacaaattttgtagtgctttaaaaacttcaaaattttaaattatagaattaaaccatcataaactgtgaaaaaatatagaaggaattaattttttttttcaacatgcataagcccaaataatttacaaatcgatttaatttcaggtaag

SEQ ID NO: 181731 - DNA, 693 bp, Cannabis indica
gttttttattttttattttgggttctcaaaaagtatgaatcctgagtacaagcctaactcgcctatatttagagctaatcctatgaaataaaatggactaaaacgttcttctatatatcaaaacaaataaaaaatatagctatagcaaagaacttgaattacccattattatatatgcaaagaacctaataaaacatatacattggcttgcctccaattgttgccataagatacatcctccatttttcattaaattaaaaatcaaaactgcctgctgatgatatacgtggcctgtctgtgatgtccctatatctatacattatgtatatatttattcccaaaaaactttatttagacaaaaacccaaaagaaaaaaaaaccagattgaaatttgaaaaaattcatgagatccagatctatatctataatatattcacactagctagctcaaaaagaaactatatattatatataaataaatattgtgtattaattacatatatgcacgagtgtggatatatgtatggaagtcgtgtctctattattattattatttatttgaaaaatattcataaataattggagataagaaaagttaagagggaggaccacaacataaattaaggttatatatctttgtttacgtgggattttatatgggtaagacacgtatgtttttgttgtagtaaaaat

SEQ ID NO: 181732 - DNA, 651 bp, Cannabis indica
ctcggagcaccattagcaactttacatccatgaagccaacctctttgttcatacttgcagagtagcgcagtgagaccctcaacacaaagaataaacagatacggtgaaagaagatccccttgtcgaatgcctctcgatggaataatcagcccaacttcgtggtttgcatgaataactttgtaccttcccgatgttacacatttcaacaccaattgaacccaattttctgaaaaacccattttacggagcatcgtttcaaggaaagaccactcaactctatcataagccttgctcatataaagcttgagagccatgtacccttcttttcctgtgcgtttttctttgtaagtaatgcagaatttcaaatgaaaccagaacattaaccaaaaattaaacgacttgggatatacgaactttgattatctgaaatgaccgtatcaataatcagcttcattctgttgaccataaccttagtgataatcttgtacatgatattacaaagtgcaattggatggagattagacataagtctggattttcctttttcggtataagcacaacatttgcctcactataaccgtcccccaaccgtgcactgattaaagaaataaacagatgcattgcaccaccatcacttcgaacaactcgacc

SEQ ID NO: 181733 - DNA, 622 bp, Cannabis indica
ccattaatattaatgtggggctataaccccactaacaaaaatattgcattttaaaaaagtaaatgtaaattttttaatttgataattatagaccaaaataatagaaacgctaccacaaaattaaataaatctagtaaaagtgattatattgtaggtatacatatttttttttttatgataaataagctctcacaaaataaaaattctaggtatgtcattggtgacaacttgtatctaaatactatgtttagttacagataacttttttattgtgactaaaagtcacatttagttacaattttttttgttgggactaaaaagttatctctaaaagtagttttcactacaaaaaactgctacatttagtgacaacgttttagtcacaatataatttttttatgactaaatgtaatttttagtcacaataaaatattacttgtaactaaaccatagtatttagatacaagttgtcaataatttaattttaacaacaacaagtattgtgactaaaaatatatttagtcacaacaaattataattcttgtgactaatacttttagttacagaccttttagtcataagataggaatgatgatttacaattagtcataattttttctac

SEQ ID NO: 181734 - DNA, 512 bp, Cannabis indica
aatctttttaaaattcagggtaccgattttaaggacggggggtttattttggagttgagatgcggttatttttcagattatgggtgggtttcagaaggcaagaggttgttttggtctgatggaggcggagagggtaggagaaataagaagaagaagaaatgggaagatgaaaaacaattttgggtttttaaaaggggagcaatggcactacattttcgtgcctcttgaattgcaaaatagtgcctagaatcttaacttggcacgtcaggtaagagttgtagggccgacgtggtcgtgcccacctataatggagggaaattcccgctacattagcatctacttttcaaaacttttggagcacaacattttcgtgcctactgatcatagtgtcgtgccaagctgccaccaaaatttaaaaaaaatagaaaaaaaaaaaataatggcacgacagtaagagtgtcgggcccaaaaatactatgtgattggcatcactttaggtcgtgccccactta

SEQ ID NO: 181735 - DNA, 581 bp, Cannabis indica
aggggagatgacaaccaacaacttgattctggtcaggaagttagtttaggctaggccttgtagttagttagtattagttgtccatttgtgctaactataatgaattttgttataacagaaattctcagttttgtactgaatcaaaagtgtataaatgaagttcttagctcattaatcacactaagatttctttcaaactgaatcaaaagtgtataaaagaaagttagctgagattaattctctcaaactttcttcttcttttgttttctttcaactaaatgttccttaactatttgacatattaaattgtattttaaattttgacatgtatcaaaaatattatttatttgctataattaaaatcgtgcccctttaaatttaacaatcacaatagttcaaaaaaaaaaacttaataggcctaaattttataaagcacaatttaatatatatcagggcaaaaaacccaacttaatttagaactagagaacgtccaagtccaatagttggggaatatatatatatacgtataaaatatttgaggttaatataatactaggtaggatagaaacaaagaaagcgca

SEQ ID NO: 181736 - DNA, 727 bp, Cannabis indica
ctagcttttgctctgtcgtattgtccgctgcttcactcgaatccctaagagggatgtggagagatgaaaggttcaaggcaacggatgatccttcgaaagagtaagtacaacgagggtgatcaaaatgtcaattcggagagaggaagatcgactagccaaccaaagtagaggacttccttgagatggtttgaccacaactaagaatgttcttcaatagcgcaccaaatgcgcgcaatacaataaagcagtgcgctagaaagaaagaggagcagaggttttcaaaccaattataaagctgaaaagcaaagaaagaaaaaggggggtcttgtcttcaaagggggccaggtcagccatagcttctttgatcatttccggaagggggaagaaaagaatgccgatcgttagcgagaagaaaaagcgagagcctctgctctctccacaatatccttatatatatctcttcagggggcgccctatctattaacaaatgatataggattggtacgtctaagggaaaagaagttcgaattgccaaagtacgcacaatggaaaaaataagatcaaactcctcaatagtcagataggatcgtaggctaccggtgaccggcttcgcgagaccttatcggtctactcaaggcgttgctctattgggcgcagctttctggatctagcttcttactaactgaaaggctctgtcattctttcttctctgaagatcttatgaaaa

SEQ ID NO: 181737 - DNA, 663 bp, Cannabis indica
gcataaattgaaccaacaattaggataagtacgaaaattaaagcttctataaatacggatacccccaatacatcgaaactcattgcccagggataaagaaaaaccgtttcaacatcaaaaacaacaaaaactagagcaaacatataataacagattcgaaattgtaaccaagcatcccccattggttctattcctgattcataactagaaagtttttctggtccttttctaatcggggctaaaactccggaaattagaaatgccagaataggaataacacttgatattatcagaaatgcccagaaaatatcatattcgtaaagcagaaacatagacgtactcccattaatgtggaaaatataccggattagtcaatccaaattggacttaattgtcaagtcatccataactgtttagtcaaaataaccattcattttgatcgaatcgcttaatttcgtttgtttgttgcggtatatgttttgtttcaagattctctatatccactagaatttcattttctatttccatttactttcgatttttctttttgattttttatatttgattaaaaaaatcaaaaaagaaaataaatagaataaatcgaaagtatattatacaaaattcgttgctttttcagtattatctctaaagtaattaaaggta

SEQ ID NO: 181738 - DNA, 754 bp, Cannabis indica
  modified_base (47)..(47): a, c, t, g, unknown or other
  modified_base (70)..(70): a, c, t, g, unknown or other
ttatatgacagagacttcacactatagagttgtgaaagtttgaactnactatagctcaaaattgctgtgngtgagacaaaggggggtattgatcatgccattatagcaatatatgacctagaaatgtattaaagagtggctcatttagaaaaatgaaggctatgaacctgtcaaagctggatctctaaaggcaaaacatgtaaagcaatatctgttaggatttataaaacactcaaagaaatatatacatcatagatctaaatatatttctaaaagtgctttaatatagaaaaccttaaatcataaatctatatagcttttgccaaattaaagaagaagattatgataaaagataagcggaagcactaacctaaagccattgttggaaattgcagaaaaggttttgatcttcatacactgtattactaaagtattttctctgatgggaaaagagggaatacagaaaccctagtgtttcttggggaccacttgtcacgacccgagccctaggttgtggcagatgtgtaatatccataacttgggtggtcaaaggtcacactttgacccttgtaggaaaataaagcttataaatgatccttttatttatattacaaaatactaatttaaaagatatggattaactcctatattaataagaaaatattagtaacaaaatcaggaccactcatcaatataaaagaacagtaatatccccacagttatgtaatcacgaaatagatagatttaataagtc

SEQ ID NO: 181739 - DNA, 832 bp, Cannabis indica
gcttcccctaacctataattattaaacatttgtatatagttattctcaataaatatagagtaaaacctcattctaaaaatacacttaaaattaaacaaattttattctaataaagagattataattaaataaaagtactaaaaaaattcaaaacaccaaaaaaaatataaaataacaataaacactcattaataatatgtcataataaaattattaggacaacaataacaataaacacaatatttaatattacatcacaataaatttattcttttgagtaaaatttccatatactgcatttttttatttttataaaagttatttccattttgaggttatactattttagtttaaggttatgctatttttatttttataaaataaaaaatcaattataaagtataaataaaaaagtccatataatattttatacatgtattataatttagaataaaattattaattttacataaataaattttaaaccatatattttttatttagatataattattcttatataaatacatactttcttaattcacaatttgatttaaaaaatgtataactaattacaatttaaaaattatttataataaataattgttctcaaacttaatttttttattaatattcttaattaaataaaatattattaaagattttttgtctggtctgttgacctgtgtttttcttctctgttttgtctgttagtcgtttatggtgtaaagtggtatcttggctttttgtcgcctctttgtttcttggcctgatttgatcatgacagatacagagaggatggatatagaaaatgatagggactttgtcatcc

SEQ ID NO: 181740 - DNA, 515 bp, Cannabis indica
tttttttttttacatcttacaatactatttttgtaacttttatattataaaataaaatctttactcattatttttactccttctaaacttattaaaagttttaagaaaagttaatcttaatctataattcaacaactccaacaaaccaaaattcatagtccataaaccaaagtatatagtccaaagtccaaacaaaactaaatccatagtccaaacatataatcaatgaataattttaaaacatcacaaaaataacaaaaaaaatacaaaaatacggaatttaatattttacggttttctagattttatttatataaaatacagttttttcaatatatttttctgttgtactcttattattttattgttgatttttttttgttatttgtatattattttaaaattattttttgattgttattttctttgttacttttctatgtaaaattttcttatattttttagtagtaatatcgtaaatatatatataataaatgtaaaaaagtgtaaaaaaa

SEQ ID NO: 181741 - DNA, 430 bp, Cannabis indica
tattttatggatttatcttaagattgataggattaaataagagataacgacggtacccttatttttgaaaaaaaaatgttttttttttacactttaaaataatttttttgttttatattttatgaaattttatatagaatttcctattgcaactagcgctgcaacttaaatcgcaacaaaaaattatataaaaatctctattgcaactagcgctgtaatcactttagaaatccaaaccgtaaatttaaaaaaaaaaagttaaataaacagtatatagagtaattccctaaaaataaattatatcttttaagttaaattctttttttatataattttacgattttgcataaaaacaacacgaaaataatataaaaataacatgaaaataatatttaaataacattaaaataacaataaaaaataaatatat

SEQ ID NO: 181742 - DNA, 757 bp, Cannabis indica
tgaaggtatatatataaacatagataatatgtattcattatatactagaaatgacattataacatgattcatgtcgtatttgatctaaagttatattctatgttattatatttgaaatattcatcatatattaggtcgtttaaagatacttttaaattggtatcatagcatatataatattgaaatatctactatgacatcttctcaatatttttccctttttttaccagaaaataaaaatctatcataataataagtaaccgaacattagcaatatatgttcaaaacaatattattcttaaccgcatatatagctacactcttcgaaaaaatatatcttaagaaaatatattaaaaaaaagtgatgatgtatattaaacatttttaattagtttaagtttctaattttaagagaggtgttaaacacatcaagtgataagttatttttttttttttttcaagtgggggtgggagctgaaaggtgagtactattgaattagcttaataaatttttaaatgcctgtggatgcaaataaatttaatgtaatatttcaaatacaataacttggacccaaatcattttttagcatataaatttatattttaaaactataaataataataataataataatcaactatagaatactaaaagtggatagggcctccacttctatatgctttttatggtgcttagtcatttgagattcagccttctcaataaaaaaaaatatatttttagaagtaagaaggcttg

SEQ ID NO: 181743 - DNA, 617 bp, Cannabis indica
aaaagtaaattttcaaaaaaaaaaatagaaaaagaaactattctttattgtggttaatttaatacgtaatatagatatttttccatcgttactatagtaaaaggtaactatttagttaattatgatacctaaaatgtaaagtaactaggaagttacctttccacacacaacacaaaaataattcattcatttattaatatgcacttctttatcaggaaaaaaataataataattgtttacgatgctaataaaaagcgttgtaatgttagatttttagtggcgactgatgatattttaattagtaaactaacgcaataccaataggttaattgtttaaaaaatttatatttttataattatatattgttgaaatgtaactaatgagtatataattgatatggtaaacaactaaatagttactttgattttaaaaaggtgaaaaaacatatgcttcccatatcttgaaatgatcacattgaaaagtaagtcgcaataatattattttttaaggccaaacaactagcaatgtggttgaaattttattttaaagttgaaaataagagaaaaaatatatatatatatatatatatatattttattttatttaacttttttac

SEQ ID NO: 181744 - DNA, 649 bp, Cannabis indica
ggataagtccgtctcggagtcataggatgatggtttgaactaccctccatagtctcaatcttaccattagcacttaaaaaactgtcaagatactccaaactctaatcaacaacaagtttattaggtaaacaaggcttctgattcacatatatgtttcttctatacagggccggccttgaaaatatatgagcccaagacgaaataaattttggagcactcaaaaatatataaaaaaaaaatataaaagaagagtgttatgggatttgaacctatgaccttagacattatgtcatccacctcaacaaattaaactataaatatttgttgcttataatacacttaaattttacttaaataaaagcctaattaattttttttatttttttattttgggcccccgaaaagtgtgggccctaggcacgggcctagcccgcctatgcctagggccggccctgcttctataccatattctccaaatacacgcaaataatttttcaagaaaaatagagttcatatcatccaaaaaaaaaaagcaagaactcatatagaagtcagaatctacataggaaggatagccaaaaagttcaacgctagttctctgatagacctcaaagaatcataagtgcaaagcccatgtagaatagtctca

SEQ ID NO: 181745 - DNA, 908 bp, Cannabis indica
tctcgttactttctcactcatcattttttcacattattttctcacactttctctctcatcactttcttacattattttctctctcttcactttctcgtattattttctctctcttcactttctcacattattttctctctcatcactttctctctctttattttctctcccccattttctctttcctcattatcgatctggactaggccgggggttgggatttggggtccaggtcgggactggatccatgatccggcactgtgtttgggtccagagacatggacagggttcggggctacaactagggtgcgagtgcggccggtttggacgaatcatgggtcgtggtcgagtcttgttcatatcggggtctcgaagtattgaagttatttaaaaaaataaattaaaaaataaaaataaaaattattttttgaaaatattatccaaatgcgatttgtgttttgaaaatttcagaaactgttttttgtctcatttctaaaaatactttgttaaaaacaaaaaacatattacaatgacaaatatactcttagtagtttaggttttatatcccaaactaacacaactcaagttacgtaatccccaaaaatacttcaaatatattatttattagcgtaaatctcaatattcttaacataatgaggtgttattattattattactattatcattattattattattattattaatcattaaaatgttaaaataataaaaaaaattagaatgatttaaccttgtgacttaggtttttttttaaaaaaaaaacataacacttagtaaaatatctatattaaattattttaaaaatgtaaaataaatatagttaatttttaaagtttttttttttttttatttaaatttgtgttaatgttgtagttatcttgtactgc

SEQ ID NO: 181746 - DNA, 641 bp, Cannabis indica
acaacaattttaaatttagtgacaagtgagatacaatgatgacaacaattttaaattcatcatttgatgaatttcatataaatttatcaattgcttaaattttttttttcttaattctattttttatataaacttaatcacacaaaaataatatttatccaattactaaaattctatcatgtctttgaatctaatttaatttatgcaaaagatatatattttgaaaactgactttatagaaatatatctattaaattaattaataattatcatttattgagttctaaaataattaaaaaaaattaagactctaaaaaaattaatttatttttcttttgttatcaagagttaaaaaataaaatacaaccgcaacacgaaaaaggggcagtttgttttctagttaagtatataactaatcatatgcaattacccataatttcagcctaataaatattaaaaatacagttaatagataacataaagcatcactatattcaaaacaactagtcaatcccttaaaagacggttcaaacaaaatagatcatacctattgagaaactaagaatcattttcttcaatgtgattttcatgcaactaaaatacatattcagacgcacccgttgttcatatcgatgtcagtg

SEQ ID NO: 181747 - DNA, 874 bp, Cannabis indica
ttcgttttttggttatgtagattgattttacttttttagtgttatgtattgggtttttgttgtgattttgaaggtttatgatgattttgaattgggtttatgtttgttttggtggaaaatgttttcattcttaaaaagttttaatcttgaattaagagttggtaagagctttagagagaaatgattggtagaaaggactttttcgtgctgtgattataattattattatcattagtttttagaattactgttcaatattttggtttgatgtaatattagatctgaaatgattgcattgttttcacgtgtaaaaaaatcatgttttgactgttattactgttactgtaatcatacaattgattgtgtgattgtgttttcatgtacatgtatgtagttatgtagataatataatgatctttatgtttattttgtatgttttaagcttgatttaaatcctccctaaataacaacattataatcagaagtcaaaactaagtacaataacataagccttgttatttgtgtaaatattggactctcaaagttgttatgtgattgtgcattgctataagtcacattactacaaggtgggtgatttagtggttagtgatattctataaaaattttattatattaaattatgttagactagaggtaggattaatataatgttgtgactggaatatttccactgtcctctctcttcttcttctcttcctctcacaacacttcaacctttctatttcttcatcgtgtttgtgattgcatccctgtaacttgcttctccatcgtctgatcctccaacaaaacctatcacggtaaaacaattctctctctctctctctctgtcttttctttttttttcgtttttccg

SEQ ID NO: 181748 - DNA, 640 bp, Cannabis indica
acataacatagtagctatcactagtgtcatctaaataataatgggctgaaattttaaaattctcccactaagataaggtactgtgatattatatccatggactttattgttatcaatttctattactacagtaacatgttaattggaacacttataggttcaagaataagttctattagtttgctagttcgtttattatattatatccatgtctattcaaaatatgtgtgccatagagatattgtggtgtattgagtatagtctagagttcaaagttaaaagtatttgaactacatatatcaataacttctttcacccctaagtgttatagagattttgtagagtttcgaatataatctagagttcaatagatataaaagatctttgaaccgcatatattacttttaaacatcttccacccctatcaaatcaaaatatcttttattaaacaaaatctcaataattgtttaagaaatgacaagtattcattgttaacgcagattttcgttaactaaattcgagcctcacagtagtgattctagacaggaaaaataaaagctattaaaataaaagtatgaacacatggtttttttacgtgattttgcagttaaaattctgcatagtccacgagtcaatctta

SEQ ID NO: 181749 - DNA, 752 bp, Cannabis indica
accaaccttagtaacaccaccatcagggacaccaacaggcgtaggggaaaaatcctttgtaatgagggatcccaaggggtcccccccaaaatgtctgtatcccctaccatccccaaccaccatacaagcacctttcttcaagatagagttggctttaaccacattcttctagaactaagagtccgaattcttataacgacaactaaggaagtccttccctttaagatatttcgcttccagaatttggcaacacaaagatttgcaccatattagcatgttccacccccatttagccaaaaaggcatggttcatttcctagtcttccggaaacccagacccccaagagatttaggaaggcataacttatcccaagctcttaagtgaagaccatgatttcctctttcaaatcccaagttatttctcaatttcaagtaagttgttttaacaccgtaaaccttttatttaagaatattgttttgaagaataactaactaatgagtgactactcaatcttatatttttattgtaattttgatggttacatattttttactataatataaataaaataattaatttttaatttatacatttaacaagagtttttaataaaataattaatgatggcatttaatgcagcgattcactttttgcaggggtcgattcgtttcacgcccattgattgatacggcgcattaatggtgtcagacggacactcaagcgtttccaccgcctttattgtaaatcaatct

SEQ ID NO: 181750 - DNA, 826 bp, Cannabis indica
gtatgatatttttattgttgtttctatcatatatatatatatgaaaaaataagaatcaagctaaaaaaaatacaatttttattattgttttatacattcaaaataaaaaattaaaaaattagggttcattcacttacctcttgaatgtaattgctctcttgacaacaatgttgatcttatctattgatttgaagagatttcataagattttgagagatttttagaaaaatagaggaagagcatgaaagcaccatgtgaggggagagagttttttttttattatttattttttatgatatgagtttttttctttttaattaaaaataaatataaaatataaagggtattattgagatataaaagttttattaaaagagaaagttagtgtagctaaattttttaaaataaaagttacttagctaataaaaaatctttttaaggttatttagctaaatatcttgaaagaggagaagaagagtatgaaaaaataagggatatttagttaaataaccctctttcaaaaccatttttgctaaataaccttcttataaaatattttaactattttaatttttaattctttttattaattaataaagtaaattactaatatactcacttaaacataacctaaacccccagccctaatccccacgttttcttcttcttttgtttatttttttttattctcttcttcatcttttcatctaaactcaacccccataataagttcaattattattttgtcttcttttctacctcactatttcttttttaagatttttttttctttctataaattcatctccatctcttctccttaaat

SEQ ID NO: 181751 - DNA, 748 bp, Cannabis indica
aatgatgagttatctcggcaccttcgattagcaactgtacagtttgttttgatttttgttgatcgaagcttttgtcaagctttaatggtgttttgtttttgcaggttcgaaagttgcagagcttcaatggcacgggtggtggaggtttgaattttcgaaggtttcttttttatttttttttttttgttctcaaatcgttatatacggtttggcagtacaatacgcacgggttgatcccattttttctggttcggtaggaatttttttcttaaatttcggtagggatatacatatatatatatagtatttttgttttattcggtaattgtaagattaatttattaatttggtatattagtaaaaattgcccaatatataatgatacaacaactttaaatgatcaggatataaaaatgatccttaagaagaataatgtttcatattcaatttaaagaaatttgcagcatgaatacttattttgctggtttgttgctaatatagtacccaattactaaaaactgcgtcattaatactcaaaactctattctttaaacttttgttggtacccactaacttttgttaattaatagacacgtggacagtctagattattccattttttttacctaataattaatttaaaataaatatagatttgttaaaaataaaactaaatctgaaatctaaaaaccacaacttcattgcatcaccggagaaacccttcccccaatcacacacttgaaatcaa

SEQ ID NO: 181752 - DNA, 619 bp, Cannabis indica
atccgttaaacaatttattataaaatgtaagtattattacattaatataataatacaaattatatcatactaactacactgattagtgtcttactagtagtaattgacatgtatcattcgatatttatttggtgtttggtgtacttgttgtggtattttaacacacaagtatactatatacgttttaacaactaggtgaggagtcgttcccacgaagactggtagctaagtaccaatcaattgaattcttgtttctatttcgtggcggatgtttaaaaaattttaaattatatatataaaataaatcataacttttatatagtgacaactatgtaataaattgtatcaaattttaatctaattttttatataatatttctttgttgggttttgttttgttttgttttacactgagttattcattttagtaattgagttcttgaatttgtaatctctttctcattattatcttatttttatcatcatcttcttcttcttccttatgcataaaagttattgcattttctttgttgggttttagtttgttttattttacactgagttattcatttaagtaattaaattttgtgtgtttgtcttttcatttctttcgggttta

SEQ ID NO: 181753 - DNA, 739 bp, Cannabis indica
tgcgattttttggctaagccaagcaattacaatatctacaataaacaaacaatagaccagaaagaggaggtacactacaaaaaaaaaaaaaatctaaattcgaattcaaagatggtcaggaattatctgatactccccatcaaaaatacaagatgaacttaaaattctttttcactaacatgttaagcaaaaaaaagttgttaaaaaaaaaataacataaccaaggttgccttttgacaaagcctcaagtaaagattgttatttgagaaaaagagcaagtaaaaaaagtgttaatagtataatatagatcacacttctatcaaaatcactgtgatttatattaattatttgctaaacttaaattatgtaatccaacttaaattatatacctaagtgtagaataattatgtaagcctacatgtgtaagattttcatcttataaacaagttcttgcttctaagttagtgtcaaataaaactaaaaccaacataaaagatgtcttttccccagcaaaattttattatatctttatattaaatgtaaattgttacatataaaagttataaattgtcaagaaattgaacttgtatattgaaaaaagttgttaaagatcacttgaaagagaaactaatgacttctaatttcgccaacagttggcctttgcatagcaaaaatgcactcaatccatttgatcttacctgggtccgacttagtaaccacgcttctgctttgcgtttcc

SEQ ID NO: 181754 - DNA, 511 bp, Cannabis indica
gttagcaaaaaatgtaccaaagaagatgctaaacatccaccaattgaagaaggaaagcttttgcttcttctcctttggatggaaatcgtcgaattggtcggccccaatcgtcgaaatgttcggtttggtgccgccggttcctagggctagtgtgtagagcgcgccataaaacactgctagttgtaaggtagaagccttcttgcaattgttcaagttagggtctaggcaaggcgggggttttagcgatggaattgacaccgatagagttagaatcaccattccctatcaattaatttttaagattttaagattatataaatattaatgacaaccataatacaaatataaccaaactattaattttctttgaccacattaatattgagttaataattaacgttttctagtcctctaagaacttactaggtgttcatcaaattgtctaccgtgtgtataaattactcgcgcattcaccgcataaaaattgtagtttaaatttttttaggttaag

SEQ ID NO: 181755 - DNA, 1440 bp, Cannabis indica
gtagaaaaatcaccaaacttgaacaaaatcttacacttttagtccaaaatttatttccttacacaaattagagagagacaattaaatagctttctagatttatcaagcctattatgtttctaacaatgtgctctcttgattgaaaattaatttctatcaaaatacaaattaccaacacttcatgggtgttaccaacccttaaataagtgtaaatgaggttatagacgttggtgaatgaagctcggacttagcccatccgttcccatgtcgagaagggtttttttttgaaacggtttgctctaggcgacttgtcgtcaagctagttgtcagcacactaagttttggagttttgtaactccttttcagcccttattaatttttaatgttttgtacctcattttaatcacataaataagtgttgttacctccgataacagctatataatgatagctttgattcccatatttatttgtgtaataattttcttaattggactctttgaaattgtgatgaagagttacaaaatagttaccagatttgtagaaactacttttattttctctatctataactccctgttacagtattgtccataaaaaaactataatacataaaataataatcaaactatttattatatttatttatcacattatgaatattttattttatatatattatattgaaaataacattgcaaataatataacaatatgaactccataaataaaatagaagtctctgtcacatatttaatagaaattatttaaaaaaaatacaaaaatatagttgtacgaaattttaaatatttttacgattttaaaaattttatttacataaaaatatatattttctatttttttttatgttgtactcttgatattttgttgttggttttttattatttgtatatttattttttatgttgtttgaatgatattttactactattttgatgtgtattttttttttttattttgggttcatttatgaatactgtaaaaatataaacaaaaatatttaaatgtaaatgtataaagaatttgccaaaaaataataatttatgtaaattttttatttaatatcaaacactcccttagagcatctctggacaatctttaaaattgttataaaatttcatatcatcttaaaatataatattttattttatctctcatccgcgttattttttgtacttactttactactaaaaatgctctaatactaatactaagcaattctaaaattagatcatcacagtctcacacactattattaaatatcaacttatattgttatcatttggtttattttgactataatacattttttttatttattatttgtgttaaaaaaaaagaacataaatggttgctctatatctagccatctatatttatctccaactgcataagctattttggtagtagtagttttct

SEQ ID NO: 181756 - DNA, 758 bp, Cannabis indica
ctgatttgatccacagcagttactccaattttgatagtgcaatactatcaactaagtcttcctccctagatctctaaatcagaagcagtttattttctctgattatcaaaaggtatacaattgtgatgagacaatatgtatttatagagttagggaggggacttagctacaaaaccctagttggactgggcctgctcatcaaaggcttcagttaactagaaaagcccacacttctgcttcacctagactttacacacagatgctaagcccattaacaattgatcaccaacaacatgggctaacacagcaaagaactatccaatcaacccaagttttaataaaaccaataaaatttaatgtaagcccaaataaaagtctaacaactacaactatcaatatgttgaaataagttttcaacaagtctccttctagtaaggaattcttatttcttattacaattaattaaaagataattagaaaagagtgaaaattttcaacaacaaagagacgatgtagcgccgatatctgggacagaagcaaagagaaagaagtcagagggtttgcattgcatggggttgattatctccaaatgggggttgatctaagagttgtttttgctatatgcaatgttttcgtcattttttttttatgtaattttatcaacattgttatttatatttggcaacagttatttttgtttttaaaaaaattattttatagtatttactaaaattattttgttatttatatttggcaac

SEQ ID NO: 181757 - DNA, 781 bp, Cannabis indica
gttttatgttttattgtattatcttgtatgattatgatgtggctattgtctgacaggtaagcataatgtttgtgactttggagaaaattgctcaaacagatcctaaatatgctgatattattcttttagagaattatgcagcatttcagaataggtacatatttcattcttttattttttctcctgtatctttcattataaggagttattattatttgttttgggtgcattgctgagtagaagcagtttcatgcagcttgtatgacctagccaatgttgtgcctaccctagccaagttctatcaccaagcaagcgaagcttatgagcaagcttgcacccgttatatcagcacaattatttacagtgtgagtatttggtaaattgtctctttttcctgttttccattttaaattccaccttttttttttggagtagggacagaattagtaaggtttttcaaccagagaagcatttcttatttattaaagtacatatcaataacagataagaaaagaaattatgacaattaggaagtgtacattttttaataaagcttcaaaagacttaaattttcaagaaaacttatgtttgagaagattcagcatttttagtcaacatcaggatgaggccaggagggggtgaacactgttagtttcaactgcaattcttatttatttaatttgtgttaggcatgtgcattcagttatcttttaactaggtagacttcaaatgcatcttcagcactgtaatttgaatcctcatcaagtttgctctatgcagc

SEQ ID NO: 181758 - DNA, 617 bp, Cannabis indica
agacagtatgaccagtgtgctcggaccaaactgggaagggccatatcaggtggtcgaagttatagaatcaggagcatacaaattgggtaattatgacaaaaaaatgcaactcgttctagtaccaaggtattggaatggggaagatttaagaaaatactaccagtaaaagtaccaggttggctgaccacgttaagtacgaaacaaaagaacatttactcttaagtgaatggccttctgggcggaccccgcctaaaggttcagataaaattacaaagtactcaggtcgaatgaccacttatgaaaaaacaatttttattttctgcaatttgttttgtttatgctaagctaaagatcagattagatcaacataatagcttcaatgtaagttactatggtaacagacatatctccgaccaataaatgaataaaaatgtttatttcaattcgaattgagtcaagttcattagcatgtcatatatttattattaaatgtgtacaaaggtttggtcgtacccaaagcccgaacagacaaaagcatactgtgaaacaagtgaccagagtcaaaagtctgcttgatcgacttggggggcaccgtatacctgtactaaaacgatttt

SEQ ID NO: 181759 - DNA, 699 bp, Cannabis indica
ctataatcgacgttataagtgccctaaagatgttggatgggctcctataatttaaaaatgtttctactattgatagggttttcgatctcttgctaattgtgagttgtcgatagtccaatttagccctaactatattgcgaaaatcttatttattttagtttagtcaatattagggttttttcttcttagtttggcattgcctatatatttgatcagtttatatatatttgctttgtaatttgttttttctcagtattctattagtatactataaatatatatacataataattttgtgtttgagctattcatattatgattttttttttttttttttttgaaaaaaattatattatgatttcatgagtattgagtacttaataattaatgactattgttaataatttccgtaactaccattccgttaaatgcattcattaaagtaacacatgtcaccatataataggtccacattcatttttttttccttaaaaaaaaataattcaaatatattttaatctgtttttttaaaaaaaaaaataaataagtaatttaaaaaataaaataaaaaccctaaaactgtaaaacaccatctcttccgcctccaatctcatctaccatagccatcatctccggccgacacgcgaaccaacgatcctaccacatcgcccctctcatgtttctctctctcacctcagc

SEQ ID NO: 181760 - DNA, 626 bp, Cannabis indica
agaagaatgtataaattactttgctaaggatgtatatatacatggttggctctataggtgtgcaagctgggctactgtacagagttccaaaatacataaaggacccaatattttttttagtctcttttaaagttgtttttttttttagtttagttttttatatgaacccaacattgcaagggcctaacaatttgtcgttagttactcccatgccaaaaaaaaaaaaattaaataaataaaaaataaaaaatagttacaaacctttcatatttttttttcactatctagtttttttttttttttgaagttgtattggaatcaataataatttaataaaatagttcaaattttttaatattttgtaaaatatattacagtataataaaatatttaaaaatattatttataaattgtacttttttttttgttaagggcttaatttttaaaattaaaacaagattttcaaaatatttaagaggaccctatatctataaaagatgaaagttcattattcaatggttacaataaaaatgtaaccatgatggttatattttttttataacatgttatagcaggtcactgataggtaaatttctatttttagacttaaataaattattttttaa

SEQ ID NO: 181761 - DNA, 669 bp, Cannabis indica
cacttatttggataaagaggaataacaagtcaaatgtcattttagagacggactgcattttagttgttcaagctattcttagctcggtttctatgccttctatttttggtttatttgttaaagattgtcaagttattttatcttctttaagtaatgtttttattggttatgttaaatggtctgttaacaaagctgcacactgtatgacacgtggtgcttgttattggtcaggtcgtctattttctgagagtgatatttcctttgctcttcagtcctctgtattagcggatatttctgtctaataaagattattttcattttaaaaaaatatatataaaaagaaagaaaataaaatataaaacaaatacaatatctaatatattaatttttatatttttaaggaacatcattttcctatttattcacacatgaaatcaaatgaactcaattaagtaggatttttcttgggagtttattaaagaaattatttagtaagatgtttatcaataaatagaatatatgattggatatataattaatgttaataattgactataaaaaaatatacataatgaaaattacatatatattatacaatctaagtacataggtttttttttaagtaagattgtattgcttcaagctttaaaactttttacttaactaaaa

SEQ ID NO: 181762 - DNA, 625 bp, Cannabis indica
gtaaattgtttagagaaatttacaaaaatactagattttgattaaatgttcacatttatgctgtcacacgataaaaattatatgtatactgtctttgtttttttttttcttccttttataatgtagatgccaaaatcacataccaagcctctatcttctatacccacatacagaactctaccccaacaatacgagaacacttgagaacaaccattaattctagcaagatggaacaaaaatagagaaatcgacatcaaataaataatcatgacaaaacaactgtgaaacaacactaaaacaaattaaaaaacaaagaaaaaatgattaaaaaaagctaaccatcttctgtacaacctcaatactagatataatagaagctatatttaccagtccagtcctaaaaattagataaaaactactaaattatacaaaacaaatgtaaacattgaaacagatgtaaccactaaaaaatttaaaacgaagcataccattcaaaaaaaacttaacaatgagttagtcaaatgtattataagagaattagataaaaaacacaaaataatacatatagaaggaagtagaatatattataggcatttatcttctacacacacgtatggaaccacca

SEQ ID NO: 181763 - DNA, 594 bp, Cannabis indica
gataattgtcaaaatttaagggagaaattcgctaacttacaaagacagtttatcatttaaacagaataatagagcggaacctaataaaagaattaaatttttgtaaatataaaagttcaaaaaatttttttaacaagttgtatattttaggaagcagaatcgaaagtttagagtttaaaaattactaattattctaattaaaataaacaatgtagaaggcttaacacaacaaataagtaaaaggaatatggctaaataagccaaatacaaacaaatttataaagccatattctaatctataattgttaaatatcatttgaagttaaactagagaactacagactaaagcctatcctcccttttttgatatgccctactcaagcggtctttacgtccccagggtaggaatatccaggatgttatgatgcacaaatatattttactaaattcattacaaaacttatgtctctttaaaaccaaaatgttgtactacattcttgttgttagcatctcacactaacattaggtggccgcacgagattatttgaaatcttcaaaaactttccgaccaatctcgtatgactacatagtctc

SEQ ID NO: 181764 - DNA, 1050 bp, Cannabis indica
agaagaacaaacaaccatgcatgttttatgtcgttttataaagcttaaaatgtttttaatttggatcgatataattataattggagagtttaattactttgaaatattaattatataaagtccttaatattatatttacgttatcttaaaatgccaacaccatagataatattatgtcgccgtacgtatttcacacaaagacttaattaaaaaatttatataatagattaaaaaaattttaaaaaaatttaacaaaaatacgaaaacacacaaaaaaaatattttattctttgaaatttttattagtaaaaatatatttttaataaaataataaattatttttaatcgttttataactttttaataattatattatatgtagttgtcataagattatttttttaatagttgtttaataatttatttatagtttttatagattaattaatttttgttatttttaagttatttttttagtttttacttagcaaactatatttctgtaattttatagaagtaattttataattaacaattttaaactgtaaaattataaataaaatatgaaagaaatggtattttttaaaagttttcccaaactataatttataatccatacataatattattttattatcatatatatatatttataaatattgaatgattttttttgattttcattttatctacatttcaaacaaacaaaaaaactaaaaaacaaaaaaaaaaaaaacccatttatcttgattcttgaagtaaatttaagtgtatactagtggtgactaatctattattcattttaagagcaactctttgttaattcatactagctagaaaaaaaaactcattttctttcgagtgcagtaaatttaagggtatatttagttagaagaaacaaaatttaatacagacaaaaaaattattgttattattattattcatcttgtcttttggatttaatattattgtacgacctacattcacgatgataactcaattttaattataactatatattaataggaatttttttttgaattaatatca

SEQ ID NO: 181765 - DNA, 639 bp, Cannabis indica
atttgtccgaggaaaatgtggataaagcatgcctcagtgactcgaaagcaattcctgtatcgggggagagcgtagtccatatggcgggaaatcaggtcgacctccggccagttggtgaaagtgaatggagtgatattcaggcaacagaatcaaggatagctgacgtaagagaaatcggtcccgagaatgaaacaagcagcttggatattccagttgttagccaaccaatcaccaaccaccacgagcaaggggggaattcttttgatcaaccgtgaaaataaatttgtaactggatttacaaaagtataaaagcgatgttaaacaatgtagggattcgtaaaccatatgaaagtgagttattgaagatatgtaaacttggttggtgtaatttctttatttaattgcataaactaacaggtttatttagctataatttgtggtctttggtttcatttcatcttcatggtgaagaaatttcaactcattctcgagagcttaacataaaagaacctatcttgaagtggaatgattctgtttgtacgaactttgtagtgaactgttccatctgtgatctccctcaaataatatatcatattttttattttatatatataatatatataaatatatttttattac

SEQ ID NO: 181766 - DNA, 395 bp, Cannabis indica
tgtaaaaaaaaaagttttaagagatatacgtaattataaaactacaaaagttttatttattttaataataaaaaataactattagcatatatatcttttaaatttatagaatagattaatgatagttaagaatttttaaaatatatgatatttatagattattataaaagtttagaatttctatttagtttgggattttttttttaatttcattaatttttttttattctgtcttcatcccaacatcatctacataacatagtacagtatttgggtaccaatggtcacacttttttttattgctttgattttttttgtatcactttcttctttcttatacttaccaaatatgtgatgtatttatatatatgcagaattagttctccaataaaatt

SEQ ID NO: 181767 - DNA, 631 bp, Cannabis indica
aaagttccctaagcttaaactaaacataaccaaccgatttaccctaccaaataccacatcagtgaagtggaagttaaataagttgctctttttagctcctttcaattcaaatggcttataaaaaggttcctaatctaaatctctctcttccctctctctaatcctaagttcttagagcaatcattttgctcaagaaaagattgtaaacattggtgtcaaacaccatattcaatgtaactaaaggttgtgtaatcacatttcgaagagcaataaagatctagaccattataggttgatttcctccaaggagtagactatgaacacaccttttcattgtaactcttggattagtcttttgagattctaagataagttgcactttgcttatttctattaatcttttaacatactcacgagtatgtgggtcaatgagttgcaagctcttaaagaactcgttatctaaccttttcagtgatacaatttcggtctattacacccaagatggcctctatctatatcatcttgtcgtatgttgttttatctcgctgtctcattggcaatgcataatacgagacaaatattgctcgttatttattatctctctgagacaattcatttattacacaatgag

SEQ ID NO: 181768 - DNA, 664 bp, Cannabis indica
gtcaaaaaaaaaatataatatacttaactaccatcgcacaaatacatagatgatatgaaggaatgaaaagacgaaaataacctcactccgagaacatggacccactgtctgaagtagttttgtaaactaccacagacagtaacttggttgtaccttttcgtaccttaactatcacaaacattaatttaattgtaccttttcgtacctttttattttttaattaaaaaatcaaattgacaactggtgaagaaatctacaacaaccggctgtcaaataaataaaaaaattcacaacaaataataaaaattttaatagaacgtgggacccaccattcggtacaacagaatacaatctgtgttttttaaaatattagacataaaattgactgccataaataatattttatttatgtatattgtatatatactaaaaaattattattttaatagtgtagataataaaaataatgttaatttaatgacgtagagaaaaatataaaaaaaaattgatgtatgatttaatgtaaaataaaaaaaaaacttaagtaatgtatagaataaaaaactagttcagagtggtctaaactcttgatttaagtaaatctatctctacatttaattagttaagaagagagagagagctaaataatattttattatttttt

SEQ ID NO: 181769 - DNA, 598 bp, Cannabis indica
cgaaaatatggaaacctaccacttttatcgtaaatatggccaatcctttattgcatggtggaacaacttgaaaatggcaaaaataaatgcaaccacttcattgttattcggagtagtaagtttcccacttaagctattgggaatttcagagatcgtttttgaagtaacacaaaaagaatctgatgataagactaggagcagtagtactacacaaggcactgaaaattcaaaagataaggaggttgtaaacgctggtaggtttacattcgatgattctgcgttgtttgtgccacccacaacattgttgtttgtagaagtagctggattgggattgagcatgtgggagggtggacgagatgaggtagggcttggggagtacttggctagtttttgggtggtgatgtgcttttggccttttgtcagaggtctttttgggaagggcaaatatgggattcccttgtctactttgttaaagtctttttgtttttcatttatttgtgtacacttgtgtagatatgcttcagttcttggctaaggcaaggcctactagattttatggtctaaatcagtgaattgcagaatgtagagtaagaattac

SEQ ID NO: 181770 - DNA, 666 bp, Cannabis indica
aatttaaattttttaaaaaaaaagtaaaaagaaaaagaaaaaagtaaaaaaaaaatattttaaaatattttttttcggattttttttaaatatttataattattatttttttttggagagaatcagctcctttgtatttcaattccaaactgttttacaacctatcgtcatttgtatgacaatctatatatatacatctttgtgtagttactatacaacccaatctctatcttttttccccactaaaaatttggaccactaaaaacttaccacgtgtacaagtgtgtacacatagactgtctaccgtggcacttaactgtgatttttgaatgaaggggtacagagcaaaacagaatgggagtttagtaggttttgccactaaaattttaatttttgtggttaagtgttacaaaacgtaaagttcaggtgatttagccgccaatatcccttatattgattatatagtataatggaaaattagtaattgattacattttcttttacaagataaataaaagaagcttaatagattaagtgttaaaattcacttgtttttttcagcaaaaccacccccaccgatctcctctccttctctttctcttttttttttttttttttttttacttttttttttttctattttgtagttcttgtaatttgagtgga

SEQ ID NO: 181771 - DNA, 597 bp, Cannabis indica
gaatatttagtgttttgttattttcaaagttgatgataaaaaacaattaatgaatccgcgtttagtaatattatcaacacatgcattacacttttaatttgtcaacataaaattcaaagttgaattgatatagagcgaaaatagaaataaaattgaagtgggatgattatgtattttttttattatgtggatatttcaaaattttaatagaaattatagaattacatttaataaaatgtaaaataatgcataatgatgttaaagtaattgttatgcaatatttacaaatttggcttttcacattctttttaggtggtttaaatcctaatataatatttttttaaaaaaaaaaacttgtagaatattgacctgtaaagtattcatatgaaggcccaaaaaaattatttagacttaagctccaaataatttaaaaccggtacaaatttcagagggaacaattgcctcatgtgtagcttcgccatggatatatcattatagttttttttttttttttttttaagtttttacgtaactcgtatatatctatattaagttaagaatagactcgtagtattttcgctagttatttttgtgtaa

SEQ ID NO: 181772 - DNA, 515 bp, Cannabis indica
aataatatatagatttcacatgtataaaaaacaccatacacataaatgaatattagtctgcaccataaattagtaaaaaagtaatcgaaattgataatatatttataaaatacttcctttatatatatcaaacctcacatcgatcaattccgatcattaattaaacaaaaaaaataacaaaatttgtcatatatatatatatatttctaattattaattaatcatattataattaagccggcccatatacatgcatgcatgttgtgtaacactttataattgttacatatatatatataaataaattcaggtcaatgtcgtacaatctaacattatattatataaatatatattatttagatgatataataagatattgatccatcagtacggtttctcaccaatataattaccaggcggatcataattacaaactatgaaagtgtcaccactgtcacaaataaccctagagcaaccaaccctcctagtgctccgccacacgatctgcgtgtagt

SEQ ID NO: 181773 - DNA, 603 bp, Cannabis indica
caaagccagggttgactccaaaccctttgtacacattataatacaagttaatacagactatttgttatgtattaaataatacgactcacattgtattaaaatttatagtcgtaataattaatacatacaatattatccaaacatagtattatttgttatttaatataatatgactcttatatggcttaccaaatgggtcatagtttttcctcttatgtatgtaatggtaactcttatttttacacttttaatttttacagctactctaaaaaatacctttttcagctacaaatatagtaattaaagactacacaccacaataagatggttaaataaatttttaaatgattatttacactaatatattaaaagaataatcattgaaaaaatttattatagattcaattatatataaaaaaactttcgtgatatgtaagagagatgttattctttattttaattttaataatatatttaaaatatttataagttaaattttaggataagttgaggaatatttttttttgggtatttattaaaaagtacccacttttgtgagtatgttgctcaatataccctcactattcacttaagtgtagcaca

SEQ ID NO: 181774 - DNA, 840 bp, Cannabis indica
aaacaatttgaagcacttctctcgagatatggtgtccgccatagaactgctctaccgtaccatccacaaagtaatggccaagctgaaatttctaaccgtgagataaagatgattttggagaaaacagtgcatagatcgagaaaggactggtcacgaaagttagatgatgcactatgggcatacagaacaacatttaaaacactgattgggacgtcaccatatcggttggtgtttcgaaaatcttgccatctgccggtggaactagaacataaggctttttgggctatgaagactcttaacatggacttaaaagctccaggggagaaaagattgctgcaattgaatgagttagaggagttcagaaatgaagcttatgagaatgcaaagatttacaaggaacaaaccaagaagtggcatgaccaaggcttagtcagaaaggagtttcaacctggggaacaagtgttacttttcaattcaaggttgaaattgtttcctggtaagttaaagtcaagatggtcgggtccgttcaccgtggtcaaggcgtttccctatggagctgttgaattaaaaggagaaggtccagcaaccttcaaggttaatggacagtgtttaaagctctacttgggaggtcaaattgaccaagccaagtccgccattattctggcgcctctctaaacgaacaactcagcgtccggttagatgacgataaagacagtgctcttgggaggcaacccaagtgttttctttaattttcctagccttttttgtttatgttttttagttttatgttttttagtgtttttctagtatttttcaattttttggttgaagtacctagac

SEQ ID NO: 181775 - DNA, 612 bp, Cannabis indica
agaagtaattaactagctactcgtcgctccagtcagggaggtgggaaacaaaatacaacgtaagttattcgagacattgctggctcgcattatggtattgaaattgttgaggtgggcgactggggctgaagtcccatcgtacggcgagacgtgagggtttttgaatccttggggaaatttagagttcttaatgtctggaaggaaaggctcgtgttcttcattcgagtcataaccaggcagtttcccatattccccatcttggtatcttctgaatttatcttccaactcaatgattcacaattagattggatcttcttgctttcgattagcattaagttgttggcgtaaatcaggtgcattctgatttaagcgctcgtgtaaatcgggttgtctttgattcaaatgttcacaagatctggctatctttgatcatgattgctcacaaaccttagtatctaagtaactctcagattgatagctcctcgtattactcatactttttcgatcatattaaggtgaggtttatctcctcctcgcgtatgtctttttgtatcgtactgtactctcaggatcttgtatgtcccaagccagaacttgcctcgtccttcacag

SEQ ID NO: 181776 - DNA, 501 bp, Cannabis indica
tttattttatttaaaaaaatttaagattaaaaaaatattgtttagtaaaatttttagtgttgtggttggaggcttggagcacactacaaaaaatcttacttagtcacaataaaatttgtgactaaaagtaaaaaagttgtgattaattataaatcatcattcttatgttgtgactacaaagtctgtcgctaaatactatgttttggtcacaagtaacattttgttgtgactaaaagtcacatttagtcacaaaaaaattatattgtgactaaaaagttttcactaaaagtaacaattttttatagtagcagaaataatttttgataataaatttagtgctcgtgtaacatcaaatttagtgttaagattaaagttgttctgaggccatctccaacccaacaataaaatcttatatataatgtgatttttttcacaaattaaaatgttccaattcaactgcaaaacatatcttatattttcatggaagtttataatgtctca

SEQ ID NO: 181777 - DNA, 503 bp, Cannabis indica
caataatatatatatatatatatatatatatatatatacacacacattaatacaaccatgcaaacagctttatattggccatattgacaaatgaataatagaagcaacctttgcatggtagtttttgtctattaatatattggctgattttatatcacggtgaatataaacagggacagtatgctcatgaatgtattcaagacctcttgctgaatcaagggctatctgcactcgagtagaccaaggcataggctctctctctgcatatagttagaacatatagtaaacatcgccacaaatgagacatcaacttaaatcttcatcattcatttctgtctcacctgaaccacgcaaatgttggcttaagtttccattctcaatgaattcatagaccaggaaaagagagccctccacacaatatccaatcaggcgcacctgcattgtttaccagtttacattatgtgtatgtacaagagaaacaacagttttttttttttaaaaaa

SEQ ID NO: 181778 - DNA, 574 bp, Cannabis indica
cagtaaataggtgtatgtgtgattcttcatgtaactcacattcagggcaaagactattggggatgaccatgatttcacttaaatgatctctcattaacaattagttgttaatggctttccagcatgtgaaactgtgtttgggaatgcttagcttattccaaacattggccgcatactccaccttcttagctgaaattaaggaatcataaaagtatttcaccttgaacttaccaccttttttagctcactctattctatcctttccagccacttcccttagctttagcaactttctaaagtagtagctcaagtcctgtttaactgaaatgctccataaatcttgatcttttagataaatgacgtttatctatttgacccaaaaactgtctttcttacttgagattgcccataaaaacttttccatcatagtaacattttattttttccctctgaaaatcaaaacccccaatagtctaatttagaaattcaaatgaaatactaataaatgttattagaattttatacatagagagagatgcatgaatttaatgagaattttactaagttcaaaatt

SEQ ID NO: 181779 - DNA, 1017 bp, Cannabis indica
aaaaacatatcatacgtgcatcgcacataacaatatactagtatatatatatcatttctctcttcttttatttttttcttagtcaacgtcgatagaaggtaagtttttttttttttccaatcattttgatctatattcagggccggccagaggatggggcagccggggccttggccccaggccccacaattttggaggccccgaaaaaatcaaaattaatatatatatatatatataaaaacatgtaatatataaatatttaactcaacaaattacatgaaaagcatccagcatagatggtaagtagagcttatgttagacttgaggttcaaggttcgatccttactctagtcatcttttatactttttttgaaaatacaccttttatacttttagttatttgtgaaaagttttacttagcatttcaaaatttaattaaaatttattttaatttttattaaaagaaatggccttgttttaaatttcgccctaggcctctcatcaccttgaaacgatcctgtctatattattgttagaatagccgttattcatcaattttaatgttttttatgaatcaaaacgaatttctcatacatatatatacatataaaaaattatacatacaattaataaatatcatatgtatatttacttgtatatatttatatatattgtttagtgaatttgtgattttattaattgttattgattagaatactttattctatcagtttcatatattttaaataataaatcatagtatatgtattttatatatacatgaatttgtatgttttccatctgtgattaagaaaatttttcattttttttttattttggtgtttattttgaatcgtttatgcattaccatattcatatcattatttatagtgatttcgttcatgaatatgatttgaataaacattaaaatctggaaattttcttgagaacccatttttggacccgaatttttttgtgaaattaaagtataagtttacatattttcgatgcttgaaa

SEQ ID NO: 181780 - DNA, 644 bp, Cannabis indica
aagaaataccgttagatagacacttttaatgtataaagatatatatttatattcataccactcactcacttatatattaaatttggaaaagtttgatcaatcaacactcctttgagttactgtttatggtggaaaacaagcaatattacttattaattaattattaaaatgataattatatatattaagcttccttttaaactagaaaaaaaaattctaatattagagcacttacataagatatgttttaaaatatatattctttaaaatatttttttttttaaaaaaaataaattaaaaacacgctacaaatattatgaattcattctctattttaatgtttcttcatgttttatattgttttaagaatattatttattgttctaaatttattctattaattgtttgagatttttacatttttttttttaaattttttttattatgaggatatgtataaatagtaatattatatgtttgaaatgaataaaatttgaaaaaaaaaggtgaattttggagatgtattttaaagaagatgtacaatgtaatgtaaaagtttaaaggtaaaatagagattagcaattttttttagaaattttcattcatatatattatttttatttttttaatttacggtttttgaa

SEQ ID NO: 181781 - DNA, 588 bp, Cannabis indica
tctgttttgcaaaatatttatattatctttgttaaataattagttatgattcataactttgctagagtttttatattatattctggtcgttgtttctatttgaaaaatgttccaactgacttactacgttgtttggtagctgaatttgatggttgattttaatataagaattttcattaaaaaaaagattttttgtcacttaattgtcatttttaaccagagtatataagtagcttatgttttcatcttaaaactaattagtaatgagtaaaattaatttatattcttacatatagctcaatatgttgattaaaagtaattcatatttttatatataactcaatatgttgactaaaagtacttcatattcttatatataacttaatatttcttatactagagaaactctcttattctttgtattttgtctccattcagaatcattcatttagattggcttgtttttcaattcatttacattatataaacaactccctagatttctattgatttataagcttgtttttcaattcatttctttaaaatttatcatttcactataaaatcaacggttaatgcttaaatata

SEQ ID NO: 181782 - DNA, 612 bp, Cannabis indica
ataacatacatatactaatcatcaaattattatattaaattatctctaaaaaataatgtaatatacacatatattacatatatttgttcttatatagaaaactgaaaaaattagtaactttgtaatatataatgtggtgtatcttgaactgaaattattaaatttaaaactgtagattacattgcatcgccagttggacaaaattacaaatcataatcgcaccataaaaaatttcaagccaccatttttatacgaagtggtatgcaggaagtggcggagctagcctaacattttagtaggggcaaaaaaatttttttgaagcaataatgaaaaaatataattttttattaaaaaaaatacaaattctatgtgaataaaaataaatatatgtaagaataaaattaaaaaatataaattttatatagataaatataaaatctgtaatgacaaagatgaaaaaaaattatttttatgcggtcaaaatataaaatattcaaaaaaatttataatacaaaatttatatcaataaaagttaagaggggacaaatgaccccacatgctcccttccctttgccagtgtacgcaatggcagacccatatagaagcagggca

SEQ ID NO: 181783 - DNA, 774 bp, Cannabis indica
gtgcgtccctcttgacacacacatgtagcaactgaagcattccatgtctatcccaattagacccatctcagttatcaactctcgacctctgtcgtgactaacaaggatttgacggtccctgcactacttccacactcctgccagcaagcttccttttcaacaaaagcgcctcctgcggcttacaatgtcactcaggcaaacttggcctagtgtaccaagcatacagcatggactatcccctcaaccttgtcctatgccaacgagtttcaaacattctgttgcgcctctctacagtctcacgtggtagttgtctttctagcatctctgaacttgactcgaagcaaccatcaacgtctcctctctaggatgtccagtattcccatgaagaaaagcaacccagtcttaactccatctcagcctactgatcctctttaaaagactaactggctcaacgacgtcttgttccaacattcggaccatctcgatccgtccacacgcctacatcctctctaggataggccaaccaggttcacctcccactgagatgaacttggctctgataccaactgtcacgggctcaccttttcaggcagcggaacacccgtgcggcaccttgacttctctaagccaaggtcagccttccaaccatccgagtaacaatgggctcatttttcgcgcgaccgtgtgcctcgggcacactcccgtctctcgaacaactcccgccgagtcatgctcgcaagcatccatgagtgcattcatgtaccgagactctct

SEQ ID NO: 181784 - DNA, 669 bp, Cannabis indica
gtcagaatcgttagtcatgatcattggaagagaagtctgacagtcacatttccctagcttgagcaaggtgactatccccaggggacggtggactaacactctcataaatgggactaaataacaagaatacaatataataaaaacattaaaagaccgtattttctgtaaataaaatcttaaaaccgtaaaaatatttaaaattttatacaaccatatttttgtaatttttttattgttttttttttatatttctaaaatatttccttaaataaattaataaaatattcaaactttttttagataatttttttttaatagagcaagggctcaattttaaggccaggattaaagtatcatcgggaattcgaactccaaaagacaaccaagtgtgagattttgtgcaaagcatcccaaccactacaccatatattattctttgaggagtgcgcgctatggtcaacctcttgttacaatctcttagtcaaccttcatgcaatacatgtcggaatattttttttcaatttttttttttcacgggagtgttcgtaatgcttacaacatcatccctcgtaaatttttgtaatagtttattaaaagccgaaaataacgtttgaagttttttgtaacacacataataaactgaaataatcatgaactctgttttgtcta

SEQ ID NO: 181785 - DNA, 722 bp, Cannabis indica
tttaatttaggatatttaatattattttattatagataaataatattttattattttgatatttaattaaagtgattgttaatatcagttgaaattcaaatatttaatttaggatatttattattattctattatagataaataatattttattattttattaaataaaaataaaagtcacccataaaattctcaaaaaccaagaatttcagttatataagtatactttatatagaatttatatatatatatatatatatatatataaaatctctcaaaaattatttatctattttctttttaaattttcacaaaaaaatcatattttatataaagctaaatttaataataatattataaatttaatatctcattttaaaaaaacaaaattacgtgatactgttatatatatgattttaaatataatttaacagtaccattataaatttaatatctcaatttaaaaaataaaacaaaacaaagttacatcatttttatttcaaaaaattacttaatttttttcttctcaaatttagattccaataattgggatatatttactataatttggcacttttattttaacaataaataatttatttatttatttatctttctagtgattatttatttattttaatttgtatatatatgactatggttgaaaatttattttgagaatcggatatgttcagtcaactcaagtatgatttttttttttt

SEQ ID NO: 181786 - DNA, 653 bp, Cannabis indica
atacccaattatattttactatttaattaaataattcatttgcataatcatacttttagttacagaaatttaaataaaaataaaaaactaaactttaaataaaattaatattttcatacctcggcacgtagtttctaactagtatatatacatatacaaagagagattgagagaaaaattaataataatgatcttaactaagttaatagagtgtggctgagagaagaaaacaaaagcttaaggtttgatatatttgtaatttatgtgaaatagggatgatttttggttaaggatgatatatatttgtaatagagtgacctgctaacatggacctatatttaaaatttatttaataaattaaaaattagactaataaagatgcattcctagattctttttcattccctttacatcatacttctttttatattataacacttggttgtgactcacttatgtattctcaaaaaacttcttaccattttgtatccaagtttgaagactcaaccaaaatattatacaagtattctatgtaaattattattcacatttgttgaaagtttattctttattttttttattatcttaatttttttatcttacttttgtagatgaaaacaaaaaataaatggagaatgagataaatgatctaa

SEQ ID NO: 181787 - DNA, 976 bp, Cannabis indica
tgtaaaaatttgtttaaaataatgtatgtttactgttgtgatccttgatcacgtcagtcaagaacactcaatcaagaactcataaacaagaatgccttaataataaacagaaatatatcaacaaagttaatcaaactttaaaataataaacttataacatgaattgaaaagcaacaaaatgacaacatgcaagagagaggggattagagctgcttctgttttatcaaatcatgatttgaattgagctacaattaaacaattttgtacaaggagagattgaacttaactataggaagctttgcttcaagaattacataaatcctcacatgaaacattggtgataaacacacaccaattctttcacaaccctcaaatctctctaaaaactcggctaaagaattaatgagattaattcactcttttatagcttatggttctgacccagatgatcagctcacaaggatttttgatctcacatctatcttcactaaaaaagtacttgtcacttaatgtgtgtgatgatgactagttacttgtaattaaacacaacatttacatgtatacaagagatgaatctgagaggtccctggtttcttctaggtgttgattaattaccttcaaatgtgagttgaggagtcatccaagtcggattcgcatcaatcatttttatgtctacttcttccatctcgcaaatacttggttcctgtaacttttcaacgggaactaagttgaggtcgttgagttcggcttgcgacgccagtttggccaacgaatagtgttggaattttgttctcttgaaatttttcaattttgaaataatcagatttttccaagtgttttttttttttttgactttttccaaatatttggccactctgattcccttcgcttggtattctccaagtacttgatgcactaccaattgggaatcactaaggcaatgtactgccttcgcatttactactttgccattctt

SEQ ID NO: 181788 - DNA, 474 bp, Cannabis indica
gaatgtctaccagaacaccagtttagaggtggactttttgaaattttcctatatattagtttgaatttgtgttctggatgtcatttgagttatatatatgagattaattcgataaagggttttgatttgttttgagatatttgattatttgtttgttcaagactcatgagaatttaattgtttgttatttgatttggccatttgtaataaataaagtttatagttttttattttttgagtttgtatttttaattattgctacacgggcttgatcttaggtataggtgggctaggcttgtgcttagggcccacctagcttagagctgaaaataacattaaaaacatgtcagacaattttttcgacgaagacccactattagagctctaactgtagactgtagttccttcaaatcgaatacccatgtctaaccagttatactaacgacgccgtttcaagcagtcgtagatcacgtg

SEQ ID NO: 181789 - DNA, 642 bp, Cannabis indica
acggtttaatttgattttgttaattacatattattataataagtttatttttccttcattttttaattatatatgtatatactattataattatattaaaaatgcatgtacatatatagatcatatatgcatgtgcttgcttcttgggggagtaacatttgggtaacgtatgttattttttatgtatatttattcatggggatcgtgcaatataatttgtgcaagaaaataaaaatatatgttaacataaaagtaatttaagtaatcctagccagagctagtcttgaaattagtatatgaggtttcttcaaaaataataaaaaaacttattataaaaagtcctggcgatatatagaataataattttgttcatgctagctgttatacataatacattagtatatatatgaatatttatatgttacaggtattttagtactgctcccaaaagaatcaagtgtaagagagagttggaaccagactcatatgtaggtatattatatatatatatttgccctatatatttttctttagattaatttttgatgttgctatattctccgatccatagcaatattattattattattattattattattattattattattattattattaagtgtgtctaatttacag

SEQ ID NO: 181790 - DNA, 634 bp, Cannabis indica
tatttcaattgtagctcttcattcttattattctgtacatttgtcttcacatctatttctataaccttacagtcgataaaaatctctgttcatttactttctgggataaataaaaaaacaattccaggttgacatcactttttctcttatctaatgtcgatgaaatgaccaatttggtaattatacgtgacatatctctttcaaaatatgagctcaatcaacttgaactttaaagtggtaatagttttctttaacactgtaatttgcactttacatttacttttgatgtacatcttagttaaaaactcattatgtttatgctaggtctttgctcgatggtatagagcacctgagttgttgtttggcaccaagcaatatggttcaggggtggatgtttgggcggcagcttgcatttttgctgaactccttctacgtcgaccttttctgcaggtgaattattgaagacatgctaattcttcatgtgtcgtgatctgattttgtcttttagcaaaactaaataaataaaaatgatctgattttgtcataaatactctgtttctgtttcttttttcatttgcgtgcatgaatatacaaataaacatatcttaggaaattatacttatctatttacttc

SEQ ID NO: 181791 - DNA, 542 bp, Cannabis indica
tctcttctctctctgtcttgcatgcacagcttcttatcctacgcctcttgccagattatgcatattgtttttttttttaatattatatattttaatgacaacatcttaaaccctcctaatagttcctttaaaataaagaaatttaaaaaatttaaagaacaatagagcaaaaacataattcaacaaatgatataaattcattctctattttaaagttttttttttttcaaactactattctacttttaaatatattttaattttaataatactttaattatattttattctatttttattaatatatataaaatatattatttaaataatatggagaaaatataaaaaaaaatagactcatatatgtgtattgtaaaaatttgatgtaaaataataaaaaaaaatagtattttagtaatatattttaaaggatagagtagaaaaattgttgggagtacttgtgctgaaaccaaatttaaaaaagtttaagtgatattgtcgcataatttaactaatttgttgattctagtaaagtcgttctc

SEQ ID NO: 181792 - DNA, 723 bp, Cannabis indica
catgataactgaaaaactatcataagagttgaagcgctgttcttcaacagtgagagacacaagtattgcttaattgcacctaaaaacctgtttcacatcataataaacagaatatgttaacgggcaggcttcaggaaagataaaccactatcaaaaagtgacatatgttccagagcattagggagtactttactcattaaaggagcaattcaaaaccatacttgggaaaggggggggaaagtgctttcttaagagctaggagtctaggagagctctttctgaagagttattagtctaggacatttaaaataataattaaaaaaaaactgattggcgtttcttccaaaatctaaggagctgaagttcaaaaatcatagaaaaggttttcccctcctgatcaaaagttaaactaacataaaacattaacatcctaagaacaaacatttccaaattccagcaatagatatgcaaaaaaatcaacgacaggacactaacaaacatagttcgttcatatacacattcaacctccgatactagattttgagcactacatacgtttttaaccgtaaaaaacgaaattgaaaactacttgaagactctacactctacagacgtaactgcattcttcatcatcgtctcacccgcattacaaatacgatacctcgtattgcagaaactaataagtacatgtagcagacttcacaaacaacaaaaactagaaaa

SEQ ID NO: 181793 - DNA, 1033 bp, Cannabis indica
agttattgaattagtagcaaatatatagttaaaaaaattatttttactaacaaaatatcataacaaatagtgaattttactactaaaattttgttgcaaaataaattaatttgatttatgatttttaagttgaatttatttttaatatttaattttagttactacaacaacaatcctggcccctcatcaaacttaacatcctgtaaatcacaacactattattaatattattattacaattctcttagcatccagatcacttgaaaagaacagaacctttttctgtttcagtcaagttaggttacaataataatactttgttaatgttacaatttattaatgataacactttcatccatatcagccttgtttcctaccaggatctttttgacattatctgaagcatgttgttcgatgttgcgaatccaattcgtaatatctgaattagttaaaaggcagtgttagtgcaaaaaccatacaagaaacaacaggctaattaacaataatttataaatattaactttaacttatctgaaaataaaacacgtatagtaacaaactagcaaaaaactaacgtgcgaggcacgtatactaaatttaatgttaagtatttttattttgtattatagcacaactacaataagtgtaatgaacaaaagaattgaaaccaatcctacaataacagatcaaagtaattccaatatattaattaaccaattacatatatagtggcaggaaataagagaattatgaatatctatcccaagaaaaaagtcatgcatcatgattggatctcatactgttataaaaattggctcatgcatgaaactatctttcgaaataactcggtaagttatgtatggaggagtgtgcgcatagcaaaatgtaaacatctctcctgcattaggaacttggtaatgagacaaagagaagaacttgccaactaaaaattatattttatgaaagtttcctcacctgtaaatggatcaacatttagataagctgtgaatgaatgtgtcaaaccttgtcacat

SEQ ID NO: 181794 - DNA, 686 bp, Cannabis indica
tttttataaactcaatcgacaaattattgctatatatgtgatcttaaattatgaagagtctttttgaaaatttgtataagattcagattacattatgcatatcgtcaatgtaaaataaatatagtaattataatttatctatttattgaaaatactatatataaattattatacctacaggtattattaaattatttttcatttaattattctcatttttggctcttaaatatcttgatgaaggagggggtgttaaatatcattaaaactagtgtcaaatttaaacagccccttttgtctcatttaaatattttcttttgatcacttttaattaataccaatatatttcatttttaaaaaaatgagtaaagcaaagtcttaatttttttttattaattctattattaataagttaaaaatatttttatattttatccatgctttctaatttttatatcataaccttacaaaaaaaaaaattatatatcataattttgttcttcccaaaaagtctcaatatttttctgtcgataataatcccaaatatatatacgtatacattgtaattgtatatagaccaaaagtgcaattggagaaataataaaaggagagaatattattagggttttggacgtattttctacacatataatcattatgattagcattatatatgtgtgtttata

SEQ ID NO: 181795 - DNA, 907 bp, Cannabis indica
gtctaagcaaatctattattgtatgagtaattatatttacacaggtgtcaaataattttttaaatttattgtttttgatataataaattatttaaataaataaatttgttggatgttcttaataactctaatgtacattatcaattatttgattgctcataaatatgaaatataaatgtgccaaaaatagaagagatgcacgatataaagatatttatttgtcccacaatagggatattttcagatatttcattgggaagaatttccattatttatggtaagtaattaccatgtaatcacatgcaaacaataaattttcaaaaagtaagaaaatatttattttcataaaacattttttcttcacttttttacattatttattaaattaagtttgttcttttaatataattttttattttatcttcattattttacttcaataagttttcatgtacatttataaagttaaaaggaaaagtagaaacaaagaataacttgctaaactcaatataatcacactaaattaacaatatatatatatataaatataaaattatggacaaaatctaaacatatatatatgaacgaaaaaattttgaaaaaaaaattaagttaatagagaggagagaggcatagcattttcacccaattcttaattatggttgttataaaacgacaaaaagtatcattatttgctcaaacaaagaagaaaaagagaaaggttttcactaattaacttgatggttgttacttaatcctaattattaattttgtaatgtgcctttcatcactttcataagtgaaccaacttttacataacatgcaaacccaactttaacaaagaacatatggtgggatctatgattgattatctataaatataccaaagcaacaatatggtgggtat

SEQ ID NO: 181796 - DNA, 1351 bp, Cannabis indica
atccccccacgcagcagtggtccttcattggctatttctggctcatctccatctaaagttgcgtctccatgcagattaattcacttgcttctcagtcaagacacaagggagatgatgacttatttggggccgattgaccaacaaagcaagacaataagcagtatgatttctctctttataatcattatttagcttggtttgccttaaattgttggaattgtctctccgttgtcttgtagtatattatgagcgggatgggtctggctgatctttttaatgtgtgattaaacaattcaacctgttccttatagatcttgtttagtgctggatggtgggtgggtaaatattttaaatagatgtgttgttctaatataaatgcttgatagtgttgcttttttttgaagaggcagtgcaattgaattgaatttaattttgattgtcgaattctgaatcatgctgaacttgtcattaagtctatttcaatattatatgtaactttttgcttacatattattttctgtaagcagggcagattttcctaatctttctggccagggtagttggggtatgaaaaacaatccttcaaaagcaacatcagcagggtccttaaaccggcaaaagtcaatgggtggcaaagccactgagcgagctgctctttcatcgtcacctgtctctgtacactcatctctaaaaggcaaaagagatgccatgagcaagagatcaggtaagctttgtaatagaattgttaagcaaatttgtattgacatttacatttctattttcgtgttatttatttcatgcagaggccacaggttttagagattggtgtgagagtgagtatcttcgccttatgggtaaaagaggtacgttcaatcttgcatccaataatttacttgcaattcagaagttcatttagtacaatttttagctcactcaaattacatgctaattatatcctgggccttttctgtccatattgtggcttcttgcttaatgttgaagccatttgaccaaatttatgatgtgcaagctgcaggtcaatattgcttaattagttttaatggtgtttttttttcttttccacacttgatagatacaagtttcctcgaattttgcttgaaacaatcaagatcagaggctgaggttcttttgatagagaaccttggatcatttgatcctgatcacaagttcattgacaaatttctcaattacaaagagttgtacctgcggatgttcttgaaattgccttccaaagtcgaaatgatcaaaatgtcactgggttcagtgctggagacatgagttccgactttgccagtgttgagatgttgatcgagatgccaatgcaggtgac

SEQ ID NO: 181797 - DNA, 630 bp, Cannabis indica
  modified_base (536)..(536): a, c, t, g, unknown or other
  modified_base (575)..(575): a, c, t, g, unknown or other
gtcaagtatacaactgacttttgtgacctgggttcaagaaaggtttttaagggtgttaagagtgaatcaaggcatcaaaaactagaattgattaatgcatcaactgacttttatattgtcttttatcatcacctttgattaatgtagacatacttacatatgaattggtttttgctacggcagaccaaggaggaatgtgaatatctaatcaatcttgccaagcctaacatgaaaaaatcgactgttgttgatagtgaaactggaaagagcagagatagcaggtctgtgtttcttacggcaattcctttttcaactgtctgtgtttctgctgctgttcctttttcttttgctttccctttttgattccccttaggtctcatgatatgtttgattaacatctcatttatatgcagggtacgaacaagctctggcacattcctggccagaggacgtgataaaactattaggactattgagaaaagaattgctgatttcacctttatccccgtaggtatgccatcaatcatcttttgtcncttttttttttgttctcttcatcatgtactctgctcttnttatcctatcttaggtttgtgtatacaagttaccgtttgtattttaaccaataac

SEQ ID NO: 181798 - DNA, 606 bp, Cannabis indica
atgtcggtgcttttatttaccatagatatatgtttctgtttattttacttttcttgtttttggctcattatttttaagagaggtattgaatcaatacccatgtaaaacaaggtagggaaactagtgagaaatcattattgattgtcttctaggggtctcttccttttaaatttgttccaaaagacttgatcttttgtatttaatgaactaattaatgacccaaattgacttgaatacatgagtacattactttaaggttcaaattacacttgggttttaagagaatgtaattgcagagttttatccttctcagttggtagattggaccatgttgccatcataaactgtgtttccttaaagtttgatcatgtaaatgtgatatgtttaactaggttgtttgctatgcaatgtttaccaactttactctgttaattaagaaagaccttctctacaaaactaagagaaactcctagtttatatatgatttgtgtaggcaacatagtaagttttatgattttaataaactttttgttggcagacggctgcagcggaagttatgttggagtttgctatggaagaaaatgcgtgatgatcttcctgtaccgg

SEQ ID NO: 181799 - DNA, 635 bp, Cannabis indica
aatatgtctgttttcaggagcaaggaaaagggtgggcgacatggaacgacaataaatatcttttctatagcttctggacacttgtaagtttttctccttttttttttacgcgggacaaaaacttgattttgagtgatggaaaaggggattacagaaaggagggcaagatatcaaatctaccttgacatttttttagtgtcttcctcactgtaagttaagccattatagctccttgaccatgtttttcttcatcaatttgttttattgagagaatgcccaagggaagtgtgaaagaattacatcaaaaaaattaaagtagaaaatacaatcacataataagctcccatccctgatgatcaaatcagaaagtaaaacacccttgaggctttttttttccttctaaagtagaaaacaaaacctgaatttccatactctattttacacgagtgcactgtggatgttagaattgtctttcttaaagtatactctattttaatgtttgctcgtcttttaatgtttacacaaacttaccatttgctgttttgtatattttgtagatatagaacgtttacttgaaaatcatgtattttgtagtgtcttgaagaacaccaatcgtccagttaaattctggttat

SEQ ID NO: 181800 - DNA, 639 bp, Cannabis indica
caaaagataccagctgtaaataaaagtttcataaaacaaaaaggtaaccatagctacgaaattaacataagaaaatgccatttaatacacaaataattttaataatattttgacaactaaaataaggttcattgctctttttgtggtgattaatccacgggaggaactgccatttggctaaacttttatttgatcttcaataatagaagaatacagaggagaatacaagagttgagttcatcaacaatggtgtcatataccttacaaattaactcacttgagagagatgtgatcaaacacacacatcctctttaacaactttcctcactcattacaaatgtaattatcatctaaattcatttctagattgtcacataaagaagtagaactgaaataactaacttgggagctcactatgagattaagagtagcagtataccaagtttctaaaatctctcataaaaagtatttattttttaaaaaaaaaacaaagaaatattattattatattataaaaaattaaataatttaccgtcaccaacgatatataacgtgcaataaaaatatacatttcttcttttctttaaccaatatgaaaagaagattgaacttggggtattggatctcccaattgctttg

SEQ ID NO: 181801 - DNA, 733 bp, Cannabis indica
tttgactatataaagtttccaggtacattttgttataaacaaaacattgatattaattacatgtataattatgtgaaactcacgagttgtgtaacttatcttcaacaggtaaaaaaagatcggatggttttggaatcctttgaaaaattatgatatatagtacaaagatcgaatgatttttttatattgtgatgaaatttacataccaactccttgttatctacttattttttttctagcatgatacaattatatttgtttttgtttcatatatatgatgttaaatgctagttgtctttatttcacaaactatagtttctatttcgaggttaaatggtttctatttttcgagattaaattgtttctatttttgagattatgaggttaaataatagttgtttccatttcgagattatgttgttttcattttttgaggttaagttgtttctatttttaatttgagttgtttcaatttttataatatttgtttctattttacatatatatatgtgttataaatattaataattatgtggatgtccaaatcttttatttattaccatgagttgtaatcaacattcctcttttccttagtttctctttttttagtttcttaatatctcactcttgtatttgtataaataggggttcaccctattggaataaacaactcagaaattctcattcactttctctttctctcttcatcttcttcttctttcttctcatctac

SEQ ID NO: 181802 - DNA, 834 bp, Cannabis indica
ctaatacaacacgttatgagagtatcaaaccatactatgtaatatatcttccttacctaaaatagaaagtgagtttaaaaaaagtgagctccaactatacaaaaatgattctctaatctctataataaaaaataaatagagagttccttaaattctttttttaatgttttaatattgttttaataggagtattattacctttttattgttttattaaattaatttatatttaacaaatttagattataaaatttattaaaataatcaaatactaactaaagtaaaaaatataattaatttgaataagaataacaaaaataactctctcttttaagtttttttaactattaccctaagaacacttataatagcgtctctactttatcttttaaaatacctcattaaaatttaattttacttattttagctcacttttacattataccacacaccaacttctccataattttttttacaatattttagtattatttcttaaatactttttattaattaaaataatgatatataaaaagtaagaaagagaaaataataaacaaataattaaatgaaaataaaaatagaaaaatcaaacaaaaattgaaaaaaaaaaataatttgaagaaagcccaaaaactcaaataattatgtgtatatgtaaaacatgaatagtgtgtgaactaaaatgaagaatcatttagttcacttgatgtagcactattttattatttttctttagctaaaagtttaaagatagttattttagttacactaataggagtactctaatatttagttaaaaaataaagagtacttttggaattgttttaaaga

SEQ ID NO: 181803 - DNA, 634 bp, Cannabis indica
atgcttctggcacagggttctcgatccttgcaatcagactctgaatcatctcccctttgtcttcgagagactttggatatatctttttggagaatggcaagttcagccaagattctttcattcagtgcaccattcgagactggtattgtttgcctttttcgctctaagtgatttctaagatcaccgtgcttgatgttaagtttttgcctcaagtcgacaagaggatccttgtggctcttcccccttctctcccttggctcttggtgcacgaatacactttttggtctccccaatcttgaggaccagcatttccctttggaaacttgtccctctacggacctttccctttaggaagatcaaagcaaactcctcgtggatcttgggccttcttatttttttccaggaataattgttgagtttgcctttggggaacctttagaaggataccagatagggcttggatctcgatttttatgcctctgactttctaatagtgacataaattcctctcttatttagtcttgcccaatgggttctgtgtttggatgcacatggatgcctaccagtttccatcgcttttggcataacgagcattatctcttgaatcattctgttctgctcctttttctctgcc

SEQ ID NO: 181804 - DNA, 860 bp, Cannabis indica
aggagcccccttaattgcaggtccataagcaaggtctggttcgatgccattgtcaatcagttccaggaatgtagcacatatttctggtagggatgtcctaaacaaccgcattccatacaccattcgggtagcctctcatagcggaaatccacccaaaacttgtcccgaacttgctgcagacgaatattccgtaccccttcgtaatggtttggtaacatcaagattcactctaattcgcaagaacggcccccatccttcattgagagaatcagtaaaaacttctaagaattccccaatagtattacccaaagcctttgctaacccccttgatttgctgagaaaaggtagcctatatacttgaacccaaaagggtgaaaacttgagatcagtaggagttaaattctgaagtgcagatggtttcttgaggacaatgtgatggttctgaaagtgccaaggctcttgagtaaggactctctccatatcaccttcacagccgaatgagagcataaagagatcagtctccttttcagtaattttacaaggaaaccgtccatcccagtgtgttttcatttgtttttgtcagagtagtcaaatagactggcttcctagtgagaactcgagcaagaaggcagtggtcgatcgttaacttccaagttgggagattcgtcatcatcaaaagaaagtaacagattcatcatcttcatctaaattgataatgcctttcattttatgggttaatggatccatgatacaggtagaaattgattattaggaatggagaattgaattgatatggtgaagttggctatgaaaactgcaaagaaaaaccagaaaaaagatggaaaaaccgtaaaggaaag

SEQ ID NO: 181805 - DNA, 509 bp, Cannabis indica
tttctattgaataataagaaataaataatgtaacctccccattcttaattttttataatctattagtattcttttaaactattagtattctcatctatatatatatagatattttattacacccaaaaaatatgatatatgtatagtaattttgtaaacctatataattgattaatctttaacaattcaaaatatatgcatagatatttatattgcaaatatatctatctatatatctatataaaggaatgttttaaggagatgatgtggcatcttaagcttcttataatctctaatacttattttttactttttttaatttttttctttttaaattgtgttaagtgtaacttatctacttttaatttaattatttttatctcttttattcacatttcttaacctttcctcttctcttcactatttattttacatttatttttttaaacttcaaaaaagaaattaccaatcttttattatcatatattttcttcaatctaccatattta

SEQ ID NO: 181806 - DNA, 645 bp, Cannabis indica
tcctattttgttattaggtaacataatattattattcgttaggtctgtcacaattattagaatgaatcaatttaaaatcctttcactatattgaaaggtgagattgattttaatatgagcttaattatatattttattttgtatatctattgttttatttgaaaacaggtgaataaatgactacactatatacaacaattaaggacatcactccaactacagaaagttggaagaataaaatgagagtgttagaaaaatttgaaaagcggacaaataagagttcaccactcaaatatcaaatacttaatgttagcagacaaaaaagtatacaatcagttaatttactgttgaaattgtcaatactctactaataaatgctatattttccgaatttttcctgtacacccgttgcaacaaattattatttcataaatatatatttttttcttaaaaatgaacacagggtaatgatgttgaacctaataactaataatatatatatatattttatttttaattgtatcactttttaataacgtagaaaaaactaacataaaatttagtatacgtgcctcgcacgtaattttttgctagtatatatatatatatgataagtttatagtagtacacttaatattattattt

SEQ ID NO: 181807 - DNA, 681 bp, Cannabis indica
aatactattattatagatcatgacataggtattataatcttagtgtaatttcatgatatctgaatccaatatatttaaattaataaaagactaaatacaacacagtcttattattattattacaaataaaattaatataagattcttagaccttaatttataatgagagatagagttagtaaaatttaatacaattttttataactaaaattatacattaaattacattaataatgtcaactatcaaagtggttgtaatatactgtaataactatcatgcctatttgattgagaattgctaaaaggcaccattggtgcctagcaccctcgctattggtgcgattaagtatcgggttccatatagtttaatataataatttttatggagtatcgctaaccaattgtaagacgacacatctagaaggtgttaggcaccactggtgcccaatagcaattctctatttgatttcatgaaattgaatgtgctagtattaatttcttaagatccaaatcaactttaattataattaattaaggtaactagatctatatttaaggaagtttatgatattcttattattataatcaataataattattataagtgattatttaccttccttgatcgtcgtatacaccactgtcacttccatgtttaccacgttgtatattttttatctc

SEQ ID NO: 181808 - DNA, 654 bp, Cannabis indica
atagtaagtctatatagtatgttcaatggcgtatgattttgaaattactgcctgccaatacataaatttcaaccgtagcatatcatagtctggctgcctaagaccatccttatttttttttttattttttttttacaagaagcttgtcctagatttgatgttggttatttttatggccaaatattttaaatgagatgtaaaactgagaactttcatgaactttagaaaaagtaaatatttgaccaaatcgacaaaattgctgcaggtgttcaatgatcaatgttcctcaatttaactaacatgaaaagatctaaatttttacaaatattacatatcaactaattagtttgagtaaaacatattcaagtatgatcaagttgacttgaagaaagcatatgacacaataaaataaaattttaattgaaaaaatgctatatgtctttaaatttcttagtctgaaaatattttctcaaacttaaggcttgtaactaagtgaagtagaaacctccatttactgttgtaataagaaagaagaagaggtttgaagagtgatacatgtgtccggattcaagagaaccaacctcccttttaagtacctaggtattcatatttgtgcaaagagaataccaactgctcaatgttaggtgattgttg

SEQ ID NO: 181809 - DNA, 983 bp, Cannabis indica
caacatcatatgttgaaattttaagaaggcctcttatgctcaaatgatcatacatacagaatttacattcaaatcagattctcggtaactaaatagttggtgtgggaaccaataaatatcttgtgatttttcaaggagaattcaactttccagggcaaataccttcaaatttcgacaaatttagtattgtatgcaaatatagtaaacatagcaagtatgagcaaagtactattctagcatttgaagatacaatggtagtttttgctagtatgttacacaaccaacaaataaagtaccatttttttatgcaagtttaagcttagatgcctttgaaggcactatggcctggcctaaaatctgaactaccaaatgtcaatttcctttttagttgactcttactaatataacaaatgcaattctcttttattcaagaaaaaaaaagtaattctcttcgattaaaccaagcaagaggagttaaaggaattaccttcaatagttccaagaaattgactacaattggtatcttggaaaacaacattcaatgttgttccatgaaggatgcttttatcagaatttacatcctcaatggctgctaatatcgctggtttagcagacctcccaataaccgaattgtaagtgaacaaagctccaatattcacaacactcggtcttgaagaagaagaagaaacactggtatttccagtaccagccattgggtttgaagaagaagaagaaacactactatttccagcaacagaaatttgatttgaagaaggaacagtagaattgtgagtggcacccattactgtacagatgcccacaaactgaaaatcagcaaaagaatattctttcaagcatataagagcagggccaggcctgttgaccaagagaagaccttcatggctgaaagagtttctatattaaacctggtcgattcttcacctcaacccaacatctgttctcgactggaaatatcataaagc

SEQ ID NO: 181810 - DNA, 791 bp, Cannabis indica
atgtaaaataaataattttatttaaaattataatacatatataaatattatatttactcaaaaataattttattgagaaataataataaaggttgcttgcttattgtattgttgttaaattgattatttttttttttagttttgatttttctttttaaatgtaaatttatttacttataagttttcattaagaatataattaattagtgttaagtgtattcttagataatctaatatatatatataaagaaattaatataatagggtggaagagagagaagtgttaagatcaaaatttaaaataattgtatttgattttttctttttctttttagaatgaactatacattcatttattgcaagactaactgatttaatttcatttgatttctttaacttaacaaggtttcattgagagtaccgcttaaagttttttttgacacttaatggtcttatttaaaaaagttctagaaatataatttaagtattattactgtaaaaaattaaacttagatatttatctataattgagagttaaacttaaatatttatgccgtaaattactcatttaaatataccaataaaaaatgatatgaaaataatgacttcacacttaacgtttaggtacttacagaagttctaaaaatataacttatgttattattatcatcaaaattaaacttggatattatttacaacctagagttaaacttagatatttacgtcgtaaattactttaaaaaactaatatactattcagactaactatgagtactttggatgaattaaaa

SEQ ID NO: 181811 - DNA, 514 bp, Cannabis indica
gcccaaattttttttttcctatgatccactttatttcagggcccgccctgcatatatcaatatataaaaaattaaaatcttagtaaaaaaaaatagtaatagtaacaatttttttttaaatttttacactacaaaataattttttttggcatttttataaaaattcacatacaatttaaatcataaccaaataaaaactaataaaccgtaaattaaaaaaataataaataaaataatttctttattaggacgtagttaagtaaaaaaaaaaaagaagaaaaacaaaagtgggacgtgccactaatatgtagcttggcgtacaagctaagttggagtcagtaaataaacgacaaatattttagcagaaacgacaatcacattagctcttttcttctcttctctctcatttcatctctgaattgagtcctgaacctgagacctgagatgcactccaagcaattcctttctgcagacagtctcttatcatcttagcaatagccaatccagttatacg

SEQ ID NO: 181812 - DNA, 671 bp, Cannabis indica
tactaatattgttcattggatttgaaaggaattctaaaaaaatatgcacattgagaaccaaaaaaaaaaaaaaagtaaatctgttttaaattttgtcttattgttaattaggggatgaatccttcactttgtacctacaaaaattttgttaaatttcaagtaatatatctaatataactattttagaacacttttgcttgattgtattagaaaatataattgctatctttatactaaacttctaatttagatgaattaattttttttcttaaaattcaaaatttaaagtttaaatataacacacaaatatattaattaaaatgaatatattaatttaaattttagctatagcacacaaatatgacgtgcattgcacgtagattctacctagtattatgcatatatccaggcccggccctgggcataggcgggctaggcctgtgcctagagcccacccagcccagggacccaaaattttttttccctcttttaaaattatacattttttttaccgattttgaaaataccacattttttctaacataagggcccaaatttttttttcctatgatccacttatttcagggcccgccctgcatatatcaatatataaaaaaattaaaatcttagtaaaaaaaaatagtaatagtaacaatttttttttaattttt

SEQ ID NO: 181813 - DNA, 731 bp, Cannabis indica
atatatatatatatataagaatctacagtattttcaagtcatacatatgcgattaatgtatatattgtttcttttttggttttttgcttttactgatgcgagtatgcatcgatgtcatgcattagagaatgcattctgttctgtattttcgtttgtttctttagttttattattattattattattttattaaaatatataataattttaaaataataataataataattcagtaacaattaaattcaaattttggtttagaatttattaaggatatctaatatttaattaaattaattgaaacaaaatatcaccaaagtgatctcttttgtgtagattaatttaataaaaatattatgataattgtgtgtatgtgattcataaatttattaactaacccaaaggtgagttaatatttggttgaatttcatgcatgtttgtggtgataaatgtgtgacaattataaggtattttgtgtgaataatatgttagtccaaagattgcatattatttgacataatttattgtcaatgtttgatcactacaacaagagtaccgcttacaattaatattactgtccaaagacttaatattaatgttgtgtttggtatcttgagatgggattaaccattatttgaatttattgttttatttggattcttatatgagcatgttatttatgtaattgtattgttcttttcagctgttgctagtgtatctgctaaccttaa

SEQ ID NO: 181814 - DNA, 666 bp, Cannabis indica
catttttagctcaaaaagaaaaattcattggactaagaaggagtgcaaacacctcagcttccttgcaagcattagagatagaaggcaagctaattgaatcatttgatcaaagatatggttgggcgataggtggaggatccaagcaaagtaaattcaccttttcacaattctacaatcaacttttgggtttgaaaatgatgaacaagaatttagttttgtagagtgtaatagatgttggcccaattttatggaatgatggatgctgctaaagaagaaatatttgttattccgagggtgaaggctcctagacgagattgttttagcaactatttttaccaatataattggaatacagtgggtgatgaagtatgtgaggaaattttatctttcctacacagagggaaaattattaaggaaataaattcaactacaattactctcattcgtaagaccacatgtccagataatgtaagtgattttatacatattcctttttgtaaaattatttataaattgcagcaaaaatagtttatgcttgcttgtggaatattctaccagagttagttgcccaaaacaaaggaggatttataaaagagacatttattgcttataacatcaaggtatgcaaggatttagtgaagcattacaagaggaagaatgtgaatc

SEQ ID NO: 181815 - DNA, 629 bp, Cannabis indica
ctgaggtattgtggaggtggaggagtatcttgaatgaatttcattaatcgatttccacgaattgtagcaagaatctgttgcttccagagaaggcaattttgatcatttaacttgattgagattgtgtggttgaagtacacagtggtatcatcttgttctttgcttcgatttcttgttactgcagcaggagcatcttattgtgtagggtgagaattcaagtttccaggatcaatggtggccatgttcgccagcaatggtgaccatggctctgataccatgttagaggtattaaacctcttaggcatgaaagacagaaagagaagaatgaagaagtaacagaacaaagtgagaaaaaggcagagaaagataagagagagaaagataactcttcattgattaagaatgaattacaagagtgtttatataagagcagcaacaaacattaactgtcacaacaaaccaatgacagctgtctaacaaccaaaccgaaataactaacgcaatagtaaatagaaaactaactaatccctaacgtatataaatatatatgataacaaaattcaatgaacaaacaaagcctccactaccacgtgactttgctaagcctaatgttcttctcctctcatctc

SEQ ID NO: 181816 - DNA, 747 bp, Cannabis indica
tactattacgatgtaactaaggcatgtttatattaccggcatgttactggttactggggcgttttggtatgggggctagagttggtgaggatgagaatataaaactcaaacctatgtgtaatgtgtttggtaaattaaatattaatgaccacacttgagtatcatatttccagcgccctctaactctactccatctaagttcaacacacataataaataccatatgatagtattaatgctcatttctaccaaaaaaaaaaaaaaacctccaaacagtaaaataatttagggaaataagagaaactcctaacaattaagttgagtttactttgaaggaataaaaatatagcaaaggaatagaatagaataaaataaaatttaaaatgtatcaaatattaatataaaatattattattattttattatttcatattagaatggtatgttctcctattttaaaataaaatagtgatattttaatactttaaaatagcaattaaataaaatattaaaataaaaattaatttcatttcaatttatgttagattccatttcattatctccaagcaaatgaaaaagaacttcctacatgctacacaattactcaaataaaacgaaggtgcaatactagtgaagtgacccataatgtttttgtaaattgtagtacaaaggtttagtttaggtaggaataaaaaataacaaaattaaaaggtagagaatagagactagaaagtaattacagtgttt

SEQ ID NO: 181817 - DNA, 501 bp, Cannabis indica
gcctccttttcagctcagcttcggttcaagctgcgactaccattcaaagcattctccgtcactacagccaagcatctggacaaatggttaacttcactaaatcggccttatacttctccccaaatacaacccaagcgattaagcaagaaatagctacgctcctaggcatcccagttcgtgacacgatggataagtatttgggtcttcctcaagcctttggtcgatctaaaaaggatgccttcaattacatcaatgatcgcgtttgggcccatttgaacagatggaactcgaaattcttctccaaaggtggaaaagaaatccttttaaaatcggtggtacaagccattccttcttatgccatggcgtgcttcaagctccctgcatcattccactctaagattgaatctttgatggcccgattttggtggggtgccaatgaaaaacaaccggaaaaattcattggaaaacctggtcatccctttgctattcaaaattccatgg

SEQ ID NO: 181818 - DNA, 875 bp, Cannabis indica
gggatctggtaagattgtaaagtgtcaagggctcactataataaagcccttgaacttattataaagggagacttttttagaaaacatctgaatagtaattttttagaaagttaaatgttgtaagaattttacttcaagtattcttctattaagatcttaaaataccatttcaagtcctttttatgttattgatgagttcttaccatcaacaatttggcgccatttgtgggaaatgacatgcaaaagcagcgttgtttctttaccgagaatcattaaaaaaaaaagccaaagacgctctcactgtcgctaggaagtggaggtttgacttgatgggcttcaactgatcgcctcaaggcctgacccgtcacctttattagctggaggaggaggagcaattggctaggtgcatcagaacagaggaggcatgaatgaccatgagccctcagtaggataaggaaacaattagctcgaggaccacccaacaaaacaactagcgagatggagcgattgcctccatcatgccagaggaagaggcggagtgcaaaggcttggggcccccatctcctataaggccaccacagccaccgaggctgggggatcccggaacctcacaccactggccaaaaaaggaaaagtgagtctactcgatgagttctagctctcggactcgactgtataatgagaagatgaatgagctgaggacaagcaacttgcgtattgaagaaacaatcacaaacatgaaaagggcgttagaggagctcttgagaggtcgttctaaagcacctctaatcgggtgaagaggaccaaaagtaggaaaaagaggagcaagtgggctggaagatgggggagtatcaaagtactcgacaaataacacc

SEQ ID NO: 181819 - DNA, 369 bp, Cannabis indica
ttttttataagatcatatacattatttataagtaattatagtatacatcattaaattttactttttttttaaaaaaaaatctaaataaatagtttacaaaaatataattgaaataatatgttgtaggaaataatatgttgcatgcatgtctttgttttttttttttttttaatatacataatatatgatcataaatactgataaaatatttactatacttacaatagacataatcacatcaacaaattaaattataataatttaaatatcaaaaaactcgaaaatacatatactatactttattaacactcacgatttagttaaaaaccaaaaacaaaacattcacgtttttaatatttatatttttat

SEQ ID NO: 181820 - DNA, 532 bp, Cannabis indica
atacatatgtgttttttttttcttcatgaaaattcaatattgtcaaccttaaattttagtctatggtaaattggtaagtaagtaagttccttgttcaaatttttttttttgtcaaaattgatggtaaaataaaataaaagaagtttttttcatgaaaaaaatttactagggcaaattgatgatattctctctccaataatcttttttcacttttattagtttggaaataaaaaaaaaaaaactattagaaatgaaatgatatgtatagtaataatttatttttttataagaccatatacattatttataaaaatattagaaatgaaattatatgtatagtaataatttatttttttattaagatcatatacattatttataagtaattatagtatacatcattaatttttttttaaaaaaaaatactaaataaataagtttcaaaaatataattgaaataatatgttgtaggaaataatatgttgcatgcatgtcgtttttttttttttttaatttattacataatatatga

SEQ ID NO: 181821 - DNA, 967 bp, Cannabis indica
actatatatgcgatgacttgggtattttttcccccagcactctatgtaaaagatcacatctttacagcgattaaacccaaatgactattatatgcgacaacttgtgatggacccacgagtcttatgttgtcagtacgtgaatattcaatacgcgaccagtataatcgcatacattctataatatggatcagaaccttgatatcacacatctatacaaactccgaaaggtttatccgttcacatggtccaaagtcttaatatactcggtaactcgagtgaaccctcaagttcacatgttaccgagaatatgaacaactgatatgtgatcaaagtagtcgcactcgtttgagtactaactaagaatggtcaaaactctttcatttattttacaaacgtttttttttttcaattaagtatacttaatgtgtgtaacggtcctgtctgaacggttatgtaactgaatgattagatacaaataagactaatcacaaaccatctttaagaaatggactaagcagaccaattttttcttaattttgtcagtacagactctgctatataaagcccaagttctaaatcattaggtctaaacataaacatgtagtatcagtttctttcaaatatcttttaaataaattcaaaacgaaatttgtaactgaacgaaagtaaaaaaaaaaaaataataagttttacaaatattgagtatttatgtcactaaaataaatattgagtttatgtcgcttacaattaaatttaggtattatgctctactccccttttttttccgtacgtattcgtccaatctaggcaaaatactcccatttctacttgtgagtattcttacataattcatattgattggcctatcggacccctatatcggtttttgtcgttcaactcagatccaatttttctatcacgatgcatcgagaatgtcatcggacttgcctaaaaactagtatttagc

SEQ ID NO: 181822 - DNA, 660 bp, Cannabis indica
aaaataatttatatttctattaaatttttaattatttttctttagttttaagatacaagtttataaatataattaactttgattttttctttgaaaaatcttagttgtttaaattatttattggatttttaatcattttagtttgactttctaagatacatgtttagaaataaaataaattttgaaaatatttcttgtaagaataaattagatttattaagtaaatttaatatttttttaattaatttaatatttttatcacattttttttagtaatttttattaattttttcagaattaatagaacattataatttttaaaattaatttttttttttaataacgggggacaatattttgtattggtcaaaatttaggaggtaaaaatgtgaatttttaagggtaaaagaaacagaactaatagaatgagcataattatttaactgatatattttaggagaaatttttaactaagcgatatattttaagggcaaaattagatagtctcaaaagttcagtggtaaaaatactaattattttttgtttaatgctatccaaatatcaattactaagcctccattaatgcttgaagcttctctcaagtggaatgagaagtgggatatacaattctttgaaaactccgcatgtaaagtatttttg

SEQ ID NO: 181823 - DNA, 600 bp, Cannabis indica
gaatcttttgtccaaactctcaaggtgagtactttattttttatctctccgatcaattgtttttttaaaagcattttgcttgaatgaaatgaaattttgggagttttcaggaaaagggtattgagaattttgagagttctgtacccaatcgtggagtcaagcaagtattcttctttgacccagatggtaaggcttttcttcctttatcaattgatttttcattcatttggccttgtttggattcattctagaaatatcaactttctgatgccaaattccacatttcttgttaatttacagggaatggtttggaggttgctagtctcccaccacagcaataaacttagtcaagaaaatttaatgaagatgaggacattatcactgtcctggttctgatgttgatgcactatagtctatagcttatgctttctgtggtctgtttttagcttacccttacaaaggggttgttttttcattgttatgtaactatagagaaaataatgaatgcattacatgttctgtaaagaaataaacttcaaatatctcttggtttcttaagattttttcatataacaatcgatcatgctttttgtattgagc

SEQ ID NO: 181824 - DNA, 705 bp, Cannabis indica
aatcaaatgttacctaaaatataactaaacaaatgaatgaaataaaatttgattattttctatttcattacccttttacctccaatcaaatgcaaacttaaagtttctacacattatcaatgtaagattctctaacatctttcaaactaactcgacataccttctttcgaaacgtctgataatagcttcatcaagatacaaaaggcctattagtagcagcaagaacaagaatcctttcaccgggtttcgtcaataacccgtcccaatgtgtcataaactcgttcttgatcttccgcatcgcttcatgttccccggctctagacctctgtccaagcatgctatcaacctcatcaacaaagataatagttggcgaaaccttcgccgccaaaagtgaaaaagagctctaacattcttctcatcctcaccgaaccatttcgatgttatggtagacatggaaacattgatgaaacttgctccagcttctttagctatggcctttgccatcattgtcttaccagttccaggtggcccaaatagtaatattcctctacaaggcttcaatagtcctccattgaaaaggtcaggtcttctcagtggaagcaatactaattcttgaagtgattctttgatctcatctaatgcaccaatatcagaaaaatgtcacaccaaatttcacttgctggtattacctctggccttattctc

SEQ ID NO: 181825 - DNA, 485 bp, Cannabis indica
gaagtaaaacaacgaaggtaccgtgagaagatctggcgcagtggagagggagagagagggagagagagagagagagagaggtggagctagggtttggttttgcgagagcgattgattagtggagaagccatttgggacaaaaatctttcgacaacgttgaatttccttgtttggtgctcaattacaacgttgtcctcctctctaacgccgatgattgtgatcaatgtccttcaaggaggtgtgtgtattgcccctaagttaatcgtagtttgttacttggcccttaacttattttttttattgcaattatatcctcgtgtttctaaaatgtttcaaatcaccccaattcatttgtcttctattttttttttttttttttgtaaatgtaggcttctattaaaatctaacagatacataatttcgttacaaaataaaaaaaaactaaataaaaaaataaaaaaaactaaaaaaataaaaaaacaaac

SEQ ID NO: 181826 - DNA, 719 bp, Cannabis indica
tctaatacataatttatattaacctataggagtataatagaaacatcatctatatataaaagtaggtatatcttaaagaatatttataaaaataaatgtaagcataaaataaaatagatatacagataatttcctaggttttttcaaatcacaacacatgaatatagggcctattatatcaaattaaaattttcaatcagtttcatttttatatttttctatctatctctacgtgatgatgagcatgaaatatatatgaaaaaaaatgttatcacatggctccatgttttgccaaacaaaaaatagatttcaaaaccagtgccacatcgatccatgcttattaattattcaattaataattctgtaattatcaccaatttcactttatatattatctaattaaataatcgtttataatatttacttaaccttttattttcttggaatcacagaaagtaagaagaataaagagcgactaaaaaaagtttaattttagtaaacatcatttatttataacatcaattttttgtaattaaatttgactttttatcacaacaaaaaaattaattacttacaactaaaacataatatttagatacaagttgtcactaatttagttttaatcacaatactaaaataacatttagtcacaacaaattgtgatttttgtaactaatatatttagctatgaaatttttagccacaatataaaaatggtg

SEQ ID NO: 181827 - DNA, 704 bp, Cannabis indica
gtccacgagtccattttattaggctcatcgttcggtgggtttttatacaaatacaaatacaaatacaatggacttttctcctattccaccgtgatcctcttgaagaagaggaagcttattaggaatattctggaattaataatagggttacagaaatgtgtttgcttagaatgatgaagattaagtcttcgatctgaaggtaaaggtccgaaaaaagatccctcctttgtgcttccttttgggtatttataggccagcttcatcgcatgggctatcttgggtggatcttttcagggatgaaatcccaccgttggattggtaggtggcctattttccatgtggcttctatggttgtcagattgtaccagttgtacaagcttggcttcggacgcgtgtcaccttagggccattcttatttgaacttccttcatcccaagctgttggattatttagcccaatacacaaggacacgcatgctctgcatggtggcatggtgtgggagacaacctttgacaccgtacacacagaagctcggtcactgggtccatagcctaacacacgtggactgagcttctgcgggtcaaaggcgtacccccagactagtgtatcctggtttgagaagatccgcactcttgtcaggagcaaatggcctcatctctcagagtggaatgagagattggttcacagacacctttcacatggct

SEQ ID NO: 181828 - DNA, 521 bp, Cannabis indica
atagcaagaacaaatatgggaataatctaaaaactttaattcataatctaaaaaagtttcatcaacagtactcaagaaagagtgtttagttcataatcacaaacataatatctacaataatcatgttcataattaaataactaaacaaaagagtgaagaagaaggagtagaagaagaaaagaactttaacgatgatagttgatgatgattgttttgaatctcttctctatttctcttaaatgtattttctaatctcaaagttacttgtttgtatctctccagtcatcccaaaatttgagttacatcattctttatataggcccaaaaaagatagaaagaatctatttagaaataagatttaaattcaaaaatacatgtacggcgctatagcgccacgcggtacgtcctcgaggcttcacttttagcgcaaacgaaataattttttccgtaaaactcggggcgtatagtgtccatactttttggcgctatgtattagagttagtcccacacttgataatgtg

SEQ ID NO: 181829 - DNA, 636 bp, Cannabis indica
ctcacagataacgctgaagaagtcaattatcacaatctccctattacatatactcaaggcaaagtactcaataattaactcttttatctaagcagtaaatctacgaagcatgcaatttatttaatttagataaagctttgagatttatagagatagattaatctaggtaataaattaatgaagcatataatttatttaacctaggttctattcttcatcacagttaaaaatacctttaacaatattagaaatcgcaatttatcacaaacacttagaatcctacactattaggtgaatagtaatcctaagatgatggtagattaaagtaaaacctaatttagtagccatctacacacgattaaaacaaaaatcatgacattgaacatagaagaataaaaacaatttgatataatagaaactagaaattaacattcactaattaaattaaaaacttgtgtctcgggttttgaaatgacccttaactaaaagaaaactacttggaactagacattataataaaaattataataaatagtaagagtttaaggagaagaaaagaactatgatgaagaacactttgtaaagccgcaatctctatctctcttccttgctctctctctagtttctctctcattc

SEQ ID NO: 181830 - DNA, 517 bp, Cannabis indica
ctctactttatcattatgttacttaatttgattgtgtatacttatgtatcaatttttaccgaacaatgatatgtgtggtcttaataatttttacataaaaatctctacaaagtctttgtctatgaagtctccatccataacaatacaaagtctaaaaattaattttaattaaagacctaattttagcatttttaccaaacacaaagtctaaaaaaattattttttttaaaaaccccatgcatttatacaaaacatagggtcttaaaaaaaattaggcacttatttttgttacattttttttaaggaataattacacaaagcacaattttttttttttgtaaaaatttatatttttacgttcaaagatttttttattatatttttacggtattttataaaagtaatacgaaaaatacaagaaaattacataaaagtaacataaaaataatatcttatcaacatctaaaacgacaacaaaaaattaacaatagtaaaacagaaaaatacatcaaaaaac

SEQ ID NO: 181831 - DNA, 508 bp, Cannabis indica
aattctagatctcactagaatttccataaacggcaggccatgttgacaaaacggcagaccgtttttcggcaaaaatgtcaaatttcgcactcaccgaaacacccccaaaacctatccaaatcattccaaacttcacaggacacatatatatcatatatacagtaatccttaaataacaaaaattatagagtccttaaacggaaaacaccatcaaagctcagacctaagctttaaaaaattctaaactcgatttcccgctctgagaattcgctatcccactactactggagcttagatcgctagattttggattgaatatcgaagaaaataaatataaaaaggagagggtttcgtcgaaaggggaaaataagggttcgttcgttttgttttcatttatgtttagtgatataacttataatatatatatatatatatataagttttattttgaaacgataagtttatatatatgtatataaaaatagtgttgtaataataataataataa

SEQ ID NO: 181832 - DNA, 757 bp, Cannabis indica
atgagatctcaatgatttatctctattaggccaagctcaaagaaaatcatcgtttcacttctaaatacttatagaagctatagattccatatttatgattagcgctcctactcaattgaattaccatgtttcccagatgtaagtatccgccaaaaccattggttagctttcacgaacagcttgaagaacataaataatacaactaaattgaacctaaccatattaggattaagatccatagacctaagatcaaccagtgatcttgacttagcaaaatattatggtaagtttatgatatcttatctaagatcaatatcagtccaatccaatgtatactccatacatccgatactggtaaactttactgttgtcgagcaaatttcgcaacaccaaaaatgaataataataatgataataagaagaaacaatatgatgaacaattgcgagtattcaacctaaaacggcgagtactcgaacggggacgtaaatgcttagtaaaaactggaaatatcaagaagacaaaggagtatagtggttcagttagatcacggtctgcttagtccactgttccaagagtttcgtaggtgtcatttcatggtggatcactcctttatatacaaagcaagtgtccagttagttacacaaggattgcattcattatcaatcgtttgtatattgatttacagtaaattaaactaaaaaaatgtaaaacatcaataaaatgaataacagtttctattcactaaaatacaagcaa

SEQ ID NO: 181833 - DNA, 750 bp, Cannabis indica
ttcatatcgcgtatgtgacttgtagaatgtttacaggctgctatcccaagcgagaaggaatgtttttggccattactttcaattcaaattgtgatatcttgttcaataggccttgagcaatattcttctatattttaattttttttttatataatttctgcatattgaaatggaaaacaagaaaagaaaaataaagaagttgttatgtatatcctttccatctctcgaataattgtccttaacatttttgttttatttttaacctttgtaaaaaatctaatgtaatcttgattaatcacgatctacaaatgccaatctcactcacaagctaaattatgctcgtatattagatcaagctagatttggttaccatgtttaccagtgtctagcaggcctaaaggttgttatttaggccatgttttttttttaaaatttaatttttaaattattatttttttttatatatattatgtatataaaatatttttttatctttaaaataacactatttataaaattaaatttatgtaagacattaattattgtaacaattaaaattatgatatatttttttaaaatatatattataacaaaataaacgtgcattgcacgtaacttcaacctagtatatataaatatatatatattagcttataaaaacaaaaaagaaaaaacaagaagtaattacaaagtaactctaattaacacatcgaactgatcttctatcaatatatgtataaataaaaaata

SEQ ID NO: 181834 - DNA, 774 bp, Cannabis indica
acagtttttttaaaattgagttttaaaaaactaaaaaacagaaaacaccaaaaagttgtttttaatttttaaaaacaattttttttgtctaacatattatattttatatttttgcttgcatactcggatcttagatccgaaaccatacccgaacccggatggattcatgtgatggtatggtattaaaatattaatttttttagtaagaaaaaacctaaaaatagttttaaaaaatttgtgccaaacaccattaaatttttaaaatgacaaaaaactgttttttattcaaacttttaaaaactgaaaaactgaaaaacacagctcttactattcttttttttttttttttttttttttttgaatcatatgtaagaaactatattagttggctttgactatgaccaaagtctaatgggtaattattgtattatatttattaaatatattattataattcaatacaatacattatattaaggtgtatcaaaattgccttaaaaattctcaaattaatagcttaaactaataagttgtctcactgttagaaaatctgattttcgttgaaaaaattttttttttttttaaattttttgtgaatatggtttcttttttctttttggtattaattaaaggctaattagaatttttgcccttaaactttgacacgtatcaaattatacttcctgaacttttaaggtcattaaaaatacctctgaactattgagattattagatttaaagacttttgcctaattttagtaagaaaagtctaac

SEQ ID NO: 181835 - DNA, 732 bp, Cannabis indica
taattaatcaagttttcttttttttcttttgaaattattttgtttttttttttggtattatagaattagaactgcacgtgcaatggaaaaagcatcaatcatagctttagggacctaaaaatgaagggccatttacggccatcccataccttcttatgtatctttctctttcttttttatttttatttttttttaattttctttctacaaagaaaataaataaagaattaagttattattaataaagcgataagcaaacacaatatacaaaaccgaatacatgtgtctgtttcaaggttaaaaaaagcaaaaccagaaaacatagtagcaacaaactggaaagtattatttataggaaaatcttatgacaccccaaaatcttaggataaatatatatataatttggaagaaaatgtaaagtacttaaaacccatcaaagagttttactgatttaattttaattatatacattataatcaggctgtgttatcttaaatctttgattaagtgaatttttattttttaattaatcatcgtaatttctctgctcaaataattgatattacatgccatcaaatcaaaatctaggcttgcctaatgaatgaatggtatatatattttcatgcaaattcctaatatctattgatctttagaaaaaaaaaaagtaaaagaatattggaacaatatctatgtagtccattcggtggatataaaatttctgaaaaggcagaa

SEQ ID NO: 181836 - DNA, 645 bp, Cannabis indica
tttttacactttaaagcagtttttttttttgcatttttacgaaattctacatagaaattcttattgcaactagcgctgtaatctaaattgcaataaaaaatcgtacagaaactcttattgcaactagcgctgcaaccactttagaaactcaaaccgtaaatttaaaaaaaaaaactaaaaaaaaaatagtatttagagtaattctcctataaacaatatgtgccgtttaaaattattttactctgatattattagtcttataaaagaggaatctctataattttaaaagataaactatggaaaaaaaaaacctataaagttattatttgttaatacttatcttctaattaatgtatctatgtgcatgttattaattctaccctctcttctaaatgcagctagccattatacatgatattcatcaaactcatcgtcgaagtgtatatgaagaaagtttaatattctccatttggtgatttctgtcctgagactccaaaagcgtactgtacattattaattaatattaagtaattaaaaattaattactaaaaatatactgagaagctgtatgttacacaaaggcatgagagtaaaacatatatagagttatataggttaaaagtaagtataatcacattgcgataa

SEQ ID NO: 181837 - DNA, 591 bp, Cannabis indica
atttactttttaaatacgggactttaaaaatataaaactaatcaaaattttaaaattatttttatttataattgatttaaattaagacttaatttttttaataaattaaaaactatttttaaatagaatattgttactatatatataaatgatgaagatttttctttttcaagtcaatgataataaatatggagatgagagttatgagtgacatgagaaaagtctatagtgagtctcctatcaaaacaaaagttatgactgatatataaaattgaatggtgaagaaacattccaaatattataataaataatacaaaaaagagcttaataattagctctttcactttcattatttgtgacttttcattgccgtgttgatcaaaagtgtatgtgtttggaattatacaatatgccaatgaaaagtcttcccaatattccaaaataaagttgacttaaaagttttcctacactttcctctttaaattattttgtaatgttttaatttttaaactacttattttttcttttttgtacaaatttcttatgtttaatttttattacacttaatttctttatttctttttgttggtc

SEQ ID NO: 181838 - DNA, 1101 bp, Cannabis indica
gcaaaatcgggttggtcgggttgaacctatttttaacccgcccaattaatagattggacggtttgtaatttttttgggttatttcggtttgtaatttttatcgattttttcggttcggtttgggcgggttattcggtttaggcagtttataaatttttttgtacaaccctactttcagcactctttgtactttttaatcttatttatctatttattattttctaaatatttatctactatctttaacttaaaaaattaaaattatgaatacaatatacatttaggaaaacttaattttgggtacactagtgttttgtttaagatatatgtatatttttgaaatgatttaagatactattttattagcagtatttttattatcttcaaaaattatggatataaattatataattaccatatatagtttattagaaaagttagtatatataataatttttattatgttactaatattatctgtaagatactatttttgatagttttataaaattctatattaacatatcaaaattgttttatcaactaaattttatattagtatatcatattgtaacttttaaaataatagaacgaaagattttatagtaatttataatgtacctgatttgttgaattttattaagtttaaagttttataattttgttgttgaaaagttataaaaataataataaaaaaaagaaacgaaaaacttattttaatgttagttgtcgttttttgtaagatgataaaaaataagagaaaattacattatatatccactttatactttatataagtcatattctcattatgtgcctttgagactctaattttgataagttatgtgaggttatatttgatatttgattaaaaaatgatagtatttatcaattaaaattattttgaagttatatttagttaattaatgtgaatataaaagagtagtttaaccgacatgccgcagcttctccaataaacgggtcagagatgtactaatataaaaattatttattatgagtttaactatattattctcaaaatcaatagtagtaaaaattaactatattattctcaaaaatcaatatgagtttttttttttg

SEQ ID NO: 181839 - DNA, 729 bp, Cannabis indica
gtcggccctatgttaatttgggccttaagaaaaaataaaaattggggcccagtgaaaaagtgaggattcgaactctcaacctcttagttgttaaacaaattactactaggctacagcacatatttagcattagaagtattattatttattttattactaactatattttaattctttttttcgaaatggggccctaagcggtggggaaggcggtcgcctcattcgtcttagctcaggaccagccctgttttagagaatgcttgatgaggtagaaagtttaagtgacaaaatataaggatgttatactattagacataaaaaattattattgttaaaatttacattgatgccttacaatagcattgacgctatatttttttaaataaaaaattaaagctataaaatatataatagttcaataaaaaaaattatatatatcattagagtatttttaaaaaatagagtgctaaaaatgacctgaaagaaatataaaataaaatattatatctctagctaatgtggagatatatagcacctttaaaaatactatcattagagatgctcttagagcttctatgtgtttcttattttttatctaattttaattaaattagctaaaaagttaaagtaaataaatatttttattatttttctcaacttatactttttactttagttagtcatttgattattataataatattttataatttgaatttttgaaaatat

SEQ ID NO: 181840 - DNA, 668 bp, Cannabis indica
atcggtagatgtcaatgaaggtaagtcttgggatgaacgaagatgagaacacccagtgttgcaactttgatattgatctaagtagtcctcaacccagtgcagaacctgtgaaggagaagaagacaacccagaatatatccaattgttcctgcaattccacagcttccatagcagacacaaaaagaaatgatagtctctaccattatatgtagtggcagcaagataaagtaagtccaaacagttgagagaagcatttttatcaataaattcatgaaaaatggttaaattccatacctcttggacagttacacatctgaaaagagcatgttctagagtctcatcatgataaaaacatcgacaacaacatgtattatgtaaaactttgcggttaaaaagattatggcgggtaggtaaaatgtcatgacaagctcgccaaagaaagtgcttcagtttaggggctaaaggaagagaccacatttgcttccaccatgattgggtaatggtattattcgagggtgaagggtcattttggtgcagaatgctatgggcttggtgataaccagagttgacagtgtaggtgccatgtaaggtaagggaccaatagtaagtatcaggagtggtaaagctagtaagagggattgaaatgatggcctgacacacatcgacgg

SEQ ID NO: 181841 - DNA, 842 bp, Cannabis indica
gtctatataatataaaaataaacattgcaattaagcatcatagtatttagtatcactatgaggttgattttttatgatcattattaaaagttaaataaatgagatatggtattaaattgtagcaatagtttatgatacttcataaaatgctaaccactataaatactctttaatatttcattataaaaatagataattgtcctacttaaactttatttctgtcatcgcccttgttgtaacatctatatttcttaagtgtgatgagaaattcttcaacaattagtgattataactaaattaaatatttaaataaaatgagctaatttttattttattaaaaagcaaaaaatattaataaactaaataaaatcaattaaattaatatcaagttacatataatttattaattgatttctgaattaatcacaataattacataatttattattactatttttttttttaagtataattacataatttatttagattaaaacatgactgttaaaatatgtgcttattctagtcttgtctatgataaggagaattgtggaagttattttgctgaggtgttcaaacgtgtttttgtcaataaaacttacatattatcaacaaacttaggacaacatacatatataaacgttgatttttatttaattttaactttaaaccgtgatagttacgttgctcaaatgtatataactgaattcaaattcaagatataatctgagaaccaaaggggtttttgttaataatataaaacaataaaaaaatgtaatttaggattttttgccttctaattttaatctatgtatttttagtgtttttaaatttttttagcc

SEQ ID NO: 181842 - DNA, 614 bp, Cannabis indica
aatagatcgtaataccaaataatattaaaaaaaatgtagaatgacttaaacatgtatttttttaatacttgtagtatgctaaatagatccattcaataaatatactaatatgttatattatttggctaataaatttctgaaacaaacttaaaaggtcaccgaggtattttaaataattataagatcgatgaaacttttttattttatacttcaaaatatttttttttttgtgtttgttatttttacttgaattctgcataaaaaccctattgtaactaacggaacaacttaaaccgtaacaaaaattcatatagcaacccacatagaaagcaccgaagaaaccactttaaaaacacaaatcgtaaattaaaaaaaaaaagttaaacaaaatagtatataagatgatttcccttataataccataatttaatttgaaaataatgaatagtatattaagatgtaagcaaatttttcttattaagttatgaagtaagcttttatactttattgttaactcattagtttttttaaaaataaaaaagacaaaaaaaaaataagatttaaaggtaacataaggttgctgaaaaataaccaaaaatatcttcaacaataag

SEQ ID NO: 181843 - DNA, 551 bp, Cannabis indica
taatgtagctcatcttctaattatatctaattaataatagatattttattttctaaatatatataataaataagagaacataaattaatagttattgcatagttttattaataaatttggtaattaacaaattctgaattttttaaaagttgaaccatatatttgtaactttaagacaatttaactttgagctaaatgcaacaatatatgattttagttatgcatatgtgaagaaaattacaaacaaacaatgttaaatattgaaagaacaacttagcctaattactagattcagattactaagtctatcaaagaatctatcatcaatttcgacaacacaactcaagaattaagtaaatgacttaaagcaaaggaggtagcaatttacaagcttcatttgcactagaaatgcattttagctgactagtgcttgagttccccgaactaaagtaatcattttcactatattcatagatgtatcttacaaataccagttcacaatatagtaaacaacacaatcttttacaaaatacagtaaatctatacccaaa

SEQ ID NO: 181844 - DNA, 511 bp, Cannabis indica
tgtggcccataatactattagctagagaaattttgcccaaacacaacaaataatttttatctttttgtattttaaaatattaaaatatcatttcaataaagtaacttttctattattttgccataacaactaattcattttaatcattccaatacaataattttttgtatacttttaaatttaattccatttcattttatattccaatttttatttttatttttttattctttccaaccaaacgctacctaaaataaatgagcattagttacccttgatctttcgtaatatggttccactaataaagatgcacttttttttttttttttttggtctacgaaaacacaactgcttattcattaagagaaagtaacgtgatgagtacaaggggattcacctcccagaagtttataaagccattacagttgtgttctatgccccattttgcaagaaagtgggcagattggttagcagtgcgaggcaccccaaaagatgcactcttggttcatta

SEQ ID NO: 181845 - DNA, 697 bp, Cannabis indica
aaataaaaataattaaaatttatcacttttaatgacattccttataaataagaattttttttttatttatttaatttaatttttttttttttttttttaattttaatgccttatcattaattttcattacttattagtaaacatgctataaagagaaaagtgggcataagcctttggcgatagacgaattgaaatgaaagccatagttttcctcttacgttttctataaaaaattaaatagaatatttgtttatttattttttaatatttatttttagtattattttattttacttttaaaagaaaatttttttttatggcggatgaaaatccaaaaaacccaccaaaatccttatcgccattgtattttgtcaggcagagaagcagccacacatacccgtttcgaaatttccattagcctgtggagaactggtttggcttgtctctctcgctctccatttctctcgttaccattatattatccccactttttatagccacacaccctcttttctcttttctcatttccttttcactcactctttctccctctctcaactccaacgccaagtgtttcaattctattattgttgtctctttgagagaggtaagaaagtttatctttttgtgtcgaactattagtttttggacttgggtttctgtttttccaatcagtacttttgttgggtacttctaa

SEQ ID NO: 181846 - DNA, 686 bp, Cannabis indica
attgatattaatttaaacaaaggtaaaattgtaatgaaaaataaataaaaggttgtaagtttgaatttccctttctataaaccttttttaatgaacattatagtccatcaacaactctcttttaataaatatttttaaaaaatgaatgttttgttcctacccgaaaaaaaaaaaaaaaaagctcccatatttaatatattttatatttagtgtaaggataatatagtaatttaagcaaagtaaatttatttctaaaaataatttctaattctttaatgctttggttggaatcatcataattaaaaaaataaatagtatttttttttaaggtcacctgctatagcaggtcaccaaattgacacctcatcagtttttttattacccatgaatgagtattaaccattgagaaatcatccatatatatatatgctaagacactagaaaggataggatactcaaaacgtcatgctcattatgtaggtatgataaggaaaagcataaacatgtgttaagcacaatcaagaaaggtgataatagtattatgtggtgcctaaaccagtgcttaatacataattatcacttctattgactttctccaatctgaagttttgtcttgctttccataagtagtatatatagagaacttcacttgattggctcatatcccttactctcttctacatcgc

SEQ ID NO: 181847 - DNA, 699 bp, Cannabis indica
aacttttaaaagtcaacctaatcaatagttaatataatatcattatcttataagggtaaatgaagtattcctattgtatttttttatatatttatatatataaataataaatcataagaacacttttaatctaatatatatcatattaattgcatgtgatctctattgaccacaaagataattatatttcaaaatcaaaattgttgataacaaagtagaattatcttcaaaatacctcaattaatgagcatgggccaaatgaaaattagcttcatgtgatagggcctttggtgtcatagattcttggccaagtaaagtcgcaacacataatttttctgctctattaagagtgtgtttggaagtaagtgtgtaattactaggtagggtatatactagagtgttaattacacagtttagtaattacactatattttaaaatgcaaggtgtgtttggatatgaggtggtaattacatatgaattcctaatatcttgtttggtaaaatagttagtaattacatgggaaaataatattttttagtagctaatgtttaatatggaaagtttttagtaattacacagtgtaattaaattcaattctcatggggggccatgagaattgaagagtgtaattggaatccctcaattacttccaattacacagttatagtgtaattacatggtcagacaaacatgctaaa

SEQ ID NO: 181848 - DNA, 567 bp, Cannabis indica
agaatctactagttgtaaagtcctgtagcctgaagcataaaccactggaatcaccaatagtggtaagtaaaggcttaacaaaaaaaaaaaacctcctgagaagttgccgaaacgttacctttgcgttttcctatattaaaagcccaaaaagcaaagaaataaagctgaagctgaaagaggaacttgactgtcattctcgtcgagtctaataaataagtgcaatgtattgtatggaaggaccctctcgccacactcgtgatgtagcgtgacttacacgctccatcatttttaccaaagaataagtgtcacgctctacaactgcgcgtggtagtctcattgagcacctaatctttgtaacatctactttttctcgtcatctggtttgagggacatgggatacatagacagaagtatcagaataggaaagtcaccaaaaccaaccaaaaacccagagaaaaggaaaggaaagcaaagtcaatattgcaaagaaaaccttaaggaaggggtttggatttcttgatttctttctttctttctttctttttagttcaaaaaaaaaaactaact

SEQ ID NO: 181849 - DNA, 553 bp, Cannabis indica
attgtaaagatactacaatgatctatcaaaaaaaaaaaaaatattacattgccattgataatcggggtatttatgtttatggtaatttaagaaaaaaaaaaataaaaaaaaaaactccaacaaaaatatacctataaaataaaaataaaatgtatttaaaatattaaaataaaaatatatcaaattctattagaaaaattacacatgattttagaaaaaaaaaaaaatataaaaaataaaatcaaaaatgattattgatattaagcgaaaataaaatcaaaaatgaaaatttttaaaaaaaatatcaaaattaattttcaataattaatttaagttaatttttctttttagtagtgaggtatatttataactttatatattaaaagaaaattttatatatgatgcaaataaattttataaggtgtaattagaatttgagaaatgctaaaaggattctctacgtaggggagtttattagatcacatcaatgtttttaagtctatctgtatccgatccaattatatattagatgttagattttatcatccgatcc

SEQ ID NO: 181850 - DNA, 892 bp, Cannabis indica
atttattaaataaaatatttaataaaatgaaattatatacatattatattatgatatttaaacaatagtatatttttatatactataaaatatccaataaaatgatattgatatatatatatttaaacaatattatatttttatataccataaaatatttatctacttcaagctagctagttgtgctaccattataaggtattattctataatatagaaaaattcttttgtagttataaaaataatagtcccaatttaaattagttatacacatcattaagatctacatttttaataaattataatgttttaaatcttaaattaagaaccttgataaatgaatattcaattgccttataatatatatttaaaataattttaaggagtttttttatttttacactttaaaataatttttttttttgtatttttacgaaattttacatagaaattcctatagcaactggcgctgcagcctaaattgcaacaaaaaatcgtagaaacccctattgcaactagcgctgcaaccattttagaaactcaaatcgtaaattttttaaaaaaaagttaaaaaaataagtatatgagtaaattcttctaattttaaagtgttttgtcgcttaacttgtgttttaacttcttataaatatatatttagatagattgagataattgtatataaaactatatattgttttttaagatacatatattttgcgttttattccaacaaatgcacatatgattttttttttttttgaaaacttaattatttttaactaatttttttatttcattattattatttctatatatatatatatatgtgaaaaaaaacaaagaattctataatgatagaaattactatatacttataatatattatttaact

SEQ ID NO: 181851 - DNA, 625 bp, Cannabis indica
cccaatcatttaaacaacacatacatgagatgagaccttctttttaccttttcccctacaaaaataacttctttatagaataaggtacatatccttgccattatactaggtaacttacttgtggtttagcactataattacaattaaaccaaaaagataagatcgttcccattaattattgcaaaggaaaagttactaccaaaagtatattgaataaaatatatagatatataaatattgatcatgtaactttaacccaaaaaaaaaataaataaataattgaaaatgaaaatattggtcatgatgcttcttttggctacttcttaattttttttaacatttatattcacatttttcttaacattacatatttttagaaatttagggaaggctaaataaatttattactttttcttaattttgtgtaatttatttgctaatgataaaataaactacactaattatcatatttttccttgagaaaatatttataattaataaataaaatcatactttatgattctttcattttcattttccaaatgagcctagtttgtcatgttaatttttttttttttgttaatctagtttgaataattatggcctttttgtttaattttttttt

SEQ ID NO: 181852 - DNA, 868 bp, Cannabis indica
atctgttcatgttaaaaattatcttaaagcttgttatattaaaaaataaaattgttgaaaattgagtttagggttttattcttaccattttggaaaatataatgttcattttgtcatttaacaaaatagaattctagttggcaacttttgcaaaacacaggagtcaaaatgtgatctcaagtatttataagagacctactgagtttggtacaattgtgtatgacattaaaaagacctctctgtcttttttagatatttcattctcattgtattcaaactcataatgttatggctcattttttagctcgtattgctttatcttttgatgtttctcaagtttggtggaaaaaaaaaaagttcaataaataagagaataaaataaaattgtattctttctattctatttcattattctcaattgaactccttccaagtaaattgataattgagagagtgtaagaacaaagtaatgactagaaaaagattgtgtcaatcaatgccctacgtagtaaggtaaatttttttttttgaaagaaccctactcaataaggttagagtgcttatttttcagaaccatctagctcatgtggtcaagggtgcgtacgtgggaggtcttgagttcgagtcttaagtcgtgcaatacaattctcggtttaacgttttttggttttttgattccgttaaagttaacctcacgttatctatcaacaaaaataacaaataaaaatattaataaaatgaaaataaacgaagacccctaaaatccctccaagaaaagctctaaccacctgtccatccaaaagtctctttatcgaaaccaattccaccttgaaaccgttccaaatctgatcgtgcaaactcatatatt

SEQ ID NO: 181853 - DNA, 507 bp, Cannabis indica
ttatacacgagtacgtcactctggctgcttcctggattgatgactgaccctacagaccaacacgagtgtttccagcgtgctttgtcctcactcacacgcttcctgggaaaacttcccaggaggtcacccatcctaaaattgctccaggtcaagcacgcttaactgtggagttctttcgtgatgggctaccgaaaaacaagatgcaccttgttgatataggtagtaccaatcaatccatttaagctctcttcaactgtgtagtcccatacctacacagtctcagaatcatcccacttgaccttccccaggcggtgtgggattgcacagcttacccggtatttccccttacggatcacgggactactgactgtcacatacatacataaacgaaaatcacaacaacaaatttaaggatttaaacaatcaagaaaaaaagagttattgtatgtaatttccatttcttgacaacttgttcttgtcaaggacactatagttgaatgtttttct

SEQ ID NO: 181854 - DNA, 514 bp, Cannabis indica
tgcaagatactgaataacataaattacagtataatagattatttaaatagctataaataatctcataatccatcacaaacaactgataatttccaaattaacttagcgggctttacaagttgagagagattcccacataaatatcagtaagcaaactcagttataaatatttatttatttaaataattaatttttatttaattaaatagttttaactactatacatagaagcatgatttgagaaatcagaggacttcttttacactattatttttgaaatatatcgaggaaaaaatggaattgtttactctctctattgttcttcctcatgtgttgagaactcaacaagaacaacactatacactttatcctaatagcccacactattccttatggtggattgatttagaagacactggtgtgagtccaattgcattatcctcttcatccagattaaaagatacaacatacaagaagtttctgttaggttttatgccctaaataaaactccatt

SEQ ID NO: 181855 - DNA, 539 bp, Cannabis indica
atataggtgaattctatatttctagagtgaaaatttagtctaatatatttcttatacgcgaactttagttttagtttgtaaactatttgataaaataatttcaaggtacacaattataaaaaacaattggactaaaattgtactttaaaatttacttttaacttgttgcgaaaattattaattactacgcaagtgcacgcaatcaagtagtatactcacgcaagtgaggtcgaaccacagggaattggattaattactactaaactatacttataattctatttggcaaatcaaaagtatttatgattgaaaaaggaagaaagaaattcaagaaacttaaagaaacaagtgaatattaatcaagatgagagaatagggagacgaatcctgttgttaagttaccaatgttaatgtctaattgctatccttctcttgaagtgaatgacagattataaattaacctagctcttttcagatcttctaggttctaaatctcatgctctctaattaatctcttaattaaactaacatgaaatcag

SEQ ID NO: 181856 - DNA, 794 bp, Cannabis indica
gtatatagtaagcatagaaaatagaaaaaaagaaaaggaaaaaaaaaatattaaatagtagagagttgggattgaaatagtacaaaagaatagtttttaataataggaatattgcagtcatagtttgagttttttcatgcattcagactagataaataggatatttattatttaatttatgaaataagaagaagatcaatagacaaaggagagaagattctatacaaagtaaaccaataaaacaacataggttggcagaagcattgttcttaagcgaccaataattagcttattgatccagttattgagccaactaggctgtaaagtatatatatttatcaagtgtctgtgtgactgtgaagttagagccaaaaccaatgccatttttttctttgttaactagaagttgcttttgttgactatatgaatgaaaaagaaagcaacgactacataattaatatagtaccgctccaacattaccactatagataatatatatgtataatattatattaattatatatagccattgctgttgtccttggtgtctttatcgatcttcctttgaaaatgaatgggtgggtcccacaatctcctatctcctgcatgccacataactcttctcattggttgagatgttatgtcagagctgcccacaacagagatcaagtgggaggataagaaatagcatgtattcctataatattattatgggtgattccacaatgccaactccttaaaaaagattaaaaaagatgtactgatacatttttgacttgtttcggcatctagaa

SEQ ID NO: 181857 - DNA, 528 bp, Cannabis indica
tatacacatccaaggaagatagcaggtcgtgttcatgttgtgtcaagactcatgtaatataaatataatgcttgacatgaatatgacttatttaataatcgtagaccaaaaaattaaacccaaacacaatcgtttacaaatgggttgatatgacatgacccatatagcccgtttatatgtaaattttgtttgaacataccaatccattaatatattaatgacatgtttaatatattagaaaaattaataaactcaagatactaatttttatataatttagaacacaataataatatataataattaggtatgcctacatgattgatccacgtgcaatactatcaagtaagtttttctccctagatctctaaatcagaagcaatttttatttatctgattatcaaaagtgtatacaattgtgatgagacaatatgtatttatagagttaggaaggaaacttagctacataagcctagttggattgagtctgcttatcaaagacttcagttaactagaaaagctcacaat

SEQ ID NO: 181858 - DNA, 904 bp, Cannabis indica
ataaaatccactcgatttaatagtctccttctagtaaattttaaggtcaaggtgaatgtcgatgacactatttttgaagctcatcaaaggtttgagtttgggtgtatagctcgtgatgcgaatgagagattattggaagctatttcagagagtagatgtggtattgtccaccccgaaatagctgaagtaataaagaattaagaaggctttgatctggataaaaggtaacggttgggatgatatggttgttgaatcaaacgccttagttgtggttcaaacaattaatagttcagttcatatgccctctcaatttagtttgttggtagaggatttattaatttattttatcaattttcaagaatgttttaatttcttttgtttaaacgatctgctaataggactgttcactgtgtggctagagagtctggtttatgtcaaggtacgttcaatgagctgaatgctctaactgatttaaagaacattgtaatagctaattatgttgataatgaatgattccatctttattaaataaataaataaataaataaattattagactatctccaatgaaacactaaaaactcaaatttagtgttatttttcattaaaattaatccaaccaaacactaaaaattatcttatataagtatctctcactattattagtgagacatgacaacacaaaaattgttttttttagtttctaataattaagtaatagttaaatttttttatatatttattatttatatttttatataaagataataaaatacatatatttttgtgtaatttatagtattgtgattgaaattcaaaaaaaaatatttaattttaaaataataccttaatcattttggattcgtttagtaggttgtataagagtcgtattctattaaataat

SEQ ID NO: 181859 - DNA, 525 bp, Cannabis indica
tagccatagaaaaagtgttatgaaatataatcatatataacacaataaaaacaaacataaaagttatatatttatttatatattataacaaaacaaatccaaggagaagagccaacagaagtagagagggagatcataaagtggttgtttcccagaaggtgatgaagccgatttaccatgaggtctggttgagactatgccgctgccgccaccggacctttttctaatggaactttggaggtggttctgatgattatcatgattattaatggaataagtaacaaaatgttttggttttgaagagaaacctaattggtcatcatcattgtcactatcatgagctaaactaggaagagaaagagataacattataagaaacagaactagaagaagaggaagatgtttgatctgatcagacatattttgattatggttatggaatagtgccctaataataatgatccggttctctatttatatattaagagatatggaagactgaatataaaacatatatatttatat

SEQ ID NO: 181860 - DNA, 909 bp, Cannabis indica
aagaagctctaagttggttgaaggacaaagggtggaataaagttgacatggaaactgatagtatggtaacggtgcaaccaatttttagtaatcaaattatgtcctctactttcggtttggttattagagattgtaaaagtttattgtcagctttaaataatgttagtattcgttttgttagacgatcagcaaatcgagttgcccactttgttgctaggcgctctcgatttttcactgatcgtagcattcataggattgattttcctgatgagcttcaagctcttttgtacgatgaatgctaaatttcaatgaagttgatatttcattttcaaaaaaaaaaaaaaaaaaaaaaaaaaaaaaaaaaagtaatcaaccaaaacttttaataaaaactacacctactaaaggctgacacaaaatgaaaatgacaattacattagatactattttataaaaaaattacatttaacgttactagtgtttttttttttattatatatatatatttttacagtttttcataaaaacaacatgtaaataacatcaacacaacaacaaaaaataacatgcagagaataacaaattaacaagaggacaacataaaaagaccgtatttttctataaataaaatcaaaaaaatagtaaaaatatttgaaattctataaaaccgtatttttgttatttttgtgtgtgaaataatcctaaaataaaatgtaagttgaccaccatggaatggtaccattctgttacctttaaaaaaaagacattagccgaggtcataaactaaatatcaccattcattttagtttaatactctataaagatattatctttataaatttaatgcaactaaaagtttaaaattagtaaaataacactattaagtaataaaatagaacaaaacattct

SEQ ID NO: 181861 - DNA, 500 bp, Cannabis indica
taaatgagttcatgtcatggtatggtgtagaatattagaagttattttttaagtaaaaaaaattaaaaataattttaaaaaaccttaaccaaatactattaaatttttaaaatgatattcttttttattcttacttttaaaaatataattctcaaaactaaaaactaaaaactaaaaagacaactctgactcactagttaccttaaatacatttatatcaaaagagaaagcaacattaaaattagaatacaataaaatcttgtcttccactccctcaaaatcatggtagccgaataaaatgctacttttgtgatgggtattattgccttatctccactccaaatacgcatactttgtgctttagggtaggttagattgggcttctttaatcgtggtttcacttactggatggtcggtattcagtgggcagaccataaaaagaaaaaaaccatttctggtcgtacaatgtttgacatgaacaataaagatgtcaatactct

SEQ ID NO: 181862 - DNA, 506 bp, Cannabis indica
ttttgtttttgtttttttttttataagaacattttagaatacgagcaataaactgagttgagatagaaatgtgtatcatttctaaaagtaaaaaagaaaaaaaaaataaattaaaataaaattagtctccaattgaatggattattgaagaggttgcaagcctgacaaacccaacgaatagtgtataaatataatgtcaaatatttttacaataaaataaaaatccagtgtctaatgggaaaatttctatcccccaaaattgtatttacattatacagacacaaatgagtgaaaacgtaaattaatgaaaaagtaactctaagagagcccaaaactgaggatttatatcatcctttcccaaaacaaataacagtattaatagactatctcaaatgggctgtactggagatagtattttccatcatttttccataaccaatctatttgacgtaattcctttcattctatacgttaatttaacaagaagaaggggttcctttagaact

SEQ ID NO: 181863 - DNA, 836 bp, Cannabis indica
tttttttttcttttatagaataagaataatcgcgttgatagaattttataatagacatttacatggaacagcaaggtgacctaactctactatgagatgacgattctataattagttaacgattttttataatttttaataaagtaaaataagtaagatcagatgttaaattacatcaatagcgatattacactttataaaagtgctaagaaacatggttgccctttaacacttctctttgtaataacaaccaaataacatttgggggctgagggcggggaatttgagacttcttttttatgaggagaagtgtagtacttctagggaaggagagagctctgtctctctctttctcatgaaaccataagctctcgtaagctccattttcgcctctagagctttgccttccgttgtctcacatgcatcgcccttgctgccccaccttcacccagaccctcgaagcaagacccaatcattgccgcccatttttttttttctttagataaatttcgaagataacttgtaattagaattgagtgtaattgttaggtttgaaatgttataagcacttataaataagtatacatgattaattttcatttttatttacaatactatttaaaagagttttagaaagcattttgaaaatcacccgttattagagttgagttgagtataattgctaggtttggagtgttaaattgtttgataattacgaaatattataaattttaaataattaattgttacattatttcttttgtataattactatatctttttcaccaaacatgaaaatcataattaatatttaattagtactgatattcaaacac

SEQ ID NO: 181864 - DNA, 602 bp, Cannabis indica
gtttgtatgtcgataggatgtcgatggtggttaagtgtattttctgccctatattgtcgacgacttgtcgacagtatgtcgatggtttgtcgattagattaacttgttcattgttaggttgtattgtcgactgaatatcgacagtatgtcgatatgtttttgacttgttgtgaaattgtggtctgattgaatttgtcgacaacatatcgacaggttgtcgatatgttgtcgattatattaacttatgaatttaagtttgtattgtcgacttaatgtcgacaggatgtcgatattttgtcgacaagctgtgaaattgttgtccaattaaaattgtcgactgaatgtcgacaggatgtcgatattttgtcgacataattgaattgtgtttgcttttgataatgtcgacataatgtcgacggcatgtcgatataatgtcgacatggttttttaaaatttttttggccagctttatttatttgttttttgttttttctagtatggctcccagactcataattccagcacccgagcattttactggccgcgtgacatatagaggcaccggaatttttgcaaaaatcaaagctcggtttgaggagttc

SEQ ID NO: 181865 - DNA, 736 bp, Cannabis indica
gtacattatagtaatcttcctaaatgatactttcatgataattttttatttgcttcaataacaatttacacctttacgtaatgtttggaagagattgaatataattaaattagatcaaaacgataaagagaaaaaataaatgatcatttgtcaataataataagataattattctaaatttttcgagggactaactattaagttatcccataccaaagattatttatgttgttattagaatattaattgtttcaattaatatctctaatcatcaatatatcaaacaataaatagagtattttagtggtatgtgtttctaattttttagtactgaagattggtttttttagttttaccattaaaaggtgtaagacaccactggtgctcttatttaacatttttctttctatttctcatcttgtttctcccttggagaacatttattgcaacccttccatatatttggaattgctccattttattgtcaaaagcattttacatgtcaatcaatatttaatggatactttgaagattgaattaaattgaatttactattttataaatactcctaattaattattttctttggggaaattacataatttatacagaactactaaatatatcttaaaaaataatattgttccaaactcaacctaacaaaatcattttataatttcattaattcttccaattctacaacaatagacctcatcatccatttaaaactccaacc

SEQ ID NO: 181866 - DNA, 826 bp, Cannabis indica
ctacaaaacactactgccaacacaacctttggccaacaaacacccattgatgtactcaccaccattggaacacacatcaactccacaaaccggaatgataattcagcccctgaaacactcttctgttgtaatagtacccttttcttttgtcaccacaaaccagtgtacatcagtaacaacaagtgcttctttcactatttgtctgatatatacatgctagacctcagaaatattgaaaatattgtagctacatatcctccatctccacaaatatttctagcttctaccacacaatcctccactatggctagtatgtggccatgctacacgatttcttgcaatataatggatgcctctaaagctaataaaggttctgaagaaaacgtgtcaccaaaccgtatggttaagagacaacaagaagggttttccttgaggcaaacattgaagcagtgttgaggtactacaacatcacttttcactacaaacttgtttgttgaagatgaaagaaacctaacaatttctaatgatgatatgaatttggctggttcccaagacaactctacgagagctgttcttcagccccgcgctcaaccataaagatcgtagttggaatgctcgagattagggaacctaggtgctttctaccatcttctgttgcttgtcaaagagcattcccctcatttttatttttcatggagactaaacttagttgtaatgtcatttttcattttcgtcaaagtttacattttattaatggacttgaagtccctagagtaggcttaagttggggtcttatgttgttatggaaggatgatgtaaatataac

SEQ ID NO: 181867 - DNA, 824 bp, Cannabis indica
ttcaatgcgattttctaagagtattgagagtttagtactatgtatattttgtaaaaaaaaaattacatattcaagtttgacaaattataatttaaaaaattcaagcaaaaaaaaaaaatatataattttagaaaatgagattcacatcattcctttgaaaatattattacttagagacagggccggccctgaaatgtggtgggctatagggtaaaaattattttttgggcctttatttagaaaatttgaaaaaaatggatttttcaaaatcagcaaaaaaattgtgggccctaggcacaggcctagcccgcctatgcccagggccggccctgcttagagaaatgaatttcataatcttttgagttcataaattattaaaattattttaatatccaaaagaaatagttaaacttttattatttctaaatgtaattttatcacttgaatgcactactcaggatacatgcttagagcactaacatcaacgtcgttatttacttttcaaatagctcatcaaaacttaattttattgattttaactcacatttttgtattacaccatacactagttttttgttttgtaatcgctttgcgaattctatagttcacaatcttgtcaaacttgctctttctcttgatgagacaagagtttagtggtcggggttacctgagtttatttaaatctttggacttattttgactttagcctaataataatttttttttataaaaaaaatgtaaaataaaaaaaataaatatatatattttttaaggaaatttgtggcaaaaatacccaaaaagttcagtttgatacagataagtcc

SEQ ID NO: 181868 - DNA, 531 bp, Cannabis indica
ataatcttatacttttgtaactatataaaaaaaaaatatcattataatattagactcatttaaaggaagtttatatttttaatgattaaatatttaactttttttttttgaataacattgtaatatacaagaatattagatttcaaattattcataattaaagaaaatattaaatttattatacatatgagagagagaaaataatgtattaaagaaaattggcggatttgtctgtcgttaatattttaaattatcattatttaaaatattaaatttattagatttcaaattattcataattaaagaaaatattaaatttattatacatatgtttttatggagtaacgaaatcagaggatttgtgtggctttgttggaagctccatttgagagagaagagtatatcttagtatttctgtatgtatggaaacctatatcaaaaaatttaaaaaaaaatggaagaacagtaatgtgggaaaagatcatatatatatatgcttattatataaatatatatcttagtttttttgca

SEQ ID NO: 181869 - DNA, 521 bp, Cannabis indica
atgttttacattttaatttaataaataataagattactaacaaccataaattaacacttagagacacaggattctaattagtattaatttgtcattatatattgttttttttctttgatttttttttaatttattctaattttttttttttacatttttacgaaagtctatataataacctacatagcaacaacaaaataatataaatcacataaaaatccacataaaaactaactaaacaattattcccaaacggtaaaatttaaaaaaaaaaattaaaaaataacttatgaaataattctcctaattttttttgttaatttattatttataatttagtaataatgcatacatttaatgaattattataaaatatatatcatatataatatttatatatgctttcttaccggtaacgatcatgttgtttgtagaagtccttgatactactataggatatatcatttacaatccaaaagctgtgtagagtagaccttctaattattatacttctaatcata

SEQ ID NO: 181870 - DNA, 596 bp, Cannabis indica
taaaaatttaaaaacatgatataattaaattcagacataaattctaatttagtttttatatatatattattgtttaaataaattttggtaattttttattcatttattttatattcatacatatggaatggatataggggatggtgcatggtgagattgatcttttattaacatgattataacgaaaaaaacaaagaaagtaaatcgtcataataatataatttaatatttgtggtgtgtactattatttctactatgtatattatataaaagagattgatcgaaatggataatttagaattaagattataatgtgtgaacaactaaaagagtcggtgcatgtactttacgtcattttaagtattttaatgtgaatattattaattatttatgaaaaaaatattacttttatataaaataataattaaggggaaatggagtaagcaatacctctcaaaagcaaagcatatttttttacagttaaagaatattgttcaagatgtctctatatatagttggattgtcatacaacatatatatatatatatataaataactatattccatatataacgatagagagattaacatgatct

SEQ ID NO: 181871 - DNA, 582 bp, Cannabis indica
aaaataaaaaataaatatcatctaataataataatataccatacaacaaaatacaaatataatgtacaataaaaattaacaaaattaatatagatataatatgtaagtaatttgtttttaatttaaaaaaatatatataaaaaattattaattttttatatggcaaaatataatataaataataaataatacaaaaaaaaaatattgctttacaagttttaaaatgaaaacatttaataatataattttatagttgaagaccatttattataatttctgtatgtataccatgtatacatggtaacaagaggtcaacccaaactttcgaattaaggtagtattaaattgagaatcaagaatttaccacaaaccctctaaacttccatcttgcttttcgcatttcaacaggttctataatctctttcgatctctttatttcaccccatttgtgcttctgttttagtattatcattttttaatttctatattattgtatgtttcacaatttgtatttcattgttggatttaagattttgtgtttatttctttgttccaagttgttaaaattaaatgctcgatgaa

SEQ ID NO: 181872 - DNA, 729 bp, Cannabis indica
gtatagaaatttattgcctcaaagataagaaatataccatgatgttctctttctctttttttatctggcttgcctacataattaactgtcatatgtattttttcttaaaaaggtaaacataaaagaactttaataaataactgagttaatgtgaacacaacaagagtgtttatatactacatatagagctcgtttggaacgcagtattaagtcgtagtgtattatattatattcaattagattatatatcatatttttatataatactatgttaaactttaatttatactaaaatattatatatttaggtgtccataaaagttaataccacatataattttacataaaaatattgcataaaatacaattcaatataatacaatacaatacgacctaatacggcgttccaaacgagcccatacagtacaataaaactttagagatgcaatttccttaacagcttcaaaagttgtcaaaaatttacgcaaaacagcatcgtgcaagagaaaactacatccatttcattcctgcaacatcaatactataatagcagctacaaggcatattagtagccttaacaaaatagtttcaagatgtggtgcaatgtattttttaatattttacatagacacacaaaacaacaatgtgtgccatggaatttacatgatgaaaaatattacaattaaagatttttaattgtggtctatctagaactcagagcagctatag

SEQ ID NO: 181873 - DNA, 643 bp, Cannabis indica
ctgacggttgccgtacatcacggatttacaatccatgaaaagtacaataacgagacaaaaatcatatccctataaaaaatattttttatatagtataatatatagataaaaaaaattacaatagattttatatcataatataaattgtggttgttgtataataataatgaaacctaaaaatatttatatattatatttaatatatttaattcaattttttaaaattgatatatagattatatattaaaaataaacttagttgaattgtattagatatcgtttttctaagtttttatttgtttatatattaatttataattcaaatattttttatgattattttataatattagccaattaatttgtagtattgcatttgtttagctgatataaaacatgctagaatatatatatatatatgtattttattataaaaataaaataaaatggttttcttataaatgaatatcacaaaaaagtgatgatttagatctttattttatacagaataaaatattatattttaaattatatcatttaattaataaaaaaatattacaaaaatgggatcgaacccgcgcgaagcgcggcataattccatagttatatatattgtatacatagtacacaaataccaagataa

SEQ ID NO: 181874 - DNA, 525 bp, Cannabis indica
gtcagagttgctaccaacgccagaaaagtcgttagaattgccattgtcgtcaaaaaaattaccgaaaaaattaccaaaaaactggtttcttcatcaagaaactagaaaccagtttcttagtcatttttccagcgactatgccatgactttttcgaagttttctatcggtgccagaaaaatcgccggagtagctgctagcgtcagaataatcgtcagaattggcattatcaatggaaaaatcaccaagaaactggtttcttggtgattttttcagtaatttttccggcgacaatgccaattctaacgaattttccggcgccggcagcagctccgacgaattttccgacaccaaccgctactccgacgacttttccagcaccggcagcaaactccagtgactttttcggcatcaatgacaaataaaacttcctaaacaataaaaacaattaaatatgagatttgaaacctaattacatatatatggtatatcaaataccataaaaagacctaaaacaaaaaataaac

SEQ ID NO: 181875 - DNA, 538 bp, Cannabis indica
gataaaaatttataattttattatcacacgaaaatttttacaaaaatattgtatttttataaaaaacactaaaattacaaaacagaacaataaaaaacaataatgaaataactaaataaaaactcaagatagtataaataaaaaaaaaactatacaatatttaaaaaaaaaacttctggtctaaaataaaaaaaaaacttaaaaaatttaaaatatatataatgtaaaaatcttaaatttattgaacactcatatataaaagattatttttttattacaatttacaaaatataaaacataaaaaaaatggaaaagttaaaaacctaggtgccgtttggtaacatttttgtttttaaatttttaaattcacaaaatgaaagtaaaacttttacttttaaaaatttttactttttgtaaaaacaaaaatagacgttctgtaaccacttttgtttttcaattttaaaaactagaaaacaaaagtagtgttctggaaagttcattttcatttttcatttttttattttattttacgttcagg

SEQ ID NO: 181876 - DNA, 768 bp, Cannabis indica
tctaactcaatttcctcacaagtgttaaccgccagaactaatctttttctcagtttttttttgttcattcaatgtatgtctaagtaatttgttaaaaaaaatgtctaagtaatgaatccgatagtgagtggagactaagatagattggacgaacactgttgatgattattgatagcagaaacattaacaatttttactccttaaaccattaacatctagcattaatgttaattacactaatttctctgtggtaacatttaaccatcatttgtcttcaaaagctgagataattattactttcttcaaaacctttcaacaaaattattgatttgtattttaaatggattaagcatctaacctctgaaagtgcatagtaataaagaagcaaaataaactcagaatttatcatgagaaataaagtatcttaatattttgtattgatcagaaagagtatacactaatctatgtgacattcatgtacaattgtatgtgtaattgtatgactacataatctaatggttttaatctagttagtggtttgaggtatgttgagcatagcaactctggtttgatcaaacgtcctgtaaaggctctctactccatcttcaagatcttgaatgcacaactccaagttttggagttggttttgcgtcctatctcgtagcttgttatctgttgtctttactttctgactgatgagcaaattcaatgcaacatcacgcgttttgcgaaaagtcattggattcgttgggttagccgtcgcaacga

SEQ ID NO: 181877 - DNA, 946 bp, Cannabis indica
attaatggaagagctaattcgaatggctgctctctaggctctatttatagaacatagaaaccttagagacagtcacaagatcgaatctacagctgtacaaaaactttcctaagaaaacacgatctgcagcatcagattcggatgctgacgcagcagatcagaccagaaacgggaaacttgctataatcgggtccgatcctctatcaatgcttgattcctgccaaaaacagattagatattctgattgtatcaagatacaatcgaaatcaataaggaaaaggcaataatcaaagtttccctaaaaaagacaactttccaaaagagaattgcttctcttttaagaagtttccaaacaaaggaaagttcagctgaaaagtgcaactttcctaacaaggaaaagagcaactacaaaccgaataaacaaggtaagaaatcggttatgaatgcacaagaatcttaccataaaagaaaaaatattttgtcaactaacttgccaaaaaaggactttacaatataaaaacaacacataacaataatataagaacatagtataaatgtgaaaagcagtttcaaatgcagaaaaaaaaataatataaagaaacttaacaataaaaaaaaaaaatcataaaatgaagcaatcgcattacaaaacctatgaaactagtttcgaccttataaaaaaatcatataaaatctatgaaaccagtctcaaccctatataaaaaaaaaaatatatatatatctacacccaaagacaccctaatttaataatttttatttcatacaaaatttatatatttaattgtattaagtttttttaacttttttctaattcatattcttagaagatatacctattaaaataaaaataaattatattttaaatattatgacaaaaattatataaaattttcttagaaaaaataataatatatatacatgattt

SEQ ID NO: 181878 - DNA, 721 bp, Cannabis indica
caaatgaatgggacattttagctagtgacttgacgaggaaaagaaggaaagacgagtaagaataggtaatactaaaaagacaagagagacagagagacaagacagggaacaagatactgatgagttttcagttagaataaagctacacttgaatggtaccgctatatctaatttcctattatgtttttagatgattctaatgcttcaacaagtggattacaggagagattcaaaatgaaggaaaccagaaccagctggtggccatgttggataatacaagaggggaggagagcctcctctcttgaatggataaaatactaagctggaacgtccgagggatcaatagccatcaaaaaacaagatagagtgagacattttatagcaaagcagaatgttggcttagttggtcttttcaagacgagggttaaggcttcgaagcttggagccttatatgtgcatatgttttctgggtggtgtttcacttcaaatatttttggcacaaaggaggaaggattatagtggcatggaatcctttaagattcaatgtaagtattttgagttgttccagccaacatatacacttgtttggttactactgttaataataagtatagtttcttggctactttcgtttatggttttaatgataaagaaggtaggaaaattttgtggaaagacctataggagattgtaaaagctgatccctagattgttcttgggg

SEQ ID NO: 181879 - DNA, 577 bp, Cannabis indica
cctcagtcagtcttaattaggtcatccgtatcacctcaagagtgtttttacaacttcaaatgtagcatgagttgaatgcttccaagtctctcaataattttatctggtgacacattgtactcttttttaaaaaaaaaaaaaaataaaatacttcttcttttttttttaatatatttttttcaataaataaagactcaaatatatacttgacaattgaaaaagtaaaaaaatcctataaataggccaacatgacaaacttttgaatgcttttctaacctgtaaatcctattttgataaataattacattaaaaacaatataaatgttaatatttaattgtataaatttttaaatactcgtaaaggcttttatgtaaataaattggttttctttttaaatttttatataaaattttatttttcctaaataagtgtgattaattaaatattttagtaacacccataagtttaatggtaagaaataattcaaagctcatgagagccctacattttttttcctatcaaatcaaagggcattatattgtcatttatataggtgttatacaataacctctttgt

SEQ ID NO: 181880 - DNA, 603 bp, Cannabis indica
gttgctgattttattactcatttgagacaatgggatgttccaaaactacaacagttcttctctccacctgatgtcgatagaattctttcaattcctttgagttttgtttccatgtgatgatgttctcctgtgacactatactcctactagtctctacacagttaaaagtggttataaacttgcttcggaaaaacctgtctcctccctcccaagcagctcactcacatctgcaacatggtggcagtatttctggggccttaaattgccttctaaaattcgaattttcgtttggcgtgcttaccatgaggctttacctactgctgctactttgcaacatcaccacatatccaacctctcctcaatgtcccctttgtcagatgcatttggagaccatttaatcattgctttttttctggtgcaatcgggctagacaagtctggaggattgggaatcaaaattattggcatttgtcaaatcttgctctttctcagactttctagtatatgtttcttctcaattgcaatcggataaggttgaacttttcatcactattctctggtgcatttggacagcaaggaatgctgagactcactcgaagactcc

SEQ ID NO: 181881 - DNA, 717 bp, Cannabis indica
atgattgataaatttaattttgagtaatttacatatttttgcattttttataaaattttcattgatttaaaagtttcgtgaatgtcaaccattttatatattaaattttttaatttgtaaaattattaagagaatttttgactgcataaattattttatggttcatataattaatatgtttattttaaatcattatcggctaaattgctaaaaaaattatgtgtatacatatacttatataaatatgagtgatatttttgtaatttttatctttaaaacaaaaataagtttaattttctttaaccatatattaatttaatttaattattttgtttatcatctgttcaacaacataatcataattctgatttcactgatttttaaagaataatttttttaaaatttgttcaaatatattttacacttctagtatctccccgcttcctgtaaataattattttaaatacaccatttaaaaattatgaaaacttcatcataaaataattatggggtgttcatctaatttaacccgcactatttaacttttgacaatattgattctgcctctaaaatatacggcttgttaaaaaattcttcctaaacttttatatttatagaattttagtctttatgtaagattttgtgccattattccgtttaaatactgacatgtctttataaattaataacttttacctctaaactttgacaactatc

SEQ ID NO: 181882 - DNA, 528 bp, Cannabis indica
tcttcctgagatgccaaaaaaaagttaataaataaacactttggttttaaaaaaacaaatagccagaagaaaattagatgttcatgtataaatctcagaagttctagctaaccttcaaagcttcctttgcatttggaatctttttaagctttttattgaatttcttaggtattgaagatgatacaggtttaacaaatgggttcttctgtagcaaactttcatggcgaagtactctgtccctttgtttttcaatcttgcgcttcactgagagatctgatcatagaaaattaaaatgatttagggatgggggttaatatgctagaaatctatccaggaaaagattaattcccagaaggtcattctgttcttatttattgggttttgcattctttttctgaagaccgactaacatttcagaacagactccggtttgttcagtcatttaatggaaactgaacaaagaaatataacactctcgatggctataaaattattatctaactgccctctaatatcaaagccattatt

SEQ ID NO: 181883 - DNA, 673 bp, Cannabis indica
gttatttacaatctacccccatggttatgtatgaagaggaaatttaccttactgacactaatgatatatgaacctaaacaaccacgtaatgatattgatgtgtatctagctcctcttattgatgacttgaaaactttgtggagtgaaggggttagtgtttatgatgcatacaggcaagaggtgtttaaccttagtgcagtattattgtggacaatcaatgatttccctgcttatggaaatttatcgggtttcagtgtgaaaggctacaaagcttgtcccatttgtgaagaaggaacttgttctgagtacttgaaacactcttgaaaagtgtgttatatgggacatagaaaattcttgtccgagagtcataagcttcgaactttgaagaaggcattcaacggtgaacaagagtttggggatgctccctggcctttatatggaagtggaatacttgagaaggcatccaaaattgttttccatttaggaagtttaaagctcccacatctaggaagcggaagggtcgtggaaaggctaagattgtggaagaacccaaacactgttacaaaaagaaattaatatttttcgagcttgaatattgggaacatttacttgtacgtcataatttagatgttatgcatgtagagaaaaaatgtttgtgacagtgtcattggaa

SEQ ID NO: 181884 - DNA, 606 bp, Cannabis indica
ttgtattttttccaagttttgataattatttacaaaataatttttcgatcttcacttaagctagctggtcgagaaaaattacataagtgtgtcaaacttttagacatatattattatttttgtaatatctaatgtaacacttttatgagtttaaggaaattaattggggggtatcacctatatattattttttaattttttttttttattttacgattaggcttgcttcgttagttactgtgtgagttgcaatgtggatttctattgtgatttaggttgctcccgtgtattttcgtataaaatacaaaaaaaaaaataatatcttgaagtgtataaataaaaaaatactcttaattgttttttctttttaatatgttaaataattatttttaaaattttataaaatcacaaatcccttctaattggaaatttacataaactactaactttgacaatttttttaaacatttacatttaattttttttaacatttttacaacgtttataaaaaataacaccaaaataacaaaaaaattagacgaaaataataagaaaacaacattcaaaccaataaaataatacacaaataacaaaaaccaacaatat

SEQ ID NO: 181885 - DNA, 624 bp, Cannabis indica
atattacatattataattatattaaaactatatgtaattttttaagtaaaattactcattttatgcttaaaatatagatatacacaaaatatgtatctatataaatattatataaacattattaggaagaagatggagaagatgaagaagaagatagatctattttttttaattaatatatgaactaaggtaggtaggtccggaccccaaaaaataattgagttggggcggtcgaacctaacttgaaagaaaatgtaacggtgtggggcagggcaagacaaatactcggatagtgacacggatgtgccggggcagggccttgacttgacccacgaaaaagccccattttgtcatcccttaacatggtactagacgctagtgcctaataggattgcccgttttgaaaagagatgttgttgttgtttggtttttttttttttttaattttcaaacttcaaatattatttaaccaaacatgtaacttaacaaaagttgatcttgaaatgtagggagagagataaatgatttgtgattttttttaataaagggttgcatgaaacattcacatcaatttggtgttattagttagttaaggccatacaattagagatgagaatttaacaa

SEQ ID NO: 181886 - DNA, 835 bp, Cannabis indica
atgaatttatgcatttgagttaaatatgtttagccttttcttttaaaacatatattagattaataaatgaattcattgaataacaacataaatattggccttattgaatttttcattgttctgtttctgttctttgtactttttattatgatcctctccctagtattctttttaaaaaatgattcaaaatgaaaatacagtaataagaacatacatcgaaaactgataatatttaatttgaactacaaaatttcattaagaaatatcaactattacaaactctaatacacataacacaaacactaaaaactatatttaatttcttttactctacaaataaataatttttttctctttacattttcctcatattttattttcttgacaccttatttcttcccccattgcattgcagttgcagctcagacacttctcttgctccacatgaggaggaaaacacggcatccggcaccatgatcagcggatagaggacagtcttttaagaaacattttgtaagtatcatccctatccaacatgctaacccgaacataactcgagctcgcgccaaaatgccgccctcctcgtgtcaaatattttgtggcctttaaggaagctttcgcagtcctcaatgccatctttacatctcagccaagcaaaagctgcatatgttaagtaggcattatcattaaataaatgttaattcatgcaaaattagtattggatcattataacactttttgattgtttcattaccaggatgaggctgcaggacttttactgtggaaatggcagaaggcaggagaaaactgaggcaagctaaagatgcctcgctct

SEQ ID NO: 181887 - DNA, 1125 bp, Cannabis indica
tcggtgatgtagacctcaaataagatgtattctgtaaaaaatagaatcatcgtggtatactgttgtttcccatgcaccattctatacatacaataataaaaatcaaacaattaattaattaacataaataaagattttaaatgaaaggaataataatatcaatatgttatagttcaattactaacctatagaatagtgaaagtaacctatggatcattggaagtaagttgtggaggaagagtagaagaaatttttgaaggagcaatggaagtaacttgtggagcagcagtggaaataacctctgaatcaacagaagtaacttgtgaaggaacaaagaaagtgacctctggagcagtggaagtaacctctggatcatcattattagtcgtatcgtatatgataatatatggattttggaggactacttgattttgttctcttctaaatcatataaattttagagagtaaaaaagaagcgagtagatttggaaacttatgagataatcaatgagaggttgattttataggtaggaatagaataaaataaatatttcaaatttgaagttacgaattttgaaaaataaaatatctcaatatatctagaattttatttttaatcggagttataaatttataatctagatataaacgattttctctccctctaaaaaaaaaattgtattttttttttaatcattatctcattttaaataattgagtattaataatctttatctgtagctatctagacataataacttagggaagatatttgagaattttgtggcataaatactctttttatttgttttgttgttaataagtacccaattttaaaaatagcggtaaaaatcatctgttttccgttactcccgttagtacccacttaacagctcctttaataactcaaaaaaaatgccacatgttgattcataatggtttaatttatactttttattaaaaaatttaaataaaaaactaattaaacaaaattttaaataatatatataattatatattcttcttctcagacgactcatgactccatgaaccaaccccactgaaatattcctgaatttgaagtaaaaacgaaccttaggcagccatatctatgccactcagcta

SEQ ID NO: 181888 - DNA, 704 bp, Cannabis indica
gtgatattttcatcccatatccttactactcaaactcgaatgattttctttttcttatggcccccaaaccctaattttattcgagtttaaaaagaattttggttttgtctaatttatgaactgttgagtcaatagttagactaattttttttaggctaattagtaattttccctctcgaattttgacatatattaaattatgtctcatgaactttttttaccgttaaaaatttacccttgaactattgagattgttaaatttaaggatttttgtctaaaatcattcaattttattattttagtgattgtttatgtactaaatcatgttcttcagactttgatatctactaaatcattcctctcaaactttgatatgttctaaatcatgctccctgaactttcatccatgttagaattttttttactaaaattagataaaagtccttaaatttaacaatcttaatagttcagggggaatttttaacggcaaaaaaagttcagggggcatgatttagtacatgtcaaagttcgggaggaaaaattgctaattagtctttttttttagtccaaactctaaaattttgtttagtcatttcgtacttagattaattttattgggatgaaccctaattttattttgttcggtcaataattgtttgattaataattatatcaattttatgaataattattgttaagatatt

SEQ ID NO: 181889 - DNA, 864 bp, Cannabis indica
tagtgagagagagagagaaagaaaaaagatataattgtgatgagagagtagtggggggaccggtatagatcttgatgagtttgtgatctaatagatgatatatagataatagatatagatattatgagacaataaataaaaagaaaacttggaatgaagagaatgttaggttaacgttctagtaattgtgacaaaacataatgattattaatggaatcaagttcaattgattattgtaggaagttatattcacacatttaatttatacatacattcatgatatcatgattttgctcttgaaaaaattgagtcattacattttactttttaatagaatgaaataaattttaaaatacatataaaaattgataaaaaaaaaaattattaaattatttttcatcttgcattaaaataaattttccttccaattcaaaatgagatagtcattctactaaaatagtaaaagattattcaattagaatgatattaattttaatactttaaaatgcaactaaacaaaagaatatgataaaaaatatttccttttctattttattaccaccaaccacatgttactttagtatttttgttcttattctatagtcacataaattacaagtaatatcttatatatagtattattgagaagcaataataatgtgatgtaattataatttttaatacgtgaaataatctttaattaagaagaatcatctaatataagataattgaaattaataagctaaatacattacactactacaaaaaaactctaatatcaattaaagttggacatgacaagtcattgttgtccattttgtattggatagaagtatttttcatatttagtaaaaaaaaaacatg

SEQ ID NO: 181890 - DNA, 530 bp, Cannabis indica
caaacatatttatattatatagttaatatattttttttttcaacgagtatatattattgtgtaacaaaaaaatgaacacgattcatgtcagaattattacttaaaattggaataccgacatcaatataccaaatattttaaagctcttttaatattatagcgaaccatgtaaattaaagtgcaatatatctggctatggtgttatatagagaaggctaggtattatatttggctctttcctatacgaaaggataagggcatatttgtttttgtaaagatttggttttatgctacttcaagcctcatatcaaatccatttaaagagaaaagtgaacccttcttaaacagcatgtgggaaaacatatctttatatggataagggaaaaagagcaaaacagttttaccaattgtctctatcattaaaaggtattatttgatgcgtatcccagattttgttggtctgcactgaataattaacattaatagtattttcaatagtagtactcttcaaaagttttaaaaaactttac

SEQ ID NO: 181891 - DNA, 666 bp, Cannabis indica
cattatatttagggtaaataccattttgtaccctgtgttttgcaaaagttacagattggaccatgtattttgttaaatgacaaaatggaccctgtattttctaaaatagtaaaaataggaccctgagcttaatttttgacaacttttttttttaatacaaccaacttgaagacaatgcttaatacgaacagatacaaaaaatgtaaacagttttgtcatagcacttttagatcagattataattaaactttattttaacaaaaaaatcaattctacatattctgtcctacatattctgtcctttctttcaaatgaggatgccgtttcgacttgcctaatttaaaaaagttggaggctcatgtgttattgtgtccccaaactctccttttccgattctaatttggcaaattatccaataaagttttacaattttgtcgataattatttggaacaccgcaagagagtcatggatattatccccgattcagccataactagttttacacttcacatgcgatatacttatgaaataagcaaggtttcccacctggataaatggttagctttcatagctgagaagaaagtcaaggcaatagatctttgcgtgaacaggacaacgaataacatatgataaccactatactccttgcctaaaacactagcagt

SEQ ID NO: 181892 - DNA, 675 bp, Cannabis indica
tcaattgaccttgcatgcacctttaagttttattgagccaaataactctagattatcagtttctcaaaatggatagaattgagccttaccgtatcacgttttttcaacaatttgctggaaattggcatactatactactacaacgtcccgagtacaaataagaccataaacataaacaaaacctaattgaaccaactttaagtttgggcaggcaattctacgcatctaaattgattcaaataaattcaatccaaaataatttaaggaaatgaataacgaaagaaaaaattgacagataagtatacaagttgccttcaaaaaataaaaagaaaaggtgagggaaaaggtggatgacctgcagatttgcgcctgtgcagacgactcctgtaaattccatatcgaaactttcaagaaaagtcataaataaaaagattacgagaataaaaatacatgaaatcaaaatttcaaatcaatataaatgttgctcagcagtacatgcttagagcctaatcaagaattatcatgtgatgtagtagtgtgaaagtggaaacaaagggcaatgggcaacaccactggccaatatttgtttcttttaaacaataaaaagagatgaaaattaactaagaaaatacaataatagagaaaaagagaaagcaaacgttcgtaacaccaaac

SEQ ID NO: 181893 - DNA, 704 bp, Cannabis indica
aacatctctagatcagattaattattaagttttattttaacaaaaaataagttcaaggtcctatttgtacaattttagaaaatatagagtctattttgtaatttaacaaaacagagggtccaattggtaattttttcaaaataatggtctaaaatggtatttactcaactaataatagcactctaatttttttttataccactctattttttaatattttattcattttttcccttgtaaatttaatttttattacgtaccttacttacctccacttataataataattaactatttttctatttttaaaataatcaaaccaaatacttataattttaaaatagccaagtataattttaagattttttttttttaaatataaatatatttttgttaagatcatttatattttaattaaattatttcaaatttgcctcgattagtgtattagtttcaagatttaactttaaaatattgattagtttataaccatttcccatctatttaagttttataattaaaaattataaaagataaacaaaatatcacaactaattattcatatatgttttttaaattatttgaatttactttgattaattttggtctaatttagtaatttttttatagttagttttatttatatttataaatttacttttataatggtctataattttttttaggtaatgattaatttttaa

SEQ ID NO: 181894 - DNA, 1255 bp, Cannabis indica
ggtatatatacaaacaattctaaaaattattaaaataatattatattattatttaatatattaaataattaaattttataattgtataataataataataataataataaaagaaatagaaggtaacttttttaagcatgtttatacttagcatcatttttcaagtaatagcatgaaattaattgttcaagtgatacaaattaattcacaataatgcatcgtcgtcgtttggagagacatagtgatgaaacgcaggaatattttggtcgttcaatcttatcaccatcaaattattattattattattattattattaatattaatagaggaggaggacttctctacttctagctctctatacctatgcaagtacctcttcaaagggcccgcatactcatcgaatcccaaggcggccagagcccagcaaacgtcgtctccgttcaccgtcttccgccgctcacggcggcacttctccgatgcctctccagtgacgaaactcacgaactccgacacgcactcttgcatggtctccttggcttcctttgagatcttagcgttgggtggcagtatttgcttcatcatcctccccacgtttgctatcggtagcagccgttgatcttgatctactaacctgtttacaccgtccgatgatgattcattgtaattggatgaaacaccagccccgattattgacttatccatctctttatatatttatatatatgattaattaatttagagagagaaaaagaaaagaagagaatgaagtagtagtactatagatagtaccacttcgtgtgtatttatagtactactgcttattatttattatatgttttaggtaaaaagagcaaattaaactatatttttatgcatatatataaaataatttcttattattagcatttttatgcttttaattttttatattaataatatctcttaaaatatagcttttacattaagatggttattttatcacattctattaattttatttttttgtatgaaatgagtgatacaataaataataaaataaatacaaattatatacttttactttttatagagacaaggctaactacaataattcaaacaaagacaacttccaatagctaaaaatttagaaacaaaaaactctaaacagagcatataaaatatttacattcatactagtctagttataaaaatgagaaatggttagggcgtttttaacttaaagtgtgaataagagatgatatatattattattgg

SEQ ID NO: 181895 - DNA, 566 bp, Cannabis indica
ccccgcagaccgcccatctcctcgccgcctccggcccggccgggaccgccgtggacgaggttgggcagcggcgagccatgccccgtcgactcgtcggcatcgtcgcggtcgaggacgaggatgcgcccgtgccagggagcgacggcgcggacgaactccgcggcgaacgccgggtcgtgggtgacgaccgagccgacgagggacccgcgcccgcgagcggccaggtcgaccgcctcggcgagggtggagtacgtgatgagcgtggtcacgggaccgaaggcctcgacgtcgtggacggcgtcgacccacgggtcgtcggcctggaggacggtcggggcgacgaaggccccgccgagcgaggacgcgagctcgtccgaggcctcacggccgccggtgagcaggtgggcgccgccggcgatgatctcgtcgacggcgtcgaggacgtcgaccgcgctgcttgtccgagatgaccggccgagccgggtcgacttctcccgcggatcgccggcggtcacggtcgcgagcttcgcggtcagagcctcgccgacggcatcggcgtgctcggc

SEQ ID NO: 181896 - DNA, 589 bp, Cannabis indica
gtgtaatttttgtaattatatgattagttttttattttattaaaaattaatataataataataaataattttttaatgtaatttttcgtgttgtaattacaataaaaatactttttgatgctaaatttgatggtactgaggccaactccaataggaacactaaaatgctaaatttgttaaagttttagactaaattcattccaaccatactctaaaacttatcctatatataacattgtttatagtgtctcactaatattagtgtgacactagactacaccaaatatatttttattattttttaatatttaaataatatatttataagtaaagattttgtatatataatatttgtgtttacttataatataataaaataatataataataaaaaatataattttattagtataatttttagtgttgagattgaaatagaaaaaaatacattgttaaaattttattatttttgggttgatttaataccaaatttgatatttaattaacgttggagataccctgaaacaacaaatttagtgtgtggttagtgatgctctaattggtcaatgatgacaccgccgttgaagac

SEQ ID NO: 181897 - DNA, 999 bp, Cannabis indica
gttgattattttttcttaaacaaatcagctcattttcatacctggacttgaattcgtgctttaatttttcatattttttttttacaattaatgagttaattactaaattataagtatattttataatttcaacaatatttatgtaatttttcaataatattttatagagattcgtataaaaaaaaataataattaaaatgattagaatttaaatagttatatcttgaatctcaaatttttatatcacactctataaaaaaattaatatatagtttatattttttaataatttaatagaagtgttatattaaattaggagtggcataggggtgatctctaaattaggagtggacatgatctaatccaatctaattgaacttgaatcaattcaatctaatctaattttaaaaaataatatccaattataattaaactagatgttaaaagttagattttaattggatgagattgattattagatgtcaatctcaaaattcaattaaaacctgatccaatctaattacatctaatacatattaaaaaatatatttatatttataaatatataataaaaatgttttgattatatttttactaattttttttttttcaaatttgtgatacttagttgttttgtgtattatttttgtgatattttgttttattttattagttggtagttttgttgttttagtgttatttcaaacttttggttgcattaaacttgtaagtatgatatatttttgtagtattaaacttaaatgaaggtttatatatagtttttaggtattttttttctttcatatttttaaagttatattaaaaattaggtagtgtaagtagatatcaaattaaaaaatacgatccaatcaattagtaattggattgggtgagattagatcgtctacttggattggattgagataattttccaaaatctaattactaattagattgaatcggattagaaaaaaaaaataagaattgaattaggatagt

SEQ ID NO: 181898 - DNA, 1188 bp, Cannabis indica
agaagggtaaaacagtaaatttaatttaattgtgcgcttatggactatataattatatagtatcttattttgttcttctgcatgtgttttttgacaagtcaatgcggtatagtcacaaccggatatttcggaccgaaccgggttcggggcaaaaatataattttgggattttatattggcattacagtgatataggaatattctaaaaattatttgagaaatgtgatatgtgatgaaaatggcttaatttcccttgtatgcatgtatgtgtgttatatcgccctaggggtattttggtcattttgcatatttgaataactttcaacaaaaggaaattttaaaggaattgtaatatatttttctaattttcctatccctaaaatcgaaccccccttttactctctcttcctcaattgtttcatcatcttgcacccttttcaattgaaattttgttgaagtgtaagaatggatttgggaaggtgttgaagcttgattttattggaagcttgaggtagctttctacaactttacttttaagtttttattgctggaatttaagttggtaaagtatgcttcttgctgttggagttcttgtatgcatgtatgtggaaagattaaaaatatgatcttggtgcttagtgctttgttgtattgatgagttgcgattatattatttggaatttttttttttttttgaacaaatattattggtaatttttagaataaggttttaaggttattttgtgtttgaattctgtttataggttctcattttagttgtgtagggcaagcttgagttatgttctattgaagatttaaacctaattcagctgttgttattgtttaattgtgtggttgagcaagtttgagttcaagaactcttagctcgctcaacaatggaactttattcttagagcaattattgtgtttaagctttaaaatatgtttactatgttatatgatgatgctctgaaaagtttggtggtgattggagaagatttgattaggttattgttgggttttatgccctaaataaaactctttacaatctgattagttatcaatacaagaaatttgaagtgatttatgtttgcatgaattttacatgctaatggtttaatatgtttattacattcacacacacaaaatcagttaaatccagatcatatgtttattcacaagtacagt

SEQ ID NO: 181899 - DNA, 524 bp, Cannabis indica
gtgatcatggatggaaagctatatcacagggggttgtcaatgttgtctctaaggtgtatcgtcgggatagaaattagagtgtgatccatgagttccatgatggtttctgcgaagatcatacttttgggcctagccattctaagaaaatccttggacaagggatttttggcctaccatgaataaggattgtacggaatacgtgaggaagtgtgagtagtgtcaaagatatgctaaagttccacatgcaccacccaccaaaattacattaatgagaaacccatggccttttgcaatctggggaatttacttggtaggattcctccccacgggtaaaggaggaatcaagtatgcaattgttgttgttgactacttcatcaaatgggtcaaagttgaacctacatatacggttacttccaagaaggcattggattttattatcaaaagcattgtgtgtagatacggactcccatataagattgtgtcagagaacaggaagtagttcagtagcaagcactttattaact

SEQ ID NO: 181900 - DNA, 791 bp, Cannabis indica
taaaatccaaatattagtaatgtgtgaaaagttggtattgcaatatgcatagactactctgctcagtggcaaatttaatttaaaaaaatgaaacctcatacatcttatcatacaccttattttagggggaccaaaataagttactcccctccagggatgggatttaggggggaccaaaagaaaaagtggcttcgtctttgactctttccatgaacttgtattatttttagctcttttgtttgacactgtaaaaccttctttttcggtttctgctatgtaatttgttgcaggaaattatagacgaggaagatgagagcctaagaaatctaaggaagggaatggggagaaacgatatatgggaccgtagttaccgggttgaaagaaattaaggagtataatccaaatggaagatatattgttcctgaactttggaatttcaaagaaggaagaaaagccactgtcaaagaagttattactttttctcttttgaatatgaaaaaactaaaagcgcaagagagctgcctggtgaaatgtttaaggcttgtaattataattaattattatagagaaatttagcttagtatgcttgaatgtaaagtatgatttttaatatatcacctaattagaaatagggtatctatatttttaatatttttttttcccaaaaatattcttacatttcaaaaaagtttctctctaactctctctcgctctaactatgtactgttttctccaccctaaagcttcaaaattcacgagctcaactatcccgaaactcttaaaattctcac

SEQ ID NO: 181901 - DNA, 766 bp, Cannabis indica
tgaggttatgatgaagaaaaagaagttgtctgaagggaaagctatattagagtaatggttgataaactaaaaaaaatcccagatgatgattaatggtttaaaaggtcaaattactaacagttctgagaatgcatcaaactatgaagagcaatatgcataattagaaaacgtaagagaatgaaaagttaggctacctgattcagtgtttggtctcgctcatcattgaaacttctaccacgcttccctccaaccgcatcaagttcatcaatgaaaataattgaaggggaagatttccttgccacaaggaaaaggtctctaatgcgtgctgcccctcttccaacaaacatctccacaaattcactagcagaaacagtgaaaaatggtacacctgcctctccagccactgcacgggcaagtaacgttttccctgttcctggaggacccaccagtaaaacacctctgggtaattttgctccaagcttttggtagtttatagcaccttgtaagcatgaaactatctagaaacaaaaactgtatcattaaagataaactaagaagaaacttcacaaaaaaagctagcttttgcagttttctacttcttggagtaatcttgtcagcaaatgttttaactcatcaaaaaagagattctatcagcacaaatttgtaggtaaacactttcggaacaaactgaatcctaaaaatgtctgtattgttcccataaaaatttcttagtgtaatacatatatgtacatacgcctacactata

SEQ ID NO: 181902 - DNA, 723 bp, Cannabis indica
atacaataaaccaagctctaaagatttgacttttacaactttgttgtccattacattaatcgaatagcaacaatttaattaatatgatgtaacagtaataagacagatataagtaaaacctttatcttttatttattttttcctaaaagaaatattatgaaagccaaagatgaagattgagtaaaatttgggaggaagaaataactgagtgtgatgtgagtgagatgcctctacataaggtacatgattccacccttattagcctgggcctgggccctcaacctttttgtcaaaaacagcccacattttgaataaagttcatcgacaaagcatcagctttatttcttattgggttcccttattcttcttcttctttcactctattcatcccttatttcatttcatccataaatctaaaaaaaaaaaattaaaaaaaaaagcatatacacacattttttttaagatactattgtgttcatgacgctagttttatggttagtgaaagaaatgtatggtcattcttgctctttgtatatgtcatatctttccaccaaaagcactttaactcataaagatataataacctatttttaggtagaggcaagaaaagggttaggggaaaaaaatcataagagtaaataagtcttcgagcaatttctcttatttatacattattaattttaaagtgagatcatgatatatttaaatttcattaacataagc

SEQ ID NO: 181903 - DNA, 536 bp, Cannabis indica
actgaataatattaatagtcatgataataattacatttggtaactgaaaattacgttttttttttttttttttaataataatagtttttttcatatgtcaattaaatgacactaagaattaatgtgagtatgaattaatagagaaaaataattagaaaaataaataaaatagtgaaatgctagaagaaaaaagaaaaattggtttcttaaaaagttagaactccacctcacctatcctaacaacacaattatataaatatatagatatataaattggttttgtagtaactatttggtttaatttggtagggaaagtaaaaaggaatattggatactatattattattgtgtaactgttaagattgtaaatcaaagatcatgatataattatataaaattattaaataaggtgagataaaaaaatgaaaggtcttattattagataaggtgagatagaaaaaatgaaaggatttattaaagaaaagtaaactaaaaaaataaaaaaaaatgtagaaaatatgaagaaaacaaagaaa

SEQ ID NO: 181904 - DNA, 672 bp, Cannabis indica
aaaatatttaaaatttcatacacccagtatttttaatttttttttttaaattatcatgaatacatttgcaaaagcatataattaattatcttgctaatcttggtgaattacacaataattgtggggaatttttcctttccaacatgaaaaattccaaactagtagtactaacctcaaaagatcagacctataaagttccaaaaacaaaaatagcatcattgttaaaaagaaacaaatgcattaacagagtggaaattttgacatttctccatatgaaaatttccaagctagtactatataactcccaaaagatcaaacctacaaagctccattaacaaaaatttcttgggagatagtaataccaaaaaaaaaaagaaaaattgcaccaataggttaaagtcacaagcataaaaattatgaaggagatgatacaaattcatgtctcataatggtcatagaaatctccaacaatttttttgtttccttatctttttcttcttactaatcccagtgagaaggaagattttgatggggttcatgagtatctgaccccatgctaaacatcccagaacagtgaacaacatcagtagtggcaccatttccattagtgaccaaaactgagctcatgaaaggctctaaaccattattatgagtttgcagggtgggatgttg

SEQ ID NO: 181905 - DNA, 742 bp, Cannabis indica
gatatcagtagcaatgtaataggaggagaatatataaaatacaaagaaacaccttgagctcaaaaagatccacacgaatttccattcaacaatcgcaacagcaaccacaagtaaatactttgtctgggtcatttcttaagtttttgggattgtaattctggattaagtcgtattgtattgtattgtattatattgaattggattatatatcatatttttatgtcaaattatatgtagtattaatttttatagatatatttatatatatatatataatattttagtataaattaaagtttaggataagagagtgaagaaaaaaaaaattaatctaatttttatttttccaattaaaaaattttaaaaaaatcttagggttttatagaaagggattaagaaaatctcgactggtgtcttcatcgatctatttcaggttggggtttcgtttgaaatttgtactggttcgtgcttttgttaagaattagtgaattgtcattagttgttaattgttctgttttcagtgctttgtattaaggtgtagtcaacctttattttctgttattcattgttcccttggtgccaacattagggccacctgttatactctcatttttcattgtaatctctctacagtagtataaatacaacatgatttactcagcctcctttgcgctgagaattacttttccatttttgtgtaaaccttacttggtatcagagccaaaaaagcctgcatcaatgt

SEQ ID NO: 181906 - DNA, 766 bp, Cannabis indica
gtaatttctacaattattggactcaaaatttgtgtgacatcgatgagactttggatactgcatgaaatgtatatatatattaataaatatttattttaactgctattcaggaagccaacaagagaaacaacaattggttaccacctccatgggccattgttgccttggttgttttaggattcaatgaatttatgacgcttttaaggtacgctgtttccatctttatagttttactggtgttatatttttgtgtttgtatttatttcttgtattttggttgcagaaatcctctgtatctgggagtgatctttgtggctttcttacttgtcaaagccctatgggtgcagctagatatctcgggtgaattccgcaatggtgctgtaagtatctaaattgcgttctttaatacgtatagcctccttgtcaaaagctagtttagtaaaagatgcaatttcatggacttactgatgtgaaatattaaaaaaacgcactactattattgtaggctgcatttattaatcagtttatacatatattttttaaattagttttatatatatatatatacgtgcatgtatatatgtatattagtataactcttaatagctattacccaataagtattattaaaaaaattgaattttactatacttaattttgcttttctaattaaaaaaactatactctttaatgggtggttatatggtctgaagttgctctatcagttgatagagataaggaaaattgaattgagatagatattttt

SEQ ID NO: 181907 - DNA, 633 bp, Cannabis indica
tttttacagtcctgatctcaatctcttttaggttctaatgcttcatctcaaggtgttgttgatcagtactgtgtcttaacttttacactccttttattattgctccttttatgttggtgatgaagctgatgactattgcccaagcttgaagctggaagagagtgattttgtgatgccaagaaagaatttcccattatggagattaattgccaatgacccacttctcatcaaggccaaaattcatgaatggagtgatggtgaggaatttcagaaggttctcctcaaacttattaacactatttctactggtgatcatgagatcgagtctgttttcactgcacctccctctaactcaaaatattagaccagtaccatttggattagtgttataattagaatatttataccatgattattgaattgatcatccctcttcccttttcaatttagtttttctattcatatgtatttggagtcatgcatggtctattttggtctacaactgcataaaacttttgacttatttttttaggattaattataaagcactattttttgtaaactttttacatttttatatttaaagattattttttacatatttacgaaattttattgagacacaaaaataac

SEQ ID NO: 181908 - DNA, 513 bp, Cannabis indica
agtgagtttggttagcttagtcaaattcttttcataaaaaataattttatttaatgaaatttacccagaaaaactataaaatatattttttcttttattttattttaaatgaaaaatgtgtgatatatggttaaatataaagtatattaatataatgtaaaataaaactatcattaatcaatttaaagtatatttaagtaaatttatcacttcatttgggatttaattttaaatttagtgaaaaatactttcccactttttcataaattgaaaatctaaaataatagctttcaaaaaaaatcaaatataataaatgtaaaattaaagtttttttatatttattttttttagataaaaataacaaaaaccccatttcaattagaagaaaaaaaaaactacaattttagcaacaacttgtttgaaattttggtttttctttacacatgaaacattaaaatctctcaaaaacctacaagaagttaactataacaaaaacgaaaataaataaataaa

SEQ ID NO: 181909 - DNA, 618 bp, Cannabis indica
gctacaaaaccctagttgggctgagcctgctcatcaaaggcttcagtcaactagaaaagcccacacttctgcttcacctagactttacacacagatgctaagcccattaacaattgatcaccaacaacatgggctaacacagcaaagaactatccaatcaacccaagttttaataaaaccaataaaatttaatgtaagcccaaataaaagtctaacataatttccatcaccacattagtatttgatgatacattatatataatactatatataataatatataggacaattttttaaatataaatgtgtatacatatatacataaaataacctagatataagttctaataattgtcattatagtcttaattatattattatgtaattctgataaaagaattatatcgtgggctaaaaataaaataactactattcacaatatcgtgggtatattttcttctgtatttattacacgcgtgattaaccaataattaatcagcatattcttaatgataacttttatctgaaaatatcatcatatattattataaataataataaactaatttactaatcttattgatttattttactcgtaattttgtaagagaaaacatg

SEQ ID NO: 181910 - DNA, 532 bp, Cannabis indica
taatctttactaattaaatgtactcttcttaatgaagttgcaaactttcaagaaagataaactattttattgaggtggatcatggaagatatgaatgccttagaagtaaacttatgtatctttggatccacatcttttcattctactatttgtattgagtctctcgttaataataataataatagtgaaattatatattttataggttttatactattggtataaaatataatttttaaaattattattatgggaaaaattaaaaaataatgagaaaaagaaatataaagtaaactggttacgctaatgaaataattagttgcacttatggttaccttcaactgtttttcttcataattttttaactttttttttttcttttttatttaattttttcttacaaaataatttttttaaaattaatatatatatgggagaattattcgatataccattttttttaattttttactagtttgagttactctaatagttgctccaataattgctatatgtgaattgttatgtggat

SEQ ID NO: 181911 - DNA, 923 bp, Cannabis indica
gtttgggtctcgagtctagtctcgggtccaggtctgagtcccggttccggtcctgagttcagttgctgttcgagtctaggttcaagtctcgagtctcaagtcacggtttagggttcgagtttgggtcccgcgttcgagtccgggtatgggtccgggtttgagtttcggtccttggtccgggtctcaagttccaattcgggtccgggtcggagattatagttgactcctgatcctttgtaaatattataatacaagctaatacgaaccatttgttatgtattaaataatacaatttacattacattaaatttttttgtcgtaataattaatacaatatattattttattatttattatttaatataatacgatccttatacaacttaccaatatggtattggctaatagtcctgtgttttttttacttagtaaaaagtaaactcttattaattgtcaaatcagaaaaaaaaaaaaaacacatatatacgattaaattcctttattattattattattattattattattattattattattattattattattttaaagagtcaaagtgctgtaatgtaatagaccagagacgttttggttgagagaaatgaaaatataggaataggaatgagaatgggaataggaataggaatggaataaaatttaaaatgcaataaaaaaaaattgaataaaaaaataatttattttttttttcttgttacattggaatggtcattccttcctttttaaaatggaatagccattccagaaagaacattccattggaatgccattccaatactttaaaatgcaagaatggaatgaaattattcctttccattccattccattccattccatttcattacctccaccaaccccatccaatttcctcttctatatgaatacatttttcgtttaag

SEQ ID NO: 181912 - DNA, 522 bp, Cannabis indica
gtttacaatcaacacaaaaaaagttttgctttgcgtcgcactacagaaaacaactacttttagtgacaactttttaggtacaatatcaattttttgttggtcacaacaaaaaaatacttgtgactaataaaacatagtatttagacataagttgtcactaatttacttttagtcacaacaagtattgtgactaaaaccacatttagtcatgacaaattataatttttgtgactaatacctttagccatagactttttagtcacaacataagaattatttttttttttagggtgaatggttacaacagaaccaacaaagagaacaaaacaaggccaaaggccaaacaaaccgcctagccataaactaacagaggcaccaacaaactacaggagatgaacaacaacaaccagcaaaaacaacaaacatagaagctagaagaaccaacacagaacaagcaaaaaagaaccgaattaactcaaagcatgaccaaaagtaagatagtcacaatatttctacttttag

SEQ ID NO: 181913 - DNA, 1065 bp, Cannabis indica
ttctgttttgtgttttactagtattttataaaaacacaatatttttgaaaagattttcgtgtaacagtatttttgtaaaagttaacccaaattccagtatttttgtaagtttccctattgttttcatattgctttattgtaatctttcaaaaaaaaatattgctttattgtactatattatttacacattattttcataaaaatataattaaaaaaaattataataatgtaaattatagttgtaaaaatatataaaaaaaaatattattttgttaaaaatttaaataagaatttgttgtcactaaataatatttttttaatcacaacaaattttatcattacatatacatgatatataacactatattaatcataattcgttactgtaagtgcatactattttttttttagagaagtacataacttttagttacaaattaattttttttttttattgtgaaccaacaaaagtgatgcatataaatataaataaacagtttcaggcaaccaattacataactaaagtctataggggtagccggttacctcctatttttgttttggaatttttctaagaaaatatataatttatttttttaaaaaaaccacattttgtttttatcatacaaaggagaaatattattcaaaaccaaaacaaacatgctacaaccaacaagtcaaccagcttcacaagagcttacattttgttcaaaatggctaccacttcagcttctattttgttcaaaaaccacatttttgcagtataaaattaaaaacctgtatatataattttcacttgttattgtaaagtaattgaagatagagaaaagaatttctgtattttgatttatgaagccaatggcttgagtatatatacaagagaagaaagcaagcaacagaaaaataagaatgcaacagaaagtttgttacaggaaacaacaaacaacagaaagttagttagaactgttagacttttatatgtataaactgaaaacatatatgattaagtataaaagtgcggaattaataaaaacatatatgtactataactaaggatcgaaaaat

SEQ ID NO: 181914 - DNA, 762 bp, Cannabis indica
atatttgctgaaaaaagtgcctccaaagggttgatttgtagtagtgcacacaaatagtgtaaattataccccatagtccatgctgaaacttacaaattgtaactatactgcgaacagggacgaaggcaatcttgaacttttggggccaaagtgcaaaaaaaatatataaataaataaattaagagcgggcaattgtaaattttctaaaatataaccaataaaacttataaaagaaatgcaccataatttggtaataaattaaaaatttaggaggggctcaaggaccttaactatgtagctaccaagtcataacctcatgatagaatttatttaataattaaataaatactattattttagtgtgattaaatctattaaaaaagttatgaaccaaaattacaattaaaataatacactatataataatatatatagttcgaatgcacataaaatttacatttatatcctaatgtagtacaatttttcattcatttaatttattttagttttaattttgactatatatttttaataaaaattacagccaaaatgtggtgttactctcgaatggtgtatatgcctatgtcatatttatatggaaaaagatttgtttgtccaatcacacctcttatttctcaattaagagtagaacttcatactcaaccttatgatgaaataaattggagaaaagttcgccatttttgtgccaaggtaacaataataaacaaattgtagattttacatgaggctaattaacatatt

SEQ ID NO: 181915 - DNA, 595 bp, Cannabis indica
tttttacactttaatatatttttatatttttatggaattcctcataaaaattctcgtagcaattaacggaacaacaccaaaatctacttaataacccacaaagaaattaccggaacaacttaaacgatacattagaaaaaaaaaataaaaaaaatgtatatgtgataattttcttaaaatataatacttaaatagtataaaaaaaataattaatataaaaatttgaagtaaaatatcatattttttttattttactgagatatttttaagaatatagtagagaagctaatttgaatagctaatccaaataaaattattttgaaatacttgaacatatttctgtaaaataaagatacgagactttatcaatgaaatacatttgtagaaaaatattcatctttccaaacatattttgataattcaaaatatttacttttttatataaaaagaaaaattaaaaaaaaaaaaacaacttaatcttttaactcgttaaagagaattggacattaaagttaaaataaaaaagaaaatggaacataaaatttctcatttacgtttagaattataatatattccttttcaaaaaaaattataa

SEQ ID NO: 181916 - DNA, 800 bp, Cannabis indica
tttgttaagtccctgccatttattctgttattgtaactgacactttatctatctaataaaagatttttcctcaaaaaaaaaaaagtaagtttattttatcataaaattcttaattaccataaatatattttgggagagcttttaaaaataaaaaattattaaaatatgattcatttaataaattttgggagtggaaatacaactcctatcttagcaaaccaaaattaccataatgagctttcccaaactaccggcacaacaattccttctttctcaaagtcacgattctgtgcacctatcaatactaaatctccgccacagccaccggaaccgcctctgctacaaccatcggaactacaacaccgccaccgcctctgccaaaaacacaaccgctacggctccgccattttttgtacgtattcttctatttccctctttcaatttgtattgctttctccttttaactctagtatgtattttgtggtattccatcccccaatatctttttcaacagcgtgtgtggtgtgtctgttatgtcttggattttatgtatgtaaatacacctaaattgaaatgccccttctaactgtttgttgaaataattcatacaaatcaaagatattgtaattcaagttcttattataattttatatggatcgccaaattaggatagagaaaagatatcaaatcttagaggaaagatacttgaaaattgtcaagtatgtatgtggacatggtttgaagtacgatgtcaaaccaatcttaagaggactgtattagatattgaaagtcatgaaatg

SEQ ID NO: 181917 - DNA, 606 bp, Cannabis indica
taattgtgtgattgagtatgttgatctattataattttactttggtttgtttagtttctgaaattgagaggagttaatactctcatatttaattgtaagtagtactagtttcatcccatataataaattaaaggacagacaattaattatccatcaatggaaatcaaacctatatgaattgattctttgttttccattctctgtaatgtataatgaataaaattaattataacattttttttaatcttttgagatttcttttgtttatcatgatagatatcttttactgatatccaactcacaccactcaaaacaaaggtacacattgaagacagagcggaccccactgtatgaattctcatttataacgttgactaaactttcaatgaatgaacaatctcggattcttgagtgagaattaaaattagagaagggaaatttgaatttatatgcatatatttggtggatattaaatttttagatataagtttattaaaattaaaaaaataaacagattatatttatagtaaagatacttcattttttctaactttactatctatacttcccattctcatctataatgtgatagtacgatgagagtct

SEQ ID NO: 181918 - DNA, 591 bp, Cannabis indica
agaatattcttttatttttaagtatattctgttaaaccaagaattgccgttagatagacacttttaatatataaagatatatatcacctgctatatcagagttgactcgatctttattttttgaatgatcatcttcaacaaaagttttcaactactctatacatttctaccaattaagacactaatttggaaagtccccacataataaatggtcacagctttaaagaaaatgaaagcaaagcaaaaacaactatggaccaatgtatatatagtaataatattaaaaaaaaaataatagaaagaaatcttttttttttttctttagtcttggggaaagggattccaatttttggacttttttttttttttttttagcgtacgagaaaaaatagtaatacaagcactagttaagctattttatgactgaatattgttacttttgttattgataaattattattattattattgaatagtgatatatatagtacttttgagtgttgacatacaatttagcttgagtaatgataagagagaaaaaaagacaagacattaagaaagaaaagaaattaaataaaataaaaaaattag

SEQ ID NO: 181919 - DNA, 606 bp, Cannabis indica
gttctttgagtattgattttagagcactttactttaaataatactggatgatatggatatatgtatttgacatctttaaataaatgattattattaaaaaaatactaaataataatatctaaaaatactattcttactattttttttattataattattatgttataaagttggaagatttaattatttaatgtatattaaataataatataatattattttaatcatttttggggtaataaaaaagcactcccaccactgtgttcaaaatagctaaatcttcaaaacaatagctgaataatccatcagatacttataaaccatattcaaaataaaaaataaacagtattttttattgctctccacatctagagatgcaacctttccacttttttttaattaatattttatttctatgtttctctcttttaaagacttttgcaattatggtattattttattgtttaaatgaataaataatatttaattagtataaagaaatatataaagaagttaatgtatgatgtaatataaatgtgtaaaaatcaaataaagaaagtataattttagtgagttattttgaaaaaatagagtagagaaactaac

SEQ ID NO: 181920 - DNA, 536 bp, Cannabis indica
cctgtgcacccaactctaagaacttataaattgattttaccgagaaatggcacgagctctccctactccaataccaaacatcacacaaacgacttgaagatcaaggaaatactaagaatttagcatccctttcattaaacatatcatgcaccaagtccacatcccaagccaacgtatccgtttccataaatgctttaacattttgatcaaaaagagtaggattattcgaagttactcttggattatcttcattcggcagccacggatccaacactatattaattcgagaaccatcaccaactctgcatctcgcccctttttgaacaatctcttgagtttcataaatatttcaccacacgaaacttggattgctccccaactcagcatttaaaaaggtaccattacggtagtacctagctttaaaaatcttgctgacaagtgagtctgagggactaaacaatctctttacaagagttggaaaatattatgatttttaataaaaatattttctagttagtttaattttttttttaaaa

SEQ ID NO: 181921 - DNA, 622 bp, Cannabis indica
ctatcatatgttcccaaaatgtacgtatcaccctgacccaaaagtaggcttaactaacaaatcaaagaacatgtataatactcttgagatcgaacctaaccatatcaggattaagatcatttgatctaggatcaactaggtgatattgaattgaatagatattacggtaaattttaacatatctaatcaaagttcaatatcggtcccttccaatgtatactccatacatccgatactggtaaactttgccaatgccctggaaaggacataacacttatccaaggtgtaagaatacctatcgctgattatcatgccagtctaaatccagtgaactgacaaatcagggaattaaactttcgaacatataatcaagattatattccactgtgctgacaacactataatcattaacaaatacatatgttctggacttaatagaatttatacattaaatataatcatgaaataaatcatgtgaaccatgcaacataaaatgttatttctgatctttattaactagtaaatctgattatattgaaatgggttttatttagggcacaaaacccaacacgaatacaccctagagctctttcaaatactgcacgttcgtggtggtaaactg

SEQ ID NO: 181922 - DNA, 594 bp, Cannabis indica
attaattaccttatattgacttgtaagagattgaatataatcgaaagaccaaatggagggctcaaagttggctgatcgtcgatcaataattgcattagaactattgaccacagcacattggatggggtagcatgcacttgataatcttgattttgtaccaccattaataatattataattagtatataattttggtctaaaaaatacaccaaaattagtagtactgcaaatattagggagtaatggagaaatttggtgtttaagggttatgcaatgcatttttgtttgtgttttttttgggatgagaatgttaggtttgctcgaccttgtatttatatatggttagtgtttccaacacctacctcctatgattgaagtgtgataaatatcaaaagaatttttggtggctaaaccctttcaactgtcttttttatataaattttgtacttaactttaagttcaaattttggtagtaaaattctctaaactgttgaagtgttagtaatttaaagtatcatcccgttaactttcaccatagattgcttatatacactcttatacacataacacatttatactgatacacctaatatt

SEQ ID NO: 181923 - DNA, 545 bp, Cannabis indica
ttaaataaaataaaattatatacaactttaacaatgatatatagataaaattatattgtataccccactttactttacatattttaatttttacctttatttttatattctttgagatatactcacttttatagatgatgttctcattatacctcttaagttaatgaaaattaggtgctacacttaagtgaaggttgagggtgtattaggcaacacactcacaaaagtgggtacattttaatgaaatataatatgaggatatttttaattaatggatacaaaaaagaggtatttcttaacttattccttttttaagggaaatttacaaaaatactgaaatttgagttaatttttacaaaaatactgtcacacaaatttttttttcaaaaatactgtgtttttataaaacaccagtaaaatacaaaacaaaacaactcaaaaaaatagtagaacactagtaaaacaccagtagaataccagtgaaaacttgacacagtatactgcagtatgaaacttataaaaaacacagtaaaaaagtaaaaact

SEQ ID NO: 181924 - DNA, 923 bp, Cannabis indica
attatttttctattattttataaattaatttaaatttaataaatttaaattataaattataattaaaataatcaaatactaattataataaagaatatggttagagcaacaacaataaaaatatttccctattctaatttttttagttattttagactaaaaaaataagtgaaagtaccccatatactatcttttcaattttttaaaaaaatttacagtttgagttgttctgatggttttttctgcggtttttatgtggattgttatgtgaattttaattgcgatttaagttgctcagttagttgctaaaggagtttctatgtagaattctgtaaaaatatataaaaaaaaaaaattgttttaaattataaaaattaagaaattaaaaaataaataaataatatcgcgggagatactcttatggaaaatgaggaaactcgaataagtgttatagtggctagctcatggagaaaaggaatggtcaatttagctttaattatttttttttattttattgtattttttttttagttttaatttgtggttagtggtgaagtgagaatggttgggttgggccatctttcttttgctctgtgtttcaattaagtacaatttgaaatttggaggcaaagtagggtccatgacctcaaaattttagaatgattttaagaaacactacaaatgatgttatgagttttttaggtaccaaacccatctcaatcatatatgagctcaaatattgataccctactactaactaataatatatttaaattgattctaattttttatttttttaattgatcaattatcaataaataaattaaattgtggttattataaaaggggatgcttcttataatgatcaaattgaaaagagaaaagaagaaaaagcccaaatttaacattgatgtgaaagccca

SEQ ID NO: 181925 - DNA, 531 bp, Cannabis indica
ttttggtcattttgtgttgtactcttggaccggtcatggttttcacttcgagtttcactgtcggatgaattactaacaccctcgttttccttgaacttcttctctctatgtgggaatgttctactacgctcttcatcttttcgtaatcttttttgcttatcggctctactataattatcacagtctacttcagttgttttcgaatcctagattgcaagacaaaaataaataagttccagaagttaagagaaaaacaaccaaaagactcgaaatcttaccgttttgttctgataaaaaccccaactaactcttctatcagtttttgtctcctcgtgattctcaaatgacggttctaaccccgcaaaactaacatctttacagtgctggagatatgttggcaagtctttagaatactctgtcaatgtaagttaaatcattactatcattatccttttcgtaggaaaaaaaaaaaagaatctcaagaaataacttttacctacagttttctatgtattccatgatacaatgctt

SEQ ID NO: 181926 - DNA, 742 bp, Cannabis indica
aaattgaaccaaaattaaactaacttatacaaacaattgaaacccagaaataaaacaaagcttattcgaaccttagagagccaccagtggagttaataaagagtttaatatctttagtagaatccttggcgtccaacaagagaagctggctgataatggcgtcggcaacgaagtcgtcaatgctactccccaagaagacgatcctctctctgagaagaagccccatggcgtcggcctcggcgcctctcatggcggtgtcggggccctgaggagaggaagctagtagcatagaaggggtgaaattatgggggttggaggagggttttgggctgggagaggcagttgcttggaaacatttgaaaatggaggttttaggggatgagatagggaggtggtaggagaagggtttggggcgagaggagtggaggagtttggtggagggaaggggagaatagagtgtggatgagactgagagcacgtccatggccgacgagagagagagagagatttgggtaagggaggaaaggaagagctcctgaatcctgattattccaccgattgggtcggaatttaatttgtttactatgaaacacaaatgtaatattaagtaaatttaattcagaaatttgagtttaatatgtttcatatgtccaaatataaagaaatgtctctctattttatgtttggttgagtgatatgtgtgagaagtttgattaattacccataatttagactgaatttg

SEQ ID NO: 181927 - DNA, 864 bp, Cannabis indica
gttataattttgttttaagtaattttttttttctaatatatattcaagttaaagctatattcaatgacactttaaaaatttatatttagtgtaattttttccataaaatgtttcaattttattttttttaaattaaatatttcattatgaagtaaacctttttattatattaataaaataacattataaaaaagaatatagattttaatgtaatttttagtattgtgattattaaaaaaaatagtattaaaatagtattcttttggttttgatttaattctaaatttaagttttgggattggagttgtcctaagtaaaaaataattagtaggttaattttattataatgacatagttgtaataaggtaataatattatatctactaagtacaaataaagtaatctcaaaaaaatgacatttatcactaaattatattaagagtgtaaaagagagtaaaaaaaaaaagtctccatagcacttctcttttaatttatgtatgagagagtaaaatttttgagtgtgcaaagaaagttgccacacgtatgatttttgctgaattgttattggtcatagcttcttaatacatactcattctttcaataactttatggggtttttgttcataaaaaaaaaaaactattaatgagtttttacttcttttgccacgcgtcatttgtttccaaataaaaacgctatacaaaatctaaacacaataaatactaacactatgtaaaaaatagactgtaagagcatctccaactaagtgatataaaatgtaaaaatataagtccattttataaagtaaaaaatattaaaggacacacgtgatgcttaacacctttctatgtgtcaaatatctacta

SEQ ID NO: 181928 - DNA, 669 bp, Cannabis indica
taacataacatatacatataatactatttcatttatatatatatataatcttatatacggtataataaatatttttcagtatatatatatatgtatatatgtctatatatgcattgtatatgtatcaatacatttatatattaatatagattgtctaagcatgaaaattcactttgaaaaataagaaatctcaaaattttctggaatatatttttcagacccgaaaattttggtgattttaaagtctttgtttatgtattttcgatgcatcaaatttatatgaatgtcttaatttttgcgttgagattcatttggaattaatttgggcatttttggtcgtcggaattgtcttttctgatcgagtttgggtcgggtctgtcggacccacgtgtagaaaaacgggtcaaaatgacccggttggctgaagaagacaaccctaaacgacgtgtcgttttccacagtgtggaaaaacgacatgttgtttttcatatgttgcagctgtcgtttgttgcaaacgacatgtcgttttgcacactgtggaaaacgacatgtcgtttttcgtcttgtgaggcagccctttaggagtgtaaacgatatgtcgttttcccccttgcaaacaacaacatgtcattttttcatacatattagccccttcggaattgataaaac

SEQ ID NO: 181929 - DNA, 577 bp, Cannabis indica
ttttaaatatttaaataattaagtgtaacaatttaaaattaaaattacaagtataataaaatttaaattatgaaattatatgtgtataattttaaattataaaaagttttgctataaaattttaaataatttaagtataagaaaataaattgctaaaagatccttatatagtaataaattgcaaaaaaataattaataattataattaatttaattttaaaatataattaatcttaattaaagttttataaggaaataaatgattaggtcactttcaggttaaaagttatttattatttatttttatttaatttccaaattaatcacaaccatttaataataatccaatgacttaaaaaaaatgtaaccatgatggttacaataaaaatgtaacccttccatatatatatataatgtatgtataccatggttaaattatatgtcaatatttgttcatccattattgaaaaaaaaaattactttattggtatttttttttctctatacattctcaattaataaaagatatttttaatgtgagaatttgtatttgtttaaataatatatgtttgcttat

SEQ ID NO: 181930 - DNA, 1017 bp, Cannabis indica
aatttatttgttaaattaattaggaaaaatacttaggttgctcagaaaaatctaagtttattttttatgattggttatggattataaactgttacaaaattggtagatttgaattttagtcaattttgtatttttcatgaattatttgttttatttataaatttaattatgaaaatacctagactattcagaaaattaaaagttaattatttagggcttagtacagactataaactgagttagaatgattagatttggttttcaatcatttttgtatttttcatgaatttatttagttaatacttaaaataattatgaaaaatagctaaatgatgctaaaacagtaaaatgtatttttgtaatgctatttactaactatggtacgaaataaaaaggtttttaatttattggttgatgtaggtatttattataattatttgtgactaattaactatttaattagattttaaatagaataaatagtgaaaaaacttgtgtttactgtttggggaaccttcaatataatgctaagatataattatagtgtctagaattaatttgtagactatgttgagatgttttgtctatttttggtttaattatttagagttttattcatttttaacaataaatttatacataatcatggatagtatttcacacatatttctaagcagattgaatatgttttatgatttgtataaatagttaagaaatatgctagcttctgattttaaataattacataattatatattttgttaataaatagtattttagtaaaattttacgtaaaaagtgtttgtatgaggtcatgttttacgttaaaaatattcatatggatacatgcaatgtgttggtgtgaattataatgacaaataattatgtttggtgtgtcatgcaagtgaaattgacttatgtgttacgtattttacgtaagtttctgtatgagtacaaagattcatacttgattgtagtttcagtgtattgttgtgttaataaatatttaggatcttg

SEQ ID NO: 181931 - DNA, 732 bp, Cannabis indica
gacatagtgttttagacttaaattaatttgtacattatgttttagtctctgcatatttttacattatgctctctggtttatatttttatatttgtacaatttatttttatttaccctccttaaattaattttttaacaatatgccccttcaatttttttactctcattgtccgcgtcaataaatctctcattactaataaaaaaaatttaattttgaatctctcatctctaatatcaaaaataaaattaaagtaattatatgtatgattggaacctcaaattttgtgggagctaacctaaaaaattgaacacaagacatttttcaatgtaatattttggtctctttcacattacttagagaaacccattatcaacaacttcattgcaatagcttagctataccaactttcctggacagcatgcatgcaattagtttgttaatttaaatttatgtctcattcttctaacaatgatttttgttttcattttttaatttgggatcatatatcaaactttttttattcttttatcctatttcagaattttaataatatcttaaagaacttcaattcacgtataatttgattatgcttgaagttactgcttgtactggcaaaactgatttaaagtagaaattttgactatcacattttaactagtcattaatatccaaagaggactttttatcatttttgttggactcaattaaaaataaaataaaactaaattgta

SEQ ID NO: 181932 - DNA, 548 bp, Cannabis indica
ttgggctactaggaatctatcgtttgccggtagggctcaactcagtcactctgtcctacttgggctaaggaactattggatgagtatctttattcttcctcatagtgtcacgagggaggttgagaaactttgtcgcgggttcctttggggttggaatgggagtagaagtaaacttcatgtggcttcttgggagaaagtgtgccttccaaaaaattatggtggtcttggcttcaaggatggtatcaagtggaatcaagctattcttgctaaatatgtttgggccatctcttccaaaagggatattctttgggtgagatgggtcaataccatttatttaaaaagcaagaattggtgggagtatgaactcaagagtgacactagttggtattggaggaagttatgtcatttaagggacaagttcactcgggaagacatcaacaaagcaggggcaggcacaaagttcaaaactgctatgttgtataacagtagcatttcacaaaaacccttcgaatacagcaaatttaactggtgttccattaacatgccga

SEQ ID NO: 181933 - DNA, 627 bp, Cannabis indica
actatattataattatccaataactttttgcattgaaaaatcaataattgaatgatttttttttccactacccaatatatatatatatatattatatacactaatgtgatttacaatcacacacaaatatataaatacaagaaatattgtataataaaagctatacatatattaaaaccaataagtaacaatataccatcttatatagaaaacttcaaaagattccaagacatcatataagagttttccttttttttttttttgtaggaataatttgagcgttttttcttgttgagatatgagtatgattacagatatcatgattattgttaaaatttgaaactaggtatagtaacaggcaggtacaccatatataaaaccaaaaagacacgtctcaacgtgtattcgtaatgatatgcaatgaaattttatgccaatcaccaacttctcttttcttttgtcaaacttcatattattattattattattattaagtatatttatgttatgtgatcatgatatatttcaggtggtaatgaggaacaccagtagactatgttcatcaaacaaatcgtgaccgttaatgggaaattccctggccccacactgtacgctagagaagatgac

SEQ ID NO: 181934 - DNA, 519 bp, Cannabis indica
agagagatttgaataataaatttaaattaaacttttatgtccagtaaaaacatattggaaacaataataataaggttataatatatgttgcatttgttccagttcttaaaataatagcagcaagaacatctttgatctggaaaaataaatattacaaaattaagaataagcaaagcgtgtgtaaattagacaaagaaggaaccctcaattctcaaagtatcgattataaagtaacaaagaagtattaaaatttcatatgctcattataaagccacattcactcaaaatagcacaacaaaagtaacaaagaagtattaaaggtgtaaattttaccaaaaagcaatgagaattaacaactgatgatgattgcattctgtttcagtaggtgaaattgagagagagagagagagagaggtctttgttgtgtttgcctgtatgggtgatgaagtgggttaatacgttaaagtatttagtttttaagtttttttagggttttaatttagtttgggttttaatttt

SEQ ID NO: 181935 - DNA, 522 bp, Cannabis indica
aaagcaaaactaatattaagatatttttaaaattagatggttattaaaattttttattgctcctaactaagatttttgattcaaaaaataaatttgttgtaaattttttttattagattttaaagataaaataccaaaactagtacctttttagatgaaactctaaaggtccactcttcctttcttgagagattcctataagtttgcaaagtatttgaaatatgaagcaaaattagaaaaaagtcttaatactccaaactttaaaactgttttcttgtagaaacaaaacaatgtgcaaattgttttacacttttctatgtatagatatgcttttgtaatttatcacattgaagaaaagaatccttactaatctaccattcaagttaatttctgccattaattttttatttgaaaaaaataggaatgctcttaataccatccagatacatttctaaatctcactttaattttatgagttttatgtcttacgatatctccaattcaattatttacactatttta

SEQ ID NO: 181936 - DNA, 564 bp, Cannabis indica
caaataggccagctgcatttcggtttgtcacttttggtgatgtatgtcccaaatggaaaaaaaaagagacaccttttattaaaaactgttgaatattatatatcatttatgttaagaggcatccctaatacatttgttattcaaacaacgaatttgattgttccgaatgaagttgtagtgagttattcaacatttttgtggcaggttatgtatgagaacaaaggcagacttttatgtacagcagaggggaccccattacaactttttgagagaattgtgacaatttctgatgctcaaaatattgcacctagaacctcttcgaggtcaagaaggaatgacgattctgatctttgtgtcgacaatgaattgggttttgctaaagatcgcataatcagcaggtatgatgctcactctttttcagtctgtaacttattgatcatttaaatacatgtttcggttcctgtttctgtcaatgagtccactttgctttgatattttgaaaatcaatttttcgttaatttggtgatgaagtcatatcatctccatagccttggcttggctgca

SEQ ID NO: 181937 - DNA, 686 bp, Cannabis indica
gtttttgtatatagttatgattatatagttatatacggttatggttatgttgttatatgtttattttttttttttttttttttggtatgtttggtggttacatatgcagagttcttcagtatattttgagttacttatattagataagttcttttttcaaaaaaaaaaaaaaacttgttgttattgtaggaaatttcacgatcattcaagtagtagagttaagagaaaattagattctgtattttttttatattgttctcttttatttttatcctctcttttaaagtttatcatttttacctctttttttaaaatactttaccaattttacccatgttacctcaatatactctccatgtgaatctcttatgttagggtattttgggaacagtatatataaaaagaggttgtttcaattaaatataaaattagagataataaatttagttaattgatacataaaagaggtatttttcaataaacccctagagttaatagtagcgctagagtgggctcttattggagcatatttttttggaaaatttatatggtatactaacttttgttattttttttacaaaaatactgtcaggcggtattttttactttttactgtgttttttttataagtttcatactacagtatactgtgttatgttttcactggtgttctactgttgtttttt

SEQ ID NO: 181938 - DNA, 761 bp, Cannabis indica
tatatatatataaaataaatcttatatttatatattatgtaactgctattttctttttctgtaggttgccagatcttaaagattcttatatatataattcatactctaattaaccactaattttaattaattttttttgaaacctattctatttaattatttaattaacgtatattatattcaaaaaaatatatgtaatataaagtacaagacattaattaattaaatttttttattttcacactttaaaataattttttttaattatttttacgaaaattcacataaaattacttagtaacaacttaaattacaatcaaaatctacgtaaaaacttacaaaaataattactgaaacaactactgaaataactcaaattataaaattaaaaaaaataaaaaaataatatacaaataattctccttaattaattttgttactagctactctggtatagtagttagatattataagtacgtgtaataactagggtttggaacgattgtgttataattaatatatatatactttgaaaaaggttataattaatatatttatttatatagatcattttatcatagctagcttagctagccacaatgctatatttattattattatttaattaatgtttgtcgaggttattttgttaaagttaagtgccatgcaattattagtcaaacaaaggggctggaatttgggaattggaaacataaatcaaaaacttcttataaatatatatatatatataacgtcaaggg

SEQ ID NO: 181939 - DNA, 692 bp, Cannabis indica
taatatagaaatctgttgtagtgtatagagaaattattatcggcaggacccgtcagtaataattttaccgccggtattactattagtagcgacggacccccgccggtattggtctgccgctgataagaatagcggcggaccctgccggtatttgtccgccgctaatgtgttttgaattacacccatttcagtttctcgcacttaattattagcggtgggctgtccgccggtattactaaatgcccgccgctaattagtattttatttattatttttaaaaaaatcaaaaaatagattaataccggcggacccccacatccgccggtaataacctcattattaggggcggaccttccccgccagtaataggtccgcccctaataatcaaaattgttgtagtgttcagatttcatgcgttgaagatattaaagaacaccacctgtatctcttgctttcatttgaattgttcttttactacgtatataattccaacaatcatcaagaataaatccaagattctgacttccatcagctctcctaaccatcaagtctaaactagctttaggagcgattccagaactctcagctaaatcgatctcaacagtttgggcaggagtcaatgtcctcttggatcgatgcaaatgactcttaataggacttaaagtaacatgattatgctctgctatggattc

SEQ ID NO: 181940 - DNA, 564 bp, Cannabis indica
attgttttcaagttgattatattaaaaaaaagttgtcaaaaattaagctcagggtcctattttcactattttgaaaaatacaaggtccattttgtcatttaacaaaacacagggtccaatctgtaacttttgcaaaacacagggtctaaaatggtatttactcttaaaacattcataataattcaaattttccgctttaaataaagacatttaataccatcatattaaatgttgttgggtcatttactataaattaattagaaaaattaatatgaggaagagttgcttttaacaatagttggaagagagtgagagtgagagtgaaagtacataaggtaaatagcggcataaatacctaaagttttaagtttgtaagcgacataaattcaatgtttatttttagcggcataagtacccaatgtttgtaaaattgtaattttcttctagttttgtcagtataaactttgttttgtaatttattaaattagaacaatttgtaaagtaaactagatattacatgttcttgtctagaccgaataataaagaaatctggaccgttaaata

SEQ ID NO: 181941 - DNA, 763 bp, Cannabis indica
gtcccaaatggaggttaaaggggagacagcggaagtatctgtttggaccggcggcactatggctcacaacggatcacaaacggctttttggaccggtggcaatttagactcacaacagatcacaagtggctctgataccatgttagaatttgaggataagatgaatgaggttccatcccaaaactaattggcaatgggaggagtagctcattcatcttatatatcataatttatttccacacattaacaatgtgggactaactctaataaatatacattcattaggggaaaaaagataaggtaactctgtgttccttttctagttctactattttatttttaaaatatatatatatttatataaatggaaaaattatataataaaataatgagtctgaataagaaaaattatttgaattttttgagttaattttacaagatatcatatatatggaggggaaattttttgatgaaattgattttggggtgatctagtttaatggtggagagtgtggaatggataacaagaaggtaaagacaatgaggtaagtaataatatttactttcttttttaacgaagttgataattgtttttatatttgagaatggtttaagaagttttgcctttggattttggaaaatagtgagcttgttgtgttcacattttaaaattgcaagtaatagtattattttttaccagcttaaaaagtgattattgcctaggaaaaactttaatatattcctatttcatatatccaaattc

SEQ ID NO: 181942 - DNA, 554 bp, Cannabis indica
ttttgaagaaaggtccatattaactaaatggccctgtggtaagttggggatggtaggacatgggggatatgtggcatagtttgagacattgtgaagctaccaatatttggggtgaaaacatccttcagatgggccacattattgttgtgttgagccgaattgttaccctgggagagatttgtacaagcagcagtaatggcagtaggccactgacttattccaacagagtgaatggatgatggagttgtagcagtaggtaatgttggaggatggttacttggatgattgtttgatgattccccctgaagtaactgtctcggatgagatggtggcctagtgtttaattgagggattgtggcagtcaaagaggatcgggccaacttagtcaagaggggccaagcattacctttagagaagtcggtcctgtaccaatcataactagaagtaggcaaaggtgcacctttaaggcttggtctatatgctaattcggactcaatgccattgtccatattttcaagatgaataagacatttgttaaaaacatgaccaatcaa

SEQ ID NO: 181943 - DNA, 651 bp, Cannabis indica
atataaaaaaaaaactgaaaatcgggttaaatcggtttgggcgggttcattgggcggtttgggtcaaaattcaacccgcccaatttacagattgggcggtttagaattttgtcaagttatgtcggtttgtatttttttcggttttgtcggtttggtttggtcgggttattcgggttgggcggtttacgaaaatttctgtacagccctacttcaaattatgttgcgtgggcaatttggagtgattgaaatgaaaggctttttcaaaaaaaaaaaagaaatatgtcactacatttgctcttgtgattgggttgtttaattatctcatgtaggaatttaaggaggcagaataaccttttttggtttctaaaagctagccgtcaataataaaggcgactctaccttttaaaagcatctgctatgaaagttatgaatataaaaaatgtttgatgatatgaatataatttgagtattttttaattgatgtttatcgttagaatgaaaaagaatatcacaaaagaatacttatcatttttaatattttttaatttgatgcttacatcctctctttcttatttttttttattattttattcataaaggaagtaaatttacttatttactatatatgaaataataatttaatattatttt

SEQ ID NO: 181944 - DNA, 629 bp, Cannabis indica
aattaaaaattatcatctaatataattatatctgagctttcctttgccacttcagtaccttggatccccattgaaagcccgatatctgcttccttgagagccggtgcatcattcgttccatctccagtgactgcaaccacgtgaccttttagcttcaagcattggaccattagaagcttgtcaaagtggggatgacctagccataacgcaaattctttcgactttttctcttcgttcttctggtgaataattcctaaattgcaccccttcaactatagcttcactttctgaatcctcaccaggctttaaaatcccacaatcaattgctatagctcttgcagtgtgcacattactcgcctgttatcattttaatgctcacaccagcagcaatgcaagtctccacggcagccttaacttctggtcgacatggatcctttcagaccctgcaacaccaagtaaagtaagtccactttctttattcttctcatcaacctgtccattttctacttgaagttttttatgggcaaaggcaatgcatctcaagcttttggctgccatattctggatgtttctttcaatacattttctttcttcattattctaacggcctaatgactccatctctgtca

SEQ ID NO: 181945 - DNA, 583 bp, Cannabis indica
attttggcattattggatatgtaattttctgggttattctcctctcaaaatcgatcctccttttctctcttaaactatctctttctttgttgaatgtgtgagttgttgcttggatcaaagtttggtttgttgatctttgtgcttgtgttgaggtagccatcttaactagtttattttgaatttcaagctgctgaaataagattgaaaaatatgttctatgtgtgaatatgttcatgtttgcatgtgtgataaattagggggtaatcttagtatagaaattagggggtaatcttgatgttaatttggcaggattataggacccgaactgtgattaacaagcaatttttcatgctcgtaatcgggcactatggtcaaccaacctaatttactcaatcattaaccagcaacgaatttggattaacaagcttgaaaaaatgacagaagctttcttgcagtatcatagatgaggacttctgtttgttgaagaatcatgactagaggcaaattcatgaattaaaatttataattagattttgtttcgtaagtttgttttaagttgttttagaattaaaatatatatata

SEQ ID NO: 181946 - DNA, 835 bp, Cannabis indica
acagtctcgaaacaacagttactatctacaaagacagctccaatggttgattcaacaatatctgctaagactttaggcacttcaataaggccggttgagtgaagaggatactccaaaatatcactactaaacttttttatctgtaccattaaaatcaacgtatataataatatatattattggtaaattaggtacgactttattaatttcttatatcaaaatataattagaattttttttggagcgatgtatacggacctgatcttccaagagaggtttattgtggcgcaagtaggtatgcaaatggtgtttgatggccacgcgcgcaagcttctcggagtcaatattggaggcgcgtaagggagtcaaatggccggaggagaagtttgagtattcaaagtaatggagttttgtgaatagaacagagataatggagtcccctaagtattctaatcgatcgtaagaactgttgcggttgccccgaacgaaagacgggtgggtcatagcttgttcgatgagatttcgatcattgaatttgtaaccataatttcttccaattcatctaccttctcactatccatcgccggaggtggctgatacgaacgccctgctgtggttgctgccgccgtagtttcagtttctggaagctagttaagatatccatatttggcaatggacccacaaaatccttcaagagttctagtagtacactttattatgaggaaaattcactcgatactctttttatataatcctctattacgccctgtcacttcaacatacttgtaactcttttatgtataaaattagaattaaatttaattaattgattaat

SEQ ID NO: 181947 - DNA, 769 bp, Cannabis indica
aattaatacataaacaaaacaagtcaaaatgaagaaaatttgcagtccatacattggtgtatttttttcagtacacattatttatacctatttaacttataataaattggttaataaatattaaactaaattaatacatgtaaaatagatataagaatatctctaatgctaacatagagtgtcaaaaacttccacatcacttaaaaatatattattattttttttttttgataagtcagaaattcattgcaccacaaacaattttttacaacctacaagcaccttaaaataaaggccttgaataaacttttctattccagctgctgtacaaacatttaatatcaactatacaactttataaactctcaaaccattctctatcttgttgtgtaattttttttggccatatagacaaaattctgcttttaacaaaccatttaacttgcttgaaaacctcttccacaccagttttttttttccccccattgatactcatttcgggtctgccatattaagtagacgagggctgctaaaccagcagccttcactttcttcttgaacctgctacactttgcctttctcaacctcttcatgagactttggagggatatttcctttgtattccagccgagccaatgcaacacctgtgacagagaagcagtagcaaaacaacagccaaagaaaagatgttctattgtttctgtggctgaattgcataatatgcaattatcagattcaatcactccatgtttgtgtaatctatctttgg

SEQ ID NO: 181948 - DNA, 499 bp, Cannabis indica
ttgtttttcgagtagtaacatcgggttgttcagtgatatgttcctgcaattcttgtaaattttctgcagcagcaggcggacttggtgcatcaggtgtgttgttggaagagctttgtgtactggtgtggagatgttgagacgagtcaggtgcctctggaatggcttgttggtaatcatcaataggtgtcttagaaacattattagaaggcaaaacagtagtaagaaaaggatcaatgttagtagtattttcatttaatttcaagaaaggaaagatatgttcatgaaaaaccacatttctagaaataaaaatctgtttgttattaatgtcataaagacgatatccttttaccccttgaggatatccaatgaaaacacaagtgcgtgctctaggatcgaattttgtcctatgagctgaaagagtggatgcaaaagctaaacatccgaatgtctttaaattagttgtataatcaggcgtcctttttgtaataataactcatat

SEQ ID NO: 181949 - DNA, 775 bp, Cannabis indica
aaattacaatagaactttactcatcgatccctctaaattctgatttcaaatctcctgtatctgtacccttctactgtttatatgctattactacatggggtcattatcatgtacggatgtacctttctactattgtctaaaaaattatgtaaattgttgagagctctagaaaatgaaagctcttaacacgattgaccccatgaattgttatcagcctaccaacgattttgtgaatagtaatttaaaataattaatgcctatgtaagttccatgaattctatgtagaaaataataatgcaaactggtggatgagattttaagttgaaaaatattagaatacttacagttggccaagagtagctagatcaaaatcaggagccagctcatgcattatatcattgggtggttgaccacactcctgcattttctgcataagctcaacaatcttactgaaattattggaatctttttcatacacttcattaagatcttttatcagtccatattggtgggagtaacgttcgtattcttctttgctcaaactcgcttcatgctcagccaaccactttgggtatctttctccaatttccttcatgggttcatgaagaatctcctttgacaaaagttgttgcatcatgttctccatgatagattccatgtcctatgcagaaaggaaaagagaattaatgaaaaaacacaatagaaatcatcgaagagaaagtcaaaggcgatatgcataaataataatgagcagcatggccaaacgatgaaaatt

SEQ ID NO: 181950 - DNA, 687 bp, Cannabis indica
tttagatgatttggcaccacatatttttatgtagataatatattcatgttatttacatgtatttattattattattctaatcttatccctgcccaattctgtttggcctttttttaataattttttattttaatttgtttatttaatggtttttacttacccacagatctgcatattttcctttgtcccaccacattacgctttttctaattaatttaaaagaaaaattcttttacaaacaaaataaaaataatggctctgaatctgacatcactacacttatgggcttttgaaacttgtcatcgttttgttcatcaagtaacttcaatttggatccttcataagaaaatcataggaggacacgcaccgattcattagttagcctctgaatttgagttttggattgatatcatttcctttatatgatcttatcttttggaatttcattaaaaaaacaggtaggaaaggaaaaagagggctctgccttgttttgtcttccacaactaccacaacatccaacccatgcaatggatatgttattataatactattatataacgtatatatattcttgtagttgtagattttgtacagtgaaacataacatcattcatgtgtttcaagtgtgtagatacataaaagcacagacatcagaaatgaatcagaatgagtgggtctgacgaccat

SEQ ID NO: 181951 - DNA, 611 bp, Cannabis indica
gttggaggttgagggagcggcgtttggcggttgtaggctttggggtttagggtgaggaggccgttacggggacgaagtacggggtggtgagtgtgtggcggaggaaggcaagggcaagggttggtgggtttgggtgggttggttgttgtggtggaggtgtgggtgatgtgttggccggagctttacgcttacgcgatttggatttggtggttgccatggctcaatctcacaataataagctcgaaaatatcacacaaaaatccaaagaatgcaatgccaaagtcggcacaatgtggaagctcctcccactcaacagtcaccaactaaaaatggtggtttcggactactggagcacccggagaagggcggtggtgagtgtgtccgacgggttgagggatggtggtcaaagagagggaggtcgggtctggtgaagtgaggttctggtgaagtggtttccaggcgaactcgggtctggtgggttctgaggtgggttcgggtttttgggggtcgaacagtggcggctgggtggggtgttcgtcggactggggagatcgaatggtggtgggggtggtggtcgggttcgcctggaaagattgaggacggaggtgggg

SEQ ID NO: 181952 - DNA, 680 bp, Cannabis indica
agttaaagcctactccaagactttaggtcattaaaagttatatcaactagtagttagataacttaatgttattgatacttggtttcatataccaatacaaatcacttcagacccacaactacatatttttcttctagttcatcaaaacaccttaaatattcaaatttaaataaacaaagcaagatgcaaacttattatcaccataatagctctattttttcacagcttcgaaactggaaatttagggaaaatttctggtgagaatttctgtgctgcagtaagactacccttaaccttcactaatcccctgcattaatgtaaaaaaaaaaatatatgaaaaatacaaaaaaaaattaaaaaaaaaattgagagatgtaattaataattaaaccaacctcatgaaagcaacttggggattcaattttctgagtgcaattctcataaaatcatcttccttgaatgaaaatgttacatctggcttttcttctccttccaattttccttaaatttcaccaaaatcaaagagtgttactttataaaattaaattattttgcaaaatgggattaaaaataatggtttatttcctcattacaaagggagttttttaagtaagaacatcacttttgttactttttagtttttagggtatatttttttctaattattattagtatttagt

SEQ ID NO: 181953 - DNA, 499 bp, Cannabis indica
ttttttttatacttgagttggattgtttgggaactccagttcaactttttgagatctgcaattcacggatctaaacattaaagtcaggacattagttttatgcaaattgcactgaattttcgattgaattttagtttcgtagtaatttttctacacgttttttttttcatgaattcgaaacagcccctgttttgattgattctggtcctcttctcaggtgaagtcgcctgattttatggtggttttctttctggttgaatttttgttttggttgcgttgtgttgctacgtggttgcaagatggtttccctacggaagtaggggtggttcgctgtgcgagtggtgcgatttttgtactatttttttaaacctaacccacacatgaggtttttcctaatttcccaaactatacccaaccgcgaaactaaaaaaatacgcataaactagcactataaaaataggtgtggtgtagtgcgatttttgtcagtttcttgcggttt

SEQ ID NO: 181954 - DNA, 820 bp, Cannabis indica
atataattagaaattttacattaatggaataattaaaattaaatattaaatataaatttggttggaaaatcacatatcattcaatttgaatttattttgcaacaaaatttcagtagcaaaattattatatttttaagtactaaagttgtatttgttaccaattttaaagagatttgcaaccaaaatgtagtagcaaaaaagttttagttgtctttcaaagtaattatttcgctactagatttgactttttttgctacaaaaatactagtagcaaatttgctacaaattgtcttggtagcaaaaaactttcaccaacggagtattagctacgaagtagccacctaaaaaagttagtagcaaaaagtttaatagctactaaataggcattatttgctaccaatttttttgtagctgaatgtcctttttttttgttagtgaaacatttactctttttgtttggagctgacaaagtgtagggagacagtttttacaagcacgccacaccaggttttttattttaggaggccgtttgtagacgccagaacgcagcccacgaattttgtctgctgtatcggggttggttcattccactctcccttcgtagctgtttgtcaataagttgtatgcgctttttactagagtaaagacttgagatttcaagcttccaaaccagccggtcttcaatagcagagaagagaggtatcccattgattaaagcactgtccctgtcattgaacaggtctgcaatcagctcctgatcccatgtaccatcttcatccattagatttttttagtacagcattctctaaacccggatgtg

SEQ ID NO: 181955 - DNA, 693 bp, Cannabis indica
tgtagacttttccaataatgtataccttttagttatatatatggctaattaggattttacatcttgaacttttaaggtcgttaaaaatttctcctgaactattgagattgttagatttaaggtatttttttttttaattttagtaaggaaagtctaacatagataaaagtttagagggcttgatttagtacatgtcaaagatcaagaggtataatttggtagatatcaaagtctaataaacatgatttagtacatgcacaatcacagaataagtaaaattgaattaaactagataactatccttaaatccaacaatcctaatagtacatgaggaatttttaatgactaaaaacgttcacggaacatgatttggtacatgttaaagtttagggagtaaaaattccaattaacctatatataaattagcattattctaaataatgcattaaaaaaataatttagtacaaaaaattattaaattatgaaaaatagtaattcatacccaacaccacaaaaataatattactattatttgttgatgtaatttaatattaaattttatatattttaatttaataatttatgtagaaaactgttaactactcgtacagccagggttaatcttaagctatttagagcctaaggtaaaataagtttttagcgatccctatccaaatatttttctactcactt

SEQ ID NO: 181956 - DNA, 815 bp, Cannabis indica
aaaaaaactttaatttttagtttcttttttttacaaaaaatgaaaacattaagaaaataaaaaaaaaataaagtcaattggattgtagaagcttatttttttttgaaactgaagcaatactaaaaacaatttttaatataacaaatgtgaaaatgaagaacaaagagaatcaatatattagaagaataaaaattgcatgaacttacacttgagtcttgccaaagaaattagcctagaaaaggcattgtctttacaccaaaattaataaaacaaaataaagaagaaagaaagaaaagacacaattttggtataataactctaggtaaaatctgatgcttttgctctcctaactagtcctatttataaagttaaaatgctccccaaaattgatattttcgtgtacagtataatggggaaagtggcacaaaattctgagagaaaatagctataatgaacaattttcaatcagcactaggagacaaaaggcaacatgggggatacgtggctttgttggagagacctgtgcgttagaattgttggggaagtggcttgtgcgcatcagtgatggggagtggtcccacgtacttggtttaggccttagatgagagtggttgatattggttgattggtaagagaaaatttggagtggtgcttgggcttggactcacatgaacaatatttttccaacaaatattattgatgatgacatgaagagaaggccttgattaggtcatgtattggacttcttccttgatctcattcatttataattttatcacctcataaaatttctggaaaaataacacaaaatgaat

SEQ ID NO: 181957 - DNA, 794 bp, Cannabis indica
atatcaatataaaataataaaaatataaatttttcacaaaacaataaaaaagtaatagagtgaatatacataaagtgccacttcaacttctactgtgcaatatataaattcttgtaatataccatgagataatgcaacatttgcataattatatttaactttaggttagtttgattttagcttcctaataccttactaaagaaaaaaaactttagcttcctactaactgatgtgcttaatatttttctattttttattaaataattttagatttttctcgactaaatttatatactttcactacaaaatcatatgataaaaattatttaatttactttatgactactctaaaaattatcatatcatcttttataatgattttatatagtcattgctctttgtctctaaataatcacttgatgttttgtttataaaattatttcaataatcacactacaagtactattttattctgtaaagaagcttgcgttgagtgttaaaggcataaaagcttgttttgattttagagagctacatgtttcgtctcccaaactcaaatcaatagagatatctctttgtgatgattatagcccaaaatatttcgtctaacttcaaccagagctttaatgcacacaaatttctaaatttacaaattacaaattgttgaagactttgctgattaatcgttccaaaattaatacaacgaatgcatttgatgaataccttcttaataaattctctttctttagtaactagaaaacttgagctattactatttcctatacactatgcac

SEQ ID NO: 181958 - DNA, 739 bp, Cannabis indica
cttcaaatgctaatgtcatttgtgtctcagttttatatatatgtgattacattatttatgtttgctatattttatgagtttcaatattttatttttccataatctaggtataatacatggagtgatgattggggtattgcagattcaaagcctgtactttcaagacagttttttctttttttgataagtaatactttcaagacagtttgttacagcaatgttggtcttggatacttggaaatgattcatgtagatatatccattcctaacatcattggcgtgtgttccttatacatttggagctctttgctgtgaaggataaatatcaagatgcatgttttattatatgtaatcccatcatttgtagcttatccctttatcctattagttactaataaattcatgtattgtacacagaaataatattttaattcaaggattttatcataaaatgcaaattaagaagtgtttctactttcataatttacaatttgaatagctaaatggatagtaaagtaagtgtaattatttgaataactcatctctagaggaaagcaacaacaagaaaataacactgatacaatttagttttttttggtattaaatatagactttcaatcccggtttctaaagaaaaaatgggattaaaaggggctttttataccagtttttttagagaaagtgggacaaaaggttactttttatcccagtttttttttataaaaagtgggataaaaaa

SEQ ID NO: 181959 - DNA, 648 bp, Cannabis indica
attttaaatattttgtggtcagcaaaacagctgtggctctaagaatcagctataaaaaaaaataaaaaaaattttatattatttatatagttgaaatggagaagagggaggaaaactaagaaataagaaagtggtccacgcgtgtcaatgttaatcgtgtgtgtatgaattgggagggcaaagcgtgctaactgctgagccattctcacgtgtgatgaggtctataaatacccaacatttatatgtgtgagtatacataaatagagcagaggacgcactaaagagaagcttgtgtagtgctcaagcaaaggaaaaaaaaaaagaaagaaagaaaaggggtattcagtttattcttgtgtttttctttgtaaaggtttaaggaacaaatagacaagagagggaggtgagtgagatattctttgagttgaaataaccaaagaagataaaataaaaaaaaaggaatcagtattataaagtcttaagggaaagaaataaagatagtaaaaatataatttggtgagatcaatggagatagagacagaaatgaaacagtccaggtttggaagaatttgtgtgttttgtgggagtagccaagggaagaaaactagctaccaagatgctgccattgagcttggcaaagagctggta

SEQ ID NO: 181960 - DNA, 770 bp, Cannabis indica
tacttgatcgagattttatgaaaggatatgagaagtggacctatcacgaggagccagaggatgttgttgatgatgtagcggttggcgataatgaattagaggatgaaatgatcccttttctagaagacttctttccttcgacaacagaggatgtacaaggagaagaagaacaatcaaccacaaaccaatattttgatgacttatttgaggaaattgaagctgaattgtatgctggttgtgattggattttgtctctcaactttttagcaaagatattgcatttaaaagttagaggaaaaatccctaacaacatctttgatgaattgttgaagttgttaaatttttatttccgaaggaaagaggcgaaaaagagattgaagaaattagagttgggttatgagtctatccatgtctgtgaatataattgttgcttattttataaggagaatgcatctaaggaggcttgtctagtctgtagaagtagtcattgggttacttccgagaatggaaaaggaaaaaaggttccttgcaaagtcatacttgctaaccaagccaagcaagtattttatcttgaagatccacacagaggtcgcgattggaatgtgttgaagatgttaaccatcaacaaatttgggacattaatgacaatcaagatgagcaaaatgttgatgttgtaaaatgctcctaactcttcaaatttttatgttgatgcttgatcttggagagttgatttttgcaatcggatgaatgtccagttttggttgaatcga

SEQ ID NO: 181961 - DNA, 822 bp, Cannabis indica
tttctttttaaaaaaatcaattatggctaattttagtaatttaatacaatatcagtatatgcttgtgcattcagcctagttggactttggttcagccccaaatcccataccctttattaattgttactgtgatgtttagtactactatgagctgatatttcataaaataattaattaataattttttataattattattaaagtaaagtaagtcaatctaatattaaattgtactaataattgtatgccatttaatataatattagtgtgtatgcttgtgcatctagactttggttcggccccaaaattctatatcctttattgtgtgtttagcactaatataaggaccttatataatataaatagctagtaattttctataatctttattaaaatataatatgtcagttttaaaattaaattgtatcagtaattacatgtcatttcataacataataagcaccataaatattcttttaacgtttctctttttctatattgagctaccctaatttagttgatggtcactttattaatttacacaattttaatttctttaatacgaaaatatattttatattctacaaagcaatacaaatgaaatgacttgtcaatttacacttgttatatattggccatatatagaaagataaagaagaagaaaaaaaaattatacatagattttaactgattattaattatagtgactgaaagtctactatttttattgctaggaatttaaactaaggaaagaaagaaaaatagcttctacaatatcatactaaaaaaagaatattcttatgcaaccagttcatatgcatc

SEQ ID NO: 181962 - DNA, 940 bp, Cannabis indica
tataattaatctactaaagtgttgacaattaataataaatttgttcatattgtttattttttaattaaaattattttcaaattttgatatttagaattagttaaattttaaatattatttaatttaaatttaaatgttttgatagtttaaccatatgagcattttcattaattgcgaaaataaatttaggacgaataataattttttttaattactataaagtataatagtaatttttgtttttatttaaatcactattatgcttttaaatttcaataattatcactgcattgaatatttttaattttaaaattatgatattaaaaaactaaaaactaaaataaaattaactatattctgtaatttagattgattatatgcgttcttatatattttaatatattttgtcatatatttaatttctttggtgatttgaattgtatatctattatattttatattacggaattgctttattttatttatcccttaagttttatgcaattcaaatatgactaagaatatgtgtccaaattatttatttattttttgaaaatttcggctatagtgttcaaactttatatatttttcaacgttatttttcaaactaaatcacatgggaaattatcaagtttatatttctaatgattatgtgtgtgtgaaaagtagaagaatggagtagagagaaaacaggggagaaaatgtaaaatggctctaattcaatatcagagagccctgctgctatttatattgaattcaatattaagatgagttagttacagatgcaagccacagctgagaataggaaaccaatacagttacaacagaaaactgacagtgtaactaacataacagacaacagtaactaacttatcctaatacccccctcaagttacactagggcattgaagtgttaacttgtccctaaaatatacaaact

SEQ ID NO: 181963 - DNA, 675 bp, Cannabis indica
caagttcttaatatatatgtaggaaaactcaattgtcctctatgttcatgatcaaaatgaaaaaagcaaagtaagaaagtcaaatataaacatataaggcattatgaattgaatctaaagttgataatggagataatgggaaaaaacaagaagttaatttaaaattaattgattcagatatttagatacggataatttaaaaattaaaaccatcacatcagtcaagaaataccaaaatcaaaacatgatacaaaccaatactaaaaagtagtacatgaaacagaattaagttgaaacacataaaaaataataagatcatttaaactagaaaaatgagattgtatatattgctacataacttatatgaggaatgcgtacaactcataatcatttggccatttgatataagcattcattctatggattctctctcagcactaacacattaattcataataacaataattaataaaagtgagtgaaaaccaacttgagttgcccttccttttctatcaaactcttatacatttacttactttttaataaattaattaattaatttgatatttttatatatattataaatttataattgttctaaatttcataaaagcttcaaaaattcctcttagagaataataatgaagaaaagactaattaaaatatatatacatt

SEQ ID NO: 181964 - DNA, 583 bp, Cannabis indica
aatttttacgggtgtacattagttggttcggtcaagttatagtgtataattactaacttaacataaatgtcggttacaaatatctaatggtaacgggttcaataaaaaataaaaaactcgtccaataaaaaataaaaaactcgttacgaggttcaacttcaatattcaaatacaatcaaaattatcaacaataaattctaaattttaaattaaacactataaaatacaaattttaaatgtaaaatagtttaataattaaacataattaatatattatgttataaataattttattaaaaaatatataaatcggtttattcagtttatttgtgcgggttagaataatattcaatccgcagtttgaatttttcgtaaaattattcgggttgtattttttgtcagtttattcaatcttgaaatttagtatattataggaaaaaaattatttttgaacttttatttaaaaaaaaaaaagaagatattttaaaatcaattaaaaccagttactccgcagagcctgctgggagtgaaacgtggttagttaggtaggtaaaggcattcaataatgttatcatacaaattc

SEQ ID NO: 181965 - DNA, 707 bp, Cannabis indica
agatcaatctaaggtggaattagttgagtctaggcttagttttgagtgatcaagtgtggagaggattattgtaagttgtccttgcttatgatggggttcaaaacaacatttccaccttccatcaaaagcaacttggtagagtagtcttcttctccttcttctttttcctgagggtcttagatcaatatggtaatggccagcctccattacctaatcctagcaaatccaaatagtgcttgaacttggctaggtttagaattttagtccctacatctgcaatgttctcttttatgggaactttcttaatctgaacttcctcttgtgtcaccatatctctaatgaagtggtacttgatttccacattgcttggttctgtcgaaggattcttgcacttaatggatacaactctgactattagagtacatagtgggaacttccttaagtaggtacagctctttcatcagacattttgatccaaatagattcttttattgcctctgtgacttgaaacatgcttagcctctgttgtagcaaatgctacaataggttgcatgtaatgaacgcatgattgcaatatgaattactagagcaatttaacattaaatgattttttataaatttatattacgaatatttttaaattgtgggttcgtattttttaaaaaaataggtcattaaagttataatttatcgatcctgaaaatttt

SEQ ID NO: 181966 - DNA, 659 bp, Cannabis indica
ggtatgggactacacagttgaagagagcttaaatggattgattggtactacctatatcaacaaggtgcatcttgtttttcggtagcccatcacgaaagaactccacagttaagcgtgcttgacttggagcaatttcaggatgggtgacctcctgggaagttttcccaggaagcgtgcgagtgaggacaaagcatgctggaaacactcgtgttggtctgtagggtcagtcatcagtccatgaagcagccagagtgacgtactcgtgtataagagccattagtccgtgggtgtaagggcccaatggaggcttgaagcggggacgttacacgaaatgcgctgataaaagttatttttaccagcgcaatagcgaactgtactggtaaaagtgacatttcttgtagtgagtattgtgactaaaaacacatttagtcacaatacattgtgattttattgtgatttttatgactaatacttttagccacagactttttaattagtcacaacttacgtaggaatgacaatttataataagtcacaatttttttacttttagtcacaaatttcgttgtgactaaaagtaagaatgtttttggaaaagtaagattgtttgtagtgagtcacaatatttgttgtgatggagggagagttggatggatgga

SEQ ID NO: 181967 - DNA, 730 bp, Cannabis indica
ggcacatttgctcgaatcgtccaatgacaaggatcacaaagtcgacttcagttaaacctgtacattatatgtttacaattgaattcggtatttaaaagctactcatattcattccaaacatttaattttatatattaagttagatatgtatatacttatttctttttttaatttgagacaaaaggagtaatattaaatttaatgttaaaaggtattaagatatgttatattattactataagtatctaatcttcataatttaatttagtaattattatataacaaaattattataggacattaatgtccccaacaccccatgtgagatgacatcctaaacaaaaagttaacaattttttataatttttattaaagtataacaaataagatccgatattgaattgcaccaatattaatattatggtagacatcgtagtcatagattccctttagcatatctcgttatacaatatcgctaaccagacgccattcatgattgtatttaggaaccactcgtacctacaatgctaattgcatataagaaattttaagtgggatcaccacaagccacatgtgccctcccgctaaactgggcttgaagaatataaaaataataaagtttggttgctcttaaagtttgcatgtatttcgatatgaaactgaataagatataattacaaactacattaaacacgtttaacagatctacaaaacatttcatatttaaatc

SEQ ID NO: 181968 - DNA, 773 bp, Cannabis indica
caccctgacccaaaagtaggcttaactaacaaatcaaagaacacgaataacactcttgagattgagcctaatcatatcaggattaagatcatttgatctaggatcaactaggcgatattgacttgaatagatattacggtaagtttaataaatctatgtcaaagttcaatatcggtcccttccgatgcatactccatgcacccaacctgagctttactttaaccaatgctctggaaagaacatagcatttctccaaatgcaagtaaactctgttgtagattatcatatcagtaaaaccctgtgtctgataaatctaggaatctttattcacatagtcatgtttactttccaatgtgttgacaacacaataaacaggatcaagtatgtgaaaagggtttcagatgaatttataaatcaaatagacaagcaattgataagatgaaccaaaacatacacaaatgaatgaaaaatacttctgtttctttattgatattgaataaaatggattacattgaaatggagttttatttagggcataaaacccaacaataaccagagcggggattgagttcttgattggagaacttgttaatatcacattgtagtttgatctattggagagaattaaaatggcccatcaaggtgactccgagctacaccggtacaaagaaagacttggaaccggatcgacaaaggacttttcaattttgtcaaaatgaattttatgatataaagacatggattgtgtaccagtcaataaggatatcgaacag

SEQ ID NO: 181969 - DNA, 730 bp, Cannabis indica
ttgctattatgtatagttagtttacaataatagattaaataagtgagtgaataccaaatcaaaaaattatcacctcatcaaactttagagcatgttttaccaagccaataacaaccttattagcacttctgaccgtgacataataaataaccatgtaaattaattatttaatttggcaagcaaaacaaatttgatgtggcagaatagcataaagtttttgtgactaaatgtgacttttagttataacaaaaagttacttgtgataataatacatagtatatttagatacaagttgtcactaatttagttttagtcacaacaagtattgtgacaaaaaatacatgtagtcacaataaattgtgattttaatttgtgattaataattttatacacaaatttattagtcacaacttttttacttttggtcataacttttattgtgactaaaattaagattttttgttgtgtgagctaagcatctgttttgggcccacccaatccactgtgtcctaaaaatatatttttcctttcaaaatatacaatgttttagtaactgtattttgcaataaaatcaaaacacagggatgaacaagaaatgactacgaatcgcaatcaaatgtcctggttatggtgacatgttgaacacttagtattcatgattcttattgcctttctattgtaccatatcatgcgattttttcacttttgaactttttgggaactcttcttg

SEQ ID NO: 181970 - DNA, 846 bp, Cannabis indica
ggggaaaatttctttcaacttgttgaaagatacttggagtaaggacttcgtagaaaagaagaagcatgtggataagaagattgaaaagggaacaactcagaaggagtcgaagtactctgtctatggatatgttgtagcattgcagtattgggcatatgagtccatcctagagcttgctgagaaatttgcgatcagaaaatcacacagctttcctagaatggtgaactgggagagtaaggaggcgccactcggcaaagaggaagtcatcagattgtttgcaaaaaatgtaagttttttaattcattttatttgttcacgtttatttatttatttcattttaatccaagtctaataatttttttgttcttatttgcagttgacagtgtactccattttatgtccgcgagctcatgaggccgagtttttgagcaacgtcactggaggtgaggcgcctctatttgtagatatggaggaattggttattggcagtgatggagagcctactcaggatagtttgcccagccaggcttcgaagcttgcacagacgctaaaacaacgagcggaggaagctggaatcttcagagctgatacaccaccacactctccacgatcagaggctcgttctgttccaccacctgcatcaatgccccattctgcatccatgcctaagtcagcatctattcccagtacttcacagcctcaggaatccaatatcttctgtcatattgacaagattaagcgtgttgagaacgaacaacttgctttaaagcaagggcagactgatattctgaaagggcagacagagataatgggctacttgaagaccctatcggctctcatgggaga

SEQ ID NO: 181971 - DNA, 682 bp, Cannabis indica
tgagaaatatttgatatgtaaaaaattaaagtgaataacaagatgacgaattattttcttttttggttaatgagaattgttgttgagtctaatacgtatttatagaaggagaaacttttataagaaggaacacaataaaaaggtattaaagataagaacgttttattatttattttatttttttattcatattatgttatctggctatattttatcaacaataaaatcaataaattgattattttattttttaaaaaaagtattttttttttcgtcataggatattctaacattattttaattagttatttatcctttattaggtatataatatctctccatgtattttttttttctaaaaaaataatattctaataattaaaagcttaacatatgaattttattttaaaattttagaaaactactttataattaagtttaaactacatattatcaaataaacatcctctaaaattttaaatttattttctatatatttataattgatattgttattcttaaaaatactcacattgaacataaatttctatatattattttaactttagttttgtctatatttccaactgagaataatttagtaggctaagtataaagatgtgagataagtttaaaaattatttgtaggagtctatacaacatacccatctacaaattcatc

SEQ ID NO: 181972 - DNA, 560 bp, Cannabis indica
gactgttgtggaggcttttacttatgttcaatatataatgactgaagttaactttggctggttaatttgatcagttcattgatggtcggcaagtatgatggtactaatgatgattttccacgtattttgtgtgtatctcacaggtggttttaaaagacctcgtgaattgactcgagttataggtgtggttttgggtgtattgactgcatcttttagtgtaactggttattccttactttgggaccaaataggttattaggcagtaaaaattataacgggtgtatcagatgctattcatgtaataggatcgcccttggtagagttattgcgtagaagtgttagtattattgatagggcatacttgcatccaaagagtgcatgtccaatggacttccaagcttgtttacatactgagcaagtagaattggtgatgatttttttgcttgacttaagatgtagccactagtaaagcatcatgaaaaactcgccaagaaattttgttacctttgtggcatctgtagagaccaaaaaatctactccaccagaaagagggtgaggtg

SEQ ID NO: 181973 - DNA, 721 bp, Cannabis indica
gacataacagctataccaaactctaataacactggcaacaaaccaccagatccccccatccaaaacaaaaagaggtagaaccatcaaaaaacctacataccttcaagactacacatgcactttaaatgcatccaacaccacctatcctataactaactatatcaactatgacaagctttcaccaaaattcaaagcagccatccttgctgcccatttattcgaaccaaaaacatataaacaagcttgcaaagacaagatatggaaccaagcaatggatactgagattgatgctttagaagcaaacaatacttggattgtagttcctctacctcctggacaacatgtcattagcaataaatgggtatatcgaatcaaatataacccagatggatctgtcgaaagatgcaaagctcgccttgtcgccaaaggctacactcaacaacctagagttgattattttgaaacttatgctcccgtagccaaattcaacaccctcaaactattatttgcccttgcaacaataaaaaattggcacctccaccatatggacatcaacaatgccttccttcatggtgatctccatgaagatgtctatatgacattaccacaaggttacactcctaaagaacctattcccaaaaatgcagtatgcaaattacaaaagagcctatatggactcaaacaagcttcaaggcaatggtatgccaaactcagtcaaaca

SEQ ID NO: 181974 - DNA, 563 bp, Cannabis indica
aattactttctttcgagtgatttgattcatcaataggggactatcccataccataggaagttgcttcttggaatgccgtcgttcaagcacaggctgaccactgattcaatcttcaaaccaaaagccagatcttgctactagaaaaccgaaggagcacacaaagcaaacgaagggactcaccaacgaatcaagcggaagacatgtttgatccacacagcagaagtttgcgaaatcttgcaaaacaaccacgcccggatccgcaagaatggctatgtaggtaaggggatccgcgctatgatcgctttgagttctgctcgaaggaataggaattcttcttaggagtttgaagtaaaggcgaggtttgcaaacgatcactgaattttctccttcggaccctcggccgtatattcttgacgtccttaccaaaacaatccttaccaacggggttagttttagtcaccaaaaggacgttgttttctttgatctcaaaaagggaccgaaggaaatgaaattagatggaaccagtaccagtaggtattgatctaagcttagaacggggtagg

SEQ ID NO: 181975 - DNA, 756 bp, Cannabis indica
tttcaagatgtgttgctgaatataaaaacttaagaaatgttgtctctactagttgcattttgtgtagttgctcttgtcacgatagttttggttacatatctcgtcatcatgcatttattagttagaaggtttcattggatatccttatcttgttttccccttgctcactgtttttcatgggttgtttgttcagcttccccgtattcaagtgactgatccagtggctagatattatggactgaagcgtggtcaagttgtgaagataatccgtccgagtgagacagcagggcgatatatcacctatcgatacgtagtgtagtattcagtgcaatgtcatatccaaagggtagaaaaactatgtgatagaaaaactgaaagggttattggcatttttcccattatatattagaatgtatattcttttttttttttttattttttaatttactataagtaatttgcgtcataaatacttaagttttacgtcaggtagtagataagtacgtaagttatatttttgacaattaaaaatacctttcgttactagtgtagaactggaaatttactatgggttgatgcattttagattttgaggttatatttagatctgagtcattttgagttggaactttggtttgttgggtagatctaaattagattgattctatatgtatttgtagacgaataggttcgaattaaaggagtagggacaggtatgttaatttttgttgtaatttttgtgtcaaggtttttgtg

SEQ ID NO: 181976 - DNA, 753 bp, Cannabis indica
gtgttaaaaaaacaagatataaaaatgaactaaaaaaaaatcttacttttagtcacaacaaaacttgtgaactaaaagtaaaaaaattatgactaattataaattattattcttatgcgtgtggtgactaaaaagtccgtggctaaatgtattagtcacaaaaattacaatttgttgtgactaaatgtatttttagtcgcaatacttgttgtgactaaaattataattagtgataacttgtaactaaatactatgttttagtcacaagtaacattttgttgttactaaaagtcacatttagtcacagaaaagttatgttgtgactaaaaagttgtcagtaaaagtagcagttttttgtagtacacacttattatatatatacaaatataaaaaaaaaaattagtttgagaataatttttttttaaaaagagagacacagagtgtaattgaaaaaaaaaataaaaaagaaaaatagagagaagaaaaagaaagaaaaaaaaagttagcaattgtcttaaaaaaaatgaaaagaaaaataaagagagctaaaactgattaaagaatatcaaaaagacaaaaaaaggtttttttagtaagatttaataagtaaacagtaaaaagaaaataattaacaaaggaaagtataaatgtaaagtctagaaaaaattaagtaatttggtgtaaatttttctaaatagataaaaactagtaaaatagcaaatgtaaaataaactaaagaaaaagaataaaact

SEQ ID NO: 181977 - DNA, 631 bp, Cannabis indica
aaaacaatatgcatgatgacactattagtacccttttcttttaaacaagtaccattgtctttttcttttctttttcttttataacttttattttttggtataattttctacataattacaatagtactaataagtcatttagtcaccgaccttgtgtactattttagatatttgttttcttttttaactgcatttatttttctcttttctatgagagcaataaagaaaaaaaagattcacttaaaaaaaagaaaaaaaaaagaaataaatacataaataaataaaagagagagagggagagggaacatgttcatgtgtgaaggtacattattattatttaagaggactagtctcaatcaatacatgttgttattatataaaatagtgataattttgttttttttttgtttttaattgctttgtataattttaaactaaataacatcattttgtatgagtacttattcatttttttgttaaataattgtaaaaccaaagaatgatttgtttcttttctaatttgtttactatgtctttggtaaaatacattgatgcttttattttggtagttgtaattattaaaaagtaattctaatttagtaaacgtagttttttttttgttttattgtat

SEQ ID NO: 181978 - DNA, 843 bp, Cannabis indica
  modified_base (51)..(51): a, c, t, g, unknown or other
ccaccatttaaccttcttcacctattttatttctctcagttgactttttcncttttcattttttcaatagaactttaaaattcagagttctcacacaatatttaatccacacaagtgttaaattttaaaatttcaatctaattcaatttgcacaagtgcaaatattcgcactttgtaaattggataaatccgatttgattggattaagtattttataggaaaatttacatggtatactaatttttgttatttttttacaaaaatactgccagtacggtatttttttactattttactgttgttttttttataagtttcataatgcagtatactgatgttaagttttcactgatattctactggttattttttagttgttctactgttgttttgagttgttctactttgtgttttactggtgttttataaaaacacagtatttttgaaaagatttccgtgtgacagtatttttgtaaaagttaactcaaattccagtatttttgttaattttcctattttataagcacccctatataacttgggccttttattaaggtgttgtactcgtaagttatgaattcagtgaatatttgtttataaagatataatattataattttatattggcaaaatacccaaataatagatatgaagaaatgatcatatataaaaaaaataaagaaatatagacatatttgtaatgagatcgatcacacaaacaaatcccttttaagtataattgtttgtaatagttaggtacaaaaaactaatttgattatcacatctcttccttcaaaaaagaaaaataataataaaaataatatatggagctccgaaaaagat

SEQ ID NO: 181979 - DNA, 576 bp, Cannabis indica
gtctgtcatcctcgtgttacagcaactttagaccttcagcttttttattctttttagagaattttcgcctgtcttcagtttagcaaattgtcgagatgctccttttctagacatgattattgatgctgtcaatttacatatacttataacttggtgcatttttcaggttctcttctgtagcacagagatttggaagggcctcttttgttcgacagttggagccagattggcatatcgacacgaatcttgagatagtttcacagttagctgtataaattcgccatttttactcatttcattcatcaagtcccaccaaaatatctgttgattccaaagcttgtgaactaaatcttgtgtttgcttgtgacagagatttatcaagtacgagcttcacatctctcctaccagaactgaacggactgcttctaacgtgttcagctccccatccttagaacagttttttggatcagtttgatgcttttaaacaaataaaaatatgcaaatataattcataaacttttattaggtggttctttcctccccatatgttttgttttttaatcttttaaccatgta

SEQ ID NO: 181980 - DNA, 776 bp, Cannabis indica
atctacatttcctaccgtacaacagttcatagggagccatccctatcgtactctgataactgttgttgtacgaaaattctatcaacggtagatatttactccatgaaccctcaaagtccataacacaggctctcaacatatcctccaatatctgaattgtcctttcggactgaccatctgtctgaggatggaatgctgtactgaatttcagctttgtacccattgccccgtgtcgaacttaacgttcgaaaccttaaagttagggtagggtaagtttaacggtttacggtacccttccgttccggtaaacccgtaaaacttaagtaacgttaccggtttacccccgggttaccccggtaaggtaacgttcctacctaacttacttccccttccgtacgaactaattaaacttaaccttcgtccgaaccctaacgtagtacctaccctacgttaaacggttaaagtacggttttcgtttcgtaccgggacccgacgaaaaagtaaagtagggcaaaattttcgtaaatcggtccaccactacccagatggaatcatacatacccgtggtcctaggtaacccgaccacaaaatccatcgtaatatcctcccatttccattctggtagggttagaggctgcaacaaccctgctggtctctgatgttcagccttgatctgctgacaagtgaggcatctcgatacgaattctaccaaattcttcttcataccgctccaccagaagtacggtttcaaatcttggtacatcttggtggtgccg

SEQ ID NO: 181981 - DNA, 951 bp, Cannabis indica
tcgaagtttaaaacaagcaagcataaatacaataaaatagttgattaagactcggggatcatcaacaattaatcctacaacaaaaagtggtacaattctcagatcagtgaatatgaatgaggagtgtaactacaataacaaacaaagacaatggaagatataaaaatgaaatgaggattacaaggtgatataaacgatccatctgagattctttaagcagatgagcacaatattactctaagacaacaaaaactctcaggtagttaaaataataacaaataattaactaaagcataagaaacaaaacttttgttgattgaagaaagaactgataaaaaaagagaggggaagtaattctcacaaagaaagaaactaaattttagctgaaacaaataattttttcatccaagagtacttaaagaaagacaaattattagtacaggcattttcacatatccagaaacttttatcagatatagaaacaaaaataaaatccagaatgcaaataaactaactaattagtttctgtagtacttaaatttcgtctaaaattgaagttccaagaagaaaaattgaccagtggattttttttttttttgctgaacaagaaaagggcactattagcattagacaatgaatttaatcttggaaacaaagatgccaattcatcttatgagaatttttaatttttcactacactgcttttctcaatgtttactttcaaaccagacacatcaagaaatatattagagcatgcagccagcccaaataaatttttctttaaagcattgaggaaaaccaaagtgttgtctgcgaattgtaaatgtacattaacacataatctcagcctattctaaaaccctctaccactctctctttgctcagtcaaccatccgccaagaaatctatactaaagcttaaatatgaactcatatgcagctgaaccaccac

SEQ ID NO: 181982 - DNA, 844 bp, Cannabis indica
  modified_base (757)..(757): a, c, t, g, unknown or other
attgtttctctatagtagtcgggtctgcctttgaattattccacaaagtttcatttctagcttctcaaattaaatcaggtacaccaaactagcaatagcagctaaaaatatatttttcttgagtaggcttttctttgatctttcaatccacctcaagataacttgtagattctagttcaaccacatcttgattaattgtaaacactgctgagagaaatattttacaattaattgagtatatttacataagattataaataatttatatataatataatttaaattatacttaatattgtaagtttttcaattttttttcctttaaaaactaataaaatatccctgttatatataaattgataaattataattgaggccattgtttgtttttgacagtaccaactttattacgtacattcatagaaatggatttgacaccacaattgcataatgcatgctatatctatatatatactatataccattactatattaataggtttaagtacgttaaggtgtcttcatataactggttctgagccagtttttttattaaatgttctgcaatatatgtatcagattctacatattgattagaagtactataaaagtctgtaactctgtactcaaagaaaaaaagtactacgaaagtctatatatatataggaaatactattactatattaatagctaggtacgtacgatttggtgtcttcatataattggttctgagccagttatatattctccttagttnttttttaaaaacaaattgtaactcaatatcatttgtaagaaaaaaaagttacactaatatctatattcagattgtacaaaaagtaaa

SEQ ID NO: 181983 - DNA, 1417 bp, Cannabis indica
tatttttccacttcgaagaatcgattagctcatggatgcaacagtaagacatgaaatcataagcttcatggatgcctattcggggtataatcaaatcataatgtatccaccagaccaagaacatacaagttttcaaacagatatgggtctgtactattacaaagtaatgtcgttcggtctgaagaatgctggagctacctaccaaagactagtaaaaaatatttaaagaccagatcggacaaaatatggaggtatatgtggatgatatgctcgtcaaatccaagaaagttgggggcacatagaggatctggatgaatgcttcaaagtcctcagaaaatataacatgaaactcaatcccttaaagtgttcctttggggtcagctcgggtaagtttcttggttttattgtcaatgctcggggaatagaggctaatccacaaaaaatacaagccctcctagatatgaaatcgccaacaaagacaaaggaagtccaaagcttgactggtcggatagccgcactctacaaattcatttcaaaatcaacatacaagtgtgttcctttctttaacatcctttgaggtaataaaagtttaaatggacggaggaatgcgagaacacttttcaagaattaaaaagacaacttgcaaagcctattatactcttgaaacccctgacagagaagaattaggaatatactagttgtcactgaatatgcttgttcatagcatccattattcttagtctgctttcgcgaaatcagtttctcctcgtggttttagagtgtattaaaattctcgatccactcatcttctaacgtggcttccaatatcaggataaaatggggttggagatcagagagaggtttgtttgaagagaaaaagtataacacaaaagtttttcatctttggttttccacttcccttgagtttggtagaagcgccgaatcccccacttcaatttattctcgccaacctattagccttaaacaacgagagttatgtcctaatccccacgattatgcccaataaaacatgggaaaaatgattggatctaaacctttatacgggcttgcctcttttccgtaatgagatcccgattccccgttaataatccccaatgccaagtgtttatccatctattaatatacatctagttcagcgtgcaaagtgaaaaatggaacggttgctggagatacttatgggataccaggaaagggcaccttccaggagaagcagacacttcacttcactcgcccaaaaggcatctaacgaatggaggagcaaggagctaagaaggtatcttgcttcccaacagtcgactcccatcattacatgcatcgaagaaagtattcggcaaatggagagtcagctcaaatccaattgctattgttttgagcttcacacagaacacacgcccaa

SEQ ID NO: 181984 - DNA, 735 bp, Cannabis indica
caacttcagcagtgttttgtgtctaaagagtccagtaatgaaagtgcagattcttactatttttgtgggcatagctcttctgggaccagaaaagtaggggagaagaggactaaaagtacagagaatataagcttgtctgttcttaggcagtactttgctgggagccttaaagacgctgctaagtgtataggaggtaggagaaataaaatatcacatgtaattcatattcactaatcatcattagctatctgttaatgcttattatggaaaatatattaaaatggttgaaaatatcacttttacccgaaaacaaaggaattttaaaagcctttaatgattagagctgaaactagaatgatatctgttcaagattctaaattaaacccttataaaactaaccattatataaatatatttatattggttgagtttacattcatttatttagatttaagcaataaaatatactaattattgaactttttctaactgtagtttgccccaccactctgaaaaggatatgcaggcaacatggaataactagatggccatctcgaaagatcaaaaaggttggccactcattgatgaaacttcaactcatgatcaattctgttgaaggtgctgaaagagctattcaaattggatcctttactcaagcatcccacagcttaactctccaatgattccagaaaacaatgatgattcttcttcatcaatcaatccaagtgaacaccg

SEQ ID NO: 181985 - DNA, 515 bp, Cannabis indica
gcaaacaaaggagttaaaattatcaagggaactgttgcaactggtttcagttcaaatgctaatggagaggtaaactcgttttaatttctcattttcttggtcacaataatgaggctgaatttacttacactgaaccttttgcttcttgtgcaggtaacggaagtgaaactcaaagatggtagagttctcgaagctgacattgttgttgttggtgtcggaggaagaccccttacaacattattcaagggacaagttgaagaggagaaaggtggcattaaggttagtggaaaaaataaaattgaaatctttgattgtatgaccttcatttcttaatcataacttggatcttcataaattagaaaaataaaataattgtctgttgctgatgatcatgtttgaatttgaatgtgccaatgatactgagttctttctactgttgtatggcttcagaccgatgcttttttctaagtcaagtgttcctgatgtgtatgctgtcggagatgtagctacttcct

SEQ ID NO: 181986 - DNA, 519 bp, Cannabis indica
atttgtatatttatatgatatataatttcttattcaattaaagattcctctaataatgtattccatttggcttactatttagattagtttaacacattaatctatatattttaaatatcttgctatgccagtgccactctggcaatttaattagcagtcgtcatcttaaggattcaaaatgaagcttattattccaacatatatacatttctattaataaccaaatgtccatcccatatgattatatttgttcagctcaataatgttttgtgcattattgataatatatattatgtatatttaccttatgacctcaccaattatagcatatttattaaattctaactggaatcagaatgattaataaaagaaataacttaaaatcaaaaataatcgaaaatattttgctatgttgttcacaaaggcagtcaattaagacaaattcaaacactatttggacattctctgcattaaggagtgtggttgaatgggatgctaaaagttaaattttaattgaat

SEQ ID NO: 181987 - DNA, 757 bp, Cannabis indica
tttttttaagaaaaaggagcatattgcatatgccatgccacacttttcgtagtatcatattatcaagagcttggtttaggaacattatttccatagaaaattattctatacacaaaaatgtaaggatattccccatatattctttttttcaatcaaaagttgaagaagagcacaattaacttttcacgcgaaacaaaatttgtgatattttttttttttttgcgggaacgaactattaaatttgttaaggatatgtagtattttttaattttttttttattgtgtgagtatttcttaaaaggaaattttatttttagccactaagttgagtagatctaagcgcaggcttgacccgctttagtttttggattcggacctgactatccataataacaaaaaaaaaaaaaactacttaagtgtggtacgaacactctgacaaaattgtgttaagatttcaaaattaatattgactcgtagattaaataaatttaactataagaccacgcaaaattctttagtgctcgctatatataaatacatataatttatttgaggttttggcagctaaattttcctaactgttattttacttgcatttaactctctaagttcaaattttgacggtaaaattctcaaaactattgaactggtagtaaatttaaggtgtcatttggttaggtgtcactatggactgcttatgtacacatgatacgttatattggtacacctaatattattatttaaaaaacttattttt

SEQ ID NO: 181988 - DNA, 821 bp, Cannabis indica
  modified_base (91)..(91): a, c, t, g, unknown or other
caacctttttatgtctttccacaatttcccccaggggtttcaatacctcctaagattatggctagcctcccctcctaggtcattcctttcnccctttgtagctgcagcaatgaagctactgatttcagctctcaagggttctctttgtatttgcttcacttctactagttcttctaagcgagatcggagttaatgagaagaggaaaactgtgtatgaaactctaatgtgaaagaattctacgaattgaagttccccagagctaacttgaagtaccactactgggcgacttctgctaaagtaggtgggaagattatgcactgtacatcacctctcactgcttttaagtccatctgtatttccaaatattcaaggtgagacgaaggacattcttttcctgcatacattttctgtgttggaattttgaacttaggcggtacgtcgagagtgttggtttctagtgagaatggagatcctctagtctattcaatttctatatctgtgagttttggactggttaggccttgaacaaggctcttaaaatgatctatttgtgcttgcaccaatggattaacatgacttacctattgaccgacatgtgtcacacgagggtctcttagaactgtaccaggtacatagttattcatattgcttggttgtatggtaggatgaacatcatgtttgtccattcctcttctgcgattcagatcatttctaaggtcgtgctcgtacccaattggtcaaacactgatgtccaaagaggcctttgcgtctaaccgttttgagcaagggattagcctgatgctccatctgagtacgtgga

SEQ ID NO: 181989 - DNA, 1280 bp, Cannabis indica
taatgcatttttgaaatttataggttgggtgaatttcttaaataatgctacagctattatgccaagaaatagctgatgtggggcaagagattcataattaacaactcatattaataagttgttttgatgaatatttttgaagtgtcacatgatatttgtcagcctgttaagaagtaacaagaatttagattcatcgtggcttgtacagatactacagaagaatagttttatgtaaattgctacgaatggctcgtctttagctagtttttatggaattgagattttggatggcaggggaggggaattgtgaagctagtgttggaattgctattttgtagttgatttttattgtaagtcccttgtaaattctaatcaattaggaagaataccctccctgtatactttaattatttattgtatgatacattgatagtagttggtgaggttttcttattttaaagtaatactatttaagtgactcttggatatatatttcaatgcacttgttataagtaatgtacagtgttttttagttttttttttttaaaaaaatttatacatttatattttgtgtttttgtcaaatagtaaaaatagtcatcttaactcgaatttagtgcatcttcatgcgttaaaagatccatgtattttgcaaattaatgacccgtaaataaagtctgaaggctaaaatatttttgcaaatatagtgtgaccctgaatggtgtaaatcctaacaattccattctatacaagtatataatcattacattcaattctcacccaaaccagaaaggagaaattgccttatttattattctatccattatagttgtgtgtaatatgataaggagtaggagcttcaaaaaagcaaactaaagctttgagtgaagactctcttgagaagtcatcacatggcttctatggatatcttttagagtaggacacccggaaagggtcatagtgagttcaagctcattcttcagcatttcaatcacagttctaaccccattttctccctttgcggctagcccatagataactggccttccaacctgttgcatattttcaaataccaaagtcaagatttgaccaaccatttcatcacttctcaaaagttatgagctaatttagaaagccatatttttgtcaaatgaggattgaacttacaagtacagcttgtgcaccaagggctaatgccttaaacacatctgttcctcggcgcactccaccatcaagaagaacaggtatttccctccaacaccatggatgaccttcagccat

SEQ ID NO: 181990 - DNA, 906 bp, Cannabis indica
gttatctaaatttctttcctgccgtaccccacttttcaatactcttttggaaatagttccataattttttatgttttttttggaccattgtaaataaaaaagaatggggctcgttgctttcctttgcgccgcacaatattgttttaaaaataataatatcatttttagcaaatgtttttttttttgaaatgaaatcatttatgtttaggtggctttgtggttgccttacatttggatcgatctaaatgtatgtcatgtgacaagaaaattaacaagattaatcgaatataaaatgtattaattgttggtccctagattttcttaaattgatgaaagtctaattttttcttttcaaaagattgtttttaattaggtatattataaaaagacaagataatatataatacatatttttttctgattaaaaaattaattaaattgtattatatatacaaatttatatgcagggtgtcgaacataagtgatacagatcatggccttcttagaacgttgatgacgactctcagccacctctctttggacacaatgatgctgtatggtcgggacatcacccaccatttacgtcaagctgtgagtgccatctcttttttgcatcatatttaacttaagtcatctcttataattactgtagagtgtgcaaatcgtgtcctgtcgcctaattaattttcatatcagacatgtcttgttttttactagtgcctaattgttatttttatgttttttaactttaactcacaaaaacttgtgaggtatttggaggtattgggtagacaagctaggcgtgcgccttaggcccttgaccgctcaagcctcgaaatcatgaaaaaaaaaaattataaatatatagataaaaatatgaaaataaagaaaaaataaataacaata

SEQ ID NO: 181991 - DNA, 586 bp, Cannabis indica
atgaaaatgtcttcattctattgttgacaaaaacaagtgtgcctactatagaattttcctattatatatatatatgtattatataatgtttaatgtctatattgattgtgaatggctctccacaaattgaaactttgagtgattaggctgaacttcatcttagtttagacttgagaatatatattaaaagaaatgatgatgaagctggacatttggtttcaaatggttggtagttaattccacgtgtcaaacacccagaagaaagaagctgtatacgttacatataactaaagcaattagccaaaggagataaataacaccaatccctacgtgcttgcatgaaagccaatggagacaggacatacataccctccttaaacatgctaaatttatacatttatttattcttacaaactgatttgcaaaatgtaatcaatctatttcataaaataaactatttttaaggatgaaaaatcggtacatgttaaaatttcattatttcttttagagaaagaagaatggagaaaaatcgtcccagcctctggctctttggtctctccttgtcatgagttggtttggctgtgag

SEQ ID NO: 181992 - DNA, 769 bp, Cannabis indica
gttgttcgaaaggttttagagatggaaagcaagtttttgctttggagaggttttatacattaaacttgactcactcttactgtatgccattcttttgttttacactgagatttacttttgtgtaaaaaaataaaaagtgatggagtagactagagtagtgtttgatggatgccttattttgattgcagtattagcggactattgattttaaactgattgatgatttccttaggatctgtgtatttcctcaaaattctgcttagattgatatgtttgtttttgtttttgatatttatatcacttatgattgagtgatttatcaaggacttatacatggcagggtggtgcaggtacctggagtgatggaaagttagttactagaattggaagaaatagcgacactgttttggcggttagcaccttatctctatcttcttgaaattttgttatctacttccttttcatagcttttcccagtagttccaccgaaaaatgtgtgcatcactacttgcacttgaaatcttactccctctcacaagaatttgatgaatgaacaacagaatagaccaatggatttttttttgccatcttaagtacatttgatttactgaacacttcatgtacattactttagcttttgtcagtaatggtatggactaacggctttcagcaattattcttaaggttatgaaaactttagttcattttggagctccaaaggaatcttggttaatgggaagccacatctaggaacagataaactgattcc

SEQ ID NO: 181993 - DNA, 908 bp, Cannabis indica
tttttttttgtaaaaaaataaaaggtcaattatttttgaaaatttttacactaaaaatctaaaatgataaatttattacattaatacctatacacggctaaaccaacttttttacacatcttttatattttattactattttaccacatgcacacacaattcaaccttttttgacacgtgattgattgattgatgcattacatcaatcactctatacatcatttctctcttttttctcttctttttccttttattttctatttctttttcagttttttttttaaaaaaaataataaccttcatagctaacacttccctcttcacaatcacaactccattttcactcttctttttgttcttcaaattttttttcaactcccatcaaccgttttctctctttttatttttctcttaatatataaatatggttgtaacttattcttcatcaactccttcccttgttcaaaaaaaaatttctaaaatggagttgaaatctttagctaatagaaacaagggtaaacgacatgttgttgaggatgatgactctaattttgctccattgtcgaaacgtgggcgagctcttccaaagaagaaatcaaaggtggcagcccatgaaaaaattcctcaagatgatgctaaaaaaaatgatcaagatggagttggtcttcagtataaggtttgattttagtttctttttggtttcgcccctatttaaaatttgtttgtatttgccatttgtgtgtcttgtgtttttcgattttactattctaggttttttattttagcatttcgtttggttttttagggctactatttttttagtttaatttatttgttctttttatgggtttttcattttcgtttgtttagtcttaaaaactgtttcattttgttgtcttttttttttc

SEQ ID NO: 181994 - DNA, 773 bp, Cannabis indica
gaagaaagggcttcagctgtaagaagagctgatgaaggagcagctgatttgaagaagaaggtggcagaactttctcagggtttagaagagtatgaaaaggaataccaggtagatagcgctttagtggtgttttttgcactaaataacaagggcatcatctttttgtgctaatgattattgtttcaatgataatggctagggtgtcgttgctggcaagagtagtggagatgaggagaaaagtctgggagatcagctgtctgatgctaaggtagctgttgggagtgctgaaacagaaatgaagcagctcaaaaccaaaataagccattgtgaaaaggagttgaaagaaaaaacacatcagctaatgtcaaagcgcgatgaagctgtttcagtagaaaaggaacttagtaatagaaagaaagatgtggagaatgtcaaaaaaacattagagtctcttccatataaggagggtcagatggaagttttacaaaaagtaagcattttatcaaaccatagcattttgcctatgtaattcaagacacttgaatatttaactagtttggctatcaagtatattttatatttggtattttatactatgtttgctatgtatccagtttgatttgtctttaaacatttattttgctacaggaccgtgcatctgagctagagtgggtgcagaagttgaaggatgagatcgaaaatctttcagcccattagctaatgttcaattcacatatcgtgatcctgtaaggaattttgatagatcaaaggtg

SEQ ID NO: 181995 - DNA, 736 bp, Cannabis indica
tctaattatgagttacataacttatgattcacggttgataaagatacaattaagttagtaattgaatatgggagttagaaaaatcaaatagagatattttcaacaatttcaaactatcaaaatattcatttacattagttaaatgagttttggataattgagtgttgagttggttcaaagaagagctttgaagctcaaaatatttatgtgctgaaattgtcccaggcgacatgtcacttgttattaagagacatgcagcttaaacatgtgatagagggtttttcaacgttattcaatgtatctcgagggttatatggtttagctccaggcgacatgttgcttggagccatttctaagaaaaatattgcaaaacgttgagaatttatgggggcgtttctatcatcaatcacaaatattcttatctccatttaatgtcatactttgattggtaacatccatgtcatgtgtgatatcaaatgtgaatcctaaagactatataaggaggtctaaggtgcttatttgaaaacacaagtttttctatcaaaaaatcactttgttagaaaaccataaggcttgataattctcaaaactatttcttagagagttcccttaatcgcttaaagataggaaaaataagtttttgaaaaaaaaaaagtgataatatattattcaagtcatgatgatcctccactaatcgacactcaaagttgtgcgtgagtgtatttcttcttctttt

SEQ ID NO: 181996 - DNA, 718 bp, Cannabis indica
gaaggaaaaagtctacaatacctataatttggagaaaatagagaaatgacaatcgtccaaatgatgtgcaggaatttgtcatagttttgcataataaatataaaatctaattaagaaatgattgtttaatacctcaataccagttcttccatgcaaaacccgttctttgtcaatcccccatgataaacactcagtattcctcctcccttcacgatcagtgaagaatatgtcttgattttcctttccaatctccagaacccaccgaggaagagtgatcattgtgtcaccagattcacttcctccatactcatggaatgccattacaacctaaagggtcgaaacattaaaaaaaacaaaaaaaataccaattgaacataagccctctaagtaatatgaattcctcctacaacctatcagaatctcgatcagttgactgaagacattagttgattatggacaataggaagagacccagaatgaataatgctgattttccacattatgaaaagaagtactaaaataaaactaaatgattctaccaatgcaagacagtaatatgttgtgtaaaaaaaaggcgtgtgtgatcaacttctctttcttccatggcgaagaagaaacaggtgattcgaaagcctgtactagctaaatctcgtggattccccttcaatctaatcgagtgatgaattggaggaccaaaggagactgttggatggcttgg

SEQ ID NO: 181997 - DNA, 907 bp, Cannabis indica
attttcattgttttagaattcacattaggttgttaatccaacatacttgttagtaaatctagatcctggtaaaatcatttccaacagatgtagtcatgatcgggggtggaatggtggagggcaaaggctgagaagggatggaaatcgggtggtagtaagggaggtgttgatggtagtagtacagggaggtggagaatccacacgaagaaattgattcacagcatgctgtaggctgtgattaggcgatgagtgtcgagggaagagttcctccaaaggagtagcattggatatttcaaaggggttctttttgaattgggattggactgaagctcgaagagtgtcacgatattctaagataggaggggagggaaagttgtcacaacggcggagatacttggggcatcggttgtaggtatgatccatgagaccacagaaatagcaaaagttgggaagattctcatacttaaagcttatccattttggttaatggatagaccgaaaacggattgtcattcccctatgcaaaggcttagtgatgtcgagtaagacacgaatcctgagaaaaggaccagagttctcaagcagcgaaagagggtatatttctatcagatcacccaactcatcagctatgaattgagccagctggggacttctacggccaaatggaatacggtgggcttggatccaaaaggggggtataccagatactatcaggggtgggagtgggggagacatctgggtgagtaaagactataaggaacttgtcaaaatgccaaggctgttcctccaagcacggtgacgatccccatcacattgaaaaagttgccaaaaaaaggcgagaatgatattcggtaatttgagcagggaagcgaagagtccatgcctcagacatggctttctcaatcca

SEQ ID NO: 181998 - DNA, 556 bp, Cannabis indica
actaattttgtgatgtttatgatactatttggttactttatgaattttttttagtaaacatatcaaaatatctttattatataaatgtatgtcatttaataatttttaagtaaaaaataacaaaattttaaaataatcaataacattagttgttgtatttaatgttaagatactatatgttttcttttatatataatatatatatatatatataaataacttattttagaaacttaacaaaaattttctacaaaataaaatttaataaaattaagtagattatattaaattttatttaagttgaaactttgattatttttgttgattaaattggaaaagaaacttataagttacttttaattttggttatttttcggtaacggcgagaaaatatatgcttcccacatgttaaaatgaccaccttaaagagtagatttcaataatgttatttttgagctcgaacaattatcggtgtgaccggaaaacccttttaaacttttgaaaaaaaaaaataaaaaagtaaacccaaatagtatcataaacatcacaaaattag

SEQ ID NO: 181999 - DNA, 684 bp, Cannabis indica
ttattttttttttttatcttatctttttcttggttttcttcatctcttcatccaacttaatccttacccctatgaccttgatctaccacaacctcatgacatgcacggccacactctcgctcttgtcaactaggtagtaaaaacccaccacccaccacccatcctctcaatctctccttgtcactgagatctcaccctctcaatctctcccgtcgttctcctttagatctgacaaatcgtaccaatgttttcaccatgacaacaaggtctttgctcgtctccggctccaacgaccacgacagcaaggtattcattcatctctggcttcagcgagtttctgactactaattcctccagtcgaaggccaaggcagtaccaccgactttctcagtcgaacccacatttgcatctaaatccctagtaatgggtttgggtcttgggttatttgttgttgtgattatcaatgattgagtgaggaattttgaccactgaatgtatttaaggatttttgattatgagatatttgttattgtttttttgttctcggggtggtggtcttgccggaattggggtctcattggggtttgggttttttcggtggggtggtgctgggttttggggtgggagttagtaggtggtgggttttttagggggtggcttctggaaagcatgaagaagaagaat

SEQ ID NO: 182000 - DNA, 724 bp, Cannabis indica
acttctgttactttattgatatagaataatctggattacattgaaacagagttttatttagggcataaaacccaacagtttttacatccatctgctccagctctaaatcaaaatgagcaactaatgccaagatgactctgagggaatctttctttgatacaggagaaaaagtctctgtatagtcaattccttcctcttgagtgaatcctttagcaacaagtctcgctttgtacctctcagtgttgcctaatgagtctttcttagttttatagaccccactttacagccaactaggcgtctcgccccacttaggtcgaactttactaagttactacagactctgttgcacctcatagaattcatttcatcatccatagcattgtaccacaattttgattctctactgttcatagcttgtaaaaacgtttctggatcatttccaattccaatatcagattctaataaatacacaacatagtctttgtaaatctttggtttgataggtctagtagatcttcttaagacttcaccaacaggctcttggggagcagcagctggttcagcaggttcagcaggttgttcaacagttgcaggcaactcttgaacatcttgatctactggattatcattaccaacttgtggatcttcagtgattggtaatggttgttcaacattcgtttgaactacaggagtgttaaccattatcaatcttgcttttgaagtg

SEQ ID NO: 182001 - DNA, 1026 bp, Cannabis indica
attaaaaactaataaaagaaattctcaatagttagaaaaaaaaaaaaaaacaactctcaaacaaattgaatttaaaataaacttatcggcaaaatctctgtagcagttggtcctccttaaaattgacctacagattaacaataaataaaactctattatcatacaatttaatgaaaaaaaaaatatagttaatgagaatatggtaaaacaattcatattataatgtcaagatttaaaacactaatttgtcaaatctaaaaagtcggttgaagaaggcatgagtacaacatgaaacatttctcatacccattgtccatactacaaatctaccttaaacaattagaggcaaactataaaaaaaaaaaaaagtaacaatagcataaaaggcatgaaaaccatcaaaaatatagtacaaaaataaatcagatagtcatcaaatctaaatcttatatcacttaatatttagaaatgtgtaaaaacctcaaaataaaaggtgagggattgtatgtacccttaaaaaaattatattattattattatctagaaaatattattaagtaactaagaaaaaaaaaaaaaaaaaaaaaggcaaacatttgttgtttgtttgtttgttggatgaattttggggagagaaatattatttggaagaagataggaataaattaagggttggataatgttaggactcccactacttatttattttatataattttagccctatgtgaaaattatgtcagatctcacaagagatgatggcagtataataatttgggcataaattatcttattattattattaatttatacccaaattatttataattgtggctctttctccataccctgctactccataacagattttaaccctatatttggttgatactgaggaaaatagaatgaaaatatatatatttctttccataatttttagtatgtaatgtaggaactaggaagcaaattccttaaaaaaaaaggaactaggaagcaaataaaatttttatattgcaaaattactat

SEQ ID NO: 182002 - DNA, 772 bp, Cannabis indica
catgctttattaaactataaactgctaaagtcaacaaacaacatgagacaaaactgctcccaaaaatttagacaataaagctataactgaaacaacccactcaaagagttagagctttagcttatatcacttcatactacacgccaacttattaacatatcaagaatgatcccaaaacatctacaaaacaaagtaagaaaaaaaatgaattagtcccctaacaataatattaaaaactaataaaagaaattctcaatagttaagaaaaaaaaaaaaaaacaactctcaaacaaattgaatttaaaataaacttatcggcaaaatctctgtagcagttggtcctccttaaaattgacctacagattaacaataaataaaactctattatcatacaatttaatgaaaaaaaaaatatagttaatgagaatatggtaaaacaattcatattataatgtcaagatttaaaacactaatttgtcaaatctaaaaagtcggttgaagaaggcatgagtacaacatgaaacatttctcatacccattgtccatactacaaatctaccttaaacaattagaggcaaaactataaaaaaaaaaaaaagtacaataagcataaaaggcatgaaaaccaatcaaaaataatagtacaaaaactaaaatacagatagtcatcaaatctaaatacttatatcacttaatatttgaaatgtgtaaaaacctcaaataaaaggtgagggattgtatgtcccctttaaaaaattatattattattatt

SEQ ID NO: 182003 - DNA, 907 bp, Cannabis indica
gaccatcaagagataaattaagtgaaacaactcttatatatcttcctcttaagtgtctcctttaatcttgatgtattttgtgtcatgattttgttgtttcatctatgaagtttattgtatttatttaagctgtcgttctcatgtttattgtatttattttaagctgtcgttttcatgtttattgtgtaagaaatttatatgaaaacatgaagtacatataataatgtcgaattaatctaacgtacacaccatataactataggatctacatactttcagccattaattttttaaatttaatttgaatatgaaaaaaaaaggaaacacattagtgtgggtaatgggcttccaatctctctactctttttagataaatttaagtgaaaattacatgaaatatgggatttcataacaaagttagaaaaatatggcatttttaggtttgccactcttctatggcattttttcacatttaagattttttatggtatttgatatgccatatttttataaacttattatccaatcccatattttatgtttttgtttttagcttaattagttttatttattttttaatttattttacacttacattttagggtttctttttatttgaaaaatttacaccaaatactacattttttttcaaacattacatttttaatttgacaagaacattttacttttatacttttattaatttttttttcttttttacttattgaaacttcaaaaagttttttttttttgtctttttatatattttttagtcaattttggctctcttttttcttttcaacttttaagtcagttgctactttttttttctttctttcgcttatctctctctatttttttttttaatttctctttgtgtctctcttttttttttttaatttttttc

SEQ ID NO: 182004 - DNA, 652 bp, Cannabis indica
aggctatattaaatatttgggtctacctttgtttcgatcgaggcaaaaggatgctgactttaatttcatcatcgagaacctgacttctaagttacaagggtggaaggcgaaaaccttatctaaggcagggcgtgctactctgatcaagtcagtgggtctttcaatgccgatgtatgctatgcaaaccactaaattatctaaccggctagtttctaaaattgatgggatggttagggatttctggtgggggtttgataaaggcaaccatggtatgcacttaagagcttgggacaagctttgcctaccgaaagcccatggtggccttggtttcaggaagacgaaagagatgaatctggcgtttctagccaaatggggatggaacttgttgattgggtgcaactcgctttgttgtcgtattctcgaggctaaatatcttaaggggaaggagttccttaatcacagtttcaagagttctgattcttggttttggaaaagtgtggtccgtgctaatgtgattttacgaaagggtgcctgtaggctcattgctgatggtcaagatactcgtatatggaaggacccctggatacctcatggtaaagatttttttccgaaacctgtcggttccgttcgtaacgaggacgctaaggtggca

SEQ ID NO: 182005 - DNA, 1279 bp, Cannabis indica
attactataatattacattgttatataaactagaaaaatactttctttcacatgtgcatagagtaggaaaggaaatccaggtgctctacacttggccctgaattatttcaaatcattaactgttaattatactcgtttccaatgtgtataaaatgctatctcaaggcatttctaagtaattggatagtcccaaattccatccctaatttaaacttgaaatcaactattttggtatttggattgtactccaattttgtcttgataggattgtcttcatcactacccacactttctaaatcaaattctctttcatgtccatcatcatctacatcttcctcaacattaaagtttgtaataccatcccaccagttgttggttttaggtttcctaatattctctctttcaacttctgcctaaccagcatactcttcctcttgtatttcacattggtctatttcattgtattcttctccaacaaactcttcacgcttagcctctggttcaacttctttgtgtaaatcagcttcaaatggagtagcttctctaataaactcaaatgtggtaggtggttcattaggttgtatgtcaagttaagtaaaaggtgcatcatcattgatttattgaatatcttgaacgagttcttcattaaaagtgtaattgttagatttagtcccaaataaacatatttaaaataatttgataactaggcaaaacccaaaaaataatatgaacttgtaataacaaacataataaatattggaattaatttgaaagaactattagaataaaaatgtagacacgcaaggagctagcatgtcaagtgaatcattgattaacagagttgggggactcattttccaacttagatgcatacatgaataatatgaagtaaaacaactccaaataaaaaataataagtagttgatctctcatctctattcaaatacatttgtttatcaaaactatgattttattcttaagaaaaggcaaaggtcattcacccctttataatagagacaaagcagtataccatgtgcacatgtaccccacaaaagtgacacattccccaatattcaaattcactttcttgtcatgtagtacaacattaaaatggcaaaccagccaacattaaaatggcataagggaatcaacgcaactaacttaattcttatccccaaggtgcctaatccgaagaaagtgactcagtttagacctatttctctatgcaatgtgatttctaagatcattactaacaaaattagaccgattctcccgagag

SEQ ID NO: 182006 - DNA, 658 bp, Cannabis indica
attatcctaataaaccttccttaatttaaaactactacctacttaattttccataccaaaactattattggctttcttaagtggtaatccaccaatattaatttaattaatagtagtggactacttttgcattaccacctttcatttaatacaaagagttataatcttagttgttgatttagacgtggccaatctcaaagttgaaccaaatggactaaacactaaagtttgctttgttcaacaaatcagtttatatagttataaaatatatggattaattgaaagatttatatttcttaattgattagacaatattaaacttttagggcatccaccacatttgacattgctcttcttcctgttttttttttcttcataactttcatatattaattaaaactgatttgattgttcaaaagagttccttcaatgcaaataagacaaataaagattatctcacatatataatatatatatatatataaatatatataatacagattgtataagaaagagtggtaattaaccaaaaaaaaaaaaaaagaagtagataatagacgacgcgattttttaaaaattaattaaaagtactctaatcatgacgtttaatacattgtcatttatgattgattagttagcaattagcatatgatcaatt

SEQ ID NO: 182007 - DNA, 731 bp, Cannabis indica
taacatttttgtttttaaatttttaatcacaaaaataaaagtaaaatttttgtttttaaaatttttatttagaaaaagaacaatgtgttctgtaacaacttttgtttttcaattttaaaaacagaaaatagaagtctgttttgtaaaaattttcttttcatttttatttgttaaatttatttaagttgggttcgggtttgaagttgggatcgagggttgggtccacggtcggggttaggatctatccgagttccaaggtcttggttgaagtcagaatccaaaatattgattaagaaaaaaaattatttaaaaaatttagaaagtgattatttttttttgttaaaaacagttttatagaacatgattttagaaattgttttcacttttctaattttaaaaacaaaaaatttaaataaaaaaatagttaccaaatgcactttaaaatagttgtctttctagttttgaactttgttttttactagtgtatgataaggaggatatttatcttgaagtgttgggattgttgaattggttctgggatgtatgattgtgagtctcttttatattattacgattgaactagtcttattttatttaaatttgccctctaggaacaatatgtattcatatcagtacatgaattacttaatcagtattttttttcttctgtagaactgaaaatcatcattttgttgtctctaatggaaaatgttcctctattccgcaggccc

SEQ ID NO: 182008 - DNA, 684 bp, Cannabis indica
ttatattcaactcacattccttaacactacacttcatctcattcttcaacaaactcaaagactcatcaaattttgtttgattaccaacaagcatcttcacgttgttccttaactctactagatcagacttccccacaccataacttctctgtatactagaaaggtcacctttctcataatgcttcctttctaatggctcatcatcaaaatcatcttcagaagtttctaccacggggaaatcaaaactttcaagtttcatcatctttctttcaacatcagtggggagaatagcttgagctttcagttacaaataaaaaatgagaaaagtaagcagataagtttacaaaaatatatcacagcaataaacagaaacaacaacatgattttaataaatatttatttacctttgatgacatgaaaattttcctatccagctccccagagttaggatttccagtacttgaccacctacaaatcctatactcttccgaagcatcatattggcatatagaggccttaagacataaaggaatggtttcatataaccagaccataaacgcataagggaaaccaggtaacttgtatgttttactattttctttcgtctgtttgcgtttcaccttagcttttccttaccacaagaatcatcagcaaatctgtcttttctgccctcaagcaatcatc

SEQ ID NO: 182009 - DNA, 713 bp, Cannabis indica
gtccttcaacagtgatgcatcgaattctcatggaagacaacgccaaaccaactattgatgctcaaagaagactcaatccacccatgaaagaagtagtcagaaaagaagtagttaagtggttggatgctggagttgcttatcctatttcagatagtaagtgggttagcccggtgcaagtggtcccgaagaaaggtggaatgacggtgatcaagaatgaaaagaatgagttgattcctacaagaacagtcaccggttggaggatctgcatcgattataggaaactcaacaaggcaacaagaaaagatcacttccctttgcccttcattgatcaaatgctagacagattagcggggcaagaatattactgttttcttgatggatattctggataccaccagatagctatagcacctgaagatcaggagaagactactttcacatgtccctatggtacctttgctttcagaagaatgcccttcggcttgtgcaacgcccctcgccactttctaaaggtgtatgatggcgtatcttttctagatttgtattgaatcttgtattgtaaatttaattggatgatttcttcagtgtttggtttcgttcctttcgtatcattgtttggtaaaagtactggaaaaaagtaactaacaaaggtagcgagaagtcgtaacttggtgttaaactgggagaagtgtcacttatggtaacagaaggaa

SEQ ID NO: 182010 - DNA, 542 bp, Cannabis indica
aatagacaagtagcatgataaaagcaagttcacaaacatcacaatgattatttgtattcttctttggaattattttagatttttgttttatctacttgttttattttctatactaaactattgaaaaagttaacagaatcaacaataaataaactagtagttctccattgggggatgatcttgtggtatatgttttagggtagagcttttttaattatttttattatgatcgcatacgtttgtacgtagttatataaaattatctgtaaatttttaaaaaattttaagtaatttacaaagttaaaagtaagatttaagtattttgttgcacactcgactattttttatacacgtagtaagtaattgtttaaactttatttttaaataatgtaaagtattcgaaattttttaaaaatttataaatgaccttaacctatctgatcatttaaaaaatagaacttaaaaattaatctaaataccgagataaaaaaaaaaaaacctactaaaataacccataattattacagaaatttcttatattt

SEQ ID NO: 182011 - DNA, 676 bp, Cannabis indica
acccacttcgccaactcccgctgctctgtttctcttccctgtttcgggtcacgccgttcctccacccggtagattggtctggtgggagcgaatccgggccgtcgaaaacgatcatcactggtggtaccggggaatccgagctttcaagaagctccgagagtggtcagagattgtcgccggacccaagtggaagacttttattcggcggttaaataggaacaaaagtaacagcggtaacggtggaggagctcggcatgggaaattccaatacgaccccttgagttactccctcaacttcgacgatggtccggggcataattgtaatttggaggaagaggaatacgatggatttcgggatttctcgacccggtacgctgcaggtgcgggttcgggtcaggttaagtcggttgcgccaatagaattgggtaaagacgtggcggtgtatgcgtaagataaaataaagcgctgtttatgctaacatgcgcgcgatggcgaacaaaacggctgaatgagctgagaagtctactgtatgagctgtatggtttgactcgagtgacggcgcgttctttaacggtagacttttttttttccttctttaataattttttgttcaaaaaagtaaataattatagtttgtacaaagatagtggaagtaaacaatataaaaaaaaaaaaa

SEQ ID NO: 182012 - DNA, 956 bp, Cannabis indica
aatgggagcaccaaaatgttgaccgaggtttttggcaaccaattaaataatatataggaaacgttgtagggaatttaatgcatgagatttttacgtggttggggcattaaagagccttactccacgagtctttgttatttatgagagtatttattacagagaatgttcttggtgaatttctctcctattttctctctttgattccttttatctacctagaatcctcgacccttgtctcagtgtgtttgtggggtatttatagtatttttctagggtgatccctaggaatgaatcacttgtctttctgtgcaggcttaataggggcacatattctcaacagatacaaaataggaaatacatgacctataccgtaggtatcttaggggttaggtggatataatcttttatctcctctaaattgatgtgattcctcataaagtagttgtcactagccttattaatcatagcggaatagctgaaaaagaggggttatgccatctgtcatatcgtttatggtggtttcaatacgtcttcccccatgcggcattaaatgcgaggtgattgttcaatagagtccagtacctcccggaactgccttagtatgtccctcgcctccgggagcgtaaagatccttctcatgtctccaccgagagacaccttcccagaggcactcctctgttgtctaagacttagttgatttttttaaaagtggtcctctcagctccacgtgtcatccttatccaggcccacgtattttgggcaaaatcaagggcaacagtcactatcataaaataggaaattttaccaagctacacccaaaacacccatgcgtgtacttcaaaaccatttaaaaaaaattaataattattagtatgaataatttaaatgcatgcaaagagaatttcaaaaaaaaacaaaaaaaaagaaaaacaaaatacaatgcaaagcaataagtg

SEQ ID NO: 182013 - DNA, 640 bp, Cannabis indica
atgttaaattttgatttatatcaaaatcattatagtttatataccaaacatattactatgatatataagacaattcaatataatactaccaaagggaccttaagtgtattattgtgtattatctaaaatgaaatcataaaagatacacaaggtgttgaatgaacttcacctatatgaattgattagggggtcagtagtatataaacttttgaaaggttaatgaaacttaaatgcctattacctaagttacatttcattactcaaatagagtactgatcttggagattactaactttaataaggagaaaaactctctaagatataaaaaaggtataacaaaaaaatgaaatcccaatcaaacacaccctacgaaatgcgccattcaacatgtaaaaagcgagccaaaattcatataataaagttgtatgcaatctattacagatcataaaagttatgttcttttttactgcaacaatcaatttcgacaataaaatttgattgttatccactgatttacttggttataaaaaagaaaacgacactaaattaaaagaacccatggcaaaaaaaacaaaaaagatattggataaatgttgttgataatttattaatttctaaaatgtaaaaaacacccaaatga

SEQ ID NO: 182014 - DNA, 581 bp, Cannabis indica
cgacccaaaaataaaagtactaacaattagcattcctctttcacttatgttagtgaaaaaagattcttttaacatgcactagtgaaagtgaaactaacttaatatgggtgcaacttttaactaggtagagaacttttttactctcataactacttaaatactagtttatcctattctagggtgtagatcgacactaggaagccaaactggtgtgcacatgtattacatttttaccatattcatacacacatatattacaaatatataaatctctgtaaagctaaaagtattattagggacggtggagaatgtcccacctagcaagaagagcaacgattgcaaccattgactagcaatatgaagttttgtagaatagaagtatgacatgacatgtgtaaaaatacttttagtaaaagacaacatacaacatacatatatatactgtaattacattggcttgtatggttgtttaatgttaacatacagtacacaccaatattgggagtgggggtggctttggtttagctttggcctctactacttgaaatgtaatgtaatggagtttggctttggggtccatc

SEQ ID NO: 182015 - DNA, 690 bp, Cannabis indica
atataaactcaaatgatgatattatttacaaaagtttataatgaaagagagaacctcaagggaagagaaaagaggccttgagaatgcagtgaacaaaaccagaagagaaaaccaacgaagaagagagaagcctccctgcctgtttttagttctcaatctcaacactaaaaaaaaaatcaaagtgagcgattttttttggaaaatgataccgccaaattttttggtttagtatgtaatagtttttttttctctctttcaaaaaatgtgtggactttttctattcaatttaatgtcactattatattaatttttataatagttatattcttattgtagtaagagtcatttcttgcagtgtacacggctgaagagaagtggttattgttttgataatgaaaaaggagcgggaaactcaattttttagcggccaatagtgtaaaattttaattgttttttctcaattaaaaaaaagcattttagtgtacatttgagagggctttagatgtctccactgtttagaggtgtatacatttattttatttttttaaaaaaaaaaatattatcaaagtgtctcacataaaaacatgcaagacattatatgtgtctcacactagaaggcatctaaacttaatttttctattttcaataatatattttaagtgtctggtatcatttttaatgtcttcccat

SEQ ID NO: 182016 - DNA, 679 bp, Cannabis indica
ccaataagaccaatatgggaagaagtaatataaggattaccagggtcagggagccaagggtggtgcagaatgctagtagaagagccagtaccaattgttctcctaactccttgacgaagcagatccatagcactccaaatactgcgccaaacaaagctaggatttcgacccaaatctgctgagagaaaatcatcatgggggaagtaacgggctttataaatcctggatacaagtgagtctggataacacaacaatctccaaccttgcttagctagcatagctaagttaaaatcatggagaaggcgaaagcctaaaccaccttcatcctttgaacgagagagacggtcccagttcatccaaataatgccatttcctttgctacttgtagttttccaccaaaaacgagccattaatttttcaatttcatcgcaagtgcctagagggatgaggaagacactcatagcataagtggggagagattggaccacagttttcaaaagaatttccttaccgcatttgacaacaacttaccagtccaactgtaattcgattcaaaactttgtcttgagaaagcctagaatagccttcttgttcctcccaattatattagggagcgacccaaatacaggctgttttcagaggcttcaggctatgtgaagcagcgaacatatattgtgtc

SEQ ID NO: 182017 - DNA, 518 bp, Cannabis indica
ttgaacagttttcaatatctctcttcaagtttatttgatacttccaaattaaaaaagaaaaatagtctatataaatctaaataaatactatgggaatgtgtataaaatctcaggtaatggagatgatcgagaagcaaacaaaatagaacaaggatttacaaaaaaaaaaaaacaaaaaacaaaaataagaacaaataaatttaacaaaacaaaaatacccgagtgtgacatgactgacatgcatgcttttgtaacagggctgcttttgttggctacattaaaagtggttctgcttcaaattgcagacacgttataggttttaggattttagtattttaataaaaataaggtgatataatatgagaatgattgtggtcaaagtgggccgaaccatacactttttgtacaatttccatagactaacagcagtaaaaagtcaatacgactcttccatagactaaggttatatagtattttttgtttctttcatctctatattattgtccccttaaattttt

SEQ ID NO: 182018 - DNA, 650 bp, Cannabis indica
gataggtttgctttcttatatttatgtacggttagattttagatataaatcttgggttatctactaaaaaattaaagtcagctaatcaaaacagtacgtgggtacttttactattatattactaattatttaattaatataatgtcctacaattttatttgctttgatcaaattagtttggttggttggatttacgaaaaaaaaaaaacactttaatatatattttgtattttttgaacaatatgaacgaacaactcttaatatatatttaaacctaacaatttgagttctattgttcttacaaacaagtatgtgtgcatatgtttgtatatcgataattataaaataatgaatgtcagcaagcattttattaaatataattatttatattattatattaaaaataaatttaaacatatgaaaagattacaaaatatgtactgtgacatatgttggaaataaatattatattacttttaatatgtgtttgatatatatatatttcagatgtagagagagattactatgagctgttgaaagtattatgtcaaaataataaggagagcatcgagtttcttagtcgtctgttttcaactagagattcaagccgtggtgtgcagctcattgattgcttttcctatttccgtacg

SEQ ID NO: 182019 - DNA, 517 bp, Cannabis indica
ttcgatttgaaaatgcttggttacgtgagcctatgtgtagagaggttgttaggagcaattgggaagctttgaatgggagggatttaatggataaaattaagagctgtggggaagccttggaggcatggggaaaggattttactgggaattttaaagaaagattgagcaattgcaaaagggatgttcgaatgttaaagaaaaaaagagatgaagcttcggttaagttgcaccgtgagaagcaagaggagttgtttgagatcttggcacaacgagaagtttattggaagcaaagatctaagcaattttggcttcggtctggggacacaaatagcaaatattttcatagttttgctagttctcgcaagaggcaaaatcatattcagcgtcttcagagagatgatggggtgtgggtggactgggaaaccgggttgggaggagtaatgttagactactttaacaagctctttgaagcctctaatgtcgatatcagtaacgtaataaatgaagttcaaccttc

SEQ ID NO: 182020 - DNA, 455 bp, Cannabis indica
attctcgcccaacttaaaacaaaaatctctaaagcccttgatcgtgttagaatttagagatatgatgaatgattgttccatctcaaaaccaattgacaatggaaggggtagttcattcatctaaaatgccttgtctacaaatgttcatacaatacaaacaaaaataatacccttacctaaaaatttcacatttgaaacaaaattgtgaacaattgaaaataaatattactttcacaatgatttgtgacttaaagcactcacaacaagtgagttaaaataactaaaaaatataaatttagctaaaaatgttcaatatgccactatatcatgtgaggtataatacctcaaacttttagctcatcatttttttttttgtatattttaattatttttctttctactctcttatattattttactattaaatatgggtttaaggcacgacaactacatct

SEQ ID NO: 182021 - DNA, 573 bp, Cannabis indica
gtgttgttcatctcttatattttttttattatatagatatattgtgcttgatgagatataatttaaaatatagtatcttcatatgtgtaagtaacagtattgaaattagaaatattttatttttaaaatctatagaaagataacactttgtgataaatattaaaaatagtaaaattaacaaagaaattgcatgtgttattataaaagaataaatgaaaaagaaaactatttctaaatttaatatattggatttgtgagtgatgatgtagttctttttgaaaaactatttagacctatttctttctttaatagcaagaaacaatataactactatttatgaaagtttttatattttgtttcataagatgacaagtgtaaaaaggttttaaaacaaaaaaaaaatgaggaatttatataaaaatattaatgataaaattggtctatatgaaatatttaataagagaattaattttaataattatgtgaaggtgaaatgtatgccttaaattataatgatgaaaagggaggtcacgattgatatgactaattgcttctatatagaaatgtatattt

SEQ ID NO: 182022 - DNA, 724 bp, Cannabis indica
gataacattatgtaagtagaaggatcttcgagtttagtactcagaatttgattcgctatcctaatcgccatttgggtatttccccgattcttgcaagaagttaacaatgctgcccaaatagcttcatcgagctcgaaaggaatcaagtttacaacattctcggcctcatcaaaatgccccgatcgactgagaagatcaacaaagcaagtgtagtgttgaagagagggattgattccataatccttgatcatcgaatcgaaaagagctcttcctcttttgactaaaccaacatggctacaagcatagagcaaaccaacaaaggtaacttcatttggcttaacaccaaccgaaaccatttcatcatacaaatccaatgccatcttggcttgaccatgttgagcaaaaccaacaatcattgatgtccaagaaactacatctctttgtttcataccactaaagatttcatttgcatttgaaatatcactacatttagcatacatatcaactaatgcattacttataaacaagcaagattcataccctaatgatatcactaagccatgaacctgttttccaagctctaacacagccaaattagcacaagcaccaacaatgctcgaaagaactaaaggatcaattatatcaattctttctcttctcatctcaatgaaaaaattaaaagcatcattaccattcccgctttgtaccaatccagatatcaacg

SEQ ID NO: 182023 - DNA, 611 bp, Cannabis indica
aaaaggagtatagctttccttcccacctagaggtcttggattacctcaactcctacgcccggcactttgacgtcctcaaatgcgtaaggttcaattctaaggtggtggcgctccgctacctgggcgaaaaaactaccactgacaaaatggatacactggaagaatatggcagcctcctctcgggtcaccccgtttgggaagttgctgtccagaccaacaactcggacgaaattcaggtatgttatattaaatgtaggtgtttatttttttttagatttttttaataaacattacatatatctaaaaaagtatttgtctattattattttcttttaccaaatctattgttttcattttttaacaataaaatggaaaatgacggactccgaatttttactttgtggagacttatttatcattaaaaaatatttatacttatattataatcactcttactatatttatttaatattgtgggggcttttttattattttagtttataattatcaaattaaaaaaaaatacatttaattttttaaaatggagtatttttgtctagtggggcgtatctgtccctgattatttgccccgatcaatattgtgatgacgc

SEQ ID NO: 182024 - DNA, 808 bp, Cannabis indica
attttgctttgttgttttaaatttaatattttttattaaaaatgaaaataaaaataaaataaatttgatatattatgcaattttttttttaaaaaatatgatatagtgacactctgtggttttattggggaaattaattttttaaaaaataattaaaaataaatatagtgacacattgtgagtgtggctgttgtgtttagagtctcacaacttgagattctaaaagtctacagtgacacgctttgagagagtctgaaaggtttaagtaacgaagagtcactatatttttcaggacacccacattagtgacgtggagtgaagtgtcactaaagcattttggagtctcttaacaagtgtcattgtcgcccatttttgtagtagggtgcataatatattttgtgcatctttttattctagttttttatataatatatataatcagtgacagacccaaaaattttactttgagagggcttatttatcattaagaaaatatttatacttacattataatcactcttaatagatttatttaattttgtgaggtattttttttactattttaatctataattatcaaactaaaaaaattacatttaattttttaaagtaaaatatttttgtttgtgtggatccgtcgctgtatataatatatatgtactgtaatatttatttaatctttttattagttattatattatatcacatgcagatagagttgtaatatattataattttttttgtattatgataaaatcactaacaggaaacatcaaaatgaatgagagttgatgggtgggaaactaag

SEQ ID NO: 182025 - DNA, 697 bp, Cannabis indica
aaaagcagccggtagagaacaacatttagcttaatgatttgaacaggacccattacaaaggaaagcacaccgagcagagcaaccatggttgtccaagttgcaatatcttttctttcacttgcaacaagcaattagtcactgtttgaatcaaaataagaacactctttctaggactttgactccactataaatgataccaaagccacaagataagaagctagtaaagtaacaaacaaataggaatagagagagaaaaagactagaactgagatcacttaccagataaaaagggtaagcaaacagtgaaacgatagagttgttgcatgacataaatacaaacaaaaacacatatattgtatggatgccaagattcattgttttctaaattataaactctaaaattatgtcaaaacatgttaatttaaaatgcataatgtgtagagaaagatagttacttggaggcagaggcaagccagtttcttcttatgtgcttaagatagttaagaatcgcattatgagtgaaatctaaaggtgccattgcccaagatggaagctctcaaaacctcattatctacctaatggaattttaaataaaacccatttatctaaattcttcatatacaattatatatgatatatattatcctgcctgtttatagaagcttcagagaaccatccttctgcaacattgagttta

SEQ ID NO: 182026 - DNA, 558 bp, Cannabis indica
ctcaaacaatcacatgtcacaaagacaagacaagacaaagacaagaaccgacggtggctgtcgttgattggcgtcgccggccaacgtgaaccgaacggctgacaactcgccgacaacgctcctggaggctatcattatcacacacaactctgaagataatcgcacacgaccctggaagcttctcgtcgcctctgtagggtttctctctcctcctgttttcacgctcctataatagaattgtattagttttaaaatattatatatttagatgtccataaaaattaataccacatacagtttacataaaaatattgaataaaatataatttaatataatactatacaatacaatacgatgtaatacgatataccaaacgaatcctaaaggatgtaatagtaatgttattatgttatgaactttacttattttttaggtttatgttttaattggttaggatagtgtagtgtctattgagttttgtcaaccatttaggtaaaaattaatagaaacttccacacagatcgatatgatccaagtgacatcgctataatagccac

SEQ ID NO: 182027 - DNA, 562 bp, Cannabis indica
atactatgagtcaagttcagattagcaaaaactatcttccatcctccagcataaaccatcacacaccggccaagggccgtttctcacaatataatcaacttcctacttttttgtcaatctcaaaatgaaagtattagtgccaacttccaaaagcttccatccattggcagttccatttacaactaagaacagagctaaaaaaccattaaagataatctttttcaaaaacaatctaggcaccacaaacttagcattaacatcattacctagcttcgagttggatttgaaggagatggagaaatcctgcaccccaattctccacttggacttcttccaaaggaccttccattactcaagcaacattctaggaggaccaagatgtatacacaacgatactcgagaatacaaaccctagaccacttaaaagaggatcaaaaactttcctctaaataaacgttcaccaccagtacaaaaaaggaactcgtacagagagcatttttctggaaataaacagacattctccattaaacctatgttctttgtggtatattcattttcaagt

SEQ ID NO: 182028 - DNA, 615 bp, Cannabis indica
ccttcttagggcttaggtgtggctctggtccgagttgatgcttctacatagatgggtcttatcctttgcattgttgttttgccgctcctctcaaggattggaggggcttttggttttgttggcctcgtttttctactttgtcgggctgctactgactttgactcccacattagtatgataatgtctgctttggactagattctcacagttttattattgagaaccttcccaaaaagcctcatactaatggagtacgtaaaacacttatattcaagacaactcttgtctatgcttccaatgcgggacttgagttgataccccaacaattttttcttatctgtcttgctagaaatcttcttcttaaatgaatctttgctggtttggggatgacaatgacggggttgtggtgtttctcgggttctggttctcttctaggaggttgggtgggggatcaaatggttaggcattgtcgatccgctgagtggttgatgggtagcaatcccttgctatggtcattgggtctagtgcgatggggtttagagactggggctagattctggtaattgtctaatgaagagggtttgtatattgcttttggtttgatgagtgtcgatc

SEQ ID NO: 182029 - DNA, 598 bp, Cannabis indica
cgaccgcggcctctaccgcgtccacgggggttttggggatttctaccaccccgaccacctccggtctcaaccaattcaccctgccttctaacgtttcgctggtcgtccattatttaggacttagcctgcgaacccacaaggcacgtaggttagacagtggtcaaatatttcaggaccgcaattaatatttatttaatcatatatacaacaccacatatcttaaaacagtttgcaaaaagaaataaagcttacggaaccgtgagttgaactcgacactggccttgattgtacatatcttgacggtcatcagtgaacaacccggtggctctgataccaaactgtaacgcccgtattttataataataataatactcggaaattaaattttaataatttatatattaataaccatatggatcgggatcccgagtatcaaaatttaggttaaaagtactttactattacatatatatatatttttttttttttttttaaaagtctttgtcggacatgcattttccaaaatacagaattcaaaataataaaagaccgaaaccctccgggttgcactgccgcgatatgtacaatcatgtcgagt

SEQ ID NO: 182030 - DNA, 536 bp, Cannabis indica
atgatattccgtattccaaattccaattgaataccagaaatgtattcaggatttgatctgttcaatgagataataagataaagacataataatcagaaacaacatagaatttctttttttagcacttaacgttttcttcaattgttcaaaaaagaatttacagagaagagaaacattttttcacattttttttagtcgaaggttatttaagatcaggctaaatgaattcgatgtcaatagtttgatcaatttggaccgtttataattctttacttcggtcacggttttaaaattcttgtttgtggttcaaaccaaaccacacagcataattcttgatatatacttaataagatttattttactgaatattgatatttagtgacaatcttaggtctaatattgataatatctcaacattgtattaagaatatttatttttattgttatttacgtattataagctttaaaataaaaataatttagtgaaaaaatactaaaacaattacgagttacaaattatggttttaaaccaaacc

SEQ ID NO: 182031 - DNA, 1059 bp, Cannabis indica
aggatagataaggataatgagtgtgcgtgatgtgttgacacgtcaaagggtcccacctactacgtatgattgtggttttaaacaacaattgaatctggttgtattttgatacagttatgtgggacccacatctcaatcaactaacatttggatttgcttacgtggccttatgttctccaatataaaatttacacaataataataataatagtaataagaaaaaaagccttaaaaaatttgtgggatatttcctcttgatccttttcttatccattttgtgtggtagaagatcattttaaattttttaaattttttaaattttaaggttttatttagtttatgaaaaaaatttaaataaaagaactacaatagtattcttgtccacaaactatatttgtgaattgtaataacaaaaatggccttttctaaaaaaagaaaagaaaaaaaattattctcgtgccctcttaacatactccctttattattattattattattattatataggtattttgtgattatattttttaaattttaaaatttagtcacgagcaattcttaaattaaaaattaaagttaaactctctaacatctacaatcatttctgcatttcttctattggtctggctccattatgtgcccgatggctcctcagtgtaaaattttttttaaaaaaaaaactaattaatttttattattagataaaaattaaaaaaaaaatgaaaataataaaaaaaaaaaaataaaaaaaaaaaaaacaaaagaaatagaagaaaggtcgaaaggaggtaaagaaactaaggcaccattgtggtgcgaagaagaagaaaataggtagacggtcagaaggaggaattgtgattgcgagtagcctaaaatcccaaaattttacacctcgtggacgagttcgaacccaggaagaagatctgcaaagtaccatctgagtcccgtgagttctcttcttctctttttttttttctttttttttaggttttttctttcgtcttgcactatgccaatttttcttgatttggcagcgtcgtggtgggtgtgagtttt

SEQ ID NO: 182032 - DNA, 588 bp, Cannabis indica
gtggtgaattctgaacactactgatgcctcagactgtgaagttttcaaattaagtatatgaagctcccatagaggcctacaaatgttgagtggtgttgttgtcatgtgcgagatgtagtcttccataaatttatctgaatcgtccattgttggatcatcaatgtttggaacgatcacatgttcttctaggtttactgagcaaggaatccatccttcatccttcacctacaaacaatatgtaggaattttaatattttcatgcaacctatgtataaatatatatatatatatatatatatataaaattatcatattatactaatttttttttctttaggtcatataatatattaagaatattgttgatgtgtatggtaagaagtatgataatgtatgatatttatcttaaaattaattaacaataagaaagatagatcacgatcctagttgtttgggcttttaaaagttgcttttggacttcctgaaactccaaaaacacttctgttactagttatgtaaccagtaaattttaattttaaatctaaaaacctttaacataaactaatttagtagctttctttaaaaaaa

SEQ ID NO: 182033 - DNA, 597 bp, Cannabis indica
cgtaagaacagcaatctcggcctaaaactcgttcaaccgtttcgttccaatggcattggactccatcctttcgctgcaattttagtcccattgtctaactctcctttgtaaacaacaccgaaacctgcctctccccaaaatattatcttcactagtacttgcatcgaaatggcaacatttccaccctcaaacaatggaaagtcattgtgatcgccactattctggctctgcaattcactgtccattgcgctaactttaccaatttcatgattttccacccttccaaacttcttaacaaaacgtttataagacacaaacaatacaacaagaacatagataatcacagcaattacaataccagcaatcataccagccgaaacccgattaccattccctgttccattcgcgctcccatcagtggaattgctagagccagagccagaagacccttggtggaaaactaggaatatcaccagtaagattattattagaaacatcaagaacttgaagctgaggcaaaagggtcaaactactaggaattgaaccagtcaaaccattatcattcaaatacaatttcttcaaagatgtaagattagc

SEQ ID NO: 182034 - DNA, 848 bp, Cannabis indica
gaagattaagcgatgtggggaggttctctcaagttggggtaatgaatatactggcaacttcaaagatcgaataaaaaaaatgcaagaataatatcaaacgattgaagaggttgagagatgaggattcggctgcagaactgaaaaatgcagaaaaaagtttgacagaaattcttacacagcgtgaggtgttttggaaacaaaggtcgaagcagctttggcttcgtgaaggggattccaatagcaagttttttcatgccaaagctacatctcgtaagaagaataatgctattacaagactacaaaacagttcgggtacttgggttgattggaattcaggtttgcatgatgttattcacttgtatttttctgagttatttacctcaactaatgctctaactaatgccgtggtggctggtattactccttccatttcgagtactcataatgaagatttgatacggccggttcatgaggatgaagtaagaagggcgttgtttcaaatgcatcccgataaggcacccggtccgggtggcatgactccgggattctaccaaaaatgctgggatgtggttggctaagatgtcgtgttgcaagtgagaaacttctttgattcaggtgtgttacccgacaatgtcaataatactaatattattcttattcctaaaaagaagaatgttagtagtatgggtgacttaaggccaatttccttatgcaatgttttgtataaaatcatatcaaaagtcttggctaaaaaggttgaaaacagtgcttccacatataatctctgagaatcaaatcagcgttcattcctggccgattaatctctgacaacattatggtttcctatg

SEQ ID NO: 182035 - DNA, 573 bp, Cannabis indica
ttttatctaagataaattgaatatttaatatatgaaaaatattatttttttaccattgacgactaacatcaaaaataacttttattttttatattttgttatcacattaataatcaaattttaaacttgagtcaacttcaatacaacaaccaatatcatataatatacttaaaacatctatttttcgttttttttttttttttgaaaaaatgaaatatcaacttcattaaaactagcattctgaatacaagatggcatgaaggtcacccataacattatcctcaagaatgctacgattagagtagaatcgagagcgtctagtcacaaaatgggccactcgatttgctgatcgtttaataaaacgtaaactagtataaggtgaagaagacaataaaattttacaatcattagtaatcaaaccaaagacagaagacatttgttgtttactaaagatttcttgaacagtgagtaggctgtcagtttccacctcaatcgtgctccaccctttggcttttaaccaactaagggcctccttaacccctaaagcctcaacaacctcagccttgtaattcc

SEQ ID NO: 182036 - DNA, 600 bp, Cannabis indica
aacaatcactgaaacagtaaaaattgaatgaagttagacaaaaatctttaaatctagcaatctcaatagtgtagggaatttttaacggctaaaaaagttcagggggtatgaatttgatacatgtctaaagttcgggggaaaaaaataataattagcctttaaaaaatatgtggtataatttattactttaataaaacagattatccaattagtaacttttacaaaacataaaatccgaaatgacatttatcttatttttattaattaattatttttattaattttaagtaaaaaatatttttttttattgtttttagtagttgtaaaacaattattacttatattctttagaataaaaaaaaatactcctaaccaaacaatgaaaacaaacataattatctatttgctttgggaatatttgttctccttctttattcaattttaaagatttttttatctatgaaataaaagattgagatgatcataaatacgggcaatgaattaatttataaggaagcacgaaaaattatcttctgactcactacaatttttttttttatttttagttctacaaataaaattagtgtaactaaaaataaa

SEQ ID NO: 182037 - DNA, 775 bp, Cannabis indica
ctcccatcaaaaataaaaatctttgcttggagagtgatgcaaaatgcactttctgtggctacagcactttgcagaaggaaagtaattaattctgtcacttgttccttatgtaacattgcatgggaatcaatcggtcatgctatgtttaattgcacaacagctaggaaggtttggagagaaactaagttcaccattgatcatacacatgcacaaaatatgtacaatggtgattacttaattcatctttcaacccttcactcaaaggaagatttcgaattgattgtttgtacaatgtgggctatttggcattatagaaacaaagtcactcatgggggagttccgagaaccagcagcaacattgcaacttttgtaggactcatttggaaaaatttagcagattaaaagcaaaaaaccagcaagtttctatctgtagcagccaacctactgctgctccaaatactcagccgattcgagacaaccccagggttataccatggacaccaccacccaattcaagtctaaagttaaatgtagatgtggcagccaatcaagagttaaagatcttggggattggtgcgatcataagggaccatcaaggcaatgtggtggctgctctatcaaagcatgtacaaggttgtttcgttctgatgaaatggaggccaaatcgcttttcatgtctaatgggtgttgcaattgcaacttccattacacatattgaaaccgatgctttgcgtgtttcttcgaccctcaattctacatcttcaaacctttctag

SEQ ID NO: 182038 - DNA, 658 bp, Cannabis indica
attgcaaaataaacacttcctatgcttaacctcccttggacccaatctggccggtgtggggagaatgtcagaaagaattttccaccccagaaactttaagcgaggatgcaggcacagcttccaccacttttcccaaagtttattaggcgtattgaaacggtgttgttggctagcccagtaagcacttttgatagaaaatttgcccgaatttgcagcattccaaaacacaatgtccgtgccccctgttaaaggcttgatgttgagaatatcattagcaattcctccattgaaacactcacagacaagttgctcattccacattctagtgccctccacaaatagatccttgacttgccaaaggggctgattcttcttgaacataaaattcatcttgatttcctcctccttcctaccggggatccaaggtctgtcccaaatttcacaattcccatccgcaatcataatgcccccttcctccacacaatatttcgcacctctaaaaagcttttccagcatctcgaatcagtcccttttttttcaacagtccaaatcgaacagatatgacaatacttatctttaagcattttaacccagtcctttccttcatcttttagcatcatccaaaagagttttgcaaatagagcctgattcatatctg

SEQ ID NO: 182039 - DNA, 446 bp, Cannabis indica
aatatgtcaaaaccaagtgaaagaagccactaagtggtgtggaaaccacttggctgaccactgccacacttttgggacaattggtggcagtggtcggccactccctcgaaggaggattttcattggctaaattgtatttccaatatccatgtatcaaatacaagtgagacaagtcacccgaggcttcataaaccccttatgcgaccactgccacttttttattggcaaaatggtggcagtgttctcctaagtaattggccaagaactaatgtgaccaaagtggttttctaacatccatatgactaaaataagcaagaaacgccatccatggattcccataagccatggctggccactgccacttttcggccccaactgttggcagtggtctcttgttagggttttagacatcgaaatgaggttttggggtctcaaaacccccaaaa

SEQ ID NO: 182040 - DNA, 827 bp, Cannabis indica
aatggatttgtaagacttctaaagcgacgtgagttgttgttgtgtgaagaccaaaagtgggaaagtggaaaaagcattcagctagttacacactttaattttcaagaacgaatttaaatttatgaatttttataaagtctatacgatttctagacaattttgttgcaaacttacacaaaaatataaacttggataccggtaagatttttcgggctcaaatctcatgattgtcatgtattgttacaatatttaatgccggcaagtatccgtaagtacttgaaaaaagaaatctgggacacaatccttgagttgtatgtgtaattcaaacaattatgttcaaaaaaagttaatgtttttaatttggaaaatatgcaaataaatattctaactattttgcgcaagttaaaaacaattttcccacgagctttctttgacataatggttcatgtagttatgcatctccctaaagaagtcatactaggtggaccagtgcagtacaggtggatgtatctcatcaagcggtcaatgtatgtgtacaagcaatatgtcaggaatcgttctcgtctggaaggctctattgctgaatcttttgtggttaatgaggcattaacgttttgttctatgtaattttaagaagtagaacctcaattcaaccgtcctgaacggaacaatgaaatcatcccaaacatgccaaatcgacaattttttgtattcgagcatgttggccgaccactgggtatgaggacagttgacacattaccatgataaactagcataaggtagagtggtacatattgaacaactacacagagattgagtcatatatc

SEQ ID NO: 182041 - DNA, 623 bp, Cannabis indica
agcattggtcaaggttctctggagaaacagcaaggtggaggaagccacctgggagctagagtcagatatgagagctcaatatccagagttattcaggttagatttcggggacgaaatccttttaagggggggatagttgtaaagcccgcttagttaatttggaaattagcagttgtttatgattaattatgaaattatttatagctatttaaataatttattatactgttatttatggaattcagaaatgcatggttatgttattcagtagttttcatattttgcatttccggtgcccggtattttggaactcggcgtttggctcagtagaaatcacaacttagtatgttagtagtttgggacgggttattagacattgggaatgtcgggaatggccgggaatttagaatttcccaaaaatacccctttagtatgatttatgtggttttagggtggaggggcaaaatggtctttttgccccattagtgttttgtcttttgtgactttattattgaaaaataaatgtttattgtttaattattggctgaaataaaatggtataagtggcttttatttcatttttctttcttcattttcaacacttagcaaaaaaattagaaaaa

SEQ ID NO: 182042 - DNA, 735 bp, Cannabis indica
atatatagatatataaataaaaagaaaaaaagaaaccaaatgattcttgaaattgtttcagtcagatgagtatatatataaatatatatttagtgtatcgtgactttgaaacaattcaagaactttaacaaaatacttacattgggtcttaggcagagattcatgcttgaagcttgggcagagactcgtgctgataacgtgttataaaataatataaaataatataaagtagatgagaagaaagaagaagaagatgaagagagaaagagaaagtgaatgagaatttctgagttgtttattccaatggggtgaacccctatttatacaaataagtgagatattaagaaactaagaaaaggaaaactaaggaaaagatgaatgttgattacaattcatggtaataaataaaagatttggacatccacataattattaatatttataacaatattgaattaaaatgagacttttataattctgagagagagaaaatataacattaattatgggatgaaagttaactattgacttaactttagttaacgttataattttttttattaaaatacctaataaatgaaaaacaggtggcttaaatttatggtgagagagagtggagacaaggattttgggtacagaagatttttttaccttgaaacaaatacatgtattagttattgattgaaaaatacaaagaaatataaattacagacattaaaataaaaattaaccaat

SEQ ID NO: 182043 - DNA, 1003 bp, Cannabis indica
aaacatctagtagtcttgtaaataaataaataaaaaaacacacacggcaacaatctcataagataaggtttaattacaacaaactaaatattgtaattaattactattataattacaattcttatttattatattacattattattacggttactattaacatgttagaatcaatttgcaatgtaaacttttttatttatttacgtatttattttttatttttctaaaagaaaaaacattattttgtttctttcttttcttcttttccttaataaaagtccttcaaattccctatataatatacgtatttagtttgtttgttttttttttttccttttttcccttaataaaagtccttcaaatttttggttgggaaaaaataggcaccctcaataatttgtatcaatatgtggcccttttttagttatatgataacgtgtagcttttttattttattttattttttttttctaaaaacaattaaaacctacataaaataagcacatgttccatacttacctaactattaattcatcttacctaaataatttagaacactttaataatctcgtacaatatcatattgaatgatgcaataatatctatcttatgtttggtcccaatatatgtatatattatggagaattattaaaaagtacaattcgtttctagcattcgtctcgatatcataacgctattagtataattatgtatcgggtctcatgtagcttaaaaaaataacttttaaataatatcgctaatcaatcgtaaatgatgcccaataactatagtattttatttattaacaaaataatataacaaattcttattgattccctagattgtctaagatcaaaaggtgagatataagcacatgatcccattttaattataaaaaacataataataacaaatatgctatatgtataataaaagtcaatactataatttcactcaaaaaaaaaaagtcacatactataattacatctattttaagcaacat

SEQ ID NO: 182044 - DNA, 747 bp, Cannabis indica
gttacctaatatatacttacacatgtaatggagatgactaattaaatgaaatttaaatttagctctatttgtgtaccaaagtgtaccaatgtagagaaatgtattaattttatttatttattcataatttttttatattgttaatatatatattttggtagtaatagtatatatatattaaaaatttttattatacaatatatcatttttttttattatgattctattttttattgtttatttgttgatgtgacatataatttttttttaatggaaaatgcattatgtgacatatacttttattagtatactatatatttttatttttatttattgttattatatatatttctatcgtaaggtatatatattttttgttatgtggtatatatttctatcattttattttagatcatacatgactacaagtttaatttttattttattataaataaatgtgatatataattttgtaagtacaccatattttatggttgtatataatttagttaatatgatatatacaatttttttaataatataaaatattatttatttttatttttaatttgtaggtatatattttttagttgtgtataatatatcatttatttaagattgatatttaatttctatattattatatataattttgttagtcatgatatagtattgctataatttctttgtacgtactatataattttattattacggttatattaattttttaatgtatacgtatat

SEQ ID NO: 182045 - DNA, 777 bp, Cannabis indica
gctccatgtagaggtcttcttagcaccaataaagagcttgtggttgtcaaagaggattccgagggattggacccaagtgaagtctctggtcatgttagggtttcgtttcccgatgaagtgggcgttgatgtggagattcgagtcggagaccaagcaaaagtcatggtctttcttgccgtggaagtaaaaggtgagtccgtcgccgccgatgaagcgtgggtcttggcacacagctcctggtttgttacaatctgaatagtttttttgtaaaatttcatattagtatataataataattatgatattaatattatatttatcacgatatgtaatttgtgaaaatagactattttgcaaaagaataataaggaatctcaatactatcttacatgatatatttttaatgtaatttaatttaatatcaaatttcacatattttaatttaaaataaaaataatcgtaccctttaaaacataatataacatatatataaagtatgaagcaccaaaagacatagaaataaattataaattggtataattagttattatcgaatttcacacagtttgactatacaatatataacacgttaaattgatatagtattgttgggcactataaaatacttaataacaacgctcgtaaaaaaaaataggtaattaaaataaatttaagagttagcttaagcaaattaacttactgcaaacaggactacatgtaacacaatccacctcgcattgatcaggacaagcgctagggcaagtatgttccatgcca

SEQ ID NO: 182046 - DNA, 564 bp, Cannabis indica
ttttctcatgcaaaacccttatcagagtctgctcgactaacccagtttttagcctataagtaagacttttatcccttcatgccaagttacgaattttttgacaagaatacttgtgtaaaatactctatagccaaaagttttaataatattgactcgtacactaaagctagttaacgtcacaaccacttaaaaattcttatctcattttacttttataatcattttccccttagcttaatctttttattaattcgtttttttgaaaattttggtaaatacttttggtatttttattaaaaataaaatatttaaataatgtagggaaaaaataaaagaaaaaactgatgtatgatgtaatgtaaaaatttgaggtaaagttaaaaaatgttagtaaaatattttaaagaatagagtaaaaaagttaatgtgagtgctcttataatatgcatttttttaaaaatatttttttttattttaataatatttacttttttaaaaatttccttaagaaaaatatcatgcaattctgatacatacaattacgttacacaaataaaatctatc

SEQ ID NO: 182047 - DNA, 1187 bp, Cannabis indica
ctacaatacaatgtgattgaaagggaaaggttaaagagttaatttattaaaatggatgtttgtgtgggtagtggtggaccaagaaaatcttcatgatattgggtgtagatttaaagtttgagaattttttttgaaaggtgtaaatttaaaaatttacataaaatggactactgtattgtaataagtggcttcagctagtgttataaatataggtcaggctttttgacactttttgacacgatacgaatacgacccaacacgaaaaaatatgtctttcgtttaattgttaaagcttttcattacttaattttaattgttaccatatttgatcatttgcctttttatttaaactcaaatttaagcaatttgaccatacttttctcatttatatgtaatatatcaaattataaataataaattctgattttatataattgaaaatagtttgattatatgataaaattttattaatgtgcaattttaaaatgtatgacaccatatagatattaatgaaagcatacaataccaaatatattttgatgaaatataaaatatacataatgagtatacttttctttttcttttttcactttttcattcacattttatttttaattatttgtttaattttaaaaaattactttctcacaattgtcatcatttttatattacttggttcaattgttatggacttactaattttttttagcttatttttacatgattgcaaagtaatttattaatcgacacaaaaaaagagatcataagttcgaatctccttccttgaatttatatatatatataaaatagtaacatcagtaattgtggaatcaaaatgaaaagtaaaataaattaattgatgaaagttgaaatataaattattatatatgtgtggtcgtactcagggccagtttggcacaactgtgctgtggaaaaaaatagttgtagcaaaactatgaaaaaaaaattaagctaattgtttggtaaattataaatttcaaagtactgtaagttgttaaaatctattataataataaatgaataatgttataatctagtttattataataaatataaaattttattttatataatattttattttctatatatttttaattttttttcaaatataaatttattagggcatttaataaaaataaattatagtactttttattatgttt

SEQ ID NO: 182048 - DNA, 857 bp, Cannabis indica
gatagaaagagatttatgtgtggttagtttattcttgttaatattaaggtcaaagtatatcaacgacgagaaggttgagaactcaatagacaaaatagtaagtaaaaccttgaactaataaacaaaaaggaatgaaatttcaacatccagaaatcagacaaaagtaaactcatattacatttttggctactgaaaagagtaaaaaagacaaaagacccaccaccaataatccaaaaatacaagtaatttcatcttcactaggagccaccagcagcaacagcagcagcagaatcgttgggtttgggcaaaggggtgtattaacttggattctactgtcaatgcaagaagaaatctccatagtccatgattctcttgcctgagcacaaccgacccaccattactgccattgctcctaagatgagaatagtaactaagacgccaacaacaggaccatcagaggatgatgttgatggaccatggctcactatgtgctgctgcagacactactaccacactcagcggtggggcttgtgatgacattgttaaagagattaattaacacaagctgtatatacatgaatccttattgcatggaaagttaggtaatgaggattacaatagagatgattacataaactaaaattaaaaatgactccataccctttctctatataaatataaaaattaaagtagcaacaattttgtcaaattaccaacacaaacacactgtaaatcgatttcctattatcattcgtattccatcatattactataactattactatttcattacaccaaaccaaaatatcacatgaatatcatcattaccgatttatgtactaagtgtcatttaccta

SEQ ID NO: 182049 - DNA, 514 bp, Cannabis indica
ctttcagcttcatcattgccatgaccgtcgaggtagttaggacggtagtcactattgacctcgaggtcttcccttctccccatgggcctgtcgttcagggtcggtcctaaagtatatggggcctaaggtaaaattaaattttggggcccctatatatatagtttaactattatcaaatgatagttctagtgctttagtataatggtaaattttactataactacaccttaaactatatttttaaaattaaaaagttaagaaggttggtggttataccaaactttaggcgtagcacatcagaagaagacacgtgtctagctgggaagaatgaggacacacacacaatcgtaagtacacttgatgtgaataactcgttaagaacataattagacagagtatgttagttaactcggtctgactagacagtctatgtcgagataaaatagtactaaactgttgacttgtgtcgtcgacgagaaaccaactgtaaaatgcaaagtgtgcgatgacgcgc

SEQ ID NO: 182050 - DNA, 916 bp, Cannabis indica
ttattggagagatcgaactctgtcgaagttttaaatatatacaataatacatatatattatagtgtaaactaatttgcagaataaactcctaattttaactcgcattacagataaatatcaaaatttaagttatatttttgaaacatgtgtatcgaaaccagtggcggactcaaaatttttgaggatttttgatcggtaggggcttaattaattgttataaaaatgtttattatttactttttattaaaattataattattttgtgggggcttgttagtattttttgttctataattatttaactaaatgaaaagtatttaattttttttaacactaactttttttatgggctatggcccccacactattattattatgtctgtctctgactagaacatttgtaggtatctaataagtgtcaagtgaataatcatgtgtgtcagtttatgattggtccacatcattaaatttttatctttaccttaaaaattaatttaaatatactaataaaaaaataatcacgtggataatgatttgacacttaacagttatgtacctacgaaagttccagaactataatttagatattaagacagccaaaaattaaacttaagtatttatttgtaaccaagagttaaacttagccatttacgccgtaaattactctttattgtaccaacagatcaaacttcatggttgactatgtgtgttgtaaacacttgtgtgaatgtgacataatgactcatttagctgattgattcatcgtaataatttttaattattagataaaataatttaaaaattttaattaacgtgtataaatatattttaaaattttaatatagcgtatgtatatttttatattttatatataaaataaaaatataaaaaaaaaaataaattttttacttatac

SEQ ID NO: 182051 - DNA, 772 bp, Cannabis indica
ggagttaattttttttttactaatgtagtgcaggtgcggttatcactcgacagagtcctgatggttctatcgtggaagctttgagagttcagctgtgcttaaggctgaaactctagctttacttcatattttttgtctttttgtagattgcggggctggaacaatcttgtcttcatgacagattgcaacattttggctgaggcaattggtagtaataaaaagatcccttcttagaagattagttatgtttttattcttctttttgatgctttggaattgcttccccattcccatgtctcttggttaatcgaaattcacaatagtaatagtgatgttgatcacctcgttaattgggcttttaaaaattctatttttgagttgtgttgtttccatcgtagtgtttgcttaatttagctagtttttatttaagagtaatgttattgggcaccagtggtgcctagcacccttaagacgtgtcgccttacgattggctattatattaaactatatatatgagacttaaaccaatagcgatattgacacgtaaaaagttgttttggcaccactgatgtcttttagcatttctcttttatttaatgaagattatatttcaataataaaagaaaaaggacagtgtggtgctaagcaccacctacactcccaacaaaaccccgtcttaacccgtgtaaaggtgtcaacatcgtattgccttaaaatcaaaattatctggtcctcgattttaacacttattaacatagcacttaaatcgtgc

SEQ ID NO: 182052 - DNA, 770 bp, Cannabis indica
gctaataggctatggaaggacaagattgataaggttaggatgctaacctatggagtgttcattattcgatttcactctatggaatacagggaccaagttctgaatggagggtacatattcttcaatcgacgccctgttatcatgaagccctgggatgccaatacgaacttcaggaaggaagatgtcaaagctcttcctatatggatccaattagagggtcttgaacttaaatactgggggcagaggtctctcttcaaaatagtgggaatgattggcaaaccagtaatggtggactcagttactcgagacagagacagattgaactacccaagagtattggtggaagttctaatgaaccaagagtttcctagcatgctagagtttgaggatgaacatggtagtatggtatctgtgggtgtaaagtatgaatggaagccagatttgtgtgctaattgctctggtttggggcatctggttgcagattgtaaaaagaaaaatggtgccaaaagggaatgggttattaaagaagataaacggaaagagaaacccaagattgatgatgagggttttcaagcagtattgaaaggaaaaaaggtgcaagaacaacaaaatggtgtgaaggagactagcacttcaaacggtttcaaggttctggatggggtcaatgatgatatggaatttatggatatgcagtgggctaatgatgagcaaacaggctatacaagagaggggggaggaccctctcttggcaatggataagtttctagtat

SEQ ID NO: 182053 - DNA, 735 bp, Cannabis indica
gcaaaagaattgttatagcaagcatgggctagcaaagatgagcgggaatgagcaatgacttgagtttagttctggagttcgagcgggggtagcattccggtcttaagcaaagccgtcctgcccggccatatgtcctgttcagtcagttgcatatcggtaagcatgattgtagcaatacaaataggcgcggtagacgaaggagctgttttcaacaaatcaatattatggtgggtgcctggctgatgaaatacatcctcagaatgcccttcgtgcctaaaaggttagttcaagggctttgatagggaaatgcacgcacttgttgtcgtttcagatgcgatcaaaaagcctttttttcaagcgtagatactacatatgaggaagatgcgaatagagatgcggaagttcctgttggagttggaggtgcaggagcagtgaacatgactcttgcagaaggaagaaatgcggtaaataaagaggagttccaggcgtaggagttcattcaaatagttgaaataggaggagcaggtgcaaaagtagtagcagtagcacgcgcttccctagtagcaggaaaggaggatagaattagtgcgctaccttctccccaaggcctcctcggtcttcttggacttggtttatgtctgattccacccgaactgctaatgtagggttttttggggtaatggcaccggcacacttttcgtctaaataagttctctttcgtcttccgatagttct

SEQ ID NO: 182054 - DNA, 1012 bp, Cannabis indica
attctgcaaaagggaaacgtagtagtagtgctttaagtttgatgatattttcatcgttcaataaaatgttgctataaattcccaaataatatcatgtcatcgtgttgttttaagaggactcgtttgtcatgcttgaagcagttaatattattctccagtttttaccaactttatcttcttcttctttgtaactgttttctcggatttactcagaatccatcttcttctgggttttgaatttcactttctttgtatcaagtttctactacttcattggtaattgtttcctttttttcttaaaaatgtctcccctcttatcaggtcttgttcttagtacatatttggcattgtaactaaataaaattgtgtttgaagaataattaagtgtgtttggccatgtctcttttcaaaaaacaaaaattttgaaataaatgttgttttttattttaaaaaataattgattttaatcaatattttttttctattttatctcatgcggtattcattgtgtgtgaatacattcagcaacacataaatataattttttgttggcagctatccaaataatagtctacaaacaatatcataataacaaaaagtgacaattattcagtacacttagatgaataacaacttgacaacaacacaacaacaactaaataacttttatctgttccaaggagggatcagtttcaaaagatgttattttggttgatactggcactttgacaacagaatcaatcatggagcaacaagaaaacaaccaaaagcaaacccctgaagaagttgaatattgaaaaatctataattatttattcatcaataaatattgttttggttgaaaacaacaaaacaaactacacaatatttacaaaagaataattaagttgttttgatgtattgtgaagattcttttgtgttatttttacaacatcttattttaacctaaaaataaagtcaaagttgttttcatgttgttgtaaaaatttgttatgaattgtttaatcaactc

SEQ ID NO: 182055 - DNA, 896 bp, Cannabis indica
tataaaaccctaatggaccttcatattgggctttaattaaacgattacttactctgtaaaaataccataatattttactttcgtagttaatacaactttaactctctctagaaaattggtacaactactctaagcaataatatcaactcactaacaacacaaagaaacaagataattatcctcgctcaattaatatccaaaaaaaaaaaaaaaattaaatactattttaatctggatattacattaatttagattttttttaatataaaatgtgattacttacataaaaataaaaatagtatgagtgtgaatagtaaaaaattgtaaaagagagaaaaaaaaaatatataataagtgtttgtatttttttaaaaaataataaaataaaattttgtgagataataaaaaagtgttagaaaaaatatatataaaagataaaaaatgagtggaaaaaaaagagagaaaattggaaaagaaaaaaaaaatgtcacccaaacttacataagaaattaagagaaaaaaaagtcggttaagaaaaaaaatacagaaaagataaaagaaagaaaaattaaattatagaagttttaataaataaaaaaaaagatttataaaaatttcaataaataaaaaaatataaacataaaaattatcttaatttaaattttagaaaaaaattaatatagttaaaaattttcatttaatatatattaatttagaggataaaaattttaagtagcaaaaaaaaaaaaaaaaaaacaaaaaaagaagaaagagaagttaaagaatattgtactatctagtaagttgtactagtggacgagggagtcattcatgtcttttttatttgctagaagttcctaccgagggagactctatttatgctatttattgtgtac

SEQ ID NO: 182056 - DNA, 899 bp, Cannabis indica
tgataatggaagtgtgggagtagtgtgataatggcatactttctctagcttttcctgaatctccagcaaggtgggggactccaatgataacctaaagatgttcttccaatggtggaggcattaactggtttttagtgttatctgtttgggcggccctttgttcttggtcagtcttgacatatttttgtaagtgcgagttatttttcctaatgaagaatcgtatttcttgcttcaagttgttgcattcatttgtgttgtgggtgtagtccgcatgaaaatgacagaacttgtagtatcccttttgctcatgtccttcttcataggagaaggttctctatatggcaccatggactgggtggttgcaaagattgtctctatttcttctgttaggatagtaagtgcagtgaactttgaggcattctcttgaggatgttgttcggagttgccactgaacctgcttttctttccattaccctgcatgttgccattgtttgacctctttccaccttggtcgaactgctgtgattttgtaaattttggtctagctggatggatgtattggctgcagtggtgtgttgttgagttttctttgtctcctatatccacaagccaaactcttctttgagccttaaaaatccatctgctcggtccaagaattctgcattgacccacaattagtcttttttatgtctttcccagaggtttaatacctcctagggttacggctagccttccttcctcggtaagtccttaaccttgtagcttcagtcatgaaacctctaaatatggtagcacgagtttcctatcacgtttttctcctcaggaggaaccttcaccgacatccaagagaatatttttgctcatgtatatccatggtggattgatctttgccaagcaga

SEQ ID NO: 182057 - DNA, 1032 bp, Cannabis indica
tcagcaaacataactactttagtattttcgccgttaattgataatttaatatttaagtgctataaagataataatttaggtactttctccacaaatatctctttttttcaacgagattctataagattctgattctttttttcattatttttaatattaggtgtttgatgctaagcctgtattaaaagaaactctacaagcagaagttgggttacctgtggacaccaaaataccagtgatatgttttgttggtagattagaagaacaaaaaggtccagatattcttgtggaagccattgatcaaatcattgatgaagatgttcaaataatcattcttgtaagtgcataataatcattattacttttacttaccacttagaatgaaaaaaaaaaagaagaagaattaatgaattgattttgtttccagggaactgggaaaaagtatttggagaaaatgattgttgaagtagagaagaaatatcctaagaaagttagagccataacaaaattcaatgtcccattggctcatgtaatgattgcaggttctgattttattgccattccaagtagatttgagccttgtggtcttattcaacttcaagctatgagaaatggaacagtaagcactacacaaaactttattgttcatctttttggaaaattttattgtgtatcaactttgtacttttaatcagtgacggactcagaatttttactgtgtgggggcttatttatcattcaaaaatatttatacctatattataatcattcttacaaaatttatttaattttattggggactttttcttacgattttgatttataattatcaaatttaaaaaattaaaatgtaaatttttttaaaaaagtaatatttttattagtgggactatagcccccaaactaatacacttgggtccgtccctgcttttaatatctaaatagctataaacttaattttaaaaatacagtaatttgcggtcaaactatctaaattgtaaggtttggtacgatcaactttctgaactgaaa

SEQ ID NO: 182058 - DNA, 1019 bp, Cannabis indica
tgcaatcttggatggaaagaaacaacagaatttttgaaggtgttgaaagttctgcaaaagatttatgggagaaaatcaaattttggacagccacttgagtttttaagaccaagcattttgaggaattttcattcctggacttatgtagagatttgaacattttggtgtattttcttttggtttttcttttttgaaattttattattgcttgatactacttttgcttttatgcagtaaagcaaaagtagtatcagtaaccatggtcttcctccactttatgcagtaaagtaaaagcaaaataacacacatgagttcttcatctactcattttcatataaaggatggccccgaaaacagatttcaattttgttgagcgaatatatttctataggaaaaataaaacatcccgtaaaagaagtatttgttgatcacttatactaccccaaatgtctgattgcattttccaactgaaatggaatattacgattgaaattgaattatacatccagaatagaccctaaaaagacatgatcccaagcgaatacttgacatcgtcccccctcttccaggtccatcacaagggaaatgaaaaccaagatttactttatctggtaatcacgaacactcttatcggttcagttcacaatttgaatatattttaaattataattcattggcaattaatttaattttctttttactaaaattttttagaataaattcattgagtcttgttgggaggggggttccaaatgggctaagaatccatgtttcaaccttggatctcctggtattgaggctcttagtctcaattaggcatcaagtgtgccaatgataaaaaaataaaacattaagagtacgtttggcattgttttttgttttttgtttcaaattgtgttttcaaaaataagaacaaaaaatagtttttgaagtggtgagagtgaaaatgaggagaaagtgatgagagagaaaatgaggagaaagtgatgagagagaaaatgaagagagaagaagagatg

SEQ ID NO: 182059 - DNA, 697 bp, Cannabis indica
cctagggagaaagtttcaaggtccaactcccacttcttgaccggagtagttctcgcattacattcagaagtcggttggacaccaatgtcaacaccaaatgatttccttttacttttacccgaggaccctagggcttcaagttccttgatgtagtcttcttgagcttgaaaaaaattagccaaagcctttttttcctcctgttgggcagagtagtcacgacccaaattagggtcacaatgaccacccactaaatgttaaccttccaacatgttcgccttaggcatcgcacaaggtttgagcccaaaagaattaaacggtgatccaggcccacctctcaagttataattcacataacccaatgtgtcatggcccttaagcacgtggcacgaagtaaccccaatatcagcttccccattcggatgggtattaagcttattcaccaaggcaacatggcccactaatgtaaccggcccaataccctcattacctaactgtatcatgccaacatatttttcaaataaagagactgggttcagtgaagacctctctttatcacctttgaaaatcacgcccaagctggtgcccatctcaagacccaaatttgaattatccttcaaaataggaaaagtaacaagctctctaccacgatccagacttggcttcgtcatgctcttaccagaaatatgcaactctcttg

SEQ ID NO: 182060 - DNA, 723 bp, Cannabis indica
aactaaccaaaccaaacacatcctcacgtcaataacaacaatcacagatgcagaaaaataaataaaaacagctaagctaaccagattgctattgcatcgatcgagatccaaacacttgacagccacaacttcattaagcggaatatagatcgctctaaaaacagtggcactagctccataaccaacctcctcaagaagctgataatcttcgcgtttagccgagaaattcttcgaattcgcacctgttctccccatactgttcgaaacccaaaaaaaaaaagaaaaaaaaaaaactacagtccacgacggcggactcaaactcggaactcctcttaggccagtccgtacagaaggagaagaagaagaagaaggtgcgtagtctggtgtggctaaggaactgtagttttggggagagttttcgatgatgatattatatcaagtcgttgaccgccatgagaggaagaaaaggaagctctggctcgagtcgactccagatgaaaccaaaaataaaattaaaattaaaataaaaataaataagtgtgctgacgtgtcattgtgctgttctggtatcgggatgttgacacgtggacggtatcacaattgggaagaatctggggccctctgtctttttttttaaaaaaaaaaaaaattaattaggatttagagggtagatttggtatttaagtagaattattattagtgtggtttgttcaagtcaagtct

SEQ ID NO: 182061 - DNA, 872 bp, Cannabis indica
atattttgagtaattaagtatttatactttgggtaattaggtacttttattttagtagttaactaggtacatatagtttgcataacaagatacttatattttagataattatactatcttaggtaatcaattaattatattttaggtaaacagatacttatacttttatgtaactatgaacttatattttggataacaagatacttatattttgggtagctataatatcttaactaatcgattacttataatttgagtaactaagtactattggatgacgaagctcttatgatgagtggatcttgagaatagccacaaaggcaccccccaattaaaattgagcaacagtagaaaaaaaatacaatataaaaaacaaatattaatttaactgtgtaatattaaattttgaaaatatataaaagaaaataaattagaaaagctagagagggtattaaaaaaaaaaaaaaaacataaaagaaaagaaaaacaaaaggaaaagaataaaaattataaaaaaaataaataaatgaaaaattggaaaaaaaattgagaaagtaaatgagagaaaaaataaaagaaaaataacaaagcaaaaaaaatatatgaagaaatatatataatagaaaataaataaagactagaaaaatggaagaaataaaacaagaaaataattagaaaaaaaataaataaagtaaactaatgagagaaaaaaaaaaggtaaatagaaaagaaaaaaaaaatccttttattaatacgtgagtaaattttttttttttttaatttttaagactttttgcatttatatataacttaaaatttcttttcacaaaaatatgttcttcatcaacgataacatcttttagaagacattt

SEQ ID NO: 182062 - DNA, 811 bp, Cannabis indica
gaaaactacttcgggaactgtgtggggagtcatctcgggtacgcgggtgaggccggggagatatcaaaggaaaacggctctgccattgttgcgggaaaaattagtgaggtgataaacgagtttgagaagaaaggagtaatggaaggagcaaaggagaggattaagagttggggtgtactgggaacggagtcgcaaatggttgccataacttggtcacctcaattcgatatttacaactgtgattttagttggggcaagcctcaaaagatcgaaatatcatctgttcatagaaaaacaatttccttgatggagtccaaagatggaagtggaggtttagagatcggtttggttttgaagaagcatgaaatggatcgttttgataatctcttcgggaccaatattgaaactctgtaaaagcagcagaagctacttgtttaacttctgtattaacaaagtatagttctatatataaataagggtaaattgcggtataaatacatattgttttatatttttacacatttaaatgtctaatgtttatttttggaagtaaaactaccaaatattacaattctgttacaccgttactactatttccgttgactcataaatatagacacgtgaagggttcaaatgcatttcatttattttattttattttaaaactacttttttttattatcaaatttaaatgctactgttcaaaaaaaaaccaagttcaatcatgttctatatactgtactggttcacttagctatggtaatttagtattgtcatttctatttttttttaaacttaaagtagtatttag

SEQ ID NO: 182063 - DNA, 777 bp, Cannabis indica
aaatcgggcattgaaatgcaaagtgagcctttgatgatttaaaatttgtgcgtgacgtaaatcatttgaacctaattttaacaagcatgtgggggcatttgatgtgtatagtatattaccaagaaaagataagaacacacataataatgtcaatagaactatttttggcccatgggaaagaaagacaaagacaaataaattaagaaatattcttggcccatccacttgaaactagttttggtgaaatttaagaaattaaccattagtagaagtccttctttttctttttttgattgaaaagaagtctattaacacacgcattttctaggactcatttgacaatgccatttatagaactagtcggataaataaataaagctttcccaaaaaataaggccatacacatgcaacaataatgggtgacaagaaaaaaggcttaaacagttcggcggacagctactttttgttacttcgtatattgagtcagtcatttttcagagtaaaacgtttaaataaaatggtcataaagtcacttaatttttttttttttttttttcttttaacatgtattctggattttatgtttgatttagattgacttttagttggccctgatttcaattttttttagtcctaatttgagagaaatgcataatacattatcgttaatgtcaaaatgtgtgattgatatgatatgaaccgagaaaaaatcaaattgattgttgacacgataatctacaatcttagtataatgatattagtaagaattggaggtat

SEQ ID NO: 182064 - DNA, 510 bp, Cannabis indica
ttaaagcagctccgagaaggcgtcattcaagctgagataatccaatcattcaaggtggcttcaatttggaatggggacgaaacaggggtcatcctcgactagtgcgattgggccgactgtttcttcggtgttgctagggacgtttggaggaggtaaacaagctgagataatccagggatcaccatcaatgagattgcaacatgttggagttgaccatccttcaattagcaataatggaaaaatcccatgaaatgagggagccgaatatggaggagtttaatgtgaatattgtggagggagattcaaatgagggtctttcttttattgatgtgtaaagaagaagagtgggtcacgtggatagtagtgggacgggtaaagagggagaagaaagtgtgctcaatgaagatcaaatgggcctcaatgacaaaaatgacacttttcttgataatatagatattcctgaaattatgatgtgagatgggggacagttcgggtgagccaaaaaacttg

SEQ ID NO: 182065 - DNA, 689 bp, Cannabis indica
accagttcgaccgagtataggctgatactgtaacacatcggtacaggctagagtatgactagcagctggagtatgaccagttcgaccgagtataggctgttacttgtcaatagtaccgtccctatgaacgttcaggactcagtatcgtgttggacacggcagttagggttatggtcaggggtatgggcgtctgatcatgactcgggatttatgtatgattattattatgcttttcttactgagtctgtcgactcacagtgctatgtttatgtgtaggtaagggcaaggctaaggctgatggaccgtgagagcgagccggtgaagattgtacatgtcggggcggttaggcctggagcgtacgatcctcgggacagcaaggctatttttgtaattagtcgctaggcgacaagtattttgtatagacagtaaacttttgtaaatggttttgtaatcgggatcccgagtattttgtataaatattttacaagtttaattaaaaagcaaaaattttaattaatcacgttttccataaacctcgttgattagcaacgagctgcacagtatgtttaaaaatcacgtaatacgcctatgctagttagggtgttacagtagctgtggtgtgaaaaaatcagttactgcaaacctatagaaaaaaactgaatagagtggtaaattatatattttaaagt

SEQ ID NO: 182066 - DNA, 596 bp, Cannabis indica
tgggtcctagttcgggtctaggtgccaatcctaatctcggtcctgtttcgagtccttgtgtttgagtctgagttctagtccgagtctgggtctaggtcttggtctgcgtccgggttttagtccgtgtttgcttccgggtcttggtctgggttttggtttgggttttgttactggtacgggtcttggttcttgtccaggtcctggataacgagtcctgggttccgggttcttagtcgcaggtcctggcgaaattctgggtctggatgcgggtatcgatatcggcctaggtcaaggtccgtgtttggtttcacgtctagatcttgtttagggaccaggtccaattcctgttccagggtcttgattctggttcttgtgctgattttgggtctcaggtccaagtctgggtttgggtcctggtctagaaattgttccaagttgaggtcttggtacaattccatgatctagacaccgactacgggttgggtccaagccccgggtcgtgggtcaagatgtagatcccaatcttgggtcgtcgatctcatttcaatttggatctggggtcacagtctgggttcgtgtccgggttcgaggtctgg

SEQ ID NO: 182067 - DNA, 992 bp, Cannabis indica
ataataatcactaaagacaagtaactggttggatgaggaaacaggttgacctgcctcgttgaatcttccttaaggaaattattcgtcagcatcaagttctacctcccaatcaaaggccttaggatttccatgctcctgctccttaggctccatgggttctgcgaattgcctataaaaggtcataaacatcccaatgtggggatcattggttgatatagcacagacaatttgcttttacgggctagttttgacttgacctcaaaaactagtctttgagtatgacgagcaaccgtgactgccactttatcctgcacaaatcttctcttcaaagatcctagctaacaaataggaagtgtatcttataggtcctcccaaactctgtacatccacgaggctggatgaaatggcctctaacctctatttagcttccacacgaagcatccatacacttctccaccgatttggttggagttgtgatggtgttgtatttctagattttggtaatcattactgaattccaactcagagaaacttgaagtataggaagagttgcttggagatgaggatttttgtctgctcaaagtttaggtttattctcttaaagaactaggagcaagtcattgtctattcagaaatcacctccccaaaagtcacataggttcatctacaaagaagagaatagagaggtgagtatccgaaccagtccagaatgcccttccaatggaagaacaatttaaatactcttaccagaaggaaaaaatgaatcaaaatgaggggaatctatcctaatgacaaagattttcaacaaaaagtcaattttgggatttttcaaaacctggaagcttcaaagagtagaaatagaggaaaatggatgtttctaacatagaatttcttcactaaacatttttaaattgaatcaggcaattcttgggtttatttttttcttaaaataacttcaaagaaacctagaatctagcaagtagcgataaaat

SEQ ID NO: 182068 - DNA, 789 bp, Cannabis indica
ggggaacatctcactaaaaaatgggctgatatttgtttggaggatgaagaagatcatgaagtattgtttgatgatgaatgtataggggaggaagataccagtttcgatgataggtggtgccttgtaggccggttattatcagggaaagtttcagactttcagatttttaaaaactattatggaggatttatggaaaaaaggtaaagggattacaataaaaattcttgatcaaaatagatttttattttcaatttgatcatgagatagacgttcaacaagtgattgatggcagtccgtggacttatgatagaaaacaatttcttcttgaaagactgaaaccgggtaaaaatcctagaatggtagctttgaatactattgatatgtgggtacaaatccatgatttgaggccgggattcaaaactgactgggcccttcgagaagcaacctgatatattggtacatttgttatttttgatccaaataactttcaagagtgtgtgtgattacttacttgtgcgtgttaagatcaatgtggctgaaccacttaaaaggcgaatgaagttttgtagccgaaatggtgactagttttatgcatacttcaagtatgaacgggtgtccaattttgtctcatctgtggaatcatgggccatgctgagaagttttgtgataaagtctatgatatacctgctgatcatattgtaaaaccatatagcctagacatgaaagctcctttgagaagacaaaagtttcttgactgcttctccgtggctgcgctccggcaaggtagac

SEQ ID NO: 182069 - DNA, 706 bp, Cannabis indica
gattttgagtgttatgacatgcttaatatgttggaataaagaattatgcgcctaaggcataattaagctagactcggtaaacttgtaccttaagcataattaaatgtggtctacaattattactctagaatattatgaaggtaagaaaaggatgatgtatggtaaaattgttaatcaagtgaagacatgagttagggttattactctcaataggtgttattttgagcatgctgtaatatgttgtaggaatgattatttagtatgcaagttaacgttattaccctaagattctatatgttataatatatattgagtgcacgcatttatgttaagagttatgtgtataagacataattgggttagacttgatatatatcactaggataaaccaccgaaagaacgtaatatatggattatgtgtatacatgaatagggttatgcgaaggcataacagattagattcggtaactataaccgaggtaaacccaactaaggtcttattgtaaataaacgtgtgagagtaacacatatgtctatgctacatagacataaatagacgtgtgagtgtatcacgtcggtctatgccacatagacatatacaggcatgtgaacataacatgcagatctttatcaaatagacgaatagtgcggtggcacctgtgttatacatacatactgagattacgcgtgtaatgaccgctctagt

SEQ ID NO: 182070 - DNA, 1249 bp, Cannabis indica
taaaaaaaaaaccatgatcacgaagcaaatccattttggagtttagagagaccaatttaggttttttgaacaaagaatttaaaaatagtttcggtttgacattccagacatttgggtgtggagcactacaaaacttgccctttcattttccacgccttgagccgttcacgccaacacattcataatgagagacggtcctgcaaagcaggcaccgtcaatttgtaaaaaagccacccattactatatccaccttgcaagtgttacaaggaaagaaaaacaatcataagacaaatattcaactgaagtaacagaaaaagaagagtcaataaccttcgccgtaattggagaagaactagcattcacattttatctggaaccaccaaagttttaattaatggaggatgatcaggtgcttcccgcttagaaaaattttgcgtgtctaaagatgggatgaaatagtcaaaattgagagtcgtacattcttttcgaccttttctcttagtgttgcttgagaaaattgagatagggagcattctcctcttaataccaactttagaaccagtgtcaacttttcccacattaaagccatgaaaaccatcagaagtagtcattataaaggcattattgtccatcaaaagtgccatgcacttcatgcaaaaaatacacatggagttgggtcacaaaaaatagagtggattaatagcatgcccactactatctccaagcccataaccaatggatgaatgggttgtaagaccatcatgaaacttattactattaattggttccttaaaaattgataatgtacaatgtgctccctagattcaaataaaaattatcataactcttaggttgactatcttatttgtaggagagccaataattaaattagaatctaaattgtcaacattcccattacaagaaatttgtaatttattcctaattgccttattaatatttttaagattaccttttttcaaaataattatttttcctttattttcctcaatcacaggcgtgatttttgtaccatcaaaatctggcttagatctatctgatgtcgagatccataaacaagaaccaccagtgttttttccagtaagacgaccgtgactactcgagccatcagattggttatcatttagagatcatttaacaggtatcagacgctaaaaaactgacgtagctttaatgttatcaccatatttccatctatggccactaaccacagtcgggggaagagaaatac

SEQ ID NO: 182071 - DNA, 892 bp, Cannabis indica
ataattagtgggcttaggttgggcattcacaaattgaacttaaataaatacaaaaattagtatttttataatatgcggtgcggtgcggtttgaaccgcatattaacaattcaaaactgtaaaccgcacagcactgcaccgcacggtttaggaaaaattcaaaccgtaaccacaccgtaaagaatttcaaaccgcattttttttgcggtgtggtgcgatgcgggcggtttgagcggtttgataaacacccctaacagatagtgaccatgtccactctgatacggttcaagattagtgagcaagcaaaaaatagccaccatcttgagggagaatattgtggatattgtctcatatagaataaatggtgaagaattgagtcatatataagaatatggactactctactcattaccaatagaccttttgatattagttagttaaatcaatagagttggtgaatctaggattatgtcatctatatatttgaacaaattaaattctaattttattgaaaatttgaaatcagccgtggtagttaatggccattgtcaaacgtatgttaatgaacaaactcataagttaggctaattcccaaagctattgattatttattaaaaggttcgtaaactaataatgacttcgactagcattattgaggaaaaaacaaaaaatactttattccattaatttcctaagtttgtgaccttttactatacgaaaacaacaaacaaaataaatgtaaataaaacttctaaaaaatccttaactatagtaaaatataataatattaataatataaaaacagtttgttattttaatactaaagctagataaagtaaatggaatcaaaatagtaaatatgactaatgtcaacatataaataaccatcgtta

SEQ ID NO: 182072 - DNA, 987 bp, Cannabis indica
atttatatttcagtattgttaaaccaattgaaggtgttgtatcaataaagaaacttcctcctaagaagacatggaaggtatgttttttgtttctctcctgattaagtttattactttctcttctcatatcacgaaaattatactatgcaacacttttggtgtgtctagaacttagaatgatttattttccaggttgatgaaaagctatttccatgcgacctatccaaggagaatgtgaagttggccgaggaagctgtaaaattagctgtccaaacatggggcaaaagatcgttgaccgaacttgaagcagaggagcgtctatcttattcttgcgaaaaggtcaaattaataaaataattttataggaaatactagttttccttttgcactttattgtgtcagacggaaatcaaactgcatagaatacacttgtactatatcggttttaagccatctttatttgcaattgtagggtcctgctcaggatgaagtcatagccaagctgagggatgcctttaaggaaattgttaaagaatataagatatacaccgaggaagaaaggaacaaggtaagtttattcccccaagtcgaagtttccacagtttgggcagttctttgataattttcttcttactgcaggttgtttcagctggtggacttcatgtagtaggcacagaacgccatgaatctcgccgtattgacaatcaggtactgcttgcatgtgtttgaaaacatttgctctatcactcttaacatgtgtttaaatatgaggaatatttttgcaatgaatgctacagttttaaccttaacttgtattatccagttgcggggtcgaagtggccggcaaggagatccaggaagttcacgcttctcttgagtcttgaagcaacctgtttcgtgtatttggtggtgatcgaattcaggtacaattttgaattaaaagtgctaagggatagttgaaacttatctattgtactgttactcgca

SEQ ID NO: 182073 - DNA, 1229 bp, Cannabis indica
gcaatattcaaatttctacaaaaatatctaagttatttaaatatttaaaatataatttataaatttctaataagtaaaatgatataaaatagtaaaatatcatttttaaacttataatttataaataattaaatatttaacaaaataacaaacttttgaatttgaaaatattatggttagaatatctataaaaatatctaggttaatttcaaatttattaattatttaatttgtcatataagataattttaatataatatttcaaataaaaaagataaagttatcttttaatttaaaatatgttaaatatcaaaatatctaatcttataattaaataatatataaatattaaagaaattaacaaatttttaaatctgaccataattaaaaaataaaataatcaatttttaattttaaaaaaaatttaaacatctaaatattaaattaataagaatctatggaaaaataaataatattaatttaaaatatgatattaagttcaaatatatttaaaaataatattttattttaaaattggggtttgaaaattgaaaaaaattggatttttggaaaaattccacaaaaatcgctcaaaaatgttggctgccagtaggctgcagctgtagcccgaggaggctggaaatggggctagacgcgcgcggacagcaggggagccagccgagggtttctcggcatctgtagggtgcaaggcggtcgcgtacagggtgaacgtgggcggattgcagggtagacacgggcacttcagacagaagccatccgcgcgcgtatactcccttgtccgaagggtctgtgcgtgcgattgagcatgagcatcccgaattttcaaactttgataactttttaatttttatcggaattgagttccgtaaaaaccaaaattgcttaatttttcacaaggaatccaaataaaatattttcagaaacagaaaaaaatattttttatggaaaaaattctgtacaacacatacattcatcaaacaacacataaaccacatgaaaccatccaaatcaacacataacatcgttttaattcatatttcatgaaagtaaatcattaccatggctctgataccagttgttagaaatattttaccaggatctagatttactaccatgtatgtttcattaacatcctaatatgaattctaaaacaatgaaataaacacatataaagtttaggaaaccttacattgggtgcagcggaatat

SEQ ID NO: 182074 - DNA, 1249 bp, Cannabis indica
attataactaaaaaactgttttttatttttaagaacagaaaattgtttttaaaaacaatttggcttgtttggccttattttttaaaaacagttttcagaaaacaaagttacaaaaaacaagaattttgaaaacaacaaaatgttgttttcttttctaaaaccaattcacctttggtcatattgttttaaaaatcactaaccaaacatgacttgtgctttaaaaacttcaaaaactattttttgttctcatttctaaaaacaattttttaaaacaaaaacagaaaacaataccaaacatgctttagtcattgtcatctaccatggatgatggctctctctcaccccaaaaagtaggacatgacatgggcatggcttttgttcttctttacctgttatgtttatgtgtatgattgaactttggataagaagatcataggctgtttattgatatgtttgtctataaatcgattcgggttggcagcaacaattctcataacaacacacaaacacaaagatccagcttgaggttcattctcttttttctcaaagagaaatgagaattgagattaggccaccatgtccaccttaaacttgcttagttccacatggactttgaatgaattttgaccatcactaaaggagatataaagactacattatcttatcaaacaaaaagaaaaaaaaaaaaaactacaaaaaaagtataatatgatcattctgaaccaaatgtgttcctctttcttcttttaattattaaaattaaataaatagatattaaaatagaatagaataataacatttcttatcatgcattcctgaaatcaaaacaaaaagaatttaccaatttgttttttttaacaattttaaaaaaaaaaatagtcctctattttaacattttgtagctaaagttataaagagtgccttggagattttctaagttttttttttattatttttttattatttttttttttttgagataaaacaaagagttgatgtatgagtaaattttaattacttttttcaataaagagtttgatgcatgaaaaaattttagttactttttttttagcaaaaagcttgatgtataagtaagttgtagttacttttaagcttatttattttcttttaggttgtttttgtattttttccaaagttttctttgtgtggtgctagaatatgcaattttaactcaaagatacacaattaatacaaaataggcaaaaagtggtaattttgcaaacatttc

SEQ ID NO: 182075 - DNA, 626 bp, Cannabis indica
gaatattattgaaggtgctatatagagcaagctagcgtatccaattcctccttcggttaatgtttttcgatcgtgactactatatagttacatttatttggagtaataaaattgataccactagtaacctgtcttattagcaacaaattttttaagacaattagaaaatgataaagagaaaatgtatatatatttgacattcctaattgttacctaataatataaagtcgtactaggttatcttaattttgggaactgattatctagctcttgactacaaatattactatatattatttattagatacctacagtacctgtccttagattttttatatacctacaacgacataaatcacgttaatatatatttatgtacacatacacatatatataaatttataaacacacacgtaaaacctaatgttttgaatataacaaaagtgatctggtaagatgccatattatataggtaacctaccaataaacatacaaaatataagagattaaacaaccattggatcacttgttggataagctataatttgtctacattgatatcttaatcagattaattaatcccatgcattgattatatatatatgtatatattagaatataatatt

SEQ ID NO: 182076 - DNA, 816 bp, Cannabis indica
aatattagtttagaggaaagtaaaaaaaatatttaaatttttaaaaatttgtatggattagataaaaaaattgaaagtttaaaaatatataagctaaaaaattaagatatataatgtgtgagattataattatagtatttttaaagagtattatacattaaagtattttttagatgtaagagtgctaaaaataatgtggaagagagataaaataagggaaatttacatggtatactaacttttgctctttttttacaaaatactgtcaggcggaattttttacttttttactgtatttttttataagtttcatactgcagtatactgtttaaagtttcactggtgttctactggtgttttttagttgttctattgttgttttgagttgttctgctttgtgttttactggtgttttataaaaacacagtatttttgaaaaaaaattccgtgtgtgacaatatttttgtaaaaattcactcaaattacaatatttttgtatatttccctaaaataaaatattagatttttaaatgatgtgtaaatttttagtattgttaaaagatgctattattggaaatgctctaaaagacactagtagtatcaaacacttctaatatcgttattaaattaattatatatcgaatcttatataatttaatacgttaactataaatcattggtcatcaagtggtaaggaagtttaggggataattttacttttctactaattattattttacacataattagctgtttttttttttccagttttttagagagaaaaagttccctgaacataggacctctatggttctc

SEQ ID NO: 182077 - DNA, 946 bp, Cannabis indica
gcacccccacttaacaccttggtggaattgaaatattacctaccattatatataataccacgaaagtagcatttaatttatgaagaaattaattaaatttaaataacttattagtattatgttttataagaaatttgtacatatttttacttcttttattttttttttaaaaaaaatacaataaaataaatgttattttcaatattatgaaaaataataataaaaaaaactcgacgtaaataaaatattgttttttaaaagaagatatgaaattttaataattttttttatattttataaataacatggttaatattttgttttattaaaaaaatattaatttttaagtacataatatgaaatatttatgcattcaactagacaatgtaataatctaattaaatgaaatctgcttaaatattttcatacattacaaaacacagttttaagcttctagctatattctccttgattattttgaatgtctggtaactatagtaaaataataaaattgtgaattgtgttttctaagaagggcttagctgggaagaggaaaacgaaatactaactaccacgttgattgtaatagatggatggcctttcatgctagtttttgcatatacatggaaaataaatcaaaccagttctcccccttgacaatatatatattttaatttgtcataaattgacctatttgttttgacattaactaagttgcgtaaaatttttcagaaaaaaaaaaaactaagttgcgtaaaatatgtatacaagtaactaaattggtcaaaaagttcatagagctataaatacgcggaccatcttgttttgggtcttcaaaacttgtaaataactaaatattagcttaaaaaagtcttatacaacaatgtgagatggcagaaactaacacaagtcggtaagaattgaatccctttttggtaaggtaatt

SEQ ID NO: 182078 - DNA, 588 bp, Cannabis indica
ataggagaaaaccatcattcctccttttgtgataagaatggctcacaacttagagttgttctatgagtacccgtgggaaaagatttcttataacaagttgatagaaaattgaaataaatactttatataagtgaatagtcgtatgaaaaaaaaaaagattgaaagggggaattattagaaggaggaaaagttctcagcatacaactatactatagcgttacagtattgggcatatgtgttcatattggagctagctaaagaatctggagtgaagacgtcacatcgctttcttagagtgctcaactaagagagtaaagacaaggtgacactcgacaaggagaaagtaataaaattatttgctaaaagtgtaagattttttatgcttttgatttggtcatatttattttattttttaattttaatcttataatatttatatttttatttgcagttgatagtatactccgtgttatgtccccaaactaatgaggaagtgtttgtgaggaccatcaccggaggtgaggcacctttatttgttgacatagaggaatttgtgttaggcgacgatgggtaaccagctcaggatac

SEQ ID NO: 182079 - DNA, 911 bp, Cannabis indica
  modified_base (23)..(23): a, c, t, g, unknown or other
  modified_base (46)..(46): a, c, t, g, unknown or other
caagtaatgatagtaggggtttnccgcaaattactcatgattttanaattaaagcagttaggaaaatgaataccccaaccatcaaccatggttagcagctataccaaataaaaaagaataatgtataaaaaagcgtctccaatattttaatacttaatgtcaattcttttattagcctaatcattttatttagatatctttgtttttctgttttttttttaattttttagacaaacacaaaatgatgattgaacatctttagtaaaaaaataagagggaaaagagaataattttttttttttttaaagttaggcgcattttagcgggagggggccaacttctgcataaagcttcacagaaagtgattattattttattttttatataataaatttaagattgaaaagagatagagagagctaaaaaagcaaacagaggccaagacaaggcaagcacgtgacctgccaataacttagctgctttgctttaacaaagagacataagacatcccattgttctttctgatgatggtctctgttcaatcccacgcatctcctttggtccaatcaattctttttttttttttttaaatatcaaacaaaattattattattatttttttttctactttttatagttgtgtaaaaagcaaaataattttcgttaactgggtctggctgcatctgtatctgtgaccaagtttggcattttgttttggcctttgtgtgtttgggatttctctctcttttttatttttttagtttttctttttaccattttgtgtcatgagcgtgtgtgagtgtgagagttttgattgagaaagaagataatgtgaagtagaatcttaactaaaggagtaaggaaaggaagaacagagcaagagggtaaaaaggaaaaagccagcaacccca

SEQ ID NO: 182080 - DNA, 670 bp, Cannabis indica
aataatatttcagcttataaaaatttaagtgatttactccatatactgtttttttaactttttttttgtttaaatttacgatttgggtttctaaagtggtgtctccagtgatttctatgtgggttgctatacaattttttgttgcgatttaggttgcagcgctagttgcaataggggttcctatgtagaattccgtaaaaatacaaaaaaaaaaatattttaaagtgtaaaaataaaaaagccctaaaaatttattaaaagaaaaataaataactaaaaactactcaaacagaaaataataattctttgaataattagtggatttgcctcttgattttttccatcgggtaagaatatatccactcacttttaacatagtattattctgtcctctatttagcaaagtaagtattagtttacctcctatctttatggacatattgatttttttactatgattatttaattaagacaccctatttttattaaaaattaatataaatatttttctaagacttacacttactttttttatttttttaaaaaaagtaaaatatattattctaaaaataaattttcaaggaaaaaataataaaaatattcattatcttttaaaaaattataaaataaaataaattcaaatacataaattaaatataaaaaataaatt

SEQ ID NO: 182081 - DNA, 775 bp, Cannabis indica
ttctttttgcctttctcttttttggatgtaggctgtggagtgtgaaaatattgagtgggggttattccataacccaccccacgaacatagcctcgtgtctcaggattgaccaatgccatagtcagcacatcatcagaaccttcaggttcccatttaccctctacttctagttgtaggtaatgatcctgccatatacgatgcatataagttaatcaatttaaataattgacaatgatgaatatcatagtatgtgtttaaatttattttacttaaaattctttcttttatttgtgatgcattaccatcaagctctcctttcttgttttttagacctaatgcccataaatcagctctatccattttagatgctttgtccccaagcaactctctagcaccttggtatcctcctcttgataggtggtggttatattcaatttttgcacgaagagcttgcatcttctcccttaatgctatccacttaagagacaatcttgaattaacaaatttaacccaatcctcttgtgtaatgacaccctcatatccccttggtcttgttggtggaaattctcttggatttttcaccaatttcttgtgcaaatgttctcttgtaagatttgtctttataatctttatatcgttttctcgcttgttgcaagattttttttttatgttgggttgtaattaacgtactctgcaaattagaaattatcaaacactatatgaaaaaatattaagcaattggaaaaagaaacaatgaagaagtatgtacttcatt

SEQ ID NO: 182082 - DNA, 815 bp, Cannabis indica
ataaattaaataaaagtattttgagttcataaataataatattatctacacttcaaactaaaaaaatactacaaatcgacaacgtcatcgtcgtcatcaccgggaggggcagtctgtgaggaggaaccaactgcattgctaggaggctgaaatggtggaatcggtggaattgggagcatcttcggtatgtgaaatcctggaacggcgcttgccaattagatcatttgttattggaacacactcatgatctggttatgagtgatcagcatctgtggttgccactcgttccatgcttcttgctcttccacccttcgctttagtgcctcatactcctcttgagtgacagtgggctgcccggatcgacctagcctgggagtttctctttttgcccccgtcttaagtcttagcaactggcccagtcctctcaagtggcatgactgctcacccaatacttttgtcataacatgcatatcttcaagaaattgggtggggtcgacattgtactggcgcgggacattagctggcattggttgagtggcacgaatctcaaccattttagcatgcaaaaaaagtttgtgaaattgttagagtgaaagaaatttaaaatataaaactaatttattaaaagggatattggcggcaaaactacccgaactttacattttggtaacacttaactataaaaattgaaattttggtggcaaaactacccaaagcttatttctattagctatttacccttcgtctaaaagacaatgttaagtgccacggtaaacacacttcagtgtacccatagtaatttttttggtccatgt

SEQ ID NO: 182083 - DNA, 647 bp, Cannabis indica
ttattattttatttttataagattattgcttttattattattagtcattttcaggtttgcaaggtggctcttaaattttgtttgttcccttttgtttttgtttcttcgaaaaaaaagttgaagccagctcttcttgtggggtttcctcctctatctatttttaaactttttacatattctagattaaataattatattcataaatatacaactcatatttggtactatttgatcaaatgtattatgatttaaatgatgaattaacatatatttgaatatattggaaatttttgtaagcatttctataaagaattgttttgatagattttttattaatttgatattcagaaaaaaaaaattagccattattttttttttttttttaatttctatacgttgtaaccatttataaaactacttgtaaatttttagaaaattttgaataatttataataccgaaaatatttaaacagttatgttgaccgaggttttcggcaactattaaaatataattataataaggagctgtaagaaagtgagatgaagactttttacgtggttgggcgttaatgagccttagtcacgagccactgctataatggatgtattaatacagattctacacttgagagtaatgtttttctctt

SEQ ID NO: 182084 - DNA, 645 bp, Cannabis indica
attttgtgctctttcttgtgataggttgtagatgttggatatgttttaatggtctctgtgttttttacagtgttatcgatgaaatatcgataggatgtcgatttatttggatgtctgtttgaccattagtctgtgttgtttttgtatgtcgataggatatcgtatgtgtgtcgatagaatgtcaatatttgattaagtccctgaatgtgatagctaactttgatcatgtcgaccagttatcatgatgtcgacaattttgtcgataattttgatttaccagttagggtgatcatttctcttggattgtcgacatcatgttgatagtatgtcgatatgttgtcgataatgccatgttcttgcctcatgtttgataatatcaactgaatgtcgacaaaatatcgatattatgttgacataataacgcaattgtattgctgtttgataatgtcgacagcatgtcgacagaatgttgatattttgtcgaccaattatgtggttgctcgctgtttgataatgtcgacagaatatcgacatgatgtcgacgttatgtcgaccactttttaatttttttgacagtaatattgctttgttattatttttcagatggctcacacactcataatccagcatccgagcattttactg

SEQ ID NO: 182085 - DNA, 661 bp, Cannabis indica
aacactaccttttaactaattcagatattaggaattggattcgcaacatcgaacagcatgcttcagataatgtcaacaagatcctggtaggaaacaaggctgatatggatgaaagtagaagggtatgctacttttcattgcgacttgaattctggcttaaagtttattttgacttttttttctatcattatttgatcatattacctcctaatttataggatgtgcccaccgctaagggccaagcacttgctgatgagtatgggatcaagttcttcgaaactgtaagtgctgtacagcttgtgaaaatctgatatgcaaattttgagtttatgtattgtgtactgagagtctaaattgtacatatattgcaaagtgccgaaacgaatttaaatgttgaacaagttttcttttcaatagcaagagatataaaacaaaggctcgctgatactgacaacaaagctgaggtacatttcgaaagttttgtttctgctcctgtttgtggagcacatatcttaatacacagtttggggtgctggggctagtagtttagctgtacaaaaatcagcatgctgtggttcttaagctgactaaaattatttagaaagtggggggatgcattatattgcattatgctttggaaatgagaaagaggaaagaaaac

SEQ ID NO: 182086 - DNA, 689 bp, Cannabis indica
gtgttatttgaggaacaataatgttatatgtttattatgaactccacacattagatatacaactttgctataaatgcatgttattccaattttcaatcttcggtaactaactataataaaatgatttagaacttaacggatgttcactactgtgtattcatattgttatatgcagtagtttgatgttattatgccaagtgtttgtcattactaaacattaattactacacgctgactaaacttctcaacatagtaataattgtgtaaattgaactgaaggaatatggaattgataattatatgtaatatacaatcatatgagagaatacaagttgtacatatataattactatcccattcaattaattttatatttatttattttgttgaaaataactaacataacaatatctgtattttgatgtttttttttttaggtaaatcatgtgtattaatcacaaaattgttgtattttgggtgtacaattaaaatcccacattgttacattatgtatataagaatgatcactatctcaattagaatgaaactttttaagaaaaagttcctaaaaataaataggtgagggcttagtaaaacttccacacaccaataactctaaattaataaaatgtgcttgtagtaggaagtctttgtttcagagttaactaattgataactctgtttttggg

SEQ ID NO: 182087 - DNA, 542 bp, Cannabis indica
tttgttaataattaaattacatgcacagattggacgcaccaatgagtatataatttgtggacttcccatttatctaaaacataattagttaaaatagaaaaatatttgtgaagcaaattataaattatttagagtgtaaataatacgtcaacaataatcaaattttatataatttgtagtgggaacaaataaaataataagagagtgtaaataatggggcaaacaaaaacaatgatgtgaaacgtgtaaatatctgcactactagtcgtgtatatgttaccaaatttggaatagtttgttgttgggggtttagctttcatagaccaagagaatctttcttcttttagaagaacatgaattatagggattgatcgatacaattttttgaaaaataaaaaaaaaaaacaaaaaataaatccccataacttttaattacatgcatattatcattcatattataaacactatgcatggaattaaaccgtattaattcttaaggcaacatacacaaacaaatctacatatatattacatagaggaaa

SEQ ID NO: 182088 - DNA, 800 bp, Cannabis indica
ttacttttattttcatgttatttaaacatatttaattaagagtaatattaagacagatgaacgctaaaatggtaaaatacgaagattacaattaattcaatttaatccacattttttttattataattggattacatttttataagaaaattacattctacacttattttatttattctaatttttacttttattttcatgttatttaagatatacctacttttatagatgatatctccattatgcgttttaggttaatttaaataatgtgctacacttaagtggaggccaagggtatattaaacaacctacttataaaagttgatagattttaatgaatataatatgagggtatttttgattaataaatacaaaaaagagatatttctcaacttattttttttttattggatcacatttcctaatttagaaattgaagaaattacattgtatatctattttattttacttgttttaatttttacttttattttcatattttaagatatatctactttaatagatgatatctccattatacctcttagattaatgtaaattatgtgttaagtggatggtgaagctatattggacattttagtatattttaatgaaattttaatatgataatattttttaattaattgataaaaaaaagagaaaatttctcaaagttctttagaaattcctttgaggtaaatataagatagtgtaacactgaattttttttttttttgttgttttaattttttgtaggaaaaattaattagttttcatttaatttccctttttcgtatatt

SEQ ID NO: 182089 - DNA, 1360 bp, Cannabis indica
ttacagtttcattgatgtcacaggcaaagaaattccaactattccatctgccaaaggtaagcaaaagccaattattatggtctaaactcaaaataagatcactataatataccatggagaaaaagcaattctgcggaaaaccatgcatttgcagcataaatgatgagcttataaaaaaaaactccaaattaacaatcaaataccttaaaatacattatcccaaacttaccccatctgaggagttttagccaagccgttattgagctgtaaaataccatacttagaagtatcataaattcgattaaaggagggtctaacgaaacttggtttgtcataactatgcaataaagagacgattcttccttcaatttcaacggaagctcccactagaaatagaagcagaaatacccagaaagcaaagccttgatctttgccattgtagaaggacctagagctcggaagagcagtgcttttagttttggttgtttgagtacaagtaagagagagagacaaatgattactataaaatgatttgtgagtggacagatcatcacctgtctgacataagattgcctttaattaaagagtggataattgcataaaaataattagttatcaaatttaatctttaaccaaacaaaacattatctgtttatttattattttatttgattagttgttcatttctttggaggagtttaaccagtaattatatgtcaacctaatttgcaatatattttattttatattgtgtatttaacggattattagtttaataatttttatttatttttttaaaaaaatttatattatttaacagaatttattagttcaattttaaataaataaacaagattctagtattttactctaatgaatgattacaaataaagagaaggaatgaaaattagggttgtaattcttttcgtttatttttatttaataaatggaaaattctatgagtaattcgtaggggtgcacaaaatatgggacaaactattcaattcggtcaatccaacccatttatgttaagagtaggtcatggctcactgggctgaaaagtgataggccatataattataggttggttatgggtttggacacattttaactctatattacctaaactaacccatttcttgaaagatgttccaaatttgagacaattttcatacgtaaaatgtattttacattcacaaataaaataaaaatgcatattttacgttttcatacataaataaaattatattgtgatcaccttagaagtacattaaccaaaacacattactaacacgtagtctatagttacctcctacttctaccaaaaaagtccagaatgtgagaatcaaatcgctatttt

SEQ ID NO: 182090 - DNA, 588 bp, Cannabis indica
gttgaaaatagccttcttcccatagggacccaaaacaaattcaattcattaaaagattatacaattcctccctaatcaaattctccagagtaatgctatcaccacacaattcaagggtgttccaatttttttttcctttcccagtaaaatctatagacaacactataacttgctctttgatgtatagattacatgttttctaatgtacttataaggctcctattgttcttttaactaaatttatatttaattgaatctataagagagatattataagctaaagctcattattaaaagctacaaagaaatattataagctgaacctcgtaatcaaaagctatattgtgattaaagatatcataaattgagtgagggaacaaatttctttaaaagtaaagttatatattttatacaacagttgacaagaagtcagcaccagaatacaacaaccaaacatgtagagaaacaatgattagataccagaagttgggcttttttttatagagactacacagtaaaataaatctcaaaaatgcaacaaaagaaatacgaaagcagaagagacaagttaatactatctgtatcctg

SEQ ID NO: 182091 - DNA, 684 bp, Cannabis indica
atctgtatatgaatatggtatttattgtaattatttattagtagtgtatttttcaaatctgtttcaggatttgttcaattctctttgtagagcttgtgaaacatttcgttttgggccgaatgcgtttacatttgggctagatatcccgacaaaagaaaagtaccatactctgttccatggaaaatacattcctttgcttttagtattgaattgagttcatctcaaaacaacatattaaacccccaacatgaaatccagataacaaaagtaacctaaatcacatcctcgcccaccttcttcattattaaattattattgttattattaacctatatttttttacatactttttaaaatcttttttatttattatttattaatataatctagtttcatcgttatctcatttccctgttgcgtgctctgtttttatgggaaagtcacttccatctacgaccagactccaagaattcacgagagtaatctcatcagacaagctccaaaagtcaaagcgtgcaaaacccatatctcaaatccgagtttcttcgcccggaacagtcaaatcggacagtttccgagttgactcggatcagcaaaagtcaaggaggatggagagctccgagggtcagagccgtagtggccagactcagactcagccgctgtctctggtggtggccgactgtg

SEQ ID NO: 182092 - DNA, 685 bp, Cannabis indica
catatcctccaaatataaaaatgtttgcctagaatctctgcccatgagcctacttctcatgcttcgtaaaggttatctgcccatgagtctacttttcatgctttgtaaaggtagctttttccatccaatccacaacaactttgctccaccttttcacatgtatgaattcttggtggctataatcttagttcatagtaaagaagaaactgatgattaattgctcacactactctgacatggttcatgcgcaagaaaagaatccatgaaagcattactcttagcaagaagctttatggttgattaggctcttcttgaccatctctccatcgctaccaacaagctcaattgactgaaatagctcgctcagcagtaacttcgatgcaaagctcgctttgtctatggaacaagccaaagtaagttgacctcattcgtattgattctggcttctgcccttaggagtaatgaagcatctttttactcaattagaaaacaaatgaaattctgcactcagcttaagctaaaaaaaaaggccagcatattgcataatttaaaaacatgggaggaataaagggtaatccaaatgtcattttcaattgtgtaccaacagtgttactctaacaaagacatgctagaaacctcattctgggcaaggaaaacaaattggttatagcatcctcaaatatcc

SEQ ID NO: 182093 - DNA, 621 bp, Cannabis indica
ttaatatttttatatctttggtgtgattaaaaataaaaattaattatataaatgagattgttaggaaaaatagatgaataaatacaaacaacactacataatatgaaatatcctaaaatcaaatagagaagttattcactcttatatgtccccatgtgttattgtgtagtctttgctttggtccctctttatttggaagtttatgtgggccaagatatggcccacatttgagaagtagtttaaccttgttggtgtcttaagttgggcccacatggggcccaaggattgtgtagcccattgacaacccaattaagatggtaaaagccatttctatggtactcaggccgcaaagcatgcttgtgtgtgggtgggtccaccatatttaaggtgtggtcagtgcccaaaccctagacgtttcttttggttttaaactttggtgtgtgcccattatagtttcttatttgaaaaaaaaataaataaaaataaaatagacgtgtataataaaaacaacaaaccaaacaatttgtcatgtattccaaagctgcctattacttggcaattttgacaaaatagatgatttatgaaaatgtattttataaaagttattgattaaattatttg

SEQ ID NO: 182094 - DNA, 975 bp, Cannabis indica
agaataacttcttttttttaggtgaacaagtaaacctataaagatcttaactttaatgcaaataaatcagataaagccaaagagtttaacaatgaaggctatttctcaatctattcattcaaattttgttatcccaaatggtaaaaattgtgcctgagaaaaactatcaagtaagaaaaagaaaagctgggattgtattgaacttacttaacctcgaaataagtaacaattaagccagaaatttacaggcatataaacatggttgaaattgaaaaaagcaaagaagctgtgatctgaactctgttttcttcatcaatagtaagtagagttaatggcttcaatcaaaacgacaagttcaaccgcaattttgtagtaatttggtttggccatcaaaactttaatgcctgtcaaggacaagtgttagaatcctggtaatgtacaatacaattggaaaaacttaactcataagaaagacatttaaagcttgttttgtttttggttcaaagaaatatgatatcctttttacatctttactacccctacaaactgatttgctttgagaggttttcagttggcagttgaagctttatttaaagctcttacttgttaatcaaaaatttttcacaaatttcactgctcacacttctggatttgatgtcagtaaattataaattagctccttaaggctattcccaaaccttctacagatttctttccattttttattcttcttgaaacttattgtaggaccaaaataataaaagtctatagtacatgtggtcatagtagggcctagtagtttcacattcttcttataaagagttctaaattccaatccttctttttctaatatatatacacaaaaaaaacaagtctacaataaaaccctctaaaagtgatatttcagtagattttctatctatttggattggcatccaagtagaatttttttaaagccattttttttttttcatt

SEQ ID NO: 182095 - DNA, 517 bp, Cannabis indica
ggtcaaacgcaaattctagatatacaaaaatcacttgactatgaaaaaatttgacaaggcacctggttcagccatgagaaaaatttgggaccacccataaaaatgatttattctacctcggggatccccttcagtagtttgggcaactttgtgagtaacggtacccttgttaaacgcagctcaagcaacatgatcttgttcttcctccttgggagggacttttatagatgaccaagtggaatacttttgtgctttaatatccatggttgattgatcatctacaagtaattcacaagcccataaatgcagctcgtggagattacaactcgatgccctcatcccaaatggaaaattgaccaatatttgatagtgttttgacttaacctcatttggagcaggttttagcaccattgttgttcacagaagcaatgaagttagttcaagtacatggaaaagaaaaaatatcatgaacaatagaagtagcaggacttacaaggtttttgaaaagttgtatgtg

SEQ ID NO: 182096 - DNA, 754 bp, Cannabis indica
gaatatgtaatctttgattcaagtgagattatttatttatgttaaattatttattatatttgagttagaattataattaaaaaaattagatttaatttttactcttatctagattttgaatgcagagatgctttgatttgtttaataataaattttacaaatattgaaactataaatttataaaataaataaaactatttgttaagggatccttttatactaatttaaatgtgaaaataaatgtaaaaaatttatagaaggtgctcattaaaatagaaatatgaaaagataagcacaattacttatttattatgttctctttttttttccttaagtgaaattgaacattattgaagttttttttttcccaagggtgagactaagtcaataatgttcatgggaaacccaattttaataagttcaaaaatttaattaatttttttttttgaaaggtatttaatttcatttattgagatgaatagattatgatgagcatgagccccaccacaataagtggctaaaatgtatagtacatacacatttttattggtgaaaaattatggaattttcttatattttaatttaaattaatgcactctagaaaatagtaaaagagaagaatatatagaaagagatagccttattttgtgctaagggtatttgagaaaaaactttaaattaagttgagttataataagaaagtgaatagaggttaatatgtggagctaccttcattaattagataaaataagtt

SEQ ID NO: 182097 - DNA, 519 bp, Cannabis indica
aaattattaatttaagttatatatgtacagctcagaaccaatttttttaaaaagaaagaagagaaaataatgtggatgaatagaacggctttttaggttgataaaaagtggcggtgacctaattcaaatgagcgaaattaaagtagatgtacatgatgatatgaactgtacgtccattaatgatttttctcaacaagttctaacctaccacaattccattactcgtaattaaaaatattggcctcaccatacagagtaatataatcactacataataggtatatattaaagggaattctttttaagtgaagcttatatatgtatatatatatttacaaacacaggcggttagtgaatagagtaataataagatgtagcattcgttttatgaataatgtaaattaaacattgtgaaggaagaagatgtcaaaatcaaaatcaatcctacacaagttgccaattgccatgggccaagctagccagtaaagtaagtagcataacatggcaccaaaagaggtg

SEQ ID NO: 182098 - DNA, 528 bp, Cannabis indica
cctttgacatcacctgacataaaattggtttccaatcataatgaataggaaaacaaatcacttcacctactctcatttttcgaaaagtgatctgatctgacaaacttgattctatattgatttcaatcatgatccaagcatattctaatctatcgctattcctcgtttcttgatcttgtttcagaatacttccaatttgtccaataattttcctcatagatggaccaccccaattcttcatatcaagattaaagacttgaatccaaattggtattttggtcaaattctccttatgaaatttccccagagcattccaaggcttcataatgatgggtttcctgttaaaaaatacataacctcctacaattatattatccctattcaccactaagtgaaatctaacaacaaaaactccatgtgtcaacagggacactttgccaatacctttatctttccaaattctatggaagaagccttccatgacatgaatttggggatttgctccaaaaacataacacaccaatgaag

SEQ ID NO: 182099 - DNA, 734 bp, Cannabis indica
cttaaagaaacctcattcgctatgtcctcaaaggaaatcttaattatgttctctatttttccttttatattttcaccagcaatctcaggtatatgcaaaatagggtaggaatatcagtgattttaactctagacattctctcctctaaagctttgatgacccctatccaggatgatatagtattcgcatcatctattttctctagaggtataagtgtttcaagaatcgatcttggggcaactgaaggcgacatctcctcgagcatatcctcaatagaagatccccaatcactcctttccttgtccttctcggagtccttcgattctgaaatatcaattgtagttattcccattaattctgctaccgacttagttttgagaatatgatcctctgacgtcagccctcctcgcttcacgagctttgcgttattagcatttcctttcacatccttcttcactccctttcttggtctccctcgacccgccatggccctaggtcaaaagctgaagatcacgagaaaccctagcaaagacgtaatgtgacagtgttaattttaacagaaaaataattaaaatattttatgtataaaaatatatattaataaatagagcatattattatacactactatgactataataagtaaccttcaacaatttatatattaatatttattattgagaaatgtatttttccttcttcttctttatatatgtgagcctaatattaactag

SEQ ID NO: 182100 - DNA, 534 bp, Cannabis indica
agatttgcctcgcttccttccttcattaacaagtattagaattgagggaaacaagcagcgtccattattaagtctcccaagattaccacgtgtcacagaaatggaaattttgaatttggagaattcagagttgttgtatgaggcaataaagccaaggaatccttgttccactctcactccactctaccattaccctcctcttcagtctcttaacttgaggaattgtggatcatcgtttagatccctccatatggatttatatcccaatctcaaaactcttcagattgaatccagcgactactttgaagctatcgcagtgtcagatgggaaatctctggaggaactaacatatttaagaactgagggttgtggtagttttgtatctttcccaaatggtggacttattgctcccaagctgattcatttggagattagtagatgccctaaattgaagtggttgccagagaagatgacttccctctcaaatttgaagtccttggcaatcgatggctgtccgttgataaagagtttccc

SEQ ID NO: 182101 - DNA, 889 bp, Cannabis indica
aatcataataatagatcatattttcaaaaatcttaagcctccattctatgaataaatctcagagtgtctttttcaatatttatcatctttctctatcttttatattcatacaaaattttatattttctcatacattctctcaattttacaaatgttaaactattagagtataggaaatcggcaagaagaaaccagccaaaaaataaattccaactatcctttaaatttgataacactttacagagacaaaaaaaaaaaaatcagtttcagcagtttgaactaatcaaactgcaatttacattgatcggttctaaggagttttttatattagtctgttagttttcagattacaccaatccaccaaaaatcaaaatctgaattttcaaataaaaaaaattaattctcaaactttatttaaaattgaatagtgggttttggtcggttccacagttatactcctattacattgtattggggtttgatactttgatcattactaaattaaaaaaaaaaaaataaagaaatgcaaacccaatttcgcactaaaaaagagaaaaggaaaaaagaagaggaaaaaccaaaagttgaaagaaagagtatgcaaaagaaccattttccttgtaagcatatgagtgagtgtgagagtaaaagctaatcaattgagtcaatatacaaggaataactctccttctccaacaaggaacggaaagaaatagaaaaagcgatcctgggttaggttttcctcagtcctcactcactcagtctcagacctccattgaataacactcaaaaatgttgctttcccgtttctccatcctcaccaccaccattgtctttttggccatcttccctcagttccgggtatgctttatttttttgtagtttcact

SEQ ID NO: 182102 - DNA, 803 bp, Cannabis indica
tacttgagggaaatactcgtaccgttggccatttgggccacgggcaaagtaacggtacaactcccctctttcatctcaaaagtacttccgagtatgaagcagctcattggtccatactcaccggattttgtagccactagtttcgaagtagcttttcctacttcttctttcaggttgagtagtaggtccctttccccttgttaggtcttgaggcacggtctcttgataacattgaggaggacttggtggaggagtcctgttggttctctcattatggcaaggtcattcaacatccatggagaacccattggttggtgctctcgagcttgagtcctttcaagctcttgattaaaagtacttttcctctaagcggtatccactcatggtgtttgcctagtgcttgctcggttagcatgtgtagttgtgatgttctgagcattcagggtttttccttggacactagttcacacatgaccaactagttgaaagggtatctctcttactaactccgaaatatacctttgggaatcagtttcgtgattaaagcgataagcctctctaatccgttgagacaggttagctatccgttgttcttgcttaatgcattggctttcaatgttcttctaattttccaagaaccagtgttgaaactgttcgtgtttcttatcaaaagagtcttgcaattgttgttgcaggtcagccgcagtatagttgagctgagctacatgaggattggccgtccttaggggtcttctacctctacgtgtggctcttcaagtgggatctagtcactgaagccagtc

SEQ ID NO: 182103 - DNA, 883 bp, Cannabis indica
ccaaaatgtgccctgtaaacacaaagaaaactattgtttattttcttcatagctttttcatccaatttgttttgcattacataagtactttaagcttaccattcatcaattggaacaaaatggcttaatatgaagcccagacctgtgatgatgattgccctttggaacaagttttctgaaacttgtttggaaatgacatctttgttttggatctgataaaccatccaagctccaattatggcatatattggtgcctgtgtaagcatcataataaaatgagaaaacttgagtaagtatacactaggtgtcttcaggtcctatataatttaatttagaactaaatcctacttacgttttaagtgggatatagtagcaatgctctttaagaatgttaagatttatgtaagttgcttactgtgccaccaatagttggttttggtgtatgaagaaagctaatcaaattgccagagattccaccaaggatgtaaatcaacagaaatgtaaacgacccataacctctgcagactttaggcccaaatgtaaaaagtgcccaacaaccaagaccaatgtcaaaaacaccacagttctgcaatatataccaattatcatgtatctcataattcaaggaaattttaagcaaaagaagccataacattattacatagagaaatgctaaagggtacctgcctagcacctctatgtgtcatattgctattggtccaactcagtatcgagttccatagagttaatataaaaacttttaatggagtatcgctagccaatcgcaacgctacatgtcgagaaagtactaggtaccactggtgcctaatagcaatgctctattataaactactactacttctaacctactcctactattttt

SEQ ID NO: 182104 - DNA, 525 bp, Cannabis indica
agtaaaaaatgatacaacattagtattgaggagttgcattagcataaatcaaaaggaatcatattgtctgcaggaaaatgtatgatcatattatttacaatgatcattttttagcaatgtaatattacaacaatgttttagcttacctttgtgcgatgattctgcttgactgcacataacaaagcactttttcttcagctatcgaattttttctactgttttgtaatttgtcaagcaataagtctaccaatttttatttggttgagaatcgttttcttttgttgagaaacaacttcggttctaatttttgatcgaaattctagagatcgttgttgaagcttttttcttcgtcaatgatgtttttttttttagtttgttgagaatattttcaaatttgatactattttttgcttacagtaacactgaattgaatttgtctatagattcggaatcgacttttgattttgatttgttgattggagttttggttgtgttcgaaggttttttttttttttatttttttaa

SEQ ID NO: 182105 - DNA, 1154 bp, Cannabis indica
atatgatcgatgactaataatgattatctcatctgcattaagaaacttgttgattaagtttggttcagtagccacatctctctgctaaagagcatgtttgctaccatcttttaatggtctccctcaagattatgacatttttatcatctcaatcaactctcgccatgagaaatatactattgtggaaattgaatagttacttcttgctcaagagcattgactttagaagcatagccacgatcttgattctgatccctttgtcaattttgcacataatcgtggtgcttacatatccagatatggttcatttgatacttaatcttcaggatttactcctgctccatccttgtagctcatttattctaggctcttctcgtcaacagacttggaatccttatcctataggtcccaggcctaccatcacaccaatactgtgaatagtgctccattcccaggccaatttactactcgtccaacttgccaaatttgtggtcgagttagtcatgtttcttcaaaatattattagcggttcgaaatagaattcctagggattggtgtcgataatgtcgataaagtcccacttctatgcaggctatgattgctattagaaacattgtggttaatcctgcttggcatccgaatttgggtgctacaaatcattgtatctcctctgagaataatctgcaacaaaggcaagaatatattagatatgaacaaattcatgttggggatggtgctggtcttcaaaatcaaatcactagtaagtcctttaaacaccccacttgtctaaatctcttattgtaacaccctactgtttaggcatactatagtgactttttaattattgtgctcacatttactaaccaaagagtttcttaaaaacgtgtcaaatttaaattttttgtttaaacttttataaatatacatatatattcatacaaaaagttgggattcctcttctaaaatttataaatatatttaaaatacacttttacaaaatatgacacaacaactacaaaataaagcccaagacgtctcgagaccgaactctctaggtcaaactatttagacatgtacaatcatccttgagctctagactcactgctgctcagccttagcctttccattacctacacacaaaaacagtatttgtg

SEQ ID NO: 182106 - DNA, 707 bp, Cannabis indica
gaataatacagtgcatacttgggcattgcacttgaagggacctgtctacgtggcaatgtttaagcccctctctattgcaattgcagctgccatgactttcatttttcttggggattctcttcatcttggaaggtaacaaaaatattataatttatttaatatatgaatcaatatgcatttttttttttttttggtttattaatggtatttgatttttgaatgaacagtgtaattggagcaactatgatatcaattgggttttatactgtgatgtggggaaaagctaaagaagaagatgtgaatgaagaaatagaagagtatcaccgtgttgagggccttgaatcaccacctattgataagacccctttgttgcaaagttacaaaattgacaaaaaatagagatcaaatttccattaaaaaaaatgtaatttataatatatgatcatatgtaacatatgtaatatataacatggtgtattgtaaaattgcaagtagaaaagtaacaggttacaaaatgtttatatattctttgttacgtgtggattgtggagtggaggaaagagaattgttacatagctattagctatcttaagaattgcacacgcttcttcctttttgttggtaagaaaacgacatatcgtcttatgtcactttctcaacgacttgtcgtttgattagaaattacatataataatgataataattac

SEQ ID NO: 182107 - DNA, 621 bp, Cannabis indica
gaccatataagtttacaagtagaacaacaaacttaatctattttcactccttactactagaaagaaaatactctctctcactctcactctctctctttcactctttatatatatatatatgtatatatattatatatatcaaaatcagctgatttctaccttagtgataaaagggtaatgcaaaaaacacactacccttaacaaaatctaaaattttttctttagtaatgtcatgtagcttagaattttttttccctattcccatgaaagagtctttgatccaaaatcagctgattatctcagaagttccaaatggaagtaggaaaaatcatgtcttcattaacatcacaaacttgaaagctaccaacttcttcttctgcaccaccatgatgattatgatgattatgatctgcagctataccatgcatctcaaacaaggcatcccaattgaaattcttgtcagtaaaagctccaagctcatgaccatgatcatgaatttcttcaaatgatgatgaggtctgatcttgagtagccacatgctttcccatatcatcatcatcaacttcttctcttcatctaacttctatctctctctcctttcattactcctatctgttgaag

SEQ ID NO: 182108 - DNA, 886 bp, Cannabis indica
gaaaagatcgcgcaattgcatgcgcaacctattagcagatcgcttaacaaattaaagaaacatcaccacactcgaacacatagtcttacattcagaaagtatatggccatagggagaagccacatgtttaaacttttgtaaatccctgatgactctcagacaatccgactccaccacaacattcgtccatctgtaagtttatatttttaaacatataaacttttttttaaatataaaaaaaagtttatattttttaaaagttatcaattgaataaatgtcataataaattttgtattttttaaaagtgtacaaatagaattttaaaaaaaatttgtcaaaataaaacttaataaaaatttaatttagagatgttataacaaaactaattatattttatgtatctgctcgtatatatattaaaaattatttcaaaattaattatattaaaaaataaaattattaaaaattaaatttaaaattctatttcaataattttaaaaaaatatattatcatttcacaaaataaataatgttaataagttttatagaattcaccttacttttttttccaaaaatatatacataaaataagagacgtgtgttttacaaacactagtacaaatcgaaaccaatgaataacagatcaggacaaaaaaccccacttttgcacaccacagggagtgtatgggacccatctcaacaataaaaagcctatgattttttttatggtacttaactttccattgacatcatcaacaaatagtgcaacgtggatagtttattggtccacgtgtcactcccgtgtatcacctttgaaaccgcaacttttgccgtttacttcccagttccccagaccacaattaccaacacaatagcaaccggtgg

SEQ ID NO: 182109 - DNA, 582 bp, Cannabis indica
aatataaatttttttaaaaaaaaaaatcacccaataatttctcataaactaataattctgttatatagctatattttataataattctcttaagccatgcccaattgatctctaaactgaaagcactttttaccacccatatcaattctatacttttttttctttttttattttgttcatgtaccctaatattagtatataatgtgttttagttaattagaatattttatatgtatcttttattttaaaaatatatattttaattattatttttttgagaaaatatatttaattatttttaattttaatatttttgtgaaatatttaatatttttaattatacattttttttatgacttgctataataggtaattaacgtgtaaaattcatatttttagacttaaattaattgtatacttgaaataaatttattttttgataaaaatattttataaaaccttttcaaaaatcaatatttataattttttttttatttttttattttaagtaaaataaataaattcaggttcagatttcaccttgattgtcatcagtatatgcttcagatttcaccttcatga

SEQ ID NO: 182110 - DNA, 1299 bp, Cannabis indica
atttagatacaagttagtactaatttagttttagagtattgtgaccaaaaatacatttagtcacaataaattgtaatttttgtgactaatacttttagctatagacattttagtcacaacataagaatatgataatttataattagtcataacttttttactttcattcacaaattttattgttactaaaagtaaattcttttgtaatgaaccattatattataaagataaaattcttaccttgtagataaaacaatttggtcataattttccataaaaaaactgaaaatactgatagttacatatatatgttgctatatccaatgttcatataggctgaaatcataaattttggggaattaattaatggctgctttgggtttgtaaagagcttattattatcaattctacgtttgtttataggaaaaggaaccagatacttaaagtgttaattaacaaatagtgatgatgagttgtcattattaattgataggatggataagagagaggggaatggaatggaacagagaataatctatataatgctgaccagctcactaacatgcccacataagtaaaagcagcacaaacattcttggtagatatatataatattaatagacttaattaacaattaacattagcaatcataattattaattaattagttgtaaagacaccggccacatatgtcatctacctctttagtagttgcgtgaaaccattaaatatcgtagttgttattattctgtgtatttaattttttatatggactcttgtctattatgcttactttaattatgctgaaagataaatggtagaaaataccactagtgtctcaccaatatagttaattatatatttggttcaatatatttaagcttcataatattcatagtactactaattatttgcaacacaatatctgatgcttaatatcaatactaaaattctgttgtttctgttatcttgatgctagcgcagcctatatctatgatcgtggatatagttcttattttataattaataacactctttttatgaacttatttcattgcactagatagtataatgaagtatggaacagacttaattctttcaaataaaataatctgttatttttaggttagcgattcaaaataaccttaaaaacaatggattgtttgacaaaatttaggttctaaaaaacctagtttgtctttgttgcgatgatgtgggatactgaaaatattcagctattctttttttgactgtctcgttatttttgactatattttttaggatttaaaaagtgtagta

SEQ ID NO: 182111 - DNA, 650 bp, Cannabis indica
tttcatattaaagtcatggcataaaagagtaaatatatattcgctggcaaaagtttttatttttaagaaaataaaatttttataaataaaaatcaaatacatgtttatttctacatcaaataagagtatacttacaaagccgtagccagcggtcttgaatatcggccctatcaatgtatacttggagcaatattgagcaagaaaaatcttagtattaggggtttcatccacatatgcagcaataccaccttttgcactcccaattgataaaaaatggtcacattgttgagtggaattaagcaataaaatttgtgaattggcaaaacctctttgtttcaacaactcatacacgaaagagtatctcaaacacccaactctttctccactctttaatatttggttaatgtctttaattgttggttcgagttgttccactgttaaaagtgatgttaaactagctgcgtaactttgagtcaatattaacagaacgaacgcccaaacaatcaccacgaatcgagccaagttactcactactctctcctctgcaaacaaaccctatctttcgttaaagaaataaaattatatgtggaaaaaattttagataaggcatcatttttagttctactgtagatcataatttgtttcagtat

SEQ ID NO: 182112 - DNA, 650 bp, Cannabis indica
ttgacttgcacatgagggctcaaccccaattcacatggcactagctttgttagtcaaaaacataattggctaaaacatgagctactctattggcctcacaaaatacaaacgagatgccatcaacactatcatacaacaataaagttcttatttgatctaacaaacaatcgacatcaagacagccttcatcctttctttggattagttgaatggcttgtaaacaattcgattctatgctaaatcgatagattttacgttgtattccgacctgtaaacccaagagaatagcctgcaactccagctgaagtggagcaatttccctgttgactacagtagaggacgcatacagagaacgccccccactgtcccgaaccacacaacctatgcccgacactcctccgccacttttaactccggcatccacattaattttcatccgccccagatcaggtgccccccatttcgaattttccctcctaacccaactcacagcatcagctcctcctccctgaaactcagtcaaatacgtcctacaccagtccaccatctcccctgccataggagctgtcccaccatgtattacattgttccgtacgttccaaatgttccatgtgagtaccagagaaaactcgaacttatcctgttccatt

SEQ ID NO: 182113 - DNA, 685 bp, Cannabis indica
ccgacgaagtcgtcgctgctccacccttttggttttgatcttcaggacaggggcagacttcagaaaagtcatatctgcgaaacataaaatgaaaagattaagtataaaatcacaaccctacctgacagtttcacaacaaaagacgaatttacctgaaaattttgtcgaggagtttttgctttagaaagacgcttgtctattcgctcttgctgcttctcggatggttctttgtatactggctccctttgaagacttgcgttctcaggaatcagctgatgttctcgcaacttcgcagttgtacacaataatcgccagtcgcgatcttgtaccggaaggctcccgagaatttcagctgtctccttgctagtcgcgtcaagagtcggtcgagctggtctatctgcgatgacaacaaagagcgagtaagcaaaagatttcaaaagtaatgcaaaaaaatgtctaagtcaaaaaatacgcgacatactgggtctgcgattaaagtcagtcctaatcccaggaaccttaaagacgtaaaaccacttcgatttccaatcacccatgttcgacaccattccctcaactccgttgatttcagaagtcgcccatttgctaaagcagtagaagccgttatgaagacctacgcttttatgtcgtagaaataactgaattcttctactgagggagccct

SEQ ID NO: 182114 - DNA, 1063 bp, Cannabis indica
gaatagattttacggtaagtttaattaaatctaagtcaaagttcaatatcggtcccttccgatgcatactccatgcatccaacctgagctttactttaaccaatgttctggaaagaacatagcacttctccaaatgcaagtaaactcttgttgtagattatcatatcagtaaaaccctgtgtctgataaatctaggaaactttattcacatagtcatgtttactttccaatgtgttgacggcacaataaacaggatcaagtatgtgaaaagggtttcagatgaatttatacattatgtacatataatcatgaaataaatcatgtgaaccatgcaacattaaatgttatttctgatctatattaataagtaaatctgattatattgaaatgagttttatttagggcataaaacccaacagtctattcatgggtctttgtttcattgacctcgaggtcaatgggctcgaacactattttctttttatggccagtggttttcttttgccttttagaaggctccacctcgatatctgtaggaacccctgaattggttccacttttcttcgcttttcggtccataacatcttcaaaacgcatgtctgcgaggcaaaataaagtgttaaaattattgaaagacaaatgaaaaggaagcgtgtagtgtaactttctacctaagaaatttaccaaaaccactagaaggcgagctatcactagaagaggggtagaagggctgtagtatccacttaaatccctacagcctgtgatcttgaatatatcaaatggctcgattagttctaaattctagtttgcatctatatggcttgccctatttgtcatggtgccatattgctcagctataccataatatgactcgttacaatcaatctggacgtggaatctagggtaccagctgtcaaacctatgagtcattcggtctacgagaagggaattccaaatataaaaaattaaggcggctatctcaaaaagcaactaatgtgtacgttcagccctagtatgtggtgaccaaccacattgattacctcaggatgctccttcaccaaac

SEQ ID NO: 182115 - DNA, 564 bp, Cannabis indica
ccaaataacactatttgtgaaagttcttagccattgctgagaggaaacaaagaaagaaaaaggaaagacagagagaaagagagaagaaaagatgaattgaagaaagactgaattcattacaccgttattagagagaacaagaatatataaaagagcaacaactcactaacaaaccaaggagaagagaagaagaggttagttagagtagttatacaataacaactaactaaccaacttctataacagaattgactcttattaatattaataacactatttgacaattggtttctacttaactcaacgagttataccaaccgagagtatagaaggatatcatagaactactataaatttctttacttttagtcacgaataaaagtaaaaaagttgtgactattaatttataaattatcattcttatgttgtgattaatttcgtagctaaatgtattagttataaaaattacaatttgctatgactaaatatgatttagtcacaatatttgttgtgacttaaagttatatttagtctacgaaaaataattttttttattagtagtga

SEQ ID NO: 182116 - DNA, 615 bp, Cannabis indica
ggcataaaacccaacattaaccagtcaaactgaagccttttgagagaagtttagaaccaatattcgcaatacaaagcaaccctaaaaattctttcaaaaaaaaaaaaaaaaattaaatacctaaaatatgagttatcatgctacaagatatatggctcctacaattagacgctatatggctctcttgatcttttgaattatacttctactactaaattaataatactaaaagatagagaagtaattaaaaggttaaacggtaatttgaccaaaacgcattacgaactaacacatggaagactcactactgaaattgattatatcaatggacactgcagttaaactctgtaaatataattctataattactaatgagctgtttagaatgggttaatgctagcaagagaatgataatgcgaaatattactttgtttgtttttagggtttaaccttacaatgttattctcttagtaatataagtacccttaaaaaaaggtgatgttgacaacttaaaaaagaatgagattgaattattcccttctattatattaatttgaaatttatttttaaattaataaataaatttaataccatcaatattttgattattataat

SEQ ID NO: 182117 - DNA, 566 bp, Cannabis indica
aaaaacttaatttttagctattttgaacttcaaagttgatcaaaataagcttgatgtcgatttttattccatttataagttcactttttttttttttttcaaaatagattattgatttgaaggtcattttagttgcagacgttattctgtaaatatattataatgggagtttgatattttttttttttttgaaatttttacataaaaaatatataacccaacttttattacacttttacctttacaagggtaagataacttttacatcccttttattattttatttaccaaaataatttttgcacacacataaaccatgcatgttgacgtcattgtactataatgacactcaactctttttccctctctattctatacatttgttccatttttgtttcaattttctttttcactttttcatattcagttttccttttcaattagttctctacgatcaaaatcagatttctctctaaaaaaaaatctcccacaatttccaactatcattgaagttctagcccattgattttttttttattttttttcttctgttcaaatttctgtat

SEQ ID NO: 182118 - DNA, 898 bp, Cannabis indica
cgattccacctttcagcagcagtttcaggtttctaagggtataaattccattaaaaaattgtgaaacagacattttcattaaaagataaaatgggctaactttcaaaatgcctagcacatagcagctaccttacaattccataaagaaacgaaaacaatagaaagagaaataatcaagtcaaaccatccacagatcaaacaatagaaagaaacgaatagaatataatctgtggagctacttatttcaagttctccctttcgaaagccagttccaagagtccaccagtgtgtgaaccatcaaggcttgagtgcaattgccaaaccgaacttggggttcttttccaatcccctggaatataacatttctctttaattatttttcattaaaaagaaaagctagctaaaataatcctactctttgaactgaaaatagagaaaaaagagagtgagatttcatgaactttactagagctcttctgccacaaaacgatagtcgtcccctaacctacaccgtatgcgataacccctataaagcttctgaagcttcaccgcagcaatagctgatttgtcacgcgttgtcgaatctgcctgggctgccgttcttcgccgaagtcgaacagagcagaacgagagggagagattgaggtcgatttaggtttagggttgataaattagaggcagatttaggttgtttagggtttaggcaaaagaatgagagagagtttaattagtcccctgtttcctgctgctccgacgaactgctcgagccaccgttgtcggcgaagtcgaacaaagtgaatgagaggggcgactgatcagttttaggttttgggttggataaatgggggtataggggtttgcatatttgcagctgtagtctatactctttattattatt

SEQ ID NO: 182119 - DNA, 862 bp, Cannabis indica
gcgttaatgtttggaaattactataggtgaaacttttttactaaacctgaagccagagctctttattccgttctgcagcacgaatatgtatgccgtctttctttggtactgttccctccgcagatgaagtttctatacccaaaagctggtgctgaagagtggccacagtatgttgcagctcgctaatatacgcaattgcatcgtccacaatggttgccttcttcatctgtaacaaatcacagaccaatgctattagttttacactgcaaaagtgatctgtgaaatcactgaaatgagggaaaatgtagaaggcaaaaagttttctcctttagttcgttaaaattacatttgttattttagggactaagccacgcaaccgcagcagcttgtcgttgagcttctccctcctcctcctctcagcgtggagattcttggacttgaaattggattcagtctgctcgttttcgggtttctttcgactaatccttccattttcgccaatgcacatttcatccaaaccagagctcaggataaactggtccatatcctgcaagtattgggagctcttagtttcaccaagtgagggagggagagagccccttttgcggcagtatttcgttaaagtgtgtttctgggagacaagttatatgtataaatatatatctataaaatattttatattgaaaattggtcttcacagggtaacatgttcttcgtgtgtggaagagagaggtaatgagatgctacggatatgattataaatacacaaattagataggcacaattcctcatagcccaactaattttggctaagagagagaataagagttccgtacgtgcgaatcagttaagctattccaaa

SEQ ID NO: 182120 - DNA, 789 bp, Cannabis indica
acttttaaagtgtattatattttagtaccttatcattaatttggtattagagatactctcgtatttaaaagaaaattgctaaaatatatgactattgatgtaatcatgtatcgagtcgtatataacatatagaaattgtttgatactactagtttctaataaatactctatttaaaatgtatctttgaaattaatcattgttttttttttagttaaaattcatcaattaatcattaaagagccaaaaaggccaataaggcagtaggattaggaatgagacacaaacaaaatagaatgttctaaagaaataaataatcaatctaggtagggaatgggcagtagcattagatgctctgttacaacgacaaattgagaaactagagaatgatttcttaggattttatgagtacctctgtcatcagtaatatataaaaaaccatttgtatatatggtagacaaatttacttttgttttttttttttctagtgtcaaacgtttttatttttagttatataagaaattataatttaattttttattaacaatgtattatacttataccccaccacacatgttactagtttaatttttttaaaaaaaataaaataaaaagtaaataaaggtagtttttgtaaaacataggtaacatttccattaaaaaaactaacaaactacggcaaaatcaaaagatcaatatgaaattcaaaattaaaagctaagagaagagaatcgggcaccaaactttagtagtatccgaaaaaaacaaatccgaacaagatcaatattgaa

SEQ ID NO: 182121 - DNA, 1275 bp, Cannabis indica
gcaactacaaataaaagttaaaattttattttatagttaagtattttcgttctctttgaaataaaaaatagaaaataaaaattttactaaataaagccttaattttcgcaaaaattctttagtaatgttctcttgcaaggtatttttgtaatttaaaataatttattttaattttatggcaagtgactagaattttaaaaaaaaattatagaaaaatgtaactaataaacgaggaagaattagaatcaatatttataatatgttatatattaaaattatttgaaaacataatcataataatcttttcttatttattttatgaaaaaatataatcaaaatgattaaattaaccaaattatctttatttattaaaatataacatatatttcaaatgacaaaattctcctcattactttaacgacattccttaagaaattgtaaggaaatctgatttaaaattaaaattcttattctattaaaatacattggttaaaaattgaaaaaattattactaatatatttttaaatatacatttgattgtttttctttttagtatgaaaatgcattttatattagataaacattcataatacaaaagtatttaacgggagaggcatttcctccaaccaagaacaaatagagtccaccgaaagagcatatttgacaagtaaatgagctgctgaattggcagatctgtatacatgaccgatttgtactccagggaagtaggacactaggttcgtaatgtcagataaaagacaatggaaattggaaactgatgaagatggtgattgcaaacctttggccactataagagaatcagtctcaatatagtgaacattcagaccattgtctattaaccattgtaatccatacatcaaagcaagagcttccatcacctctggccgaaaagagcctataacaggctttgaaaaagctgccacaacttcaccatcagagttgcgaaggattgctccacagcctgttgtttgagtctccttgttgatagcagcatctgtgtttaacttaagcctaccggtaggaggattgagccaagaagcttcttgttgctgctgtaaatttcttggagaaacagcaggtgctgtagcagagttatttttctgagccgcttggaagtcttccaagtaggatagagcagaatacaccaacatgttatacggttttgttctactaccatgtttttctttatttctctcattccatattagctaaaggactgttatgaattgctcaagctaaagatttgaccatga

SEQ ID NO: 182122 - DNA, 809 bp, Cannabis indica
aataaaaataaaaattaaaaattcttcgctgatgacagttacttgttttgccaagccactcatgaggctgcttctaacctgctcctgctccactcttttgagaatgcttcaggtcagaatgtgaatgtttctaagtctactatctttttgagtcctaatacgaacactcttcttcgaggtaatatttgcaacacgctcggcatgatggaagcttctgaaggcaactactatttaggcctccctaacattatcggtcgtaacaagaatgctattcttagttttctcaagaataaagtcattaatcgcctgaatagttggcacaataagtttctctccagagcaggcaaggaaattcttcttaagacagtaattcaatcgcttcctaattatgccatgagtatttttttcattcatattggcatttgtgaagagattgtaaagcttatggcccggttttggtggaaaactagttcaagtaaaggtaacgggatcatttagatgacttgggatcgaatgaccactcataaacatcttggaggtatgggattttgacatttaagtgatttcaatcttgctatgcttgctaagcaaggttggcacttgttatgtaatcataatactctagctagtcgggtttacaaagcaaggtattttcctcactcggattttctcaacgctgaacttggctccaatcctagttttgtctgacgaaagtatttggagtgctcaaaaagctaatcaagttaggagctcgatgcacaatccggtctggtatgaatacccagtatcccttcattaatcccatggct

SEQ ID NO: 182123 - DNA, 502 bp, Cannabis indica
atagtgggccaaaagtatccctgttgaaggattttcttaaaaaggctgggcccagaagtttgatctctgtagaaacctccgtggaccactgcactaatttttgttccagcaatacaccttaggtatggcatcgataaccctctgcggtacaacttcccatccataatcacatagtgtggggtctgatattgaaacttcttagatacggacctatatgcgggaagttcccccgtacttaagaagttgtaaataggtgccatccatgaatgagagttatctgctatggcagttaccccctggactttgatgctggatttcttcaaatggcgaacagggaatactccgtgttcgatgattttatgatttgtggccaacttagctaacatgtttgcgaatgagtttttctctctcttagaatataacatatactgtaactcttcactactacaatttatacatttagtgacacaatttagtgacacgcacaaaaactgtgggtcac

SEQ ID NO: 182124 - DNA, 544 bp, Cannabis indica
aagtgtaaaaaaaattcaattatatataataatataagaataatataaactaattaaatatagatggatcgatatattttatttcttatttattagtaaaacgtgtaatatatatatatatttatatagattcaatgtatgcgtgtattcttgtatacataaaactacataaatatatacacaagtatgaaatgtttattgtgatataacaaatacttgtcattatatactcttattatatttaatttatttgtttgtgtagctatatgaaaaaaaaaaagtaaaataatgaacaaacacttgaaaatctataaatagggcatctctcaaagctattctcaaaatcaaataatatattttcttgtatacacaattttagaggcttggtctttattgtttgagcaaagatgagttgtgatgaaggtatcaaaatttaccaaactttttacaatttttatttaattttaatttatatatataacaaatatttaacattattaatttaataattatattgacaggaaagacatcgtggccagagttg

SEQ ID NO: 182125 - DNA, 1024 bp, Cannabis indica
gaaaaaaataaagaaaagagaaactagtgcctccttgtatcacaattattataaaatggtttcacatatttactgtgcgttaagttaaaatgcttttccatcctttgtagatcccttatatagatgttgactgttacacctggccactttgtgcgttcagaagatagacaaattaaattgatgtgttcgttgatttttcatttactatcaaatgtgtctacttttacacgttgtgagcgctttgtcaatgatcaaaacatgaaatgcataaagtattttaacatgcatggctaaacttccaaaacatgagatgcaaagttgggcactgttccatcacaagtaaacaccactgcatcaccaaatatctttctttttttttttgaagggtacactaaatcctactttaaaactaatagcatatggccaccttgtcaaaaaaagagtttaccaaaatatgacatgcaaagttgaacacgattccatctctagactaaacatcgagctaatcctaatcagtcccctgaaaaaaaaggaaaaatataaatacatcaaaatccgaggatagattggagaaagcaaagttagagaatgagagaaaaaaaataaaaataagaataaaatattagcaagccattaagaacatagctttagaaaatagtatgcttattgtatatattactacagaagaagaaccatctctaacaaagtaacaaaatttatttaaaaaaaacataacatatatatatacctacacatgatatacatacctgtgcctccatccagttaaagcaccagtttgaatcccttcgacaggaaatcatccctgctcaatttcaaagcaaggaacaataatgtatgtaattgcaataagattagcatgcaatattcacatatcagatttcaaacatttaccttctctcaatatatattatacatatggaaatctgtatcataaacagaatgcagtagtttgaagggaaaaaattagaaatataatacataaacgaaattaatcaaagttaaa

SEQ ID NO: 182126 - DNA, 655 bp, Cannabis indica
aaacatttacaatctattacaatgaaagagcatctttcaatcgaaagatctcaagtataatttttcacaacttttgaaactaatctctatcttgtaggccaacttttttttgcctaaaacatccctattctatgtttgacactgttttaattaactctttgtacaattacatcactattttctacatgattgttccacaattgatcattcctggcataccaaattgagagtaccatgttcgctatagctgctgccatcaccttctttttaaacttctagatttttgctttgtgagtccattttagcagttgagataattctgtggtctcagccctccatgccagccattcctttattttttccacacaaaccagtgagtaagagcagctgaaaaataggtgctttgttgactcatcctactgtaaacataatctgcaaacagcctcattaacaacttgaaatttctacaatctgtcctttgtcttaagtctattttgaaaggctaaccacacaatataaaattgtgttcaggtgtgttaaacctacccaaaaaaaaattagtgtttttttttttttttgtagaaagagactattgtattaacttggtaaataaattacataacagtcataagtggaggtggaatttcctccaacc

SEQ ID NO: 182127 - DNA, 758 bp, Cannabis indica
attgattcactacatataaaatagatgagaagaaagaagaagagaaaaagaaagtgaatgagaatttcttagttgtttattctaatagggtgaaccctaattatataaatataagagtaaaatattaaaaaactaacaaaaatggaactaagaaaaaaaatattaatcaaaattaatagtaataaataaataatttggacattcacatcattattattatttataagaagtttaatttaaaaaaaatctaggcaccagttccacattgaagacccgtatgatttagtatatttaagtttggataaaaatcctaattagtgaattaaaaattagaaagaaacgtggatttagccttgacggaaaagaagtgtgatttagctcagctgagctcagtccaactccacccgctgcttttcgaatcgtttcttgctcatttcatccctccaattcaatacacaccaccaatgcctttctagggtttccttcccccaatttcattctcacgatcttctcttttcaacctgcgatttcatacagaaaacgacaactttgtgtcttttcacccaatttacaatcgccttctttcttgttcaaacttcaaagtaattgtgcctcagcctgtcaattttgggtggaatgatttgtgttttcagcgagacgatacttccggctacccccgttcttcgccgcacactaccgtctgaattttgaccgacggtcagtatcacatatcgtaattttttttatatggaattttg

SEQ ID NO: 182128 - DNA, 787 bp, Cannabis indica
cgtgatgaatagcaccgtagatagaaagtttcatgaggaaatagtatcgtgcggttttggtggttgttatcattatatatctcatatttcctttttaccccacatatatatacaatttatattcttctattctcttctaccactacatatctctgcctcagactttgtcaccgctttgcttaatcatctgttccctactatactatatatatatagtaaccatcatgatatcacacctttcactattcccactactcaatttcttataatcactatacatgtaattaccacaaaacattttaatacatttttcagcatgcatgtcatctcttgtcacacacagatatatttcttaaatttactaattttttttttaatttacttgcaatttgtgaatttcaccgtgagaaagacttgttttgaccctaccacacactactttttacttttcagtttccaatattccatatatatatttagctaaaataaaatgtcttaatcaacaaagggcatcttcatcatcatctgtttataataattaagcatctctatatgaacatggacgtgtatggatgcatgtctatgtattgttgtattgtaataagagagaaaaagagatcatatatatcacataaatatatatgcaaacagagattattaattaattagttgattattatgagataaatttatagaaataaactttctaagaacccaaaacatggaaaattaaaatacatgtacagacccatctaagagaccaacaatttcttttcttactttcttt

SEQ ID NO: 182129 - DNA, 556 bp, Cannabis indica
tcttaaagaaagcgacattgtccccgactcagccagaattttctataggtaattcatttcagttttattatttttaattttagtttaacaaaaatgtatagtatatgtaaaaagtgcatatagtatatatataattttatatagtagagatataatataaatatatgtgtctagaggagaagaagagaataaaactagagaatagaacaaaataaaaagagatagaagaacaaacacttgaattggagatggagatcaataaaagcttgaacaaggtttttacctctttgtctaagaaaattatttccctctctataaacacttaagactttgtagaaatacttttgagaattaacgccttacaactctctagttttgtgtttgaaagatagaagagaagagtattttcaaaggatgaaccaagatctctatttatagtatttaagatctcacactttgaaattcaacaccctacagtaccccatgactattaccatctcttaattagatgtaaatgagattaagtgagtgatttggaagttatgggatgtaaaga

SEQ ID NO: 182130 - DNA, 678 bp, Cannabis indica
ataaatcaggaatagacatttggagtttttctcatagcccaaaagacaacaatattacaactatgctatgggctcacctaataaacctttatacagtccaaaaaaaaaaataacaaaaatatctcttactctatacttgtagctgcatattcctcgcactagagaaacgaagccaacccgcgatggaaggacttcgacaacaatgaagcaatgccgacaagggaagaaatactattaattccagcaaattcatatgagaagaataatattatcaaacccaaaatcaaccattatcgattaaagaaatattctgcaaaaaaaatttagtttgaaatataaactcaaccccgaaaaatctttcaaattccataaaatgtattctcctaaattcagtatacagattcataagatgtagaaatttaataaatagatatcaagttccaaatcaatctaaatcaagtgtaatccaaaaaccatgtatcaatggagtagctaatattctacttgttacattaacgtatttttttagaatttcaataggaatttattcaattccaatcgcgacaaatagactaaattcacattcatctcatgtcatgatctagcaaagttattttgatattttttttttgttctttgtagttgcattacaattagctgtcgattttattgaagctt

SEQ ID NO: 182131 - DNA, 779 bp, Cannabis indica
gtactttggtgggaaaactaccttaaagatctattctatttgcaaatctacaactctgttcttttatctccattaactcattagataatttgattcaactcagcctaatttttcaagatggcaaattggcaaattatatgcccaggtagcaaataaatcttatttttgtgttttaaaataaaataaaaaccattaaaccaaaaaaaaaaataaactaaatttttttcctctttctttcttcctgatgcttcttcttctcttccccttttcagccctaccagtgccataactcctccacacctgagctcatgacccaagcaatctagcctcaaagatccactatcctccacttagtcgtggcctagctgtgctccgcctccatcatacatccgttcatccaatttctaaggtcaaagatgttcgcttcgttcttcacttctcagttcttcttcttcttcatattttcttgttactcatcactgtctgagacctagatggagcttggagacaagttttttaggcggaggagttgtgacagtaagctttctcaattgctacaaaatcaacgaaggctaaaaactcaaatttagagcaacgctgggtcagttctgggatggtgcaatatggatatggatgccgtggtttttcagatcattggagagattttttatattttcttgaatgagtactatgctcatttattttttaggagattgctaaatttgaaatttgaatatgttttgatttagatgatgaaaaaaaaagttcaaagttttttt

SEQ ID NO: 182132 - DNA, 867 bp, Cannabis indica
atcaaggaagcgcagtggcaaaatgtttcccttgaatctgatcgtctttgtgcggttcaagccattcgaagctccttagacatgtcttctacttttggtttaattgtaaaagactgtaaaagtttgcttgcttctctttcaaatgtttctctttcttttgttaaacgatctgctaatttagtggcccacagctttgctaaggctgctagtttatttcctgatcgtcgtttcagtttggagcatgttccaactgatttgttaccttgtttggtagcagaagttcttggttaataaagattttcgactattcaaaaaaaaacatggtccatgtataaatctgtaattataactacttttgcaaataaattattttcttctctttagttatatttaatttaaagccttttttcttggaagatgatctaggaaaggaatcattttttctgaaccagcccccttatggtctacgcacaaatttagtcagccattgagtcaaacactcagaatttaatgctttctaataaataatttaacgataataaatgttttcccatgcaaaagcaatatggcagccctaaaataagctaaatctttttttgctcaaaggccgcaccagaccagtggccaagatggcaattttatttgcaacgctcttttcgttagtataatataatatttaattttatatcttttgggttaaaacggtttattatactagaaatgctaaaaaataccaatagtacttaatattttctgtgtcattatcgctatagtttaattaagtatcgagttccatatataattcaatgtaataattttttaaaaaatatagctaatcaatcacaaatgcgacatgtctagagatgt

SEQ ID NO: 182133 - DNA, 709 bp, Cannabis indica
ctctagaggtggtgccaggtattttcttacccttatagatgacttctcaagatttgtttgggtccatatattgaaaaccaaagacttggctttgaaaattttcatagaatggaaaacaatgattgagaatcaaactggtaagaaaattaagaaacttagaactgacaatggattagagtattgctcagatgcctttactgatttttgcaaaaaggttggaattagtagacacaagacagtgccaagaacaccacaacaaaatggtttggcagaaagaatgaatagaactattctagaaagggtcaggtgtctactgattcactcaggtttaccaaagaatttctgggctgaagctgtttcaacagcctgctacttaataaatcactgtccctgttctgcaataggtttcaaaacaccaattgaggcatggactggaagagatgcaaagtatgaacacctgagggtatttggttgtgtagcatttgctcatgtgaggcaagataaactcgaaccaagagccagaaaatgcatttttctgggctatcccgagggagttaaaggatacaaaatgtggagtattgagagtggagatcatcaaaagtactttatcagtagggatgttacttttgatgaaaacagggtgtatagggatactctcaaaaactcagcaagatgtaccaatctcttctgaacctgaacagaatatgga

SEQ ID NO: 182134 - DNA, 643 bp, Cannabis indica
ggaaagacaagggagaaggggaatgacacacacggtagagagacacgaaatgaaaggcagacaccacaacgagaggaatagtagaagaccatttctcaacgctaactaagcttgacacttagagactcattaattacttttctaaaaaaacacgctggatgctatctagaatgacttaacttcaataatggatttgttctattatcttgatatgacctacatttgaggttgtattatttgaagtaaagtttttagaattacacgtgtcatatggataacactaatgtattttgtttgcaaacaaccatattaatgacattggttagaacaaagatactgtataaacgactatgaatcatattcatatgaatatgagaagaaaaaaaagaaaaagatgtagtgaaagagaatttaaagaaaatgtaaagaaaatgttttctttatttttttcctcttttgtagaacgacgtggagggtactccttattatcaattgatttgtgaaactctttctgtatttttgtttttttgtttttttaagccacttagaagaagtagggctccaaattcccaatttgcataacttttatgttttaagggaatagaataaagactgatttatatttatatattgactataaaaa

SEQ ID NO: 182135 - DNA, 835 bp, Cannabis indica
atgcttaagatgattaaaaatgagagggtgggatatatattataagtgatgaattcctaatccgaaccccaccactgcaaagtcgtgtcgataccctagtaacatcacaattaaacaaacatttaactaccaattaaaaggtgttctttttctttaacttttatttttttcctagctgaactatttatttaactagaccaagaaaaaagtagtcgaaaattaaactgagatcaaattttagaagtccttcacagagaaaaaagataattaatgacacatattttgtttcgggataaccttcttcttacacacttggcccataggcagggagcattggtatttgactagagtaatcctaacagcttctatattcttatctttaatatatatacttattttttattttattttacaacatgcatatttttataatacactatacataactttttttagtaatacatcacttaaatcctaattttttaaaataattcaaataatgtaatattaatatagacatatatttctatacaaaaaataaattatttaaattcaaaataattaataaaatatatttagaacaataaataataaatgtttaaaaaaatttaaaacgaagaaagaatttagagcattctgatgtagtatatttttgatataatttttttaatatttttaaagtttttttattttagaaaaattgttgtaagtgctaaaattgtgtctaatattacacgaatatgatataattaattaataattttttatattatttattaaaaactaaactatgtctaatttaatattgaaatgcaccgtggacacacagcttcat

SEQ ID NO: 182136 - DNA, 557 bp, Cannabis indica
gtaaaaaaaaataattacatgtatgtagtttaatgatatttttataactgttagtaatatttattttggtaataattttcaagtgtcacaaaagtattttcaataaataaactaaatacataaattattcattagtgacattcttaatagtattttagtaacattttacatttgctcacactaatatatcttacattttttcttaaaaaaaaaaaatgtatatatatatcttacatttttcataaatattacaaacatgtcattgtaacattttgaagtgttactaaatgtcatttttggtgtagtgttcaaagattgttaatttttttctttctccaaaccgtgtaaatatgtatgtatacatgtatattgatatatttgttagtttttctttgattgttgatttatatcatgtgtatttggaattttggaattgggttaattactaactaatttggtcggaatttattttgcttctgggactgatgtgttggatttggctttggattatctctatataaattgttgttgttgatctagatttgagttctaaggat

SEQ ID NO: 182137 - DNA, 516 bp, Cannabis indica
atacattattttcagtgactcttccaaattccaatagaagaagtattcacaatcattactgttaaaaaagtgaaaagtataaatcccacttcacaaatacagtacgtacaacctaatctttgatctaaataaaaatatgtatgtcactactaatgatgatttttagatcaaattaaatagcactacatatatattatatataaatttataacaagagagtgggaatattatgccaccttggtttagctagaaaagggtgagcatccaaaaatttatgggctgagacgtatgtggtgatggttacacaaaatattataaataaatatgttgtacatttagtaacattacatagctacctaatcataaagtattggtctataatataaaccatggcatataacagagaatagtatacctcacttttttaaccttttcaacatttggttggtaggctccaatcaattataatatatacatatctactatatattaaatgagcattgctattaggtatta

SEQ ID NO: 182138 - DNA, 697 bp, Cannabis indica
gcaaaccggttaaccatatcagaggccagttttccgaattgtttgatttgtcgattcgttttatttttcagagccttagttggttattttcttgataattagggtgtttttgtaacaattaccaatagcaaagcccttagtagggagtttgggtttcccgaattaaggttttggcgtgttatttacccgtttacgtaaatgtgactagggcatccatgcaccacgaggttttccatttaggttggccaactaacgtgaattcggaaacaagataagaatagcatagaacatgctatatatgtgattatgtgtatgtgtgatatatatgcatgcttatggtgattcttacactaccaacactagtatggtagcagtactgagtgtattggtacagtgtacgatatttaaatagtagtgtgcggtgttaccaacactagtacaggttggtagctgagtgtatatggtataacacttagtggtagtcgaggtacggaaaaaatcctaccaacactcgtacagtagtggtacgtagtgcatgtgatacagtggtcgtactttagtaaagaatgttcttacttatctgatcagccttgttgataggtgtatgggcgcctagatacaagtcggtaatatattatttgttatatgtttttcttactaagtttgttgactcatagttgctactttcatgtgtagg

SEQ ID NO: 182139 - DNA, 828 bp, Cannabis indica
cttattcccaatcctctcttctttagctaatatgtcattaaaatctcccatgagacaccaattctcacttgtatttacttcctctaaactcttccaaagtaaacccctctcatttctattatttgaagcataaatcactgttatgaagcttgaaaacaatccatctattgttgacacttttagatgcataatttgacttgtgcatctaataatatcaacaataaaccttagaggattccaagcaatcacaatcttcccccggatgccaagcaatattagatgaaaaacaccaaccttcaaacacatttgagtacaaggctccaagctttgaagcctttactcttgtctcgaggagcccaacaaaatcaactttctgtacatcaataaattgctttattaagtactgtttctgctgattgttggcccctcggacattccaacaaagcatcttatccattgagaaaggagggtactcccccctcctctgtgttagcattgttcatctctacattctccctactgttttccactgtattctcctcactttcaagcacctgaaatgaatttttgatcactgtagctgctatcttccctgcattttccccatattttccgagcagtagtgaccttagtaaacccatcttcatccacctgctgcttccccctatgatcttttttaacaatccattccttttttccaccattgttcttcctacactcagctgctacatgtcccaaaccagaacagtaagtgcatgtggtcggcttccactcatatttcactccaatggaggtattgaatccatgttcatcctcaaactccaacaa

SEQ ID NO: 182140 - DNA, 640 bp, Cannabis indica
aatagtactaatcatgataacattaaggattgcacaatgttttcccacaacgttaaaaattagtgcaattcctttctaattttagcttatgttgtaccttttcctatttttttttttttttaatttctcttaggagtacacatttttcagaatattattaggtagactcaaacttgtaacccttgaaaaatggaagagtgcactagctcgttggatatcaaattgactcaaatcgtacaccgtagactgatatgaaatctagaaaataatatttattgatgtaaaaaacagaattacaatactccaacttggagatttcccaaaaagagttttactctttcaatatacagaatatcagatacctctctaagagagaaaaaccggacaggctcactcaactaaagaatcatagcatagcaactccaacaactaacaagatgtacaaattagccacttacaaaacataacaactcagcacaatatcgttctttcgcagcaattccagaaaatgtcaaactaaacttgggctacctacaaatgtattaacatgagcaagcaactcatacaaaatcatttaaaagccatatgttagactaaaattaaaatataatctacatggacaattccagtggggagcaag

SEQ ID NO: 182141 - DNA, 596 bp, Cannabis indica
agcttcccttggccagcaaaacagggttggccaaggtcttgatggcctgcttaactcttttttgttattcttgcttgcagttttgcttgattgctttaggattcttgacagttgacatgtcgtgtaaggtgactttgtcctattattgcaaattgtagttcacatgtcctcagtttttttagcacttttaattaattatataagttatattttaataaacaataaaataagaatattctaagaaaaataattgatttaacaatgttaattttagttgttaagaaataaacaggaggtgtttcacgtgtagttatttatgaaaattttaaattacatatgtgaatattaattgaacaataaaatcataccaaataatttcaaatataatttttttaaaatatatttattgaaaaaataataaacctatttacaggtctaaagaattctagaaaagaaactcatcatacaatttcttatataaaaaaagtgcacaaagaaatatctcaaaaagcaattgttatcacagtagctcatttgtagtcactactatatttaaaacctgatgtcattaccgtatctcacgtgtaatcatcatt

SEQ ID NO: 182142 - DNA, 696 bp, Cannabis indica
caaaggtttaagcttttagctctgagctaagctaacacagtgatgagaaacagaggtgaatgatcttcttctttgggttgaaactcttgtcagtaattattaaaagcatttttagttatttagtcattatgaacttcattattaatgttgtagttttttttaattgatatatatatatatattgatgatgattcaatgtgggagataagttagaactttgggaatgtaagatttttttaggtgagattatcgagaggtatatatatattttatatgtaaatgtatatgtatattgtatgtatgtctctctaataatttctgtgttaattttttatataaatattatttgttttaggtattgtttttattatttttatgtcttaatataaaaaaaaaaataaatctatttcattattttatcaatttattttaaatttttaagtgttaataatatagaaatgattctttaataattaattagtaggacttatttttaatttttttagtttaaagtttagagtttcagataattaccattttgccattctctacctcttgttttggttgtaaagtgtacaactcttgcatggctggtaatatggtagctaaaaaaagaagcaattaagtgcctgaaaaacatctgggtatttatgtgtgtgtatatttatatataaattgactgttacaaatatattt

SEQ ID NO: 182143 - DNA, 518 bp, Cannabis indica
aaagggaaacagaagacgagatccaatagctgacggctactgagttagcacatatgcgtattttttgagaaaaagttaaaagcatattataattagaataaataattttttgtaaaataaatcactaaacacatacaacaaaataaacatggctctgccattgatttcatagacaactatttttaatttaaatatattatataaatatatatatgtgtatataaaagaaataaccccagactctgccattgatttcaatacccctcggaaacattcaaaattgtcataaaattcctcacagtatatacaaatcatattctaaatcttaataaaacctagtttgaaaaccctaatttcaaattaaagggagaatcagataatcaaaactagcaatgtaaatctttcaatctaaatgtataacattcaaatctgaaacccccaaataagaagctaccaatggtataaaatgataaattattttttgatgataaaaatgagagactgagagagagagatag

SEQ ID NO: 182144 - DNA, 972 bp, Cannabis indica
catgagactctgcaagagaggttattgccactgaaccgtcggaaaagccccactgtaatgtctagttcccgaacaattccagtccaaataaaggcacattgaagacaaacctttaactatttttctacttccaatagaatcctgtaccaaagttaacataaacaattataaaacagagatgacaatatatctcaaaatcaaacttccaatcgaaaactagtcaattgaacatcataaacatactttgcgatccatctgaactgctcaagagaccatgaattctcaagaaaccatcggcatcagcttgagctagtaaaggaccagagttgcccccagttgggttccattttatatcaaagattcccgcggtttcaacacaataagacgtctcaaggagacatttttcagcatcaatagtgaagagcgaaatgctccctaatcggctgggttgatcaccctcatgtaatgtgtacgttgaggctgccaaaacatggtaataaggactatgcggacaaaactcaacagcatcagtgttgccgtccagatagaaatgtgccacatccatactctaaatctgctgcaaagtacaaagcaaatacaaaataactacatataactcaaaactcatatggaaattttaccaaacaggtcactaacccaattctagaaagaatattatagacgtgttcatttagttgaaatctaaagcaatgctagtgataggacagagagttcagaatgaaattcaattaaatctttggtagctgggtggattgaaagttagatggagaaatataagtaaggtagggaccaaaacaaaaggaaatcatagacacaaaaccaaaaagagaattgaagaaacaacagtgttttctaaaaatagtcattgtgaaaatttttattcgccatataacttttaaagaaaattattagtaaaaaaactatgtttggtcgcacaaacgattaaaaatt

SEQ ID NO: 182145 - DNA, 722 bp, Cannabis indica
atggcttttgagaagttacatcttttattgggttataagagataatcatctcatatttgagataagaaaaagtggactatgagagttacacttttattggacttgcattgtcataagcaagaacaaatggattaaaagtgaatccaaacttgtgaaatgagccataaattggaagagcaattttggactcaaaagtaaatgaatcaatgtggattcaaaaatagtgaaaagataacaaaattggagaagcaattttgaatcttaaatgatcaaagttgtgaacaaaattgatgagaattttgttaactttggtataattttgggctaatctcaataaggagataaccttaaaattatgagtaaaaataatcacattattttatgagtagtaatgtgagtttgatattttagttttgttgagaaaactaaaaatgtcaaatggtatttttaaagtgaccttaaaaagtcatttcaagaggaaatacacaaaagtgatattttatatacactttatgctagaaatgtgggggtgagccacaatgtgttgagacattgttgattaatttatttgattttgaattcaaattctaaatcaagtttggctatgtgcataagtgaaaatattgacatatttggtgtcaaatttttggtaaaaataatttcaagaaggaaattaaatttaagaaaaattatagagacaaagtggtcttttatattttaaa

SEQ ID NO: 182146 - DNA, 735 bp, Cannabis indica
aataaagtggcaaaaatctaattagagactggtccattgagtgtacggcctagaagtgatttttgctcaatattttattcttttttaatccatataattcagccctaagccctagttgaaacactataaaaggaacatgatgctctcactcatcatcttgtcaacttgactattgccttcaacctagatgagagagttccttccttagtgatttcagcctccttcattgttcttccatattcgaacccatagtgaaagagtgtcatgcccacacatagcaagtcaagtactcaatcatagtgagtaagacggtggtaaccaaacccgaaggagagaaagagatccaggttcagatcttgataatgctctgctacagaaaggaatcaagggctagagatcttgaacggaaggagtcattatattctgctgcaatcaatgtaaggttttcttaaacccttatgtgtttattttcattgttttagagaattcatatttaggatattaatcaacatacttgttagtaaatctagatcctggtaaaatattcccaacattaacattatagcatatatactaatcatcaaatcattatattggattgtctctaaaaataatataatatacacatatattacatacatttgttctaacatggaaaaaagaataaaaagtcatattgaaaaaaattagtaactttataatttatagtgcagtgcagtttaaactacaattatt

SEQ ID NO: 182147 - DNA, 628 bp, Cannabis indica
ttaatagattgttttctcatatatttaatgtgttaaacataggcgatatctcctattttaacactactacaaattaattttttccaacagttaataactgtcatttatactatttcccaacgcactactacaaaaatagggttcagtgacccattttaagagactttaaagatttttagtgacactccactacgtgtcactaatgtgggtgtcaaaaaaagtaatatttagtgacacttcagtgcatgtcactaaaaccttttagactctctcaccgcgcgtcactgtagacatttagaatctcacattgtcagactctaaagataacaaccacacccacagagtgtcactgtatcttacttttttttgttttttaataattttcttgacaatggccacacttatagtgcgtcactatatcataattttttaaaaaaaaaaagaaaaaaatgtatggtatatcaaatttgttttagttttattttcctttttttttttaaaaaaaaagaataaagcatcaaaactacaaaatacatcaataattcaacaatagaaataaaattttagtgttcagaaaaattatagatcaaaatgggtaacgttcaagacttgaaatattcagatgagc

SEQ ID NO: 182148 - DNA, 601 bp, Cannabis indica
aaataaacaataaaaaataaatataagtttacaacatttattgtgaagttaacaatcttatatatattgtgtgaaattgggtacactattaaaacagattttttattttattttttatcaaaattatattttagcaatgtattactaatttcgaattactctaataataataaaaataatttgtacgtaccaatattgaagatagaattccaccatcagcaagactaaggaagaagaaaacgattactgcttgggaaaatgtcttactgaaacaatgcacaagaaaaatcacacttaattaagagaatcaatatgtaaacataaactaattaagcttaaatactattttacctattccttagcaagcacaatagatcttcaatacttggaaggttcttaaaaacccgagttcttatcgatgatttaatattctttttcggtatcatgttgatcttttaaaataggctgcaacaaaccttcctcattaggcaaactttccttgaggaaaattctcatgtatattgttgcaaacatagatgctgctgcagctacctgtaataataactcctcattcaattgttataatgaaaaaaccctaaac

SEQ ID NO: 182149 - DNA, 609 bp, Cannabis indica
gctgagctaaggtgcattctcgctaagcacgagaaagatatggattttcgttgttcctaattcaatagggatgtagagctcctaaaacatgaggttcaagtctggtttcgtcatcacattcagatgaaactacactctctacagttgaagaatctatctttcttttatggcccatagtatggagttccattcaatctgcagaaacacatacacaaaaaaaactcttttttatctacattacaattcgtagaaaaatatatttgtatatgaaattatgcatactacagtacatgagaagcaacacaagttttctctagaaaaggggagtatataaaggaagcaaaaatcaagagcatggccaataaaatgagaggatagatgcagaactctacaaaaattaaaaaaaaaaaaaaaaaaaaaaaaaaaaaaacaaacaaacatcatggcaagtcaccaattatcataaagtattaattcaatcgccatataaaaaatcatgatatatatacttgtctactcataacattgtagattttttatactaatcaatcaaattttgatatatgtacacttaagtacaaattaaccaactcaaaaaaaaaaaaaaac

SEQ ID NO: 182150 - DNA, 668 bp, Cannabis indica
gattgtacatgtcggggcggttaggcctggagcgtacgatcctcgggacagcaaggctatttttgtaactagtcgctaggcgacaattattttgtatgaacagtaaacttttgtaaatgattttgtaatcgggatcccgagtcttttgtataaatattttataagtttaattaaaaagcaaaaattttaattaatcacgttttccataaacctcgttgattagcaacgagctgcacagcatgtttaaaaatcacgtaatacgcctatgttagttagggtgttacagccatgctctcaccagtttcacggctaatcatagaagcatatctccccaaatctctcagagttcaggagaaaagtaggagccagagaagaagcaagagcgagaatccgggaggtgcattgaccacttgcccgatgcaaacttggcctccaaggcacctggggggcaactgaggcacgaggcaacaggtcagttacaaagcttctaacaatgaagctgaatatgaacctgtgaatgctagccccaagctagcacccgaagcgcgagctaaccacctcgacatgcaccaagactctcagctagttgtagattatgtccctggggtgaaatatacagctcaaataaaagaaaaataatggcctatcagagctgataaagcaaactc

SEQ ID NO: 182151 - DNA, 901 bp, Cannabis indica
cttaatttccctgcaaggttaatgcccttatcttcctgggatgcccaatgaattacttgggtggcctagtgacttcttgaccttctttgattaaaatccacatgtcatgcttacaaaaatgtggacaacatttacccccgaagcttccaggacataccatggttcaggagcttgttgtatctccttctgacataaattctacacgtggtaatttggacaggatctttaatgcactacatcatcagccgccaaactagagtaccattacccaaaaggcacgattacttctattcttttgtcaatggcttaaatgctaacttttgaattttgagcgtgtggtgggtgcgtattctgtgggatgctcaaaactacagtgattggatttgtgcttccttcttattcactgtgtgccctttacaatgcatgcaatgatgggagctgactgttgggaagggtgatatcccttcaactcctcgttcatccaaccgttagacacctcttgggcgagcaagttgaatcatctaccttttgtagaaggtgccttttctaggtacccaataaatacctttagtaactgatccacttttcactttcgttgcctgtcaagctagagctctatgagtttttaaatcttctcctattgcggaagcttcatcactattacaatcagcacggtctcctccactgtggatgttgcaccaaaaccgtcaacccccagattcttgtcaactggtaaattttctttgtttattttgttgtagaatttttgaggggattgttaagattcctttgtatttttagacattggtaccacatcgatggtcttctaaagggttttaggtatcacgctgtgcgctgcctgtgttgttgttgtgtcgcttctggtaggtcagtagtctgt

SEQ ID NO: 182152 - DNA, 546 bp, Cannabis indica
atgcacccctaaaaggggtctactaatgtactccttatctgtatcgtcatctgagagaattttttagtctattttttttacggtcgtctacgttgtagttatttaggacatcttaaaaaatttgagaaattcaaaaaaacttaacatgcaaaaaacagggttcaaacacacgcgttaaagaataaagagtcgcgtgcaatagactatttgaatcctatttttggcatgctaaattttttaaaatctcttaaaattttacaaaatatcttaaacaaccaacgaaaaaaaattcaactaaaaaatactttcaaatagccaaaaacccaaataatgttacattgtacaagtacaagtaacatgaacaaatttattaaattatcatgtgcaaattgagatatattttcccatgtgaaataaaatatatatatctttttttttgctaacgtaaagaaaataaatgtaaataaaataaaacttacacaaattatgatttaggccgtggatttctatggtggtaatgctaagcaaagctggaaaaggaaaaaa

SEQ ID NO: 182153 - DNA, 708 bp, Cannabis indica
atataattactcatattactaaaaaaatattatattaaaaatattaaaatttaaaatttgataattttatcattaattatcaataaattaaatacgaccacacgcgagcaaagcgcaaattatttcctaattaattaatattacttgaacaatttacgtataatataaatccccaatacataaatttaaatattgtgctgttagaggagtactttaaaaaaatatatatgaattaaacaatttaatcataacttttataattctttaattgcaacaagtgatttattaatatgcaccaaaatactatttttttttttataaaaatagtcttgatgtggctaatagtaaaaataaaaatgaaaaagagatggataatatgtaatgttcactactacaaaaatgacattttgcttcagttgtaaaatgacacaaaaactttttgcttcggttgtataacccgacataataacagcagacgtaaatagtcaacttgtttgcttcatttctaaaccgacacaattttttttttgttctcggttgagaaccgaagcaaaaattacgctatattagcgtcagttttggaatgaagcaaaaaacgtaagcttcaaattataactgaagctaatttgtattattcgtcgtcttcaagcttttaataatcttcatgcagtaatatccacactgtacatcgtctgcttgtccgtcacg

SEQ ID NO: 182154 - DNA, 558 bp, Cannabis indica
aacactatctacttgttggtgtttatttttttctaaaataactacttgttagtatgtatttcaccaatttagtatatgaacaaaataagtaataattacaaatattttcaataaaaaaggcttaatatttgatcaattttatattttttttcagcctatttttgctaatcatgaattggatgaatcacatgttcctactaaattaaaggtaatagcttatcttgataatatattttatactttatggtattcacttgacatgtttcctaataagtattcttgtgatttagatatttggtttgttttgaccaattaaacttgatctttgttctactattttcagttatgggacctatttataaagccacaagatgtgattgggagtaggtataaatttgatgagaatttcagttacaaatttgaaaaattaagtatatacacaataaagtttatcattatgttataatatttttctaagatattttataattaagtacatattgtagtataattgtgttaaatccccttaataaagtgatcactttatttgggttaaac

SEQ ID NO: 182155 - DNA, 824 bp, Cannabis indica
aaatttggcatacgtagaacggggtttagtgtattgtagtatatcagatagatgtttttagtacattaaaaacttgattgacctatcaaaaatgcttaagacatacaaatgtaaatatttttgctgcacttattttaagttgtattcttatgatatttttggaatgggttaatgttagcaaggtaatggtaatgttaaacattaccttatttgtttggagtatttaatcttgaaatgttattcccttagtaatgtaaatacccttgaggaggctaatgttgatacattaaaaaagggtgggattaattattcccttccattatattaatttgaataacatttttaaattaataaataaatttaaataatattatgatttattataaacaaatattatgatatatatattaagtctgtaagatcgattttttttttcgagttatttttatgtttattagcaatacatatatatgcttatacataaattttaatgtagaatggtacattaatgacatagcaaacaaaaatatataacatagtgatataaaaaatattcattttaattaattgaaaatacaataaaatttaatattttctaattaataaatatatttctttaatgaataattattttatttttatatataattaacattatatagatataataaaaaaatattttaattttaatttttttaaaaataatatataagattcatgtactcagtcaaacagtatatttcaattaacggaaatatgattacatattaccctacacagctaaacacagtttacacatttctctataatcatattttccttta

SEQ ID NO: 182156 - DNA, 509 bp, Cannabis indica
atgaccattccaatgtaacaagaaaaaaatttaattatttttttatcaattttttttatgcattttaaattttattacattccattcctattcccattcctattcctatattttcattcctcccaaccaaacgcctccagtaaatcaatgaccacaccacagtttctgattaatctaggttattaaatttttattttttattttaaaatttatttaaatatcctaataataaaataatacgtggatattaatttgacacttaacgattaagttctaaaaatataacttaaatattattacagttaaaaattaaacttaagcatttatcaataatcgaaaattaaacttaaagatttacgcaatatcgttattgatacataaaggggtggtatttaagtgaggtgagcttaaagaatgacattttggacaaacagtagaatgaaaatgatgtgaaggtgagtaataacccaacaagtactcaagtggagtatacttaatcaaaaaaaaaa

SEQ ID NO: 182157 - DNA, 675 bp, Cannabis indica
attattatgttatccatcgatagtgaaatttttggtattaattttaagttccaaaaaagtgatttagcgtatcactcatcagttttacaaatattgtgacttaggggcctgtaaatcgtcgagcagcagttccactcatgttgaccagcacacttgaattcagaataaaggtaagattagtataattatatgcatatgggatcacatatttggtatgcacttttatgattaccagttagattacattgaaatagcggtatcagtatatatatagagttatattggatactaatgaatgtatgtttggcttaagtactgatttacgctatcacattggtacgactagagtaccgagtataggccggtattatggtcaataatactgttgtatgaacgttctaaactcagtatcgcgtgggacgcgaggatagggttatgattgggtgtatgggcacctaattataatccgaattataaatatgttatgattatgctttatgctttttcttactgattttgttgactcacagttattgtttgcatttttaagtaagggcaaagctaagtttgaacagtagtgagtgcaagtggatgaagattgtacatgtcagagcggttagacctagggcgtacaatctttgggacagtacgctgtattttgtatagtcgctaggc

SEQ ID NO: 182158 - DNA, 633 bp, Cannabis indica
tttttttcatataacaatgttcaaacagtttattttacaataaaatagtcacgcatacaacatactgctttaacgtaattttcaacgtgttaaatattttcgaatttcttaaaattttgcaggatgacttaaataaatataatttacatgatcgtgagaaaaaatttgactagaaaattatttcgaatactaaaacggatagagatatatcggtatatttcttttaaggggtgcattatagaatgttcctatattatatactatttttatatatttttttaatttatagtttaggttgctccgatagtttatatgtggattttaaatgggatttaagttaccccgttagttgctatgtgagtttttatatgaatttccgtaaaaatacaaagaaaaaaaatgttttaaagtgtaaaagtaaaaaaattcattttttctgacattgagaaggaggattcaaacttggaacctctccgagaaaaaaatttataatcactaaactatgtctataaccacaagataagtacaccttaatccttacaaaaattaagtttaatataattttaaaattactgttaattttttttaatttcttctcaaattattttactttaatttcaatacttattttga

SEQ ID NO: 182159 - DNA, 754 bp, Cannabis indica
tgatatatttttcatgtgattttttataattaaatgcattttaaattataattttctcatgtttatttataattattaacatgcatgcataaatacaggggcggagggaggactcaatctctacggggccaattattaaaaatttatattttaaataaaacatttttacatatatttaagtcacaaaaattatttataactaaattttttaaatatattatttcacagtaattaattagtcaaaactcaaccctataaaaatattagtcaaaatcattacttattattgttattttttttatgaatcagaggtatattattactcaaaaacatttattattattattattattttgaaaagaaaaaaatattttattaggaagtgtatgaactattatatttattgttcaattagatcattttatagttattgtagagaaaatagaaattacagaataattattataattttcataaaaaaaataagaatgtattatgtactgatccattttgatttagtaaattataatatttaattacatatctcattaaataaagacaactattcagtatttataactatatttcaaccaatatttttttaattacatatcaaaagttaaagctagttcgcgtaaaaaaaaagttaaagctaaattgtatataatcctaacacttattgctcatatatatatataaagaaatttttttgagttaaatataaagtcaatattaatttattttttcttttaag

SEQ ID NO: 182160 - DNA, 626 bp, Cannabis indica
gatatttttttcaaaatttggtcagtaggtgtaaatttctcttaaaaatactattacttccttttatacaaaatgggccctaatttaaaaaaaaaaaatacaattttataaaaaatattatttagtttctatgaaaaattattatttttgatatacattttacactttttatatttaaagttttttttttttttaactattcttaaggtattctataaaaatacaagtaaacaacaagaaaaccaaggaaataacataaaaattaatatataaataataaaaattcaacaacaaaataacaaaagtacaacataaaaatacattaaaaaactgtattttctgtaaataaaattttaaaaatcgtaaaaatatttaaaattgggtaaatactattttggaccctgtgttttgcaaaagttatcaattgggtcatctgttttgttaaatgcaaaatagaccctgtattttctaaaattgtacaatatgaccctgaactgatttttgtctaaaataaactttttttagtacattgttgtcaaaataaaacttaataatctgatctagagatattatgactaaaactggttttacaatctactgtatctattcgtgttagaaattgtctt

SEQ ID NO: 182161 - DNA, 384 bp, Cannabis indica
aaatattgtccttttttttttcttttcttttttttgtaaattcacagaaatattgtcctttgaaaacaataaatatggcctgtttttctgatatacactttctagttctgatggggatatacactttctagtttgtagttggcataaccagattttctatttgtacaaagtaggcagttggtgatattgactctttaatcaatttaaagagtaattatcaatattcaatatagactgataagttatttcctctttcttataatagtcttccttctattattattacttttgatgatgagtgagaggttttaaaaaattattaatacacacatctgatgccaacaacgacaatacatggatacaaaatttattttgaagtactaa

SEQ ID NO: 182162 - DNA, 776 bp, Cannabis indica
acatcattgatgtatctcttgcccttttttagtgtcaatggcaatggtgcctttgccgactgcttccatgaagtcaccattaccgattttgactttagtcttggatctatcaagactacaaaagatgctttcatttttcgtcatgtggttactgcaaccactgtcaagataccaagtatcttttccttcttctgttgcagcttggcagacatagaagagattattttcatcatttttctcttcggaaaaattagcttgatgggatttctttaaacgacaagttttttcagtgtggccaaattttttacaattttggcactgtggttttcctttaaaccagcagtctttctccaagtgactttttcttttacaaatgccacatggaggatacttgtcgttattttctttttgtttttcttgtgtctttttcccatcagcttttggtttttgagaccgcggattgattttagactgaaaggcattttcaacttcactttccttatgcctttctcgtctactttcatatgcttcaagagagcccattagttcagttggtgatagagtttctaaatctttagtttcctctatcacagaaactattgaatcatatttttctgtacaagaaattagtatcttttgtactatattcttgtcagaaattatttctccataggctcccatttgatttactatttctttaattctagaatagtaatcttttgcagtctcattatctttcattctaagattctcaaaatctcttctaagcttttgta

SEQ ID NO: 182163 - DNA, 713 bp, Cannabis indica
aactcatcattctgttctctggaaatagatgggcggataccattcaaaaccgagcccaagttgatacccgaagagcgaaacaaatcatgaaagtaacttgtgataacactttgaaggcccgattcccagtttacccaaacgccgttgttgtcttggagttgactaatactattatttctcttcctagagcttgcaacagaatgaaagtatttactatttttatcgccggagtttaaccaaaactgtttcgatctttgcttccaaaaaacctctcgttgagccaaaacttcagcaagcttatctttaccttccttgtgttgttgaatagacattggatcacggccccattttgagtttcggatttggcttttacattgattaattcgatggcggaagtttccagttatttcgcgaccccacttcccaagagcatccccacactttgtgattttatcttgaatatccgtgagtcccgaattcaaccagcagccttctataatctgtttgcataaaggttcgcgaatccacgcgttctcaaaccgaaaagaatgatgattagttggcgggaagatacctttgaaaaccagaagtataggacagtggtctgaggttgagatctccaaattgtagagaatcggctgagagaacaatgcaaccattcacttgtaaccacgtgtttgtccagccttcctcaatccagtcattgctatttc

SEQ ID NO: 182164 - DNA, 670 bp, Cannabis indica
atgagactagaccaaggtttttaagagagaaactgttgtgtagagaagaaattacttgttgaacctcagatgtgtatgcaccagttatgagtatgtcatcgacatacaccaagattaggagcaggttaccatttttgatggagaaaaagaggctattgccagatttgctactattgtatccccattgaatcagagtgtttttgagagtgtcaaactaggctcgaggagcctgtttgagacaacatatggctttgtggagtttacacacatggttgggataggtaggatccacaaagccttgtggtcgggccatataaacatcttcttcaagctgtccatttagaaatgcattgttaatgtcaatgtgttgaatttcttagccaatggagatagctaatgtgaacatgattcttattgtgcatggtttgatgacagagctataattttcaaagaaatcaatgcctgctgtttgttggaaacctttagcaaccaaccttgctttaaacctttcaacagttccatctcattgagttttatcctatatacccatttgatttgcataataatcatctatgaggttctaggaacaagagtccatgtttccttttctttaatgcagtcatctcagtgtttattagagcattccatttttggattggcaagagcttct

SEQ ID NO: 182165 - DNA, 733 bp, Cannabis indica
aaaataaacgaacacaaaataagccttacttcaatttacacgacaccaccgctactcacaagattcaactgttataaaactagattttcaatccaattgctcccaatactaaccttggctctcaaacttgtagaagaataaatataactcgcaaatgtcaaaaaccattagaaattcgtatacattctcaaagtcattccaacatatccacaaaccgattatcaataaacttgcatcatttaaccttatccattaatgtcaacaacatatgattagaaatcaaaaggactaatgagttttaatgtttaggcttaggacaaggtagatagaaaatttcatttaggctcacctatatcataagtttctcaaatcaaatcatcctacaattatcacatatgatcctcatatgtcctttttctctaaatacacgagagaaccttttctttgataaacttgcaacaactttcatttttttatgacacaaaattgtcaattttttttttttttcaagttgttgcaaatactttctatattgaaattcactcaataatatctttattttcacaaacaaacatactttctccattattacaatccccaacctaacaatccacttatagtatagttagggacaaaagtatacatatacataagggattcaatttttttttcgctcaaagtatgtgtaatacaagaataaacaacaagtcaaaactcaaagggtaaataagat

SEQ ID NO: 182166 - DNA, 500 bp, Cannabis indica
aaactttaacatatatgagatatgacactttgaaagttgaattaccataaaaaaaaattaaaattccctttatacattttctaaaaaaaaaaaaaacaaaatgaaactactgtgattgccggagtggtcactagggccgaaaaagtcaccggagtttgctgacggtgcaagaaaagttgttggagtagctgtcggtgttagaaaaatcatcggagttgttgtcggcgttagaaaattcgttggagtttcttggtaatttttccggtaatttttccgacgacaatgccaatttcgacgacttttttggcatcggcagctactccgacaactttttcagtacccgtcacaaataaaattacctaaaaataaataaaaacattacatatgggttttgaaaacctaatttacacatataatatattaaataccataaaaatacctaaaaataaaaaaaatatcatattaaattttgcatcaagttcgcatttgtgtattcgagt

SEQ ID NO: 182167 - DNA, 881 bp, Cannabis indica
aaaagagctaagccgacattgatgatgatgggtgaggaggaagacagaatttcgaaactacctgattcactcattctacatattctgtcgtttcttttcactaaagatgtcgtttcaacatgcctacttttccaaacgctagaaactcatgtggtattgtgtctccaaactctctttctccaattctaatttggaaaatgacccaaaaaagttttacaattatgttgataattatttggaacaccacaagagaggcatgtattttatccccgattcagccataactagttttaagcttcgtatagcttattcttatagattatagtgaggtttgtcacctagataaatggttaagttttgtagctgagaataaagtcaaggaaatagatattttcgtcaagagattaaggaataacaatggtgatatttactactacaccatacctaaaacactcatagtcaactcacgatatttgactatattgaatttgatttagtggagttggattctcgttactcgtttagctttccatctttgaaaacattgtcattatcttatgttgggcttgtagataatgatgtaatagataagctattgttgggtttcccttcccttgagaaattacaattgcataagtgttgtttatctagtcatcttcgtgatgagctccacatcaacatacaacatagtttaagcctcaaggtttcagacattatactcactaatgatttggtggaaaaaaaattgaagtaataaatcttgtttctttgatgctaataggtgtttcctttgacaaaataaaacactctgcatgcaaggcaattagaattctcacattaaattgttgttggggtatggaaaagtcgtcatcattcgaata

SEQ ID NO: 182168 - DNA, 910 bp, Cannabis indica
aggaccacgaggggactcatatgtctccatgagttggagtactcatggacattatcgggccgacccggtagtgcgtcgaagaatgccgccagaggttcaatggtacgtttcccttggcttgccggtatgccgcttgcacgagacgtggcctagatcctccaagagacgtcgtggtgcgcctaggccacgagtctcaacacgagatgacacgggtagtcattcgtgggctagtttgcatacgcgcatgggacggatgcaccatgttggaaagggacagaggtctaatgtatgcaactggtttggtggcttgtcttgagggcctgccaacatgcgtggaggcatggcgccttgaggattggtccatggacgtatgggagtccttgggcgacgagggagactattcggacagtatcgaatggggcatgatagaggcgttggcacgttggcttggtgttggcatcttgccacacatgctaccttggtcacgagtgacaaggtgagcgtcggtgttgggatttgtcttaccatggtgggaacctatggacagtgcgagtatcttggctagagagcctcgatgcatgaatgcactcatggatgcttgcgagcatgactcggcgggagttgttcgagagacggaagtgtgcacgaggcacacggtcgcgcgaaaaatgagcccattgttactcggatggttggaaggctgaccttggcttagagaagtcaaggtgccgcacgggtgttccgctgcctgaaaaggtgagcccgtgacacctagctcctactacagaatcttcgtgtgagccgggaaagactcttctcagactaatttcttttatagaacttccagccttgttttttagtttataattaaatcgttttgtcactttcattctatcgaatccatcataaa

SEQ ID NO: 182169 - DNA, 723 bp, Cannabis indica
tttacattaaggaattattatagtggtgttagagtttggagtaatgtgtttggcttagttaattgataaagtgatacataagacggcaagttttgattaatcatatgtagttttctatttcagtgaactagttttttttttgttagtggtggtggcaacgtttgcttctcatttcgttaggaatcgtagtgaatattcctgtgaatatcttctgtaaaaaataatatggcttatgattatccaatgtttcttcttgattttacaagtatgagtacgacgtacgatgtttttgggtcggtcggcaatctcattttcttaaaaaaaaattaaagcttttattaaatgggaaacagttacaagagcattgtttgggaaaaaagaggatgaaaataagagagaaatccaactaaatggctttatttttacttttttttttaaataataaagcaaatatcttttttattttttaatacttgaaataccctttattatatataatgtatattatatgttttattcctttaatagaaattataaaaacaaatacatcaaaatatctctactgaatttttgtcaattatttttttattatataaaaggtattatatgttttattctttttagatttttgctattgtcgttgttgtctaatatgttatttaagcatataattaatttttttattaatatatcgtatgatatacaaacaatatacattaaacc

SEQ ID NO: 182170 - DNA, 643 bp, Cannabis indica
aatgagcaaatctttcatattatattggacctgtgttttgtaaaaattatgaattcgacattttattttgttaaatgataaaatgaaccctatatttttaaaaaatagtaaaaataggactttgagcttaatttttaaaaaatttattttttaatataactaaagaaaattttaacacgaacagacagaaaatgtaaccagttttgttataacatttttagataaaattattattaagttttattttgacaaaaaattagttcagagtctattttgtacaattttagaaaaataccgagttcattttgtcatttaacaaaacagagaatccaatttataacttttacaaaacacaggaatcaaaatagtaattaccattttcttaacaaaacaaaataactatttgtaagaaaatacatttatttatttatttaatcacaatattttttttttttttgttatctaaatctaataaagcccattaatacatcccaaagccatatttttgaccttggaaatctttttcctcattaaaatgttacaataattagagttcatagtaggtgaagacgaagaataatctaaaaatgaacccattgatggaaaagaaccaaattcaacacctgaaatcgaacctttataa

SEQ ID NO: 182171 - DNA, 552 bp, Cannabis indica
attgtctcaggtggataaggccaagagtcgattggagaaatggggggagaagaagcagcctcttctaaacaagtgaagcccaaatatagctggtgactactactacaactacccttcaatgaaaccatttattggggtttttcccactaaagggagggagggactcagttcatagtgtacccattttcgaattgggcccttaaatttagccatagtaagggccccgttattgacactgtgattaatttaatttagtttttatgttttatactcattattaataactttcatttcacatttcataaaaaaaataactttcatttcactagtattagtatatatgtattttattgagtgattggtgaaattatatctctttttttctttctaaaatatatagtttacttattttatttaattttcgtcaaagtattatatagtttactaatttatttttgttgaaatagcatcccaataagagtcaagtaaattcaacattgtataatatgtgttacaaaatgtatcaactctcaagtatattaggtaagacta

SEQ ID NO: 182172 - DNA, 703 bp, Cannabis indica
gcccttacacccacggaatgaatggctcttatacacaagtacgtcactctggctgcttcctggattgatgactgaccctacagaccaacacgagtgtttccagcgtactttgtcctcatgattgaccttacagaccaacacaagccaacacaagtgtttccagcgtgctttgtcctcactcacacgcttcctgggaaaatttcccaggaggtcacccatcctaaaattgccccaggtcaagcacgcttaactgtggagttctttcgagatgggctaccgaaaaacaagatgcaccttgttgatataggtagtaccaatcaatccatttaagctctcttcaactgtgtagtctcatacctacacagtctcagaatcatcccacttgaccttccccaggcgatgtgggattgcacagcttacccgttattttctcttacggatcacgggactactgactatcacactaagtaaatttagaagtaattgctttttgatagttttagcttttcaaatttatcatctacggaaagttaggaatgaaatttgtggcactaaaaactaacaagattatgtaaaaaagattgtaaagtgtaaaaaattaaattttaatgatttagcctaaaaaaagtaagtaagatatgaacttgtatagaacccaatttcaggccttatacaaggcgctgttagattgtaaaaatatgag

SEQ ID NO: 182173 - DNA, 695 bp, Cannabis indica
ttgactaaagaaatttcagagtcgaagtccaatggtgttattagtattccatggaattaggtgtcgtttattgatgaagttacacgacatggcgctctacctaacaattagttgcccttgtttcttatattattgttataggaaaatgaggcacattccatttttagtactttgacatctccaatgtttaaaaattttattttatttatcttttacattattctttgttatgtgaaaagacgtgacatctatttgagtgacacgtgagaaacatttcatgacctgaacgggtaatatgctccataatgtatagtctaaagtgatttatcatttgtaaacaactcattagaagagtaagatagaatattcggacatgataaatgacaccgtccgacctgtgtcgatcttacaacaagctcacatacaccggccaaggtaaatgcatgtggaatttcttcagagatgctttcctcttttatttatcaattgaatccctattttaatgggatttctacatacaaatgatgtaatttagtgaaatataaatattaacctcgattttagccaaccgacagtggaatcgtgtttatgatcagtatcaccacgtgtacacaataagaataagtaaataaagaagacacaatatttttactagaagttcggctcccttacgctagcaagtaataacctactcc

SEQ ID NO: 182174 - DNA, 837 bp, Cannabis indica
gcaaagaaactcaccaacggccatgtaggttttttttcttttacctgaattcaagttttaaaataaaaataaacaatagaatatgacaaaagtttaagtcccctaacaaaagaaaaagggaaaggaaaagaaatagtgacaataacccaaaagaaaaaaagaaaataaatgatggttatcttggtagcatgaaaaataaagtaagaaaaaatgaacgtgaaaaagctgtgaagtattattgttaataataatgataattattaagattggaacaacattatcatgatgtgtggtgggttgtgttactcattccacgaccccatgaaaagtagatctcacctctttaattttagtcaagaaaccctatacatgtatatatttagtttctaattttaatttaagcatatttcatatcaagtttttggttatcttagtttgaaggatctatctaaaaatttatctcttaaaaggaagaaaacaaaaatatataatgtatttggtttatctatgaacgccagccaaacaagagtatggacaaatactctaacttgcaatattatttaattaaattcaattaattaagtttgaaaatgcatcataaatattattttaaattaattatatagcgattgattggccacgaagttgtcccatgtgcaaatgaaatttgataatgcgaaaagataaggaaaaatcatatcaactaataataatgtcacgaaacacacccttaaaaattcattatattacattaaaagaagaaaaaaaaaataaagacaagaagtggtgcacaccccggtatttattacataaaaattgaatatttattgcattatt

SEQ ID NO: 182175 - DNA, 897 bp, Cannabis indica
ttttgtttggtttcatattaaagtattggaatgtcattccaatagaatgatctttccactattttggttgaatgactattctattttgaaatggaaggaaagaccattccaatgcatgatgagaaaaaatttaataattttttttatcattttttcttccattttaaatttgattcattcctattcctatttcaattcccattcatattcttatatttttatttctcctaactaaacaccacctaattatgtttctttataattgaccatataaatttaatttgactaggttttactaaaattgtttaattttcgttttttttttttagtggagaagggaatttaaatttgggacttaaagaagaagtgtgaaactactaaaacacatgcctataaacacaaaattacttaattttaagaatggtttgtgaagttcttttagttgaatgtttttgctattacctattaatttatgtttctagcaagaaaaaaaaaaaaaacctaattaatttatgtatatagtggatcaaattaagcacttataaaagtattcacctgaattataattcaatataatacgttgacttacattacacatataaatactctacaactactcaaaaagtgtgtttttatgtgatatttgtgtaccaatatcatatcaaatttcatgatcatgcaatttaaaattcccacgattagttgttcagattatgaaaaggtatagcatcgatcttatacatgatttgttttctctttttctttttcatttccataggtatatgtttaaatatatatatttatatatatatatttatatattcactattcctttttggttgtcacaattcccgatgtaagtcatctatgcaatgttttagcatcaatactccttgc

SEQ ID NO: 182176 - DNA, 754 bp, Cannabis indica
gtcttcgtacatcaagtgtcaaataggtatactagatctagttagcttgtacccattaatcagacccagcctctccttttcaagcatcaatcgagaaagaacttatgcacaaagaataaagagatatcgggaaagggggcccctttgtctgagacctttaaatgggtaaaatgtcttagagagaccaccattgagaaagagttgataccaaatagtagaaatgcactgagagataaggccataaacttgatcactgaacccataagccttaagcacacactcgataaagcaccattccaacctatcataggcttttgacatatcacatttgacctcccacgacgccataactcccctattttttgcccatgtaatgcacaatctcatgggcaaggataaagtttttagcaatccatcctcctttaacaaacgccgactggaaggggcatataatcttctctaaaaaaggacggattctgtttgccaggatcttagccacaattgtatagcttacattgcataaatttataggccgataatcgttaaagcagcatgcatccttctttttaggaatgaggacaatgaaggtacggttaatttccttaatgaattttccaatggagaaaaattcttggacaaactcaactgtttgtttccccgccacatctcagtgagtattgtaaaattttgtatgaaagccatccgaacctagagagttaagttggggcatttcctgaaccaccgctctgatttc

SEQ ID NO: 182177 - DNA, 976 bp, Cannabis indica
agagtctacaacaacctccaaaaaaacagctaaatggtagcctgttttgactatataaatcccataatgatcatgatgccaaatcagcaagtcattccttggaaaaaaacttaaaggcagggtcaaaatcgtctcaacataaagatatgttccattagcgttcttcggtgattaaattggcaaccagtccatttggaggaactgaataccgaagaggattgaaagaagtgtgacctagtatccacgagtctttaccactccaaattaaccttccttctccaactttccaacggagtccaacagttaaaagttctcgaccccataaaattccttgccacgtaaaagaaggtgtacgccctgattttgagtcgaggatattggaatttgagaagaaatgactcttcaacaacttactgagtagagagtttggagtttgcaaaatccgccaagcttgtttcgctaacaaagcttagttgaaatgaacgaaagaacaaaaactcatgccaccatccttttttgttttacaaaacaagttctattttctcccatgaattttagatccttttgcatttgaaccccaccaaaaattagccatcattccttcatgttgcttgtagaatttcaaggttagtcgaaaacaactcatggtatatgttagaatggattgtactacagctctaaggagaacctctttaccccttgctgagaaaattttctcattccaagtgtgcattaatctctaaatttttccttaacattactaaacagttttgacttatcccttcctaagtaagctttcatgacattccctaatcggcatagcaagctgtcgatgaaataaaacttgagtcgctagagttgtattgggtgagaagataacactgacttatccggattgagcaattgtctagagtacggtgatagatatccagagtcacgtttaatgccaagacatgaggattcattggcctgacag

SEQ ID NO: 182178 - DNA, 540 bp, Cannabis indica
aagaaactatttggaggaataacagataaaatttggaagctcttgagttcatggaaagaacatttgttttctgctggtggtaaggaagttttgcttaaagcagtggtacaagcaatacccacttatgctatgagttgctttagattacctgtcactttgtgtcaccaaattgaaagtatgatggcaaatttctggtggggatcctctgcttctgggaagtccattcattggaaaaattggaattttctatgcaaggctaaggttcaaggaggtttgggctttcgtaacttcattcactttaatcaagcactcttggcaaagcaagcatggcgcatcattgagtttcctaattcgcttttaagcaagcttctaagcacagatacttctccaatggtaactttatctcctctggtttgggatccaatccatctttaacatggagaagcctgtttggggtaaagaattgttgttaaagggtcttcgatggagagttggttcgggtctcaccataaattgtgcaacagatgcatggatgccagg

SEQ ID NO: 182179 - DNA, 547 bp, Cannabis indica
cattccttgagatgtgataaattaataaacaacataccaatatcaaaaaattactactagaaaacatacctttgataatatttgttttttgccttgtttttgccttttggtgaaaaaatttagtgttttggtctccttcttgtagccattgtattctagacctttgtttccaatacacttcctctttaaaaagcaaatcattcaatttttcttccaattcacccaattcctttgagtatgttgaaagttgttgaagattatgcaactttgcaatctggtcatgagtctccttaattttttcagttaaagaaccaaatttgacacgactccataaagagagatttgtggaacatctctgaatgttacttgtaatggcatttaatttctttggtggcattattttttgggtttggtttgtatatgttatggatctatttttgcttgtttacaacttcatttttaatgttttcttatggttgttttattttcataaataatcatatttttcactattcaagtttttgatgtgaagatagttattgatctt

SEQ ID NO: 182180 - DNA, 1101 bp, Cannabis indica
atagtacatggtagggtatgtacgtagtataattaattaaatgaataaataataatagatgagtcatgagtgcatgcatggcatatatctctaatccaataggtacgtgtcataatcatatattatgcatggtacgagtggtaggggtctgtgtcaatgatcgaagattattgtacgtacggaatgacaagtactatactacaagtccacaacacgcactcaatgaatcgatataaatatatatatttatataacaggggtgggttcgactacaactaaggcactaattggaccaccaccaactcatgccttgcttgcttccatatatcttgtcttattttgctctatctatccatataattagctgttaatattgtaactggttctctttattataatcttataaaatgttaaatgaattgcaaagtgaagaaaacagagtttgcacacacacagtattaggtaaaatctcagctcaatttgctgagaggaattcattgctatttaatacttacacaggctgatctcagccgtttatagtagggccagatggcacaagattacaatagaataaggcacaaaaaataagactaacaaattgaggaatcttatgctaacggcttgtacggagagaatattctaaaagattttttttacaccaggccacattggcattccagattaccttccatgtcactgccaattcaccatcatttcttgataccacccctcaaacgacaggggaattcagccaactggagtttgttatcaaaaattaaatctagatggtgagagacccttggttagacagtcagccacttgatcgtgtgaggggaatgaacctgatgtcaacttgtctttgtaagactttgtcccttatgaaatgaacatccaactcaacatgtttggttctcgcatggtatactggatttgtagcaagtgctgcagcccccatattatcacaccaaatgacagggcgatttggtgaattgaacttcatttctccaagtagtccctgcaaccatgttatctcagccactaggtgagcaagagccttatatttcgatttcgtacttgagcgagcaacgacgaattgtttct

SEQ ID NO: 182181 - DNA, 781 bp, Cannabis indica
gggaaacttcatgcacaaatgtcgtattaaagttactgttccaaaatctactaagactaggtgtcccactatggtgttgtatgtagtggggcaatccaccaccacttgttttctcccttaagagtgacttgtagttgaatctttctcattggcattacaaggtccccattaaagccttgtaagttgtaattagatggggcaaggtgacaagtctccctcggtgagcccaatttcttgaaaaccatgactctaaaaattctcttgtttgctatttgggcttcaatgagcaaggggtcattatggggaaaatgcacatatcgggcgtcctcctctgtgaaagtgataggtagatttattgttcgaggatgttgggctagtactgtgttacaacgcatgtttccccttctccatctaactccctaaagtaccttttttaagagttcctggtgattctcgcaaggtgcggtccaccagagatcgtcaccatatatccatcaactggtggcggagctaagcctgagggatatgggtttctcggtcccaaagccataatagttaccgcaactagagctggcaaagtaaggagtgccaaaagttacgttcttgggacatgagaatgacctaccccctatagaggatttatagtacccttttgtccaggaataatcatatgtccataaatgaccccctattcaggatatatgatggggatacagacccattgtcccaaatggccccccctgaccagcatctcgatttcatccttcaggtgccttataat

SEQ ID NO: 182182 - DNA, 751 bp, Cannabis indica
aagcatctgtcgattcgaagatagcatctctaccattcgggacttcccgcactcgggttaacatagcatccaaaggtgttggagttatcattagaggattcttctaacgccactttggaaataagatcctggctacttttgtccctcggaaagtcacaaacgacgtcggggtgttggcgaaggagcttgagaggtctcgagcaaagagaagcataagcattatcgaattttcttttcttaaacagagtgattctctcattgatattaaatatagaattaatatgttctttgctccattaatattaaatatagaattaaagcactaatttataaacatgtaatcgaaatttgcttgtataatattgagtgtttttataatgtaccactaaaaaatatccattgatgtatcttttgctgtatctacgtctaagataatttttagtctatttttttatgttaacataattatagttatttaaaacatatagtagaattcaaaaaattcaaaataatttataatatagaaaatagtatttaaacagttttacacgcatataaaataaaatagttacgtgtataacatactgtttaaatcttgttttgcgtgtgttaaattttttctaaatttctcaaagttttacaagatgttttaaacaactataacatataccgtaaaaaaaaagactaaaaaaattactattatatgttaaaactaagataataatgcatcggtgcactccttttaaagaat

SEQ ID NO: 182183 - DNA, 732 bp, Cannabis indica
aataataataatgaaatcatcttctataaagtatattgtatgagattacaatgttgaaaaattaaagaaaaataaattaataattaaactatatatatatatatacaatttcactgtacatatataaatagagaactatatatatatttctgtatttatatagaatacacgtttggaattgtaggatcaaggaccacatcaccctcagccatcacagccgtactgccacttgtgccacggttcacgcttacaacattcccactatgctgcatggtagtggaagcaccatgcaacgtaccatcttgtacttccttgttaggccttcctctccctgccacctgtgctttcatcttcacgccattcatagaggagccgacattctgctctgaacggatattatgttgtctcttgcaaacaactttggcacactgggcatttccctgtaaatttataccttcatcacagacaaccaactcatagcgagagccagaggccataaaacaatttccacgagctccatctaccttgatccacgaccccatacattctcacagcaggtccaaccgcggggttaacccatacagtggttcgagtgcattcttgtttgcatgcataactaatttaccacattaaacataaaaaggcagtttttcatctaaaactgaatccaggattcgaggttactccagtcttgagaaaacccgagtagggatcataggatgactaatccac

SEQ ID NO: 182184 - DNA, 604 bp, Cannabis indica
ctccaaacaatagaactccaatggactttagtaacaagatgagtaagtagttgatatccttgggagacttggtacctgctgtttgtaatggcatttctatcaaccaagtttttcattttatctttaatggcaacaagtttcctccaataccaacttcctcctgtagccgtggcaatgctcatgtggtcgcaccttccattttggttcgcttttagttagatatcttgttactattggctgcatcatctaccattctagtcagttaatttttagtttgttttgtccgtaattttcaaaatatggattgtgccataaaaaatgtagtattttctgaaaaaccgtgtttttgcaaatgtcagttgtatataagaaaatataaaaactgtaatcgtttgcagcagcagaaagtaattctgctacagcaaaacagaacaggcagaatataaaatatttgcagaaaaataaataacttgacacaagagatttatacgtggtatcagtgttctcacgaacactcctagtccacggggccacgcccagagaatgaaatcaattaataaagtatcaaaattacaaagacaattgacttaaacaagtttagact

SEQ ID NO: 182185 - DNA, 642 bp, Cannabis indica
ggagaatttcctgtattggttcatatacacatcggcgtagcaccgatcacacccccaaccgatgccatactggaatcaaatcagagcaagaaaatagagcatgctcaggagtttcatattcttctccgcatcgtgaacaacaacgaggtacctgaacttttcgggagataatttgtgttgctactggtaaagccaaatggaacatatgccaaacaaaaactttcacctttggtggtatatagtaagattacatactccattccaccaatgagttagcctggatgaatctgtgactcccttctcaacttggagcgaccacgccaacgagtagccactcttaacattataaaccctgtctcgatcatagtgtcagcactaactattttctgcctcctgcctcgctaatagaatacacataattatatccacatctattaatggcaaaaaaaaaaaaaccaatgtattgagattaagataaaagatactaatacatttttctttacccgagaaagaatctacggggtcttgtaaactttttttgtacccattgcacctcgtccaattctaattttttttctttctcagttttgaaaaacttaacagttacaaaatatgcagtaatgtacattacatggtcattac

SEQ ID NO: 182186 - DNA, 782 bp, Cannabis indica
atcttccaattgttccaccctcattgattaatttttttcatctcaaaaaataatctacatggagaaatatcttctacatattgcaatttgagtggcttgcaaatccttgacatctcaaataataacattcaagggaaaattccttcatgccttgcaaatttatcctctctctccgtgctagacttgcataagaataattttagtggagaaatccctcaaggcatgtttaaaaatttaactagtttgaggagtttgcaccttagtggaaatcatctagaaggacccctaccgcgctctttgcgcaattgtcaaagcttagaagttttagatgtgagcaataacaagataactggtacattcccttattggttggaagagcttccaaagcttcaagttcttgttttgaaatcaaatagatttcatggttccataggagcaccgaaggttaaatatcctttccgcaagttgcaaatcatggatctctcagacaatgaatttactggtcgtctaccagtaaagtattttgaaagtttcacagctatgatgagcgaacatgcaatcaataacttaacacacatcggagaacaacgttaccaagattctgtaattgtggtaatgaaaggttttgagcgagaactggaaaagatcataagtatttttgtaactattgatttttcaaaaaacaattttgaagagagattccagaatcgattggaaagctaagatcacttaaagggctcaacttagtcaaaatagactcagggctccattccgatgtcatt

SEQ ID NO: 182187 - DNA, 678 bp, Cannabis indica
ccatgaattttgttctagtagtttgaaagtattgcatctttggttgtagcgttgctaaagaaaaggtcttgtatccagaaatatatggcgaaacttcaattttccatcagcatagtgaagtaaagagtaaattcaatgagttttgtgatttgattgaaagtggtggagaaaactcttctacttcagctgagtttctttcaaatctatgttcttgtgctgatcagataacagaaaccataaacaaacacttctacattgaggaagtacaggtaatttttccttaaagactcaataattttctaaatagaattaatttccatggtccaaatagtaaatggttgcgagtgttcaaatagattgctagagattcataattctcatagttgaagataataacttagaaaaaaaattattgaagaccctattttttttttgagttagcatacctctttcattcctgaaattgactgatctctctgttgtctaggttatttcacttgctagagtgaacttaaatgtcaaaaggcaacaagaaattttgtatcaaagcttgtgtatgatgcctttgagattgattaaacaagtcttgccatggctgattggagtgatgactgatgaagaagctcataactcttcaagaatatacagttggcaggtcctatatcagtctttttgaga

SEQ ID NO: 182188 - DNA, 507 bp, Cannabis indica
gtggtgctgttgttaggagatcgggatccagtgcgggagggtccacgagacctccttcttgtcaagctgacaactgtaacgctgacttaactgaggccaaacactaccaccgtcggcacaagatctgtgagtttcacgccaaggcttccgttgtcagtgtcgccggcctccaacaacgcttttgccagcaatgtagtaggtaatttaatttattataataatacaaataaataaaatagaaaaaccctaatttctgttgaccttcgtttactcatttcccataattttaaggttgaaacttaaatacataaatgtttgttttgtgtttgaacattttcaaccatttttacatactattaatgaaaaaacaagggactaccatatgtatttttgttttgtcattacatatataattatatacggctctctaattatatagtcaaattaagcgaatgaccttggttgttaaatgttctagtattaatattaaattaaaaagaaaaatca

SEQ ID NO: 182189 - DNA, 603 bp, Cannabis indica
atagttctttttaggcaaatttcatttgatattacatgtatatatatatcagcgagaatagtactgcaaagtttttattaataattaattttaaattatattgcacattaaactacgtacacaaagattaatttttgttttacttagggtgggactgttattttatgcagtggcgaacctagatttcaaagtgagggggcgtaatttttttttggtaagtgaggggggcaaaaaagtaaacttaaaaaaatgaatttaatggaattaaaactcttgtcctctaacctatatgctaagtaacttagccattacaccaaaattaatattattcttataaatataatcttttattacaaatatatgttataactaattaaattgcataaatattttttttccgattcaatactaataatttatgtcaaggtgtttttatacattataaattagttttattgctaaatataaatatatatatcagtaatttttattttgaaactaattaaatacatatcaatttgaatgtaaattattattaatttaaaattctattgcagccatattgccacacattttaaataaaatattatactaaatacatat

SEQ ID NO: 182190 - DNA, 579 bp, Cannabis indica
taaacataataattaattatgtacaaattagctaactgaagctaggtgttaaaaaataaagatgagaaaactacataaatacccttcaaatcaattacattttactataattaatatataacttcctagtttcttatataccaaacaattaactaacgacataatggaaaggaaagatgtaaatattcttttcgattatatcaatttcttattaaaagtccaactaacttatgaatttcaatttcaaagttaaacgtgcttgatctagttagagtaatctttagatagatgacttgttggaagtttctcaagtgtgcgagtgaggacaaaatatattggaaagactcgtgttggtttgtaaccataatgacgtacccgtatatactatgtaagtataaaactacaaagttgaaacagagatattgcagttttgaattgtaaaaacacaccacaaatttcagttttagtttttaatggataaatccaactaaacgtggtggagtcatgcatcaacaaaataaatgtataatctaaaaccattgttagacattataaatgatagtccccataagttaatgt

SEQ ID NO: 182191 - DNA, 697 bp, Cannabis indica
gtttgtaattaatttaggctcaattagtcatttaaatagttcctagttttttcatttttttccgttataaatttagtttttttttttagtttttttttttttttttttttttattatttacagaaattcacataattattcacatagcaactaacgacataatttaaatcgcaatcaaaatctatatagcaactcacgtaaaaactactagagcaatccaaaccgtaaattttaaaaaaaataataaaaaatagtatacagaataatttctatttaaataatttttaaattattgtttcactcaaaaaataatatggaatcttttgtaatttatgacattgttaagatactttattattttttttaagagacaatcaatggataataaaagacattatattgttttgtaacttgaaaattttatttattaaaaagaaactggacaatttcataaatactaagttgcagcaaaataaattaacacaatattttctaaaatcatacacattttttttgtttaaaagattatttaaagaataatatatatagtttaattttttattgccagcaaaataatgaaaaataaattgaaatttgatatttgtctataatatacaaatatacaaaataatgaaaaagaaattgaaatttttatgaatacaaatagcgaccacttgaggctagctcaagtggccta

SEQ ID NO: 182192 - DNA, 755 bp, Cannabis indica
gcatagaataacctcttctgtataattttccctcgaccatcgtgtaacaaggaatcaaaatataagagtttgcgtgccttggttttatctgtaggaagttctccacttaatagatacttgacaattggtgtcatcaaggttggcgaagtatccatcatgtcgacatcttcctcttcacatatgcttggctcatctaatacctccagcagtaccaaatttaacttgtcaagatcaaattgtgatgctagttttgctagggcatctacattagagttttgttctcttggaattcgttctattttaaaataatcaaacttctataagttcttccgaactttctctaagtatttagccatttttaggccttttccatggtattctcccaagacttggttcactattagctatgagtcactaaagcatgtaatgtttttgacttttagtgcctcgactattcttaatccttctaataaggcctcgtactctgcctcgttatttgaagtttcaaactgaaacctcagtgcatagtggaatttgaaattttttggcgacatcactattactcctgcccccgagccattcttatttgaagccccatcaacaaaagtttccatgtttctgccttgctttctattccagggtcttctcctgacgtttactccttctatcaaaaattcatccaaagcccgccctttgattgaaactccttgggtggtatgttacttcaaattgtcccacttcaatcgaccatttta

SEQ ID NO: 182193 - DNA, 749 bp, Cannabis indica
catcaaaattcataaatacacatacctcccaatccatccacatgagtcattttgcttgaatgcctccaacaagaatcaccaacaagttttcaagattgaacccaaacccttagagccacaatgtggagcaatccccaattttcttattaccatacaccttaaaaccactctaccatcaatgacatatatatacatacatctcatacccttataaccctaaggggttactcactaatagggcttaagtggtccttttatggtatactataatttaatgggccaattataatataaagggtgctctcatgtgcctctaatacataattaatttatcaaccatcccattatggttatgaacaaatattgggcacatagttaatgattgtgtttatggtattaagcttatgattatattagtccacaatattaattctaacagtaaattcaaaattcaatgctattttacagtcaacttggcgcattgtaatctatgctgtaacgttaatttctcaattaccaaattatctgaaaacatagagtagttgtaaagcttaattctaactgtccatttcatataatatttctaaatgatatttaactttactaagtaaaagtagttgtatgtgttggcaataatgcctgagacgtaatatgtgttccttgaatcatgcagtacgctcatggagttgtgtacagagatggtgcaatgaaaagggtgacacaatctgcgagatatgccatcaggtgac

SEQ ID NO: 182194 - DNA, 1121 bp, Cannabis indica
aattcaattaatctcactctatatttcacacttcataattttctcaattcatagctcaagatttcaaagcataatatcattgacaagttcttatggtcaatagtttggtaccgtctatgagagacaaagacctagctatgtttttctcttagaatcatccattaccactccaacatggcaaggcattcaaggcatctccaagacattaaattcaacttggaaggaaaccaattagttgtctatggccccaacagttggagaaaaccaaggcgaggtcaatctgggtggaggacaccatattatctagatggaggcaatcacgagggaaaaaaccctgataataacaaccaaggtcaagaagactcacctagggttgagcatcggccaatttggttggttttttttatataaaaatccagaattcagttttcaatctggatcggtgcaatctgaaaattgatctaccaatctagaacctatcttaaaactgaccgttttgaacctcgattgggtcggtctaaaccgtccaaaccgaacttttttttctttaaaatatgatccaatttattctataaacacattattctacaatttacaattacaatcttacaaattaattattcataaactaattatcttattttttaactttaatattaattaaataataatatattattaataattacaatacataaagtaaaaaaaaaaactaaataaattaatatatatgtataacgatcagttttggttttttcgattcgatttattacccaaaaaaaccgaaccgttcaatggcagttttaaccgctatcggttattttgattttcgattctgtcagtttcggttctaacggtgttcggtaggtcggtttgaacggtttttttgcttttttatattttattgctcagccctagacccacctacaaggaggaaactcatatctttggtccacagaatataaccaagtccatacaatggaagaacacatagacatgtaaggcgaggctacacctccctaatgtctcccatcagaaacgacctaaggtcaccaaggcattcatcttccatacgataccttttgttgcatgtcccataagacctgagtacttgttttcac

SEQ ID NO: 182195 - DNA, 969 bp, Cannabis indica
cctgctagttcaatcttagggttttttattgcctctgaatgtaacctggaactttaaatttgaatatggttgtgtttgttgtgttgtggctgcaatttatagcaaaaaataccatgccttgaaaaaagtcacctgctagttcaatcttaggattttttattgcctctgaaagacagatgaatcataccaacagttaccaatgtatcttcatatgttaaaagtagcaaatcctggaaccattactagcttgaccacagatgacaaagatcgattcaaatacttgtatctagcatatgcacattccatcaaaggatggcaacattgtagaccaattattgtggttgatgaaaccttcatatcgaggcacattgttcacagcatctacaatggatgcaagtaacaatatttttccattagcatttggtgttggcgattcagagaatgatgaagcttgggaatatttcttcacaaagctcaaagaaacatatggagaacgtaaaggtaatctgttgtatttatcttatttttgtttctaattcttgtaaaatgtcacctatttaattttttttgtaccaggttacttttactttcagaataaaattattattttgtccatgttaccaacagtaaaatcctaacactaaaattaatttttgcagatctagtaatcatatctgatagacatcaaagcatcgaaaatgctgttcaaacagtataccctaatgtcttccatggagcatgcatttttcatctacttaacaacacttaaggtccgaatacttctactatccactggtagatgatttgactataaactttgttaaagtcagcaaagacatatacattggttgggtttggtagtacgtatatggctgctcttgcaaaatagatgccgtactaaggccttacttgaaaaagtaggttaccatcaatggcgagatctcactcaccaaaaacggaagatatacc

SEQ ID NO: 182196 - DNA, 863 bp, Cannabis indica
aaaataaagggctaaacaccctcaacttctcaatcttcacaactgtgtccacttttgccaactgtggtttcgtccccactaacgaaaatatgatgattttcagcaaaaactctggccttcttctaatcctagcacctcaggttcttcttgggaacactttttttccctcgtgcatacgattttccatctgggttttgggaaaacttaaagttgggaaagaaaaatcggagtacctgttaaggaataatggtgataatattgggaaccttcatttcttgcttccgggtctgcattgttggctggtgattcctacggttttggggttcatttttatacaattcgttctgtttagctctttggaatggaattcagagtcgttgggtggaatgaatgggtatcaaaaaatcataagttctttgttccagagtgttaatacaagatatacaggagaaactatcgtcgacgtttccataatatctccggccatcttagtcctattcctcttcatgatgttagtctctccctctctctttaattatgcattttttctagaatttttatcattttaattcaatttttatgttttttttgaggagggaactctaaattttaatatgtggattccttaattaattaagatttaagaatatatctaatacacttttgatggacaattttatttttgataaatcaaatttttcattttttttttatagtagttagaattaaagaaacatgccaaaaagctctgcggcacaggacactaatttatctattttgtccagttaattgtaaaattatgtgtaccatagtacaattcttctttaatggaatttgaggtgtcgaaatttttaaaaaatttg

SEQ ID NO: 182197 - DNA, 653 bp, Cannabis indica
ttataaaattaataaagaataatacatataataatgattgagaaattgaaaggtagattttaattttaaatattaataatcaaaacaagaattatatcattttagttattatatcttgtcgatatggagagaacctttaaaagagtaatattcttcatgtataacccttttatctcttatatgatattatgccgaaataactgtaaaatgctccttaattttaagatcgaggtgcaacatcaacgaaatgttggacaaagaccaccacatgtatttcgcgatggatttcttaagatctaactgcatctgtagatacaataacctaacaacattctatataaaattaaaatatttgtacttatcaaaacaaaacataatacaatatctaaagtatgaatagtacaatatagaatgtattacatttgtgttttttttttttcttttttctatatattacttgatttttaatgtttggcaaagatttcggataagtatatagtagtaagtgtgtttatagtagtacttcatttgtcaatgtggaatctagagttgtgcataattggtttctctacttgagtgagtattatatgtgctctttaaaatatatatatttatatatttagtatataattataaaaatctaaaatatatat

SEQ ID NO: 182198 - DNA, 972 bp, Cannabis indica
ttcaccgttgtattaaacaaattagtataatctaaccaaaaatgtgttcctgaaaaaatagaaaaaagaaaaaaaaaacaaaaaacaaaatatatatattttttaagatataaataaaataacaaaaaacgtgacactgcatactcaatatttgttaagaaaaaaaaaaaaaagtaatttatagcaaaagctgtccaactattaatttacttgcaaaaaaaaaaaaacattcaactttattattttgctgggaaaaatctccaaagtagtgttccatttacatttttaaggtgtcaggtcactaaaaaattatccgggaccatattttacaaaataaaaattaaaatgagtacttaaaataaaaataaaaactttaaaaataatttgtggcaaaacccccaactatcaatttacttgcaaaaaatcatccagcctttaagttttttgaaaaaaatgtgttcaattaaactacaaaaatcattttataaactaaaacaatccgtacacatgtggtacaatcgatttagtaaatatttattaaaagaaaaatatataaatgatgtattttaatgaaaactgaagttatgagcttgtaatcactgttatttatgaagatgacttggatattattagaattcctaaatttttttcaaaagatgtaaactatctaaagaaagagttcaaaattaaagatataggaaaaacaaagttttcttttggtttacacattaagcatttaaaaaataaaattttcgttcatcagtcaactctgaaaatttctcatattattttataagtttctattgtattcttcagataatttgattaataaaatacacttataatagataaatgagtaaaattatacccatattttaacataaataataaatgtacataaatgaaacaatacaaaaatgaaaagtactttctcaacttgggaaaattaaaaaaattaaaataaaaaaatac

SEQ ID NO: 182199 - DNA, 716 bp, Cannabis indica
  modified_base (160)..(160): a, c, t, g, unknown or other
atgttgtaatcttattaatttgttgttgatatttttgttatctgtattgtttattttttgttgtttattttcattgtttacttttatgttagttttcttgttgattttatgtttgttttcgtgttaatttttagaaaactgtaaaaatgtaaaaaaaatnatttttgaacgtaagaatataaatattttacaaaaataatgctttatgtaattattccaaaaatttaaacccatgaattacattgagtaacttgttatgggataaattgtctaagcccaattcattatagcccagagatacaaaaaggcccattttaaaagagatatacaacaaatatatcctataagagttgcatcctagatgaagttaaaacatctaggtggaggagttacaacgtaaaacatcctaaacagttcactagcttatttcggatgggatgattcaatacttatcttggatgggatgattatcttggatgggatgatttatctcaataaatcatttatctcagaagagataacttatctcggataagatgactcacacatctttgataggatgactaattctaaagggatgacttattctgatgggatgactcgcgcaactcaaatgaatgacttatctcagatggatgacatatctttaagggaatgactcgtatatttctgatatgatggttcacatatattggataggatgacctacccatctc

SEQ ID NO: 182200 - DNA, 635 bp, Cannabis indica
catcttcttcatcctcaatttaaggcggattttatcgaaaaacaagactgtggaatagttattggagagaacaaaaacacaggcaattttcctcgaggaactctgaaaatatttccaagcactgctaaaacggctgatgatttgtttagatcgtcgtacgaatcttttcatttctccaagaaaagtgtcaccaaaggtacgtcacttaataaatttcttgctagaataaggatatgatttgttcctctttttaatcttaaccatttattgttgatcaaagtaactatatgattgcctagaaatttgaagtaggtaatgtgattaattggtactaattaagaatacacacaaagaaaaagagtgttgaaagtgaaaaattatgtttaatgactaaaaaagtttgacatggaatccatgaccttaggaaatgaataattttgtcacttattttaaattaaggcctaatgtaaacaattagtttatgatgtgtttggctataatgacaattattagattaacttaactattgatcctaccattttgaatatgaatgaaacaaaatttgctctatatttataaaatatattgatacacacaagtgtttaagtaattaatttttgtttctattaattatt

SEQ ID NO: 182201 - DNA, 617 bp, Cannabis indica
gccagatttgagccacagtatcacagcccatcattcgagtgtgggttcagtgccagggccgtgagagaggggggattttggtccgagtctagtcggaatctaaaatattgattaagaaaaaaaaaacctatttataaaatatagtgactttttttttgtttttaaaattttaattttcaattaaaaaattaagaagtggaaacaattttatagaacgtgttttcgaaaaatattttcacttttctaattttaaaaaataataaattgattaaaaaagtgttaccaaacgctaccttagtgaagtgcataaatacaagaagattgccacaaaagtttagagaaagtcaaagtttgtattagtcaattgttcttgtattttatggtattattaattgattttattatgatgacatgacctaaaatttttgtgagtgattttttatgtgtaaaaaaaaaaactacttttagtgttaatttattagtcataatataaaatttttgtgattaaatatgatttttagttacaataaaaagttatttgtgactaaatatcatattttgtacataagttgtcactaatttatttttaataataataaatattgtgactaaaaata

SEQ ID NO: 182202 - DNA, 513 bp, Cannabis indica
atgattgctaattataatttcttaatcaatttctaccttcgaaattacatgtttgaatattttttgagaaatttacatggtatactaacttttgctatttttttacaaaaatactgtcaggcggtattttttacttttttactgtatttttttataagtttcatactgcagtatactgtgttaagttttcactggtgttctactggtgttttactagtgttctactgttgttttgagttgttttgctttgtgttttactggtgttttataaaaacacagtatttttgaaaaaaaattcgtgtgacagtatttttgtaaaagttaacccaaattccagtatttttgtaaatttccctatttttttatagtgatatttgttgtaattacaatttcccttgtaaagttttaaaaaattcgaaatagtttaccatacaaaaaattgagttttttgaaattcctgtttagcacgtgtattcaaataattttaaagttatttttgacactataaattat

SEQ ID NO: 182203 - DNA, 554 bp, Cannabis indica
ttacttggtttttggcttcatctgatgttttaaactctattctaatttacttgtatcttatcatgcagggtaaaaccagagattttgaagaatgttgggaaggcaatcacgttactcccagaaaattttaagcctcacagagcagtgaagaaagtttatgaactgcgtcatcaaatgattgaaacaggtgaaggcattgactgggcagttgctgaagcacttgcctttgctacattgatagtggaaggtaaccatgttcgattgagtggtcaggatgttgaaagaggcacattcagtcatcggcattctgtagtccatgatcaggaaacaggggaaaagtactgccctctggatcatgttgttatgaatcaagatgaggaaaggttcacagtgagcaacaggtaatcatctctaattgacctttttgctagtgtcttggctctccaaaccagctattttgaaaggttttattcaaaaaatttcagctatataccatacttagcacattcagcttgatgatttgggccaatgaatataatctgcagattgtgcaa

SEQ ID NO: 182204 - DNA, 496 bp, Cannabis indica
ttataaccaacttgaagataattactaatacgaaaagattaaacaactttgttataacgcctttagattaaattattattaaattttattttgacaaaaaatcagttcagagtcctatttgtactattttaaaaaatagaaggcccattttatcatttaacaaaatagaagaatataattgttaacttttgcaaaacatagagttcaaaataatatttattataatataatttaatatcagttcatacatattttaatatttactaactaattatcaattattcttaagactatctccaactataaatattgtggccaattaactaaaatatttaataaatacattaataatggataaaaaaagaaataaaaaataatgatatttattatagtataaaatttgatacgtgccaaatttcacatccatttgacattaccattagaggcagagaaacacacttcgtaaatatatactaaagaatagtaatgcactact

SEQ ID NO: 182205 - DNA, 580 bp, Cannabis indica
ggggatatgggttccccggtatcgaagccactatggtcagtgtagtcatagctagtggagcaggatgtgctagaagttgcattctaaggactcgagggtgacctaccttttgtggaggatttacggtaccctactatcctggaataatcaattgcctatgagtgaccccttattcgggatatatgatgggaatatggacccattgcctaaactttcttgctctgaccaacatctcaatttcatcttttaggtggttacaatcattggtggagtgtcccacccctctgtgatggtcgcaccttttacttggatctcttttcaatattcccccttatggtgtccatgggggctttctatagtggaccatgttacaagttgctatatatacattttctcgagtatccaccaaactggaataattgatgtatcttggctcatattccttctttgctctatttgaagtctcactttgtcccagaccctttcctccactcttgtttaagactgacttcgttctgctctagaactttttctttcgattgtttgagagcgatactgcatctgacttatgtctctccat

SEQ ID NO: 182206 - DNA, 994 bp, Cannabis indica
ttaaaaaaaaagaaaaaagaaaccttttctttttggagagaagcttgttctcgttgatcttgcggccaccgccttctgtggtattgctggcgccctccttccatttgtctggcactatcaccttcgcaagcttcttctcacctgaaaagttccatagaaataaataatacggaaatcatcataaatttgcagaaattagagaaagcaaaaaacagaattgagaatttggagattcatgaagcggagaggaagatataacgaaagaaaatagagacttacacttgtcgcacaccattatcgttcttgatcgttctggtttctcttctgtgtttcttgctatcttctattatctgagccctaatttgaccactttctcagactcgggtagattcacggaagtctcagtgcaaagatgaaaagggaaaaaaactcttatggttcaatttactaaaatagcctccctttagcaacatatttttatttttatttatttatttatttttatttttttaaaaaaacgtgatctgaattccattaacacattctcgagaaggcttcaataatgggcgttaagacctcttcaaaccagtataatttattgtgtagcctaaaggcatgtttagccaaaccatgagccacaatattgtttctgcgtgacacataggtcaaaactggcttcaaaaatttagacaataaaactatgacatcctcgaacagcacacccttctcatttgcacacaccttcctattattgatagccaacactagtgagagaaagtcagatttaaccgtttctaggggaatcccacacgaaagagcaaaacttagtccagtcataagaaaaaaaatttcaacttgaaaagccgtaatactaacctgaaaagatcaaaacatcatacgatagaacaacataatacaagctcgagaaaatatattcactaaaactagataactaaaaagaagactatcaaccaaagacataactcaaccgaca

SEQ ID NO: 182207 - DNA, 978 bp, Cannabis indica
ataaaataaattccaactccatatgataccattatttttccacccaaaaaaaaaataaacaaaattaatttccagataagataccccattctatatttattattattttctgaataaactcttacttatcttaccattgacctcaattttgctgccaaaaaaaaaataataataataataataaatcacgtgcagctcaggtgcaacagcacacctgacaaaattatttcctattttaacctccagcatttactgccgtggtaattattatacgagtcaaaggacaaccgtacttctctcttcctcaaaacttaattttaccatttttttatattaaaagaaaaaaaaaacaacaattactgccaaaaattctaagttttattttattttatttaattaaacaatgccacctatacatatcaaacaactacaacaacaccgtcatttcccatcttattattaattaataatttatttaaaatcatagtacgttagtagtggggttgtgtgtatggtggtgcacagtaacgtacgtagaccgcggctcgtacaaccactatcaccattctttttttcaccactactagctactatttatatattactgctacgaaatcgaatagagaaaaaaaaaaaaaaagaaccttgggaatccaagagtgggccccactgataaggtcagagaggagtaggggactaattaatgggtcccaattatccatgatattttcaggtccaacgtcgtcgtcttgattacgcaacgctggcgcttaataacttaaacgtacatttagtaaatttcgggggtggtgtggtggtggtagtggactcatcccttgtcactaatggcagccttggactttttccttttattaaaatttaaaaaaaaaaaataaaataaataaaaaaaaagaaagtagtggccgttgcagtcactgatcagcaacagcgcaattgtcgcgcgtcctacgtgtcagc

SEQ ID NO: 182208 - DNA, 588 bp, Cannabis indica
attcggaaaattgtaatttaataacaagattccaataagggtagcactaagtttgctagtccaaatttgtattttaaattaaaaaaaaaaaccaaaaacaatatatatatagaaataatacaaaaactataaaaaatagatagattatatctgagtggtagtgtggataagataagagtagaagtactaggttggaatggccatgcccaaatttagtgtcccttaatattataattataaacctctaaataattaatttagtttgaatcattttgttaaaaaattaataataataaaaaaattgtatatatatgtaaatagatagatagatgatcatgcatgtacaaatataattacacatatatacaccatgcatgtttaatttggactaccttcttgttaattacttcttttgtattgtggacttaataaatgtgactaatatattacctcttataaaatatcacaatgattaataatttgtgaagagggtaagggaggaagcataaacttgatcatttggtatcattatgaaaatatattttatcttgagagaaaagatcagaaaaaagaaaaaagaaaatggtg

SEQ ID NO: 182209 - DNA, 888 bp, Cannabis indica
atttttatttttatttttttaaattaaaataataatacccaccaataatatttcgacacgtggcatttgaattgggtttaacagatctgttaactttgagaccaacggacaaataaaaagtgtgaccttgaggactattgccgctatttttggaccttggggactaatcagcatcaacgtgaactttttggggacttttgccgcaaatttccctatcaaaaaatatcaatgtaacaaaaataccaataaacagttcttaatactatattatattaaaattattttcgagtacatataatatttatacatgtactataatttgaaataaaattattaattctacataagtaaatttataaaatatatgtatatatttttttaagatatagttaaacttatatagaggtatattttattaatacgggacttaaaaaatgtataactaattacaatatagaggttattcttatttataactgacccaaattggaactttatttttttataacaaattagaagttattcttgaatagaatattcttgaatagaggttttactgtatcatgaacttgggtaaaataagcccaagataaaataaactatttcatatttattataattgattgcatagtgaacaataattataaacctgacaaaaaaaaaaggtttcttaaaaaaagaaaaatagacattccaataatagcgtagattagacatagtctattacatataaaaattagctcataattaagaataataaactaattaagctgtttataataaagaaaaaaaaaacaaaaaccctaagctaacaatatcttcaattaaatgacccataattaataataaatttgttaagaagtatacatatattttttgtaataaact

SEQ ID NO: 182210 - DNA, 683 bp, Cannabis indica
gtggtcaaccaaatacacaaagtagattccgctgtggcacctaaatctttgggaatcaagctttgagaagtacacttaccatgatctattaatctatattttttataagagaattttgatacatccataacaaataaagtgggaaatttcaatacctttcattttccataaatggatcattgaagaagttccaacaagcctggttcacccaacctgtacttcttaaaagtagcccaccctccatatttgtataagatggtcacagatgttactgttggaaattattttaccaggatcttagatctactcacaagtatgttgtttaaacatcctaaatatgaactttctaaaacgataaattaaacacatataaagttaagaaaaccttacattgatgcagcggaattaatgtctccttccactcagatctctaacccttgattcctttctgtagcagagtataatcaagatctgagcccgaatgtccttcttcttcaagtttgatccttcacagtcttccaatctatgattgagttactgcttgctgtgtgtgggcacttactctttcactagggtcacgaaaaagatgaagggaaaagagagagaggtatttcggccaaggtatagaaagtggggaaggctcagttttctgaagagagaaatttctgtcagaaagctaatga

SEQ ID NO: 182211 - DNA, 932 bp, Cannabis indica
ctagggttgaaaccctagcatgcgtctgtggataggacatgaggctgcttttcgtggggctgatgctcacacaaacatgccattcagacaaggcgtatccgagaaaccccagtcatgcaccctgctaggtgcctctcgtgcacccagaagaccttacaagcagcctctaacctcagtctaggtccttccatgtgcgcgcacagacagtgtgcaatgcagactgtccgatttttccattttttcaatttttcaagttttaaaaatcactttttaatgaaacaaaatttgaattttggtatatttttgtgtagattcttatttccaaactttaaacctaattatcagattaaaattaattttagatagtaggagactttaaatattatggttgtttatcgaaattttcaaaaactaaatatttcagagcttaagaaataataaaattgcaaaaatagatgcgatggagatttttacgtggttcatgtattaataaaccttagtccacaagttagtctattagcctcaaagggcgtatatgatgtttttacaatgttttgcagaaaatcccaactctctattctttgtttctcttaaagaagaggaaagcttagaataatatgagcagagctttggctctaagttgtgatcccctcttcatatggaaaaagaagggtatttttaggttgtcgggcaggtatagacatgcccatgacccacctagggttcttccaaagagcccactaatggggtaaaatacatacaaaaagagctgactattaggccccttggaagggtttgtgctcgtgcattgcagcagctagaaaaaaggggtaccatatacgtaatggacgcgtgtcactaaaaggtttaaccttgagaagtagatgcctgtaataatcgtctggtaaaaaggtgtatgaggtgtgcggcac

SEQ ID NO: 182212 - DNA, 828 bp, Cannabis indica
gtatatatactaaaaaataaattaatatatatttttttcttgaaaagaatgatatatattaattaaattggtatttttatttttgaaaaaataaaaataattaatgctcactaaaaaaactgaaaagacactgtacttttccctctctctttctcaataatcttttcaaatcttaatttttttattaaaaaatcatttagggtaatagcttaaaaccctaataatagtctctctctcctttctcaatagtgcctctaatcagatctatattttttttttctcttctcgcatcccttctcgcatctctctgtaaaactagccctcatccctttcagatctatagccttcctccattgaagacgacgaccttcaaaggcgcaaggcgagctccaccgacgaacaaggggcacttccaaacttcaagcccattgtttgcctcacaggacttcgaaatagagtttgaaccccaagtcgtctccctctattctatcgcagagtaagagcagaaccagcgacaccggctccgaaataattacgtcgacgacgccatctttggatcgacattcgccgttaatggtcgtgatgtcattctggatacattcggttatcttgtccgaagatccttcggaatcttgtcttgagaaccaattgagaaagcaagaaggctaagaaaagagactgagatccatccaatctcgaactgatccaccatttccggcggaaacgacaaacaccggctggtcctttccggtcgttctcggttctctctctcgcttttagcaatgcctgagtttttgttttgtattttttcttttttttttttgtttg

SEQ ID NO: 182213 - DNA, 820 bp, Cannabis indica
ccaccccataccataacataattccgccactgtatgtatatagtcatagaggcaaattgtatcttttttcattataaaaataatagttaagtgttaattatgatccgcttatactgattatcatattaaaattaaaattgagtattaaaaattatatgcattaaattaaaattaattaaataaaatatatgactttaataattatttttaaattaattctacatatttataataaaattttaaaataattgaaatgttaattatatttttacgactttattaagaaattttcaagtatatttcataaatcgaaactaaattatattacttataatatgtgtctataattttagtggattgtgtaataatcacattgctacaaaataaaatttaccacaaagaaattatttagtgacctaaatataattttaaagttatttatcaatttaccataattaaaatttttagcctgttaattaattatactactgattaatttttcaaagtaaaataaaattatacattttatttattaaaaaatttaaatttcaaattatataacgaaaaacttcatctacaaataaaagtaataaatatgttttataaatttgtaagaaatagaaattaagaaaatatacaataatcttgcaatattttatttttaaccaacaattttactttacgaataatttttttaatatcatttaaaatattaaaatatgtattttattaaaaaaaaattatttattatttttgtaataattgtattagtagtattattataaagtggttttttcatttttatactttaaaacagttt

SEQ ID NO: 182214 - DNA, 1241 bp, Cannabis indica
ttttagaacagaaccatctggattttctttctttttatatacccacttgcacccaatggcctttctccctggtggtaatctcacaagagtgtaggttttgtttctcaccaaagccatgacctcatcactgatggctttattccaaacaagttggctaagagcttcttgaagggagcacggttcccttgtgactaaaagggcctttggcttgtgaatgccagacttagatcaggttttcataggatgagcattgtgtgattgagaacctgaggtgcttgtctgagtagcatctgtgtttgtgtgaacagcagatgagaccacattgttgtctgcagtagggagaaccacaccaggaagagcctgtctggttggagaggcatggacatgagatgtcctggaatctgtaaggccagagactgatctggagaaacaccagtaggctgagatgaactgagaccaacaacagggatgacatctggtgtaggaacctgacctgtatgcaaaaacaggaatgttggctggggagacgtaactgttagataggcaaaaccagtggagaaggttcagtgttagtgccaacaggttgatcaatctcattatgagaactcattagatcagacatagagtaggtgcatggattgtgagagcattggggaataatagcagtcactatggaagacttggtagaactagaaggtgtaggcttagtgagagtgtcatatggaaaagaaaattcttcaaatatgacatctctagagatgtaaagtctaccattaggatcaaggcacttgtaccctttatgattaaggctatatcccaagaaaatacaaggagttgatatatactcaagtttatgcttattatatggtcttatattaggataacacctacaaccaaaagttttaagcattgtataatcgggttgaatgttaaacaagacctcaataggagaacatatggaaaaggaaaaggaaaatgccacaacaagctgcaatggttctgaaataacagtattggatgccttaggaaaaggaaatttgtgtatttttccaagacaacaagaagaacatatggaaaaatgggaaattttattgctgatatgaatgttacaagcttgcaaaacattgtgtacaattttctcagagggatgccctagtctattgtgccaaagagtaaaatcattgtgaacttcagaattacatttaccacatctagacacagaaactttggcattattaaca

SEQ ID NO: 182215 - DNA, 677 bp, Cannabis indica
acttggcatgtgcataatgcttaaaagtaattagttgtgacaaaagaactatttattttctagagtagttgttcttattgtaagcataataataataataatacttgtaaaattaatttatatatagtatagtttgacatatttttttatggtatggttaatatatacctattatttaaaaagattataaataataatttatgattaattatgtaatatatagaagcattattttaaattatgatttaaagtttaaattatgtgataactgataatgcggataaatatctatttatgggttattaatcattaacattttattatttataaaaaataggtgtgtatttgagaaaccgatatttagggagtgattcgttcaagctaatcggttattgttatattatttctttttgtttaaaccaccagtacacgacaatttagggattcgaaatcgtccatatcaaccactaggggcgggtctcttatggtgagtttttttttcttaattatacaagagagatttgagtttttggagagctagaaaaattctggggtttttggagatttttattgggtttcctaggttctaattaggggttttaacgcattggatcagtccttgaacgcccagaacgaaagtcgcaattttcatgcacattcatccacgttcttgaatg

SEQ ID NO: 182216 - DNA, 742 bp, Cannabis indica
aaggtatgtctgtcaaagcttgtataaaggctttgaccatttatatatacatattctgcattaattttctttttataaatttgtttaatatgcttcctaacataaattattccttggatcaatattataataatctatagcgtgggagaaaatcctcatctatgtgtctcatctaagtgtgagaatacggagaagaaaaagaggagtattgttccaattttagcatcagtacttggtggtttggttgtgactttgttaatagcagtggctgtttttgttggcttgaaaaagaaaaaaacccaaggtaagtaataataagactctatatttttataagtttattacaaatgaacaagcaattaatatatagaaattaattttctagctttatatgataaatttgttataacattaaatattgcagatcccagtgctcaaaagaatgcatttgaatcctcaaaacgacagtttagttactctgagatcataagaattacaaacaattttgagcgagttcttggaaaagggggatttggtaccgtttaccatggcttgatagatgagaatactcaagtagctgtgaaagtgctttcttctacttcagttcaaggttatcaacaatttcaagcagaggcatgtttttttctttattaattgttaattatatattgagatatgtaatatatagctaatgcaagtatatgaattatatataatgtggttttttctcaattataggttc

SEQ ID NO: 182217 - DNA, 710 bp, Cannabis indica
attcccgcctttcgtctcaaccaaatgaacgtccacgttcttatccgccgtcacaccggaaaacaccaatcttccatcctcttcccggaaaacatcgtacgtcgccgggtccggcggaaagaaggcgaatttcgcagccacacccgccgtcacgttccccattgttaataaaaatattatctttttagctatacgaacttacccaacaaccaaaaatggctctgactcaacctcaacctcaatctcaggcatatacaaaagaaaatcttaaaagagaggtgtgtagtaatagaacaaagaatttttttgtttttttaatttttttttttttttttttaggttttttcttgtttttgtttcgtttcggttttgtttttttctttggtcagacaatggattttgatgatgaataaaacaatgggtctttttaattattttttattttattttatttatttatatatataattaaaataaaaataaaaaaggaaaaaaaaaacttaagggtaatgatagaaagggaaaaacgtaagtggcgtcagatgaaattaaaggtaagaaaagaaaagtagccgaaacaatagatccgatctaaccgggatgagctggacctcttcctggagaagaacaaagctctcaatttctcataatttattttgatgaatataaattatataaaaataatgtattatagtattagtgatgtgtta

SEQ ID NO: 182218 - DNA, 740 bp, Cannabis indica
cgccacctataaaatatgaaatacaatgcttggtattttcatacaacttttatcacatgtccatctatctatcaaagttgacaacgtactactccactcacatcaaagactttttcttgtcctattaaatccaatatgacaaaaggcaaaatacacatccatgggctcacctactagacttagaccgcccatcaatgtacaaaacatcactaagctaactactaggcctcatcatacattgtagaagctagacatgacttctaaaaactaatatttataaattgaggcatccttaaacagattaaagttgagtaggtcctcaagataaaattacatatggcttgtttacaacaagatatattaattcatacacgaaatttggtcttcaattattcttgagagcccaaccctttacaattcaatctaaactaactactacaaacttatgccggcccagttattctcgatctaaaatcacactataggcactccgagtcaatcatgcacgcctgcgggtaatgctccttaatttgagtataacccaacttaaagagcaagggacaaactgtagtggccaaaaattgctctaagcccaatgaaaaggggcaacgatcgaagtacttacaaagcccacttacaagttagatacaaagaacccataagcccagtggctcacatgggccacgcccaatccatgccttttgggtcatacccatattcaaatatccaacccacgataa

SEQ ID NO: 182219 - DNA, 862 bp, Cannabis indica
atgtaactttaatattaccgtatatgcagtattaattagtggcatttgtatatatatctttaataattataacattctaaataatgtctcaaaagaaaattaggaagaaattgtaaagctagctagatacaaaattaattatattttgcaatttaataatgtgtgtttgaggttgactttcgtttgtaagtatctacaaaatatgagattttttttttattgaattaaaaaagtgaattttctaaggtttaaggtgcgttcgtgtaattctaaaattcctaataaaaccaactactcatgtttttgcatgtgtacttttgatatgatatggcttcgttgtcctcttacacaaattattgtaatttaattaaaaattcacacatcgtgcaataatgtaactttatagagaagccaaatgccgtatattaatgattcatttcaggcttcagctatatcaatgaaaccaacttaacttgtttatgttccataaaaaagggttaaattgtttataaaatataatcgtaaatacttatggtcagtaaataatattggatattgtgttacctatatatattttctgaaggaaaagccttaagtcttaacgcaaaaaacttaaagcagaagacatcaaattattagatttaagttggttattaaactgtactaattatgttacaatgtaatgtcttataatttttaaaatggtcttaaaactcatttttcaattgatttttttttttagttttaaccactttaaaattagttactagcggttatatatatggttaattggtccataataatattttaataataaaccaatatactatatccatatggtcataatactttcatgtcagac

SEQ ID NO: 182220 - DNA, 829 bp, Cannabis indica
gttttttctgatgctgactggggtgcttgccccgatactagacgttctgtcacaggttattgcatctttttgggagactctctcatctcttggaaatccaagaaacaaaacacaatttcccgttcttccgccgaggccgaataccgcgccatggccaatactacttgcgagatattatggttacttgccttattgaaggactttgggatcactcatccacatccagccctcatgtattgcgacaacaaagctgctattcatatttccgaaaacccgatcttccatgaacggacaaaacatgtcgaaattgactgtcatatcgtccgtgagcgggttcaaagtggccagttgaagcttcttcatgtcaacaccaaacgcaaccttgccgaccttctcaccaagcctgtttttccatctcatttcaagaagttattttccaagatgaatgtcacaaacttgtacactccatcttgagggggcatatcaaatattaaataatatttagtgttttggggtatagagatatgttattcttagttgggtttggtgtctatcatagggttggatatcctcccccctatataaagcatatttgttgtatcatttaataacaattcagaataaaaaaataatttactttctccttttatctctctaataattaattagtattactatgccacttcttacaaacaagttggccatatttttcataaatgaatataaattaaattacataaaactaataattattatatattattatatgatagtttaaagtagtacgtaaaaaccactaaatatttaattgcttttttgtacatatctc

SEQ ID NO: 182221 - DNA, 555 bp, Cannabis indica
atattataaatttactattttagctaagggaatcacacatgtttacatattattggaccgccaattgattatttaatttttttatttaaaaagttttaaaaataaatttaattaattaagagtaaattgacgattgttttttttattttatttttttttaaaaaattaaactaatttacttcgatccgcatatctatttctgataagtattaaagttttatcatatcacaatgtttctaaatgtgaaaattataaaagaagtattattattaaatttgttgtgtaagaaattttattctccttttcttttactttttctttattatatataaaaaaataaaagtaaatctctgtataaatacttaagtttaacttctgattgtaaataaatatttaagtaatttttgttggaaataatatttaagttataattctaaaacttactgtaggtacctagctgttaagtgttaagtaaattaccacgtgacaacaatttactgattggtccagatacttatggagttaaaaaataataatttaagtattattactgct

SEQ ID NO: 182222 - DNA, 749 bp, Cannabis indica
acattgagtctctatgcgacattatggttacccaccactggcacaggtgctggtggtaacacttgttcaacaggggcagccggtgccggttgccttaatcgtcgcaactcttctttttgacgaagtatgatacctcgcatttcttggaatatctgctgacagtcagcaggaggattagcattgccaaccctcgcattattccctggattctgtggaggtggaggcggtgccggtgaatcggtttgggcaagaatttactgtctacaaaattcagacacggagccgtacatttttatgaggatgagaccggtagcatggtataactccccgaacgttttaatattacagtttagcccccgaatacgtataaatttgaagctgtaaccgattgctcatatttctagagagagagaaaattttgtcgaatctcttactctgagccagtcgtcttaggtctggtacgctttttttttttctcgtgttatgctgtcaaaatcatcgccatgttagcctatacctagggtattttcactaccctctatccttttttttcatcataaccttttccaaaaccgaatgtgttgttcttccacctgttatttcttggtttcgaatatcaaatccaggtttcttctcccttttctctatgtaatttcagaaccttaatcgcatttactatttttttttggtacccttttgcttggttggtaaatactttgatttttggcggtaattagttgcttattaga

SEQ ID NO: 182223 - DNA, 1089 bp, Cannabis indica
aaactctaacaattgcatgaaagataaacatttttgggtgattttcagacaatgttctggtttactagcctcttctttgcaaacaatgggagctgagggtgctgtcaaaaaacttccatcctctaagttcccaaagtttttgccaactactttctttatgatttcgaccttggtgctatctgaaacttgcttgttttctgatacgactatgttagtttcagaattttcacttgtctgactttcgcattttttcaattccacagagatatcttcattgacaattttttcaaactgtccagtagttaaggacacgtcttccgcttgacctctctgcatgaagaaattttacttacattagatttgataaaggcagagtgccaaagttggacgtgaaaaaaggtacatagtcacaattttctctcatttttacttaagtaataatgaaattaaattgcgcacacacacacaaataccatattatagctctctttcactttaaatgaggccagattcatagaaactattatttcagactaggcttaaatataatctcataaattatactccaactgttggtcttgtttgtcaaaactatagtggtttgtttggtgtttttgtttctaaatgataatccagtcaatgacttggaatattatttttctaaccagtctacgttttgatattgagattatatgtattgtagcagtgatatgcaaacactaagcataataaatttactcccatcacttttggcagatttagaatctagtataggtgtatctcttatttctatactgtagagctgtaagctccattttctctcataaaccagcaatgttatgagaattttggaattaattactactaagaatatttctttgaaagggttctgacaaaaatgctaaagtttggcaaattgtttatttgataaaatatgatatcgtaatgtataatggttatagagaaagggggataagggatgcaacaaaatctttgtgtgatttattgtgtgtaattgttttttgcttcattttatttgtggtaacagtttttgctttaatttatgtatcagtgttaggttctaggtgt

SEQ ID NO: 182224 - DNA, 686 bp, Cannabis indica
agaccaggttcataaattaagctgcacatcaattgaaaatgcgatgtcacaatgtgaaagattttaaaattattcaagggaaaagaaaagttgcagaccaacctttcccacatgccatcaaattcctttgcgggaagactccattcgttgaaggtagaaggttgtccatccccacttaaatcctcagatggtccttcctcattaagctgaaagaacaagtactatgataaactttgaataaaaaaaagaaaaaagaaagaaggaccagacaactaagttctgaagttttttagatcatggtaatggaaaaccattttcaggtttactacttaacaaagtacaagttaagatgatcagaaaatcaatatagtttctaataaaggagtttaacagaggaagtctatgattagactctccagtcaaaatatgggacaagttcactcaattcttgataaaattacgaatgtaattagcgagaatgttgaagtaagatgccaagaataaggtgcgcaaaagaaataagaaaacacaaatgctggaactagaaatactgctatttgcaaaacgttttcttttttacctgaaaacgtgtacgtcaggcgtgacttgccagacaaagaatgtcatattctgcacccattcatctgcagaaagaaacagctaaatatcacaacaggaaaaaggcc

SEQ ID NO: 182225 - DNA, 537 bp, Cannabis indica
taagtatgtttttgatacttccagggtgtcttgaaaaggtagaatatttgcttcatagatcgttgcttgcacttggttctcctatatttttattagagattaaaaaaaaaaagttacacagtagaatttcgtaggaaaaactacaaaatgtgaaaaacctttcatatataaaataaaatatgaaaaacaaaaaaaaatatcacatgagcaaaacaaattagagaaagtgataatatacttgtggatgaataagtgtcatattcatgtatttggttggactatgtattgctgtttttgtggtttgatttttccagcaacaataactttggcagtccaattcatttctccaagagaaatctctggtataagtttataaagttactgccattgcaattcttttcctgcaacatacatcaatatgttttacatagaaaatataaaatatataatattgagattttttttgaaaaaaaattaaacataagttagcaaatatcttacttctgttttgaagaaaagttttgtctggacaatcac

SEQ ID NO: 182226 - DNA, 743 bp, Cannabis indica
ggaaacattatttaaatgggtgtaagataaaaagaaaattaaaaatcaatctctaaattgttgataattgaaaatagcatttgtctaaaaattatagataagaaaactaatgatactcattggtgaatttcaatcttcatttgcttcagagacaatagtgtaatttttgtattttgcacttttcattctagccgggttcgcataaaactggattgtctatttttttcgttgataaattgaatatggtagggtcgacgtgtgttcctgcaaacagtgatgtattttcatttaagatgattagacatcgtgtgcataatttatttaattaaaaaaacttaacttatgaaagacatgtaaaactattttattttttttaattctacacctctgcagtacattccattagttaggcagcagtatacgaaaatattttttccacaatatctgcaaacatgacagcagatatgctctttgtattgtcatcaagttcaacatatgctatagcactgtaaaatgcataataagattgttagtatcttttttaattttaacttaattttaataacatcatatgttttgtaatataccgtggtgtaattttaacttaaagaatgaccactatgcaatttgcttactttaagatgagagcacctaccattattgagttttttttaattcagatgggagcacctatcaagaaattaaaatcaaatgtaacgaaattaaatgtaattacaatgacg

SEQ ID NO: 182227 - DNA, 669 bp, Cannabis indica
atatatatatgataatttattgaaaagtataaagactcacatatatctatccacacatattattgattttgtacaactagctaagtataaaggacaaattttattaccacttttttttttcaaaaaaaaaaaaagtttgatattgaggtataatttctcatgtaataatgtaattacaaaagattgaccatacattagaaaagaaaatgtactcttaagataaatttggggctttattaatttttgtacctaatatagtttatttttctcttttaagatgacaaaattttattgaagaatatctaaatgatacaagaataagaaaaatccttcagtccataacaactaatatgtaaaatagtaaaataagtataaattaaaaatatatgtattttatgcaaaacataaatataaaatacgatatatttatatatttttgaggtaggaataaaatttcacaaaatatatatatttcatctcctaaagatgtacaaattattaattagtaaaataaaataatagtttaattagaatggcaaacttgtaataaaattataaaattatgggtatttattagtataaataagcatggattcaaaatgacacttgcaatagaatagaaagagtgcaaaagaaagttaaaatagctgagcattgttattaggtagc

SEQ ID NO: 182228 - DNA, 662 bp, Cannabis indica
cacagttttaaacacggaaactcaattcgccattggatgtcaaactttgccaaatcatcaccacaacctaccaattcaacttaaatcaaccatcataaacctaatttaacaccaggacaagaaatcaagcaggttacacatccacaactcctaaactctcaaaatcattcaacaacttaaataaagcttaagaaaacaaggaatagctagatttgaaggatataccttagattgaaacacctagatactgctgtaattccttgaatcaaaactaaaagtccttccctttcttgcttgttcttgactatttgatagagagagagaggttctacgtttttctttttctatgattatgtttctctaataaaggatccattaactaaatagtttattaaacctgaataataatgctcacaaagacaaaacctccctgcaaaagatcctttgccccagtcaaaaattcaaagattaaatgacaaccaagggtagttttgtcatttttccaacccgacaacttctgatacctccaatgcctaacaataatgccctgttaataatattcctaaccatataaaatgtcactctctaactggcccgacgtctcattccattgctaccgaacacaaaccgataaaatacgaaattgacatatataacataat

SEQ ID NO: 182229 - DNA, 825 bp, Cannabis indica
aattaattaacataccattgtaatttacttaagcacaaaaagcactagctagagcagacaaagataaatacccaattttctgtgtgaacaagaagacttgtttaaagcttgagatataaccatatatatcatactatatataaaacaattttaatttatattatctttcccatatatatatatatatatttgctttgatcttatttattaattactagtgccagctgatattattgaaactacaaataactttcaccatcaatttgttatatagttaattaataatttattaatactaatttgatttcaaacataaaattagccgccctcttcactattattctaaggtaattagtagtataagttttccttaagaaaaaattgaaagaataacatattgctagaatggataatatatatgcctaaaatttcatcccaagttgttacaataaaggatatatatatagatatatatttatatataccaaattaccaaagattaagatccacagaaagcaaaaaaccatataaatcatatatatacaaatgaaagctacagaattaattatatgtgtatatatatgaacaaaactatatataatggagattcaaaaagtttttttctatatatttagctttatccatagctaaatagcattcaaacaaactcatgcataaaaaactcaatgaacaaatctatatctttatgtcatcctgtaaggatatatatattgtacacatatataatatgaaacaatactaatataacataataaatcaacatagtaagtaatagtgatagtgatagcagttttctcaggggtc

SEQ ID NO: 182230 - DNA, 682 bp, Cannabis indica
cctgtgatatcgaggaggcatgcgagcccacttagcagaattgtgtgccataaaattttgctttcgattaattttcattagcttggagctttcgagagagagaacatcacttctgaaatgcaacaaagcaccttccaacatagtgaggcataattcactgtgtagattattaaagctagtaaccacagcctcattgtcacaaaagaagataactctcctaaattggtttttcgctacgaaatcagcagcacacaccatcatttgtgcttcaaaaagtgcaggatcagtagcaccgaatcgtgtagagaagattgcatgaatgtggtccttgcaatccctaaacactgtcgccctgaacgactaatctgaacagatgttaacataagtgcagtaggcaaaccaatcaggcagaggggataaatgaaccaaatattcatcaatgggaggattttgataagaggaatggtcctgaaattggcggcacactaatttgattgcctccaaaacctgtaagaggtggaaccatgaacaacgttattgtgcgttctacaataacatcaaagatacacagggcccccataaaaaacgctgtcaaaattaagatgtggggcctattgttgttacaacgaacccactagatccaactgaaccaaccatcacactgaatggaatctgttctgat

SEQ ID NO: 182231 - DNA, 843 bp, Cannabis indica
tttactttatagtgtataaccaaaagttaacaaaagacactatcaaaataataatgaaaaaacatatatgcctactaaaattttaaaactgtagctacatttaacagaacattatttatgaattatttttttttagttataatagttcatttattttatgtgttattttaacactttttcttactcttatttttatttttgtaattattgcacattaggaatgctcttaatcctcaagcactcacatcagatatttaaaaatagaaattttttaaaaatatttaaagaactaattacctaaaaactacattaaatcaaatgctctaaactcgttatttattttaaactgtatttaaaattaaatattcttactctacatttatataataatattcattattctaaatatattttatttttgaagataacatattttattaattgtttgagatttttatttttttttatatatgaatatacgtaaatattagtattatatatttaaaataaataaaatatattaaaatttgataaaatagaatcttggtgatgacgtttaaaaaaaacatgtatggtataatgtaaaaatttgagataaaataaaaaaaaatatatgatatatttttcaagatagtataaataaattgatgtgtgtattatagagaatactatttattctttaaaattattttaataatatttctcccaacttgaggaagatctgacaaagagggactaagcattttttttaacatctaaaataccttatatacagcctatataaaacaatatatactatacaaattaaaatgtttttcattcaatattagattcaatccttta

SEQ ID NO: 182232 - DNA, 675 bp, Cannabis indica
aaacccaacactcaacccatcgtgcatgtctcctattgagcttgtgttgccccttcaattgtttaagggattcatgatcagtgtgaatcacaaattctttgggccacaaatagtgttgccatgtttctaaagctcgcaccaaggcataaaactctttatcataggtggggtcattaagtgcagccccacctagcttttcactaaagtatgcaaggggtctctcttcctgcataagaacagtgccaatacctacaccagaagcatcacattcaatttcaaatgtgttagaagaataaggtaaaacgagtactggggcatgggtaagcttgtgtttaagcagttgaaatgcctcctcttgtgtttcaccccattcaaaagaaacattctttttgataacttctgtaatcggtgctgcgatggtgctgaaatccttgtcaaaccttctataaaaactagcaaggccatgaaaactttgaacatgacctatagttgagggctccggctagctgctcattcacctcagggacagaccgagtcatgtagtgggtgagtatacctttgcctctcttagtctctggatgcagcactggaggtgggggaggggcccgtgatctgctcggatccgcttctgcaagctcggatccgctcttcgctgctcaggcttttccgagctcc

SEQ ID NO: 182233 - DNA, 784 bp, Cannabis indica
aatcaataatttaaaatacagaaaacataaaaatatttcatttataaaaaattattaaggttagttattagataataagaaagcaccttgagatccaattttcctaattaatttgaattcgatcatctattacatcaaccatcagtgaaaatgtatgaaatatacattttcttccattattattatttaagcattatattaaaaaataaaaaaggcgtaatattgttaattttttattataattttttcatcaatttttgtatttgaaaatacaaaatgccccaaataattaacacgtttactaaggagagtctcacgaaatcttccttctttgcctacaattacatttaaaaacgactagtaaatcttattatgaccatctcttattggttgtccgtaaattctaatatcaagaagggtatttataacttcttgtgctaatttctcttgatacatttttaattcccctgtagatcttgttattaataaattgataggaggattgttttgataaataactcttctatagagttcattaatattaaatttattagtttactatcatctatttgaatgattggtcttaactctggagcaagaacgagtaatataaaattatctattctagctctatatttgttcgaataaaatgtttagttaattttgtgcatctaaccgaaaaaattatttcttcttcaaactttttaatttttccattcattattcgtaggccttctttctcctaattatttctattctattaaccaataatctataataattc

SEQ ID NO: 182234 - DNA, 448 bp, Cannabis indica
agtttgaccatgtgttgaaagacaagtaaagaagtcaaagaagaagaggggataataatttccattattagtcaaataagtagttaataatattcctaggggaacaaaaaaaaaattctaaataaagacataattaatgatattttaccagtttataatggattgggtttccaattttgttgacggaatccttttctttgtgtgtttgtgctccaagaatactcgttgcgaaaaaagaatatgttgttaaatttgtaaaacgatcaaatatatatagttgctccgttaatatatatatatatatatatatatatatatataagcactgtgcaaaatctcacggaaaaattcatagttttgcttgggcgtttgttgtgcacttggtggatttccacgagtgcgcaccatgggtgtgaactatgaattcttccatgagattttacacagt

SEQ ID NO: 182235 - DNA, 613 bp, Cannabis indica
cctcagtgatattagaagggttcattgatttctaagaatgtgggaaaatcaagttcggaccctgatgttagttctttcgctctttccatggtggcttttctaactttatccgaaaccttattaatattatttgtcatcatttttaaattgaagcataaaccaatagtgtcgatctgttatgtattcaacaaaaaataaaaagatatagttaaagaaacatatatattaataaattattagtttgaccaacaaatgtgttgagacaagaagtcaaagaagaagaggggataataattccattattagtcaaataagtagttaataaatattcctaggggaacaaaaaaaaaaattctaaataaggacataattaatgatattttaccagtttataatgaatccttttctttgtgtgtttgtgctcaaaaaaaaaaaaaaatcaataaagactcgtagcgaaaaagaatatgtgttaaatttgtaaaacgatgaaatatatatatatatagtccatgcaccgttaatttatatatgggagagtacgaggtgatgtgatattctaatttcactttaaatacggtttatttttatttccttaattctctgtttttta

SEQ ID NO: 182236 - DNA, 573 bp, Cannabis indica
actggttcagatatcactacatagacaaaaacaaaaaagtaaaatctatagaagaaggaattaaaaaaaatcagatatatgtaagtgtttggttggtgggaaaatattcttacagttatcattgagccagggaaagcgaagctgtgaagatgtggattgagaacggggaactggagcagaaggtaatagatcaagctgaagaggaagttggagatctgatgatgaagaaactggtttacttggatcgtgaataattttttttatcttgatcttgatcagatgatgatgatgatcttgaactgaaagcagagtttcccaaggccatgcaaaaccctagctcggactggctattattattattattagttatcttctgggtggctttgtggagaaatgaaaacggcgtcggatttgtctcgcctaagctaagggctaactccattttctttgactgtaataataataataataataataatattaagtagaaagaacaaagggaagaaaccagagaggggttttcttcttctttcttctttttttcaaaaggttttggtggatatagctaagttg

SEQ ID NO: 182237 - DNA, 646 bp, Cannabis indica
gtctaagttttaagttaaacactaaaatgtctaaactttaaatacaaatagtttaactaataaatgtaatttatgtgatataatatatacacttctataaaaatatataaatcggtttaatgtttattcgggttaattggacggtttagaataatttgtaaaccacccaatatattcattgggcagtttaaattttcattgtattatttcaggttatatcttttgtcggtttatttagtttggtttgggcggtttattcaggttgggcaatttgtaaattttgttgaacacccctagtatcatatatttaattagtaattttttttgagaacaagtaacttttcttttattgatatcaagaaattattaaaaaaaaatataagaagaattaattaaatattaatattaaatatgagagcgacacataatgaaaaaaaatatcttcatgtatagacgttttttgtgattctatctaagcattttttaatactttttaatatttttttattatataaattattttttaacatatataaatataattagattagatcggtttttaattaaattttgagatcgacattcaataactcatttaatctaattacaacctaacttttaatatctaattcaatccaattataat

SEQ ID NO: 182238 - DNA, 953 bp, Cannabis indica
atgacatgtgagagagataccgaataagattttaatgtcgaaagaaggacacctatagctcattatggtacacggaatcgttattcagagttaaccaacaaagacaatcagagcgaaattctttgacttgaaattcaatatctcggggccatctaaattctacaaacataacccaaaatttctacaaactgataatatacctgtacacaacaagtttatataagaatacaaaattatagacacacattatcgactaaaaaaatattatagtcacattttacatattttttagaaaaaaaattaattattaatattaatttttcaccgctcaaattattcagcaaaaaagaatatcaaaatttttatataccaggtaagaactgcacgtgccatctacaagtatatacttttgtaacttaatgcaccactctagctactagattaggcaaactgtcatgattttaatttattttgcaactaggaaaggtatagccgcgcgaagtgttagctaatattttttactttatatatataactttgtgttttaatttagtatagtataatatgaaatatggtattgtgatgctttataaaaaaaagtaacagtttcaattatatattcatgcaacattgatgtatgacttaattcgtacaaacattaatgaaagagtaaactgctttcagcaaaaaaaaaacaaaatgaaagagtaaacatcatatggaatatagatcgtgcttttgaggtagaagaaggccactccaaaaaggagaatccacaaatgtataatttatttctatttatatattatataaaaaataatttttttctaaagaaattatacaaatatcactactacaaaaaccccctttagaggtggtttttaagccctttcagcgtcggtttttgcgaaattccctaccgacgctgattagggcgacgctaaaggatttat

SEQ ID NO: 182239 - DNA, 913 bp, Cannabis indica
attgtctgtcttcactctccacaatttactattccgatcactcaattttttgtgatagatagcctatcaacattgttagacaaatgaatgatacaacaaagctttctttcttccttagtataattagagaagtttcctgatattggataacaactcaacattataaatgatattttcaagtcttaatgaccattcaagctttgaagataaaaattgcagcaacatgtcttatggcgtcaaattcctttttattggaaagaaaaccttaacatgtgcatagccaaatgccatgcactgagactcgtagggtaataaaaaactaaaagtagaagtacatggacattcacatactggctctttgcgagaatagactgaaggcataaccccatcatcttcagaagcatgcctctctaactgaataagcagacaggctgatgctgatggaacatctaaatgaaagattccacgagactcagatgaagcacttgcctggaaaataccacatcttgattattaagatgttgcagaaatgacaaaaataaatagacgcggatgaggagagggaataagaataaaagtttctacaacgcccttacaacttacatcttgcatttcactaggtaggacaagaaaatgaaagtcttcagacaacttatctcttctatcccaattgtataagcaaattgtaccggaaaatggctctataaaaagagagaaacagagatcagaatttaccgcatgcaacttaaaacaatatagagccagtacatgagtaaactgcttaccgactagtccagcttggaatgataaagatagaactttcacagaaatcttcaatccactgaaacaacataaagagtggtttgatgaaacagatcagtatggaaaaaagtataaaagaaccaaaatttct

SEQ ID NO: 182240 - DNA, 741 bp, Cannabis indica
tagtacatttagatactttatagtataagtaatgttattggacactttaaggtgtctaatttcaccgatgtgacacattgtgattggttaacgattttctatttatttattaaatcagaatataggatctaatattaatttacaccaataataatatattatctcttgtcccttaccacttttcctcataagtcatagcatatgagtaagaaaataaatatttttatttgttctaacaaaaaaaatattttcttctttacttagaaaatagaaacctaactaagacaataattttttctttcaggtgattatacatacagcggtataacttataatgcatcagcatttggctcaagcatttacaagtgcagaaaagtagctgacaaagctcttaaattatcagattcatgtccttacttaaactgtacattttctgggatatggaatggaggaggaggaatcggagtgagtaatctttacgtcggttccttctttttcgatagggcggctcaggtatgttaattccctcattgttattgtgtttcacttctaaattacaaggattaattgaaattttgttagctaatttgtttaactacataatttaattaggttggctttatcaacaagagtgaccatgttgccaaagcttatccagcacaatttaaagatgcagctactcttgcttgccaaactaaatttgaagacgccgcatctgtatttccaggtgtagcgaagtct

SEQ ID NO: 182241 - DNA, 508 bp, Cannabis indica
aattctattaaaaaaacattaaaaatttatatttacaaaataccaatttacatagtagaaaatattaaaatttaatatttacaaaatacccaatttattatcacacattatcatattatatccttaaacgtgcatgcatataagtagttatgtttcttccaaatttacctaaacacaaattttcatttactgttctgttgggtaataagtgatactataagtttgaaagtgagagtagtttagaataaatttgaaaacctttatttatttatttttgtaaaataataataataagttagagttgggtgagaatagagagagaggagagggcacatgaaaatcccaaacgacccggatgtgaacagaaattcaattattggataggcagtcacgtatataaaacgacagctagctagcaatagtagtcgtcgtcgtcgtgggtgcaactgcaactcgtgctaagtgtgaacccaaaattgtttgtgtgtgtgtgtgtaagagtgtgagc

SEQ ID NO: 182242 - DNA, 1134 bp, Cannabis indica
ctcagatctttctcagtctgagtttcaacatgaaagttcttccgtcttgggcctccgatgccaacgaaccaccacgtggagatggtagtaactgtgtaggagagggaaatgctattgttttttagatttcattttctcattaattttttcagtgtaaatatttattattattattatatttctgttataacacctgttatgaaatgtttgctgaaatattgtttggaaataatttatatttgcttcaacgaatttattttgaataaaaatctaaaaattattatttaattttgaataaaatctagtttaagcattatgtaaatattttaaacttttatttaaataaaatctaaaaatcattaattaattgttttttgtctcggttctaaaccgagacatgcaaaaataaattgcacacccatatgtgttagtttaaaactaacaccaatgcacaaaagtctcggtttagaattgacatcaaagaatatactttttgtgacttagaaataggtgtcagttttatgaactgacactagaagtgtaagtgtcagtttaaaactgataccaaaagtacattttgtagtagtgacccctcttgtggacatttgaactggtttgtttgctctcttttgagcctttaatgcatggttattttccagcaaaaaaaaaaaagaaaaaagcaaaacagcaaaaaagcaccttaattatatgatatacgccagactattcgtgagtacaacttttttagatttgtaatagcagtcgttctaaacatatttgattactctttatattaattgatttgtcacatattattcataacacttatatataatattctcgtaatatatgtgcaaaaatataatggaagtacatgggaaacattagtttatatcatgtttattaggaatttataaacaatattgaaattccgtattttaatattcccagtttgattatttaattaagttattaattaaatgcggaataatgaaactggtactgaaaacagtttttccgtagttacagaatacaactctgtaactccagagaaacccagaaaaacaaacagtgcataaaagtaaaaacacacaagatttttgtacgtggtttcaacaatcctttcagattgtt

SEQ ID NO: 182243 - DNA, 590 bp, Cannabis indica
ctaagttgggtcaagaggaaaggtattcaaaatgttgtcattgaatcggatagcctactttcgatccaagcgttggaaagttctattcgaatgccttcggtgtttggtttaatggttgttgagtgtcaaactcttttactttctcttgtcaatgttaaaatttgtttcgttaagcgatctgctaacagagttgcacattgcattgcccgcaactcttgtttttggtcaggttgtaattttgtagaagggacagcgcctgctgctcttcaaactcttattcttgccgatttggcagtttaatggattgaagcttttcaaaaaaaaaaatatattacattttaattataaataatttttttttagtgattttgaaatgaaagtaacattttaattacaaaaagttattattcttattagaaatatactcattataaatatttatgtctacaacctaaaaaagtattttcagtcacaaattagagtgatttggatgtgattatcaagaaaatcaaagttaattcaaaattaggtggaatattttccaaaatttagaaatcaactaatctcatattgtgtattttttttttttt

SEQ ID NO: 182244 - DNA, 611 bp, Cannabis indica
tgttttttttttttttggcagtttactgcctttaaaactttagcttatttattttttttttattttaagtgataaaaaaaatgatgtgactgggaattgtcacatttgtggcagcttttttttttttttttcttttcttttaattcaatttaatcatcatatcaatacaattactctctttcacaccacgtttttatacctactatcccatttaattattcatcttcttcttcttgttcttcttcttcttcttcttcttcttcttttttttttttaaaaaaaaaacacatccagttattgtctttgggtcaaattttttgtggttattctctcttcttatgtgtttactaatctatctactattcaccttcttcttcttcttttttttctttttttttccccaaatctataatattacccaaataaaagctatgtttttatggctgagatgatgaggggaaggaagaccatgaaggtgatagttcttagttcttcttcttcatcttcttttcttttcttctttctttttttttttaattttttgaagttcttagttatgttttttttaaaaatataagatttagtgtggttttttttggttctaattttct

SEQ ID NO: 182245 - DNA, 634 bp, Cannabis indica
cttgtgcctccaaactcattgactggcttcacactttaggaatgaaaaaaaccctgccaacgtttattattaatttcttaaaaaaaaaaaaaatcccaacgtttatttgtttaaactttaaagatattaagactagtgaacaaggaaatctatatggtagataacaagaaggaataaacatataatttagttagattcaatgatggatttaagtgcatgcaactatcaattcccctaaagtgtgccacatctcgcttatttctctctttctgaccaatataaaattaaattaaaaatatatatattcttgttcccagctttacagcccaagtctccaaatattaattccaagagaatttattcctttttttcctaaagaaaaaaaaaatctttctcacaaagcttatctttacactataagaagcaatataccacacaaactctttctccatcgcattctcaaatcaaaagtgttctcaaaacttttattttttcttccctagagccttgaacatcatcattatcaaatgagcggtagtagtagtaatacacgaagacagagcatagagggttattagagatgatcaaacgacaaagaaatggtgcgttgcactccgagaagatgtgtttaaac

SEQ ID NO: 182246 - DNA, 748 bp, Cannabis indica
ctctgaattatcctgttttcatgatttaattttagatgcaacaaaactgctcatgattgtttatgatttgacaaaacatactctaagattagacagttgatatgatttggttaaaaggatatttcctttctctaattttatttgttgttataaataaattacgaaacggctcgcacttcatgtgggattatttataatttttataaattacatatagaaaagattgttcttaactaattttttttgttaacaataataaagtctttttaaataaaactaaatggtgactattcaatggttacatttttttttttacctgtaatagcaggttacaaataagtaaaaattctatttttagaattaattaattataagtaattattttttaagtaattaaataaatattaaacaagtacctttttagcaattaaaatttataatttttttttattatatataaatcctttggcttaattattttaacaattaagccatttaattataatatttacattttttttacaaaattaaacttaattttatataaattaaaaatttgtaccttagaataaattttttacaagaacacgccctgttctttttgcaggattatcatacctcttggccgtgcatggttgcatgatactcttgctgaaaatgtctcaattgcattgcatttatatcgtttgtctttatgtaatgtgtggaattataacttcgaaatccttgatttgggtcctgacgagtc

SEQ ID NO: 182247 - DNA, 373 bp, Cannabis indica
gtcccacattgctaatgtgtggacataaattaccacatataaaatgaatgagctactcctcccattgccaattgattttgagaaagaacctcattcatcttatcccaaagtctaacacaaatacacaaaaataacaaaaaaaaattataaaaatacggtttcacagaattttaaatatttttacgattttttaattttatttacagaaaatgccgtctttttatgttatacttttgttaatttatttttaattttttgttatctgtatgttattttttgttgttgttttgatgttattttcatgttacttttatataatttacttgttttttcgtgttgtttttatgaaaaacgtaaaaatgtaaaattaatc

SEQ ID NO: 182248 - DNA, 547 bp, Cannabis indica
ttttagaagtgaatgccatgttggtgagagagcctttacatatatgttgagtgaagaggttataaatataagccaaaagaaaagataaaaataaaaaataactcgaataaattggatttggggtaaatactattttggatcttgcgttttccaaaagttaataattggatcatctgttttgttaaatgacaaaacagaccttgtattttctaaaatgataaaaatagaactctaatcttaatttttgataactttttttttaatatgatcaacttgaaaataattcctaaaaaatgtaaacagttttgtcataacacttttaatcgaatcattattaaattttattttgacaaaaaaatcagtttatggtcctatttgtaccattttgaaaaatacaggatctattttgtcatttaacaaaaacagaagatataattgataacttttgcaaaacacaggatccaaaatagtatttactcttgatttattcaaagtccatgcagttgtttatagtatattttctgatatgtatataatatatatacta

SEQ ID NO: 182249 - DNA, 649 bp, Cannabis indica
atatacaagaagtacatgaaaggagtaaaatttataatttcattaaaggaaccgttttggttgaccttttcatgaatagtagtgatattggctcttttaatatatgttattatttaaatttttattaatattttatataatatatatacaagaagtacatgaaaggagtaaaatttataatttcattaaaggaaccgttttggttgaccttttcatgaatagtagtgatattggctcttttaatatatgtaggatgtatcactcttattttcatctcaattttgttagtcttaatgggttgaatgggttgaatgggtcaaaggatccatacttgaataatagccatcagaatttataagcgtatgatcattgacaaactattttatttaatgcatttgataagtaaaacgagagctccttgaattaatgtttatcatctttttgtattaatatttttgcacttttgaagtaaaataaaaatgtgatcctcatttggataaacgtttgggtgcttggaacttatattgttatatttaattttatttgtatataattaatataaattattatttataatatataaaatttgaattaaataattaaatatattttttagaaaaatatttaatatagtggcactttttgtgtg

SEQ ID NO: 182250 - DNA, 665 bp, Cannabis indica
tatctttttaagttctccaagcagaagcagttgcactgctggtaggtttgcattgggcttaagacatgagactacccattaaatgggtctttttagattcaccatttttggtcttagctttgtagggttatatatatatgaataaattgggtgttatcttttttgatactaaaattttattgtctaacatttttaggcatctctctcgtgtcattctcaacttgcaactttaatgttgaacctcatagattagctaagcatgcttttaggatagacaatgaagtttttttttaaccaaaaaaataccccatctcatgtataacttttgttacttttattattttgattggctatcccaaatatttttatatatatacgtaggaatatttcataagacaattaaaataagttagacatatatctattctatataaagtgtgcctatataacagaatttttggtttatgagaaattcatgggtgactttttatttatattaaaaataaaataatttattattaaaaataaaatgatttatgagaaattcatgggtcactttttatttatatataataaataaataaaataaatccataattaaaaaaatacgatggtttttgctgtaaatctacgatttttctcttcttctcttctagaattaccta

SEQ ID NO: 182251 - DNA, 937 bp, Cannabis indica
atgggtgttgttcttgaccttatctatcttattcttatttgctttgagtgaaaacagaggaacacaacacatacatatttgtgttttgaatgtttggggttataaatttactttcatttctatttaaattttctaaatctatttatcttcttttattattttcggttttgtattaattaattttttaagacaacataaataaaaaataaatgtgtgatttttttttatatatatataatattaataatatgaaaattgaaatgtgggttgttggttgattcttcttatcttcttttcctttttttcaattctcttatttatttattttcttagtatattttaaaggtttatatttttttattaaagaaatcagtcaatcaggacattttttttattgaaaatacaatttggattcaaattagaaaaataaattaattaatcagctgttcgattctcgaataattttacaaaagaaaataaaataaaatcaaatgaaaaaagttgtaacacacttaattttaaaaacacatatattcagtttattttaccacttaaaagatacaacaatagatttgttgtagaaggttaattcaattcattagtttaagcattttactattatataatgtacgtatctacaccattagcaactcgttcaactacaggagcctgttatcttaactactaacaataattcaatagtgaggcaccgtaaaacaaaaaaacgaaccaataacgaaataaaatgaaataaatcatgttacaaaaaacagaactaatcacagtagcatatagatcccgaccaaaccacacttaagcccaaaaaaaatcggcaagcttggttggagaaaaaataagttactaacaagtaaaattaataaagaactatatcttatagtgttgttgaatactataacacctaataacaatagtattt

SEQ ID NO: 182252 - DNA, 971 bp, Cannabis indica
aatataacatttattcaatcataccataacaaaatgtattcaattacaactcatcacataataacacgcttgatcgttccacaacttcataaccacataatttaggtacttcataaagtacccctaccactcgttaaccacgagctgtatatgtcactatcgttgtccgatacaacaaacgataagtaagaaacctatccgcggtttcaggagtaattactcataacggtaataaccgtttcttttactcgatcataatcgagccacaacgataataatcgtttcataatacttccctcgatcataatcgagtcaaacgataataatcgtttcataatatttccctcgatcataatcgagtcaaacgataataatcgtttcataatatttccctcgatcataatcgagtcaaacgataataatcgtttcataatatttccctcgatcataatcgagactatcacaattataattgttaactacaaacggtatatagtacttttcttacctcaagtccaaagtcaagtatgtgggccgacctgagtggaatgatgcccgacactttcgagtcctatgtcacgataaaggtaaatcaataagggtccattccaaaacactgtctaaaacccgcataaaataacttagggttttctaccaaatcttatggtaaaaacaccctaaataaatacatctttggctctaatctatgtctcatactgtagagctcttcataagcttcgaaacggtatatagaatgtctaaaacggacacccgagtgagaagttatggctaaaatacgaaaatcggcgattctcagaaaattgaccatccggaattctggttggtgcagccctgtaccattcggaattccggttcatcacaccagaaagtcgaaaattttagatcttcaaagtcccaaaacttgcttcaaacctaaccaattgttcccaaacttcacagaacagttctat

SEQ ID NO: 182253 - DNA, 711 bp, Cannabis indica
aaaaaatcagtttcttgatgaaggatctttggtcattggttttgatcgcataagaaaataaatattttgaatcgtaagagagagaaaaaaatcttgtgtggctggagagagcgtgattctattttgaaaatttgattatctttttaatatttatttatggcattttctttttaaatactcatatattattatttagttagtttggttatgaaatgctatatttagttgcattaactttacataccatatataaaaacttttatttatttttccatatttttgtaaatatccctttataaaaataaaaacttgtagataggaagggatgaaggcagaagttaaggccaaaaaataaaataataaattaaaaggggccaaatacataattttttagaaaaataaaatttttagcatgaaactgctttaaaaaaaattccaaaattttggaggggtcatggcccccttccaactaaagtagatgagataattacataaaatactaatttttgtaaaattttttacacttttaagtttaaagttatttttgtagatttttacagtattttacaaaaataaacaaaaaaaaaaaaaaaaaaaaaccacataaaatatcaagaaaacaacaacaaaacaacataacaaataatatacaaataaaaaattcaacaacaaaataacaagagtacaatataaaaatatataaaaaaaatt

SEQ ID NO: 182254 - DNA, 695 bp, Cannabis indica
atatgtttatttatttttccttcattctttaaatttacattgttaaagatgagcacattaattcttttcataaaaaaaaatgtatatggtaatttaataattagagactataagtaaatgttttttaataacattattttctttcgaagagcaaagtgaattgtaaataaatacaatatatattagcataaatttacatattttattaagaaaaaaatacatatttttaattaatatttatagctttctttgataatatatcatactattattgtttatatttcatgtgtctttaatttaataattattttaaattacagtaatcaatttcaaaataactaatacaattatatatattagctcaatatgtaattttaatttatctttattaattatatttttttatatcaaatatctttactatacattaatatatgcttagaatttaatatattatttattaaaataatataaatatatttttaatcaattgatacttaaaaattttctttaaaatatatataaaaaaaatagaattggattatacatataatggaaatgatggtaagtcctttgatggttgctattagtaaatcttttatgttatatatttatttagaaaaactttatattctccaatatttaattttgattttgaaagaattttatataattatatcaaatttttatgtatg

SEQ ID NO: 182255 - DNA, 598 bp, Cannabis indica
gaagagaaaagcaaaagaaaaaaagatagctgagatgaaaccgacgagaaaggaaaaagaaaagaaaagtaaaaagtaatttttttttttttcagatttcttattttaatatttttaaaagaaaaaaaattggtacaattttttaattttaaataattttttttacatggaccaataaaattgtgtcatgtgtacactatgtccacgtagatgtatatgtggatagtctaacatggcacttaacacctaaaatagatggaaatgttaaattgataactaaacacgactattggagattttatcgctaaaatttgagttataagggtttaatgcaagtaaaataaaagtattaggggttttgccgcaattaactctttaaaaatttataggtgatcttaaataattacaacgtatacgattataaagacaaactggactcaatactctcttgaatatcaaaacagataaaaattatgttaaaataccttttttttttcttataagcttatttttgaggatgcaccataaaaataatctaaatttatttatcactgtcgcatacacatgctaatatttcattcatataacaagactatat

SEQ ID NO: 182256 - DNA, 661 bp, Cannabis indica
aactagggttttctcttttctctctctctctctgttaattttctgatctggtttctgtgtgttagatctaggtttcttctctttgattcatgtatttatattgttgtagagtcggttgataaaagtcttaggagttagttacaatttcagttgtaactaactactaagtcttgatccactagaggcgaagccaccctaggactgtgtctgtttacttgtttctgcttttactttgctgatgtggatatttgtgtgcataagggactggttataagtggaatttactcaacacctattaatctttttgactatagtatttacaacatacactttttgttcccaaaaaacaaacattccttgcttcccatatatgtattctatacacagaagcattaatactaatagcagccacaccataacttccttacaaaaattcactacaaaaaacagttacttttagtaacaattttttagtcacaacataaattttttgttactaaatgtgacttttaatcacaataaaatattatttgtaactaaaatatagtatttagacacaaattgtcacttaatttagttttagtcacatttaataattttgtaattttttgtgatttaatatttttagtttacaaacatttttagtcacaacatagaaatg

SEQ ID NO: 182257 - DNA, 505 bp, Cannabis indica
gttgtgactaaaaggtccgtggctaaaaatattagtcataaaaattacaatttattgtgactaaatgtatatttagtaacaatatttgttatgactaaaattaaattagtgacaacttataactaaataatatattttagtcacaagtaattttttattacgactaaaagtcatatttagtcacaaaaaatttatattgtgactaaaagattgtcactaaaagtagcagttttttatagttctctgaaccaaacttaattaagataataccatgctcaatagttctaattttatcaattctcctattttctagattccatagaaactatcgactacattcaatggcagattagttctaagaacataacaaatcaaggaggatgatcagaaattcacttcctccttaatatcctctaaatttattatattaataaatagttattcttttattttaatactaaatatattaaattagtagcgctaacagcggtaatattatctaatt

SEQ ID NO: 182258 - DNA, 631 bp, Cannabis indica
caagagataaagtaggaagcttgagcggcctctttgatggtgtctttaaagtccgataatcaagcatcacagtccaaccattgccatcatcagcctccctcgtagtgacctgcttgtaaaacctctttcccacaatagacccagtcatgaacgacattggcatagtgaccgaggatccggagtccctccttgaattcgagcgcggtgccttaaggtgtatggcttcatcggtactggtggtattgtcatttcggtgttcatgatcgtcagatgagaaggtgaaagatgggtcatccgattggggttgctcgacggtggcgacggagttaaagttccgaaccaatgaggagaacgatttgaagatattagggtttctgattgaatttaaggttctgtttatgagtggattggccattggtgttgattgaacgaagttttttccggcttggttatggagtttcgttctctgattttgctagggcttagcgacttcgagtcagctattctaagcttaactctcttaaacagtctcaaagtgaaatttggtgaaatctaacatttccaaaataacataatttatgggtaaataactattttgtaaaaagttatcgattagaactcttgttaaatg

SEQ ID NO: 182259 - DNA, 921 bp, Cannabis indica
agggattcatagagacttcctctgtggagaagttcatttacttttgtagttttttcatcaacaagttttccaagacatacacgcgagagatattgtttctttgcttccaagtttttgctcaatggaatgtatttcatttgtgacattttcaacttcttttaaccattccttagcttcttgttcgtgttcagagatctgcttagtgtgtaatctttgttctatatcatccttttttatatataaaccttctaaaatggtcttgagatttctcatgctttcttcaagttctttgtggtacttgtaatactttatgataggttgtgcccacctgaacatcttgattataaagaacaatccaatgcaaaattccaataaagatattcctagttcctacataagaatgttaaacagttaatgaaacaatcagtttatagatccatattaaagagggatacatgtatattaattcaagtgagggaagttttaatgtgactaatgagtaagggaaaaatgatctacatgagtttagccacctcttattttttttttccctttctccacctccttttaaagatatttaaatttaaatttaaatattttgacataagtttccatttattaaaatatttcttattctaaaattgatcattaacaaaaataattccttgaataaatgataatcccctttcctatgtaacattataatcttctaccacctttttcttattcattgcaacattattcagaagagagatattttttttttcttgaacaaaaaagaaagacatttatttatacatgagaaaatggatcattttgctctaattaaaaagttgtggtctaccctagttcaagttcaagtaaagaaagagagacataagataacaaggtcgtaagtaaatcaattaaagaacataagac

SEQ ID NO: 182260 - DNA, 854 bp, Cannabis indica
agagagagagagaaagagatggagcaagttgttggaggattttgttgttaattgaaagagaaattaagaaaatactgtgtagtcatatgttataaaaagcaactatagtaagagtgaacttttatgtttttaaattttttttataactacttgtttttataacggtctacattatacattatagttataataagttatttcactttaaattttttttttaaaaaaaagtattgaataatttatgacatcaaaaataaaattcaaaattatcaattatataagaaaaaaaaaaaaaaaaaaaggaaaattttaacattttaaaacgttaaaagcaattaaatttcaaaaatattgtagttttatttaatatctaatatatacccttttctataatgtttttaaaataattgtttttttcaatatatcttctcaatttatgtttgcaatgatgacaatgacatcatcattgtctatattcatcacattttaattcatgcacaactatcaacaattacatgaaataaataaaagagaaaaaaaaaaacatctttgttgctgcttaataattgtcaccaatggggtaccacgttctataaatagacacataagagcagctccaacacaagctagtcaaagtagcttggtagggttgtgtcaggtggtgagcattgctattaggcaccagtggtgcctagcaccttctcgacatgtcgcgttgcgattggctagcgatactccctaaaagctattatattaaattatatgggacccgatacttagttggaccaatagcgatattaacacgtaagagggtgctaggcaccactggtgccctttagcatttctcactctct

SEQ ID NO: 182261 - DNA, 985 bp, Cannabis indica
agctcctctaaacatttctcagtaaaaacaaagcaagccattaaatttcctctaaattttcatatctagttgaatgatagtcaaaaaaaaaaaggaaaatttacccgtcaaacaacaaatttcctcatccaataattctcaaaattcagcacagccaagccaacccataatatcaacagcagtcggctaccacacaatattattgaaaaaggcttacatcaataaataactcctaaacagtttcgttttattttcctcagcattcaacaagataaggtacataaaattccataagactaaaagtagaaacctcaaaaaagaacaaaataaagttgaacaaaagatacttagttgactcaaaccacaactgtttgacgaaatgcctcaaagtagccgaagaagaagattcatagatacctgaaacttgtttgagagggaaagatgatgaagtagtggaggaggaggagaggcgaggtgggaggagtgggaaggcggagcagcgagtgggctgagtggtgggtcgagggatcaagacggtggtggccgccgcatacgccgtggttactgccattatgagcgtatgtggccaaaactaagcaattcctatccaaagatttgagtcctctgagtgagtctgacttgggtaatattattattgttattattttatttggttttgttcaaattttcagtgtttggtattggtttatcatccatactggtgcttttgggtggctcattatagatatgacacgtggcacaaagaagcattgttattggttccttctctatctgaaatccacgtttgcggtcttctctcttctctttttccaaccctgtttacaccccccataataatattaatttcataataaatattccaatatttctagattataatttaatcgtttttccctactattaacaaactaaacacattgtactaacacgaattgaatatagtacaagaagataaatatgtgac

SEQ ID NO: 182262 - DNA, 787 bp, Cannabis indica
atggtggctagggatctatattctcctccccaatcagattggacagatttgatggagaggttaaattgtttttcaacaagtttcttaaattgaagaaaggtaggataagcttgggacttaagtgtaaggggaaatatccaagtaaacctgctgaaatcatcaataaagtgtatataatattgaaatccctctttggatggaacatgagaaggaccccaaagatccgtatgtattaatgctaagagaagagaggccctactggtggacaaagggtatggcaatctttgactcttaccaattttgtcaagcatcacaaaactttagatttttaaaagtgcctagtgtgattgattgtgcacagaaccttagctagagtttttggggcaggatgacccaattttgagtgccatatatttatatcctgggcagtgttaatatgaaaaatctcattgacactagtggaattagaaacagcgagaggatttttattatcaatatgagaaccagtacaattgggagagactgccatgacagtctcttggttacatttggaattacaaaaagaaatgcaattatctaaaggctgaggttcttttgtagctagatgacactgaagttgcaaggaatgtttggaggcagatggttgagtcaacatgtataatccattcttaactctccctttgagcaacaccttccctgtgctcttgtccttaacaaagcaacaagtagtgtgaaattcaagaaagatattgttatctttagtcaattttgacacactcactagctt

SEQ ID NO: 182263 - DNA, 578 bp, Cannabis indica
agagagagagagagaccatgctggtcacatcaccactgagatatatagctttagtcagtttgatgaaaaagcaaggctcttatggtcgttttgtttgctctttcctttttctttgaaggaagaaataaaataaaaataaaaaaaaaaaaaaaaaaaaagaaaagaaagagaataactgctgcaacagggagagagtgaaaacaaacatttcatttcttacttcttttggctggacttaataaaacataaacatgcaaagagttgagagtgttattaataaaagaagtatatccattatgcgccaaaatccaaaaatccacaccttttattcaaaaacttttcttcaagacctctatataatcaataatcaattattatttatcctattttttaatcaataatatgaatgcatcactaactaactgtctaactatttaatatgaacacaacccacgacagaggctaaggcaaaggacagtcagaaatatgacaaatttgcccaacacccacctggcctgcattgcatgctgctactgcacaatacaaatactagtactgactttttttttttttttcca

SEQ ID NO: 182264 - DNA, 653 bp, Cannabis indica
atataaatataaaatcacgaaatttttttaaatgtacattatagtgaagaaaattaaaaactaaatacttacacaaaatagatatctaaattaatagaaagaaggcaataaatatatagaaaactcatcatataatatcaaaacaactatcatcactgtatatctcgttaccactgtatttaaagttgatgtcatcaccgtatcttacttgtaatcattattaatactatttctaatagatttgttctatacataaaataaatataacaatgatcgatatagtacttacttaaattatgtgagaggagagggggtgataaacataattaagtttaattttttttatttatttggtatattagttaataatttcttttatgtgaaaaaaaatcgcatgtacattaatttattttttaatacatatgtatttgtttattagttattatgcagaataaaaaattaaaaatgattgacaaatatgaaagttatttattttttttaaataaaaaagtaaaattattagtcacaaagtaaaaaaaaattacaaaaaaaataataaagagtttaatggtaaaaagactcttaccaagaatatgcttagtattgtaaatgatcttcaaggagcttggaatcaccaaagaaaacatcagata

SEQ ID NO: 182265 - DNA, 1001 bp, Cannabis indica
gtttttactagttttttaaaaattgaagaacaataaaaaggtaaatagtagcataagtactttaaaattttatgtttgtaagcgacataaatactaatgttttatttttagtggcattagactcaatgttgtaaaactgttaattttctttccagatttgtgagtacactctgttttgaatttattaaaagacattttgaagtaactgatactacatatttctatctagacctaatgatcaagaatttaggtcttatatatgcccaccttaagacaataatagagtctgtattcacaatattagagaaaattacagttttacaaacattgggtacttataccgctaaaaataaacattgggtttatgccgcttacaaacataaaactttgggtacttatgccgctatttacccaacgtaaaacgattacaaggtgagtttacttaatatttttaaaaactgtttttaattttttttactaaaaaaatttaaatatttcatgcttcgacatgaactcaacgtaaccctggctcggacttcggacgtcggccccggaccgtagatcctggacctagacttggacttgaaccacaacccccaaacctcagaccccggatcccaaacctcgatcctagaccccggacctcaacctagacttgacctcggaccccaaactccaatcctagacccagccccaaacttgaactcaaacccagacccaaacctgaaccccagaccctgaacccgagatatggactctagtaaatgagagaaatgtaaataaaaaattgtttttgaaatagttgcaatattttgatgttttttaattttttatggccaagcacccctattgagttttaaaacaattttctatttttaaaaagtgaaaataatttttttaagttatgaagtcaaacactcccttattcttcagagttaaaaatattagtgaaaatccgtgttatcatttcgagttcctatcgatacgtttatagtgaaata

SEQ ID NO: 182266 - DNA, 1145 bp, Cannabis indica
agaagaaaaaaaatattggtggttgtggaagataggctttcgggtggggaattctcatgtgaaattgatgagaaaaagggttggagtgggtagatgtaggtggggagggtattatgggaaaaacacaaaaagtgtcatatataactaattatgttaagtataagtttaggggaaattttttagggtaatgtaagtatattaattcaaattttccttcagtattttagaggtgccagaaatttttatggacaattagaaagtacaggcttaagtgagaaattttgaaaatgatcattttacccttaaagttaagtatatgagtatatgtgagtgtcattatagtaaattaccatttttattagaaaaactttaattactttatatttaagttagaattgatgagaattctatagaaaaaaccaactaagggattgaactctctctcttcgtcctcgttaatggtgaatgttgtctttagtgtatattgtgttctcagcgatctaatttatagcaatttctgaggtgtatctggtacatttaatacttgcaagtcacggcacaatttctatatttataggatggattagagattaaactcggtccaagagtaaattactcagagatcagtataagagctttcaagagagaataagtcattctttttcatcatctcacaagttaatacaacaaaaaggaagtagcctattaccaatcaaaaggggtcgaacctctataaaatttgacattttctttattttattttatttactttctactatttaatttattcttaatttatttaattttactcactgtctttggctaaaagcgaggtcaacagtcccatatacatatatatatgcgtatcgaaaggcaacctagggcttattcaagtatacacatttctatcgtgatatctgttgcatgcatgctagattggtacttgagttgtcatccttatggtatcaaggatgtgttagcaatcgaccaaccaacatcacgacatattatgatttttagtaatatcgattggaaaggctgcatggatgctaaaatccacttataagtattcatgattctaggatgagctattggtattaagtgtcaaatataaatgaacacctacaactttctctctcgtacat

SEQ ID NO: 182267 - DNA, 573 bp, Cannabis indica
acattgaggttgccttttttttttaatgtaactcatacgatgttttagatactattcaatttattattaaaatagttttataaaaataaatttatattgtaatgtttaaatataaataaaaaaatatattttttagtaacttattaaattgtttgatacattaaattttatttaaatttaaatattgtttattcatttattaacaaaatataaaaaataaaatacttttagtaacttatgaagttgtttgatgtatactgatttaaacattgtttacttattagttaactaaatattaatgagtaactaaagattaagaaagtaaaatgttacttttgattttggtcatcttcttcgataatggtaaaaaaatatatgcttcccgcatattaaaatgatcgcattaaagagtagattgcagtgatgtaatttttagaccaaaaaattagacgtgtagccaaaaaaaaaaaaactttttaaattaaaaaaataaaataaaaaagagaaatctttaaaaataaattgttttttaataatattatttgttttattacatatgtgtggaaaaaaaag

SEQ ID NO: 182268 - DNA, 566 bp, Cannabis indica
accacttattctattcaccaatgtgctttatgatccaaatttttaatatagtttgttgtctattacaactttcatgacatctgctcattgctcatttacattctttgatgatcattgtgtcgttctattttttattttttcatgaaataaaacaaaaattaatttttgttgtcaaataagcatatatcacttttaaatatttcatttttgtcccaatatactagttaattttttttttattcaaggttatctccctaatcaaatgaacaagactctcttatctctattccaaaagtggacaacccctcatgtgtcattgattacaaggcaattacatgatgcaacactctctataaatgcatgcatctatgcatctgtaaggtgacttgtacaagattgactaaaattttaccaatgttggtgagtgataatcaaggagacttaatcaaagatagatcaacactcacaatattatgatcttgcaggtctgttaaaaagttatcagaggaactttatctctcgcttgttaaaaatttatttaagtaaaacctataatactataaact

SEQ ID NO: 182269 - DNA, 934 bp, Cannabis indica
gttattagacggacagtagcagtaacttgtaaagatacttgctaattaattatagaattttgttattggacactaatggtttggcacttttgagtggtggcgcttcatgattaattagttagccatattacttaaaaattaattttttaagttataatagatcggatatttatttacacaaataacagtaagtatgaaactgaagagagtactaacaccaattatgccattgagcataaagttgcacaagtgatatattaagagatgatatatgatgactgataataaatatgattgccacacaatttcaagtgcaggtcaaattaatgatggaaacatgtggactacatttgcagcagtatcagtaacatcaacaccaccgaaagcacaagggattaagctttttcggccacacaaaaatcattataaaataatattattgaaaaaatatatataacaacggatggggaccgtatttcatttggtgcatttcctatcaaaagtgatttaattaattgtgtatccataatgattgaggatatgtagatctactagtaatcattagtgctgtaattttgtgcatgtcatggtggcccaatctattatttatttatattttttaaaaaaaagctgtgttatggtgtgttatgaaaaaatatagaacgtgtcgtactttatcaatatttttaaagggtagtccgacaccatccgtaggcttgatatttttgtactgtgcttagattcgtgcagtgttttgctcatgccaattcatatttcttaaaaatgccagctcattttcatatatatcggtactttacttcttcatatttttttttcacatctattaaagcatatgtatattttatagctttaattatatttatataactttctaaaagtattttacagataatgatataaaaaaattattagt

SEQ ID NO: 182270 - DNA, 644 bp, Cannabis indica
agtgtcaattactattaaggcctgtcattttcgaatttcgggtagtaagagctatttgcttctgctttccggggcttttatttgttctgttttgtgatgttgattttgttgggatttttacaggaaagagttggagctgtaaagggaggcatagagtttcttgagctgtgtggatttgaaaaaattgaaggtggcgagttcttgtttcttccccgggacaaggttgactttccggttcttcgttctgctggttccgagctcgactctgctattaaaaaccccttctttggggttctttaactggaaaaaaacattcctttaattatgaaatgctactttccaactttcatcaattacaaacaaaaagaaagaaaattagtgtttcttaaattaaatggttggaaattgaggtgtctttttttgtatggccataagttttctttctgttctttttttgttttggtaccattattttaagctataaatgtatgctttaatttcaggttttgatttataaatggattgttcatgtattaattttggggttagtttatatttatgtatacattaaaagtccaaatagtattgaattgaacaatcaaatatatattatgtattagtcctagataaaaagtttttaagaa

SEQ ID NO: 182271 - DNA, 560 bp, Cannabis indica
tatgcccaaccttctgcacctcaacctcaacctctatctaaatctaaagatcctgtgattgcagacttgcaggagcgtgttcaacaattggaggcatacattagggctaattctatcatcccaggatctcagtatccacctccaccttctgacgagtctgataatgtgggatccagcctatagatgatgttttattagtatatatttatagtaacaaatattgttatttgtgtttagaaacagttagcactgaattgtaagttgaattgtttaatgatagtttaatgatatggatctcgttcggtatgctatattatattattaaattattgtattgtattgtatggtattatattttattgtgttgaattatattatattaatattatttaatacaatattatgtttcacattgacttgtattaataggttgtgtaaagttataatatattttcaataaattcggccccaacaccgactatgggtcttgttcggtctgggtgcgggttcgatatgattcgggttcttggtccgggtttgggaatccgaggttcgggtcg

SEQ ID NO: 182272 - DNA, 736 bp, Cannabis indica
ttcgtacaattggtgttcacgcgcacgcgcattataccatttatatataatttttttttttgccttacttaaagtttcgagtattgttattaggatattagtagtaatccgtaatttttatagtgatattttttaaaaataatttttttttttaagatgagatttgatactaattatactaatatcgatatgatgctagacactaatagtgctttttaacaattctctaaagtagtgtccaaatactttcctgtaagtagtgcaattaaatatcaaatctcacatattttaatttaaaaattattataaaaaattattaatcattcccaagataataccttgtagtggcatcactagtaataacaatattatctcctttatttatacactatatattgttatcagtataattatgtatttatttttagcacttaattattttgctaccaaataataagctagaaaatgtcgaaaagcaccttaacatattcaatatcgaattcggtgtcattattgatgtaaatcaatattggtactatttttagtttaaattaaatatataagacatgtatgaaatcgtattgataacaatatgtgattttcaagttttgaacacccctccacgtgtatgaggttaaacatgcttaaaatttcaagtagcaaccttttatttgccttttttttattatttgctaatttatatatttatttctttattttttacaaataaatgctt

SEQ ID NO: 182273 - DNA, 860 bp, Cannabis indica
gtattatcatatcctcccttaatatcaacataagcccaagctaaaagctgtttcataatacatgttagaaacaaaatgaacaaaagaagggcacccaccaccaacaactactctttcctatcaattttccttaaccgccttgtcaaatgatattttaacatggtgtataggacacaatgctccaactaattttacattcacttttcataattattgtagcagaaacctatatacaaggaaatgacacaaccagcaaaatgttaggtaaccaactagttgagtcttagaacaaactacagaacaccccaccaccacaaccagaataaagaataaagaacagacaagagtgaagctttgaaatgatataaaaggtacacaatgcgatcaccaatgaaagttatgtaactttccaaggaccttatactagtttgtatatgtttgtacaaaactagaaattttcaccacaataaaagtatcaattagttctatagtctaagaccataatttaagcataagctaagaaaagactaagagccatagacaatagaaatttttgtattgaacacaaagttgttgtacctccaaattggttgccccaaaataacaatcgtgtatcgtcttcttcctcgtcgacctcatcaccatacccaaactctgcatctcccttataacccggttcgcttccgtacccagattcaaccccttgggaaacaaaaaccccaaattggaccaacccaaaaaccaggattctcctatctccattcctaccgtctctatcccgtcctcggattcccgaggccgtcgctcacatcagaagaccaagtcgtctcaccgtgcacaaaaagactcgcccctagaat

SEQ ID NO: 182274 - DNA, 643 bp, Cannabis indica
ggagcccttagagcaagacctctttaatgagctaggtttatttggagaggagtacttctttcgcttggaagttttgctttcaaagggaacaactgcctcctccactaggatcacctcttttttctcttacattgactgaatggaccccttgaggttacaataacgttcaggattcgcacaattagcccaagctctaaatctactgcatccattgcattttccatgtcaaacatctcaagcatctattgagccatgggatctgcaatacaagagaagtgttagagacatggttttaaaaaaatagacatggaaaagtttaatagaagttgtaaaatgaaaaatggttagaaaaagagggtagtccttatctcgatgccctatttcatcttttacaaaggcatactcatacttctataggcatcgtcctcgagagagctatcgaaggtaagaaaccaactgaaataatgtgagaagtgacatccagagggattaggattagaggctctgattgcatatgggatctgcctaataaattccctaagtaaagcaaatatttgtttaccccaaacaggatcgcgacatgtgtagcttacggagtcacttatcaaatctagtagatctaacttagcatattcccaaactg

SEQ ID NO: 182275 - DNA, 597 bp, Cannabis indica
attatatttgactattttttattttttaaaaaaaatagacatttactaacaggactcgccctgaaaatatatgggcctaaaacgaattaaattttacgaccctcaaaaatatataaaaaaatatcaaaagaagagtattatgggatttgaacccatgaccttaaaaattatgtcatccacttcaacctactaagctatgaatatttgttgcttacaatacacttaaattttacttaaataaaagcctaataaatttttttatttttttattttgggcccccagaaagtgtgggccctaggcacgggcctagcccacctatgcctagggcctcggccctgtttgctaatttagtttgtaaatttaagatcattttagatcttagcccaaatatatttgtatataacatatccacgatctatgaatattaataacactttattatatgcaaaactcactcttaattcttaattcaactttaagaaatttctaaagaaagatatactgagaagacttcaaaaaactatggtggcttgtgagtaaggtgagggaaattaagaagtaaaaaatactaagagaaaactatgaatatgatagct

SEQ ID NO: 182276 - DNA, 581 bp, Cannabis indica
tattatgaaaaaaaaaaaaaaaaaaacttaatctttactaactgcggaacaaatcatgcgtcactggtacttcacgatattcttaggataaacacaaaacaaccaccaccatatattgataccaaacaaaatacactgagcacatacaactatactacaaaataagtcacaacttacaaaaacaaattaccagttaactttatggtacacaataatattcaataaacattaagtaaaaattaatcaattaaaacttcttaaaagaaaaagctaagctagattaaagaaaaatgcaagagctaatagattctcttttataggactatttttaagtttatcaaattaaataagatcggttaaaaattttaaaaatgatcacagaaattatgattctacttaaaaataataaaaaataaacataaaattaaaaagagtaaatatggtaattaataaataaatcgattatattataccaataaactacatacatgctatataaaatataagtaaatacaaattaaatatacactatgtatagaatgatatataaagtatctaatatatagttaaataaaaaaaat

SEQ ID NO: 182277 - DNA, 1219 bp, Cannabis indica
gacaagaaggaagaaagttctgacaatgagatccaacatagcaagaattacactcacaaattggtaatttttgttgatcaaaaccaataataaaactatccaaataggctcttccatgaccagaacatgagattgctgccacagcctcagcttcctttgctgcccttttactccaactcaactcacttctttcatcctcatcaaaatttgatctcttaaatattataaagaaaatgtttagagttaaagaacataccaatatcattaacaacactaatgttattattaagctttttgtagctttaatatttcccatcttcatcgttaatgattattgttattgttgaagaacatgtatatataaatgaagagaaaggaatctatttttgctaaagtattaattaaggaatcctaaagtatacaaaataatatatattatattgtaattaaagatgatgactttgtccaacgatattatataggtcaactattcatttatggaagcatacgcctaaattattatatataaatatatatatatattatattaattatatttttttttttttaatgaaatatcaacttcattaaattaagggcattcagaaaataagatatccctcaaattaggctagatatcttgctctaaaatgcaaccacaagagataaatcgagagtgccttgcaatagcatgggcaaatcgattagctgatcgttttacaaaacataatttaacatcctttaaaagagataataacaaacgacaatcatctataacaataccaaaagtagaagacatcttttggttgcttcttattgcttgcacacatacaagactgtcagactcaagctcaacattttttcatgacttgttctttatccaactgagagcttccttgatccccaaagcttcaatcacttcggaagggtaggtgccattacaatggcatgttttggcctctaagaacctacctaaatgatccctcgccactactccatagccataagagttgtcttgttgataaagggccgcatctacatttatcttgaggttgtttgttgcaaatggtgtccaaagctcagccccttcatcactattgctaaacgacagtgttaaaagagcacttttattttgagctttcctccaatgttcaaaagtaatagaagaattggccagaacttctttgacagtagacttatgtttattccagaaaacttt

SEQ ID NO: 182278 - DNA, 858 bp, Cannabis indica
acatttcatctaaacagtttatgggcataccgaaattcttgaaatttcgaatacccattaaggatgttgttagctatgtaaatatctgttatggaacctgatttgattgcccatgaatgggttattgaaactttggaaaatgcatttaatgaactataaataagtgagtgcagtgactgcattcaatagtcttttggtcacaaaaatcacaatagagttatggtggtttgtttgtaccttcaaacactatatatatttcccacaaaaagagtgtttggctgagacaatgtgttacatctctaaaccccatcagatgtaagagtgaacacccttgagattgagagtacaaagatttcaacctccacactcatggcaatgataggtggacatggagttgtaaatatatgtctctaccatgcaatacttttataaagtaagtccaacacgactcaaacttaaatttgatgtcgtgtttggattcgtgtcttgttttattcaagtcccctgctttttttaatataccaactcgttttcttagtttaaatttgtgttatatattttgtatttttatttataaataaagagttaatcattaaaataatattgatttttataattttaatgtatttttttattaaaattataaaatagacatgtattttagtaatcattttcataatcatgaattaacactgtatacacggtggatggtgaattagtatgaatgacttctctattatttttttcattggtgtattactctctatattattttttggtatgtaaaatattttgttctttaatttttttaaaaaaaactaaatttttaaataatttttttttctaaactaataatta

SEQ ID NO: 182279 - DNA, 779 bp, Cannabis indica
tgactactgtaatatacctgtagtataatgtaaataataaaaacctcgaagtacgatacaatagtaatcgaaattaaccttaaaattttaaaaaaaaaagtaaagggattttagtaccaaaaaaaaaaataaaaataagtgtataaaaattgaaacataagtacccaaagtcttaagtttgtaagtggcataatcctaatgtttatttttagtgacataagtactcaatgtttgtaaaactgtaatttttttttaattttctcagtacaaactctattattttcttaaacaggccgcaaataaggtctaaattcttgatcattgggtctagacaaaaatatgtagtataaattactttcaaatgtttttctaataaattcaaaatagaatttgtattgataaaactagagtaaaattacagttttataaacattaagtacttataccgctaaaagtaaacattaaatttatgcggctagcttaaaattttgattactatttaacgtatatatataattagaaagaaagagtgatgaggtggtggtggtgggtagggctagctagggcatagtattgcgtgttgtagggtatggccggtctagtggcccactcagcttttaatgtggggccactaattttttgttagtttgtgaacagacaaaagcagagaagcttcttatcctcctcctcagttttcacacacatagaatctctcaaaaacccaaacccaccatcatcttattatatttaatacaaaatttccttctatatatatatat

SEQ ID NO: 182280 - DNA, 558 bp, Cannabis indica
aaatttaataaataaataattaacaggtttaaaatacacattaaattaaaaaattaagaaaaattagaaaaattcggaaaagagagattagtaaagaattccaattaggctgccacatggaaggttttaaactttcttttatttatatatatatatatatatatatatatactaggtgattgttacgtgccaagccacgtagtgttagttttatttaatattttagttttttattttaattaataattaaaatagtataattatttgaacgatttgttttataaaaataaaatatgtgtcagtatatttagtaagtaaaacatagttgtgttataataatgtatgttattaatagtaaaatgtacattaatcttctaattgaaaaaagttctattatctcatttcatatctaataatagctacacaactatatatttatagactttcacattctttgtaaattactaataaacaccaataatattttcatattctaatatttttcaaccttctcctcttggtggtaaaattaaaaataaaaactaaaaataaagcaac

SEQ ID NO: 182281 - DNA, 855 bp, Cannabis indica
ttataaaatattttaaaaaaaaggataatacagacttttactttttttattatatcttattaaaatattatttttttttttttgtaatagagtgtaaatgggaattacattggtattagtatttaatcatcattacaatacttaatgtaataaattacgttgtaatgtattacaaaagttaaagggaaaaacaaacaatgtgatggacctattcattaattaccatgccttacgcttaccattacaatgaaccaaacatcacctaatgtaactactaactgttttggtatctttaagaattttttaatccaaattttttcataatcgtgtacgttataattagggctgagcatgggttgggttggccgggttgaaggtatttcaatgacccaacccaataacatcggcctagaaatttataacccattcacatactgaaatttatctaacccaacccattttttcttttatgggttgggttgggttggtttgggttgggttataacccttatttcaacacaaaattaaatcagatttaaatgtaaccaaatgcatactgaaaaaattaaaatttcaaatgtaaactaattcatccaaagtaacataatatcaaggatcaaatattacagtgatccaaagtcttaaaaactattaaaattgtccataacaaacttaaacaaaactaaatcaatttttacatcagccttaatcaacaatctcaagtctcaacgtcaataatttttgcttttgggaatgattccttcaccttgagtttattttctacaattataaaaaaaaaatagtaaaattattataaacaaataaccatgacataataaatgactatgttcaata

SEQ ID NO: 182282 - DNA, 571 bp, Cannabis indica
acgagccagaagctaacattcaacaaactttgaagaactcttgtaaatagaaaatgcgatcatcacagacgtgcatcatcgacatcggaaggaaaaatggccccagctcgctattgtgatcactggaaccaagctcttgacgagacatccccagatacaaatattgaagacgtgtttaaatatacgatcattttgacccagtaaaagcgggaaaatcacagctgtatgattttcaagcaataaccgcatttacactacatgatatgtaatcaaaccacatgattttagggatgattgttgtaaacagattacagtcaactttgtaattaactgcccactatgtaattataaatagtggcaagaaagatcaaaaaaggaggaaaaaactcatacaaaagaggccctgaaaaaacaatcaaaaatctgaaaagattgactcgtggactatgcagaattttaactgcaaaaccacgtaaaaatcttgtgtgttcatacttttacttttatagctttcattttttcagtgtgaaattgctaatgtgaggctcaaatttggttaacgaaaatcaac

SEQ ID NO: 182283 - DNA, 817 bp, Cannabis indica
gtacatgagtgtgagtaagcttgtgtttaagtaattgaaatgtatcctcttgttctgaaccctatttaaatgaaacattctttttgctaacttctgtaagtggtgtgggatggggcttgttgtctaaatttttgtaagcttgacacgtggttctttcttaattagggaaggataagatataattggttggacaacccctattactattgttctggggagataagggcccccactcgcggaaagggcatccatgattaggaatctcctaccagctagcaatacaagggacgtctgccatctaaaatcttccctattctcgggtgctgaagccatatacttccacaatgccaaagttgagtgctcccacaaagggtatggatttttctccaaaggaccaaaggtattttcaaaattaatttggcgaatctacaacctctttccacggaggatctactcgtacatgtcagactatggacctagtagccagacttttttgtgtacagcatcagaggttgtcccccaaatatgcaatagtacgaagcatgtgtgtcccatcgtgcttgactgagtgatctaataaccatcaatagggaaatccaaaaaagggagactctgggacagcaggtgtatgagccctagtctgtacaatctgaaaaacacaaaaataatatactatttaataaactctacacaaaaaactcctacgaagttctctcttcaagaggaacaactgaaaaagtgaattttctgcccattgtatatgaaatctatatgaacatttatcggccgatgatcctaataaaatggactcgtggac

SEQ ID NO: 182284 - DNA, 727 bp, Cannabis indica
ggtctttttatgttgaaattttgttcatttgttgttaattttttgttatctgtatgttatttttttgttgttattttgatgttatttttatgttaattttatgttgctttcttgttaattttacgttgttttcgtgttattttttagaaaaccgtaaaaatgtaaaaaaaaatattctttgaacgtaaaaatgtaaatattttacaaaaaattgtgccttatgtaattattccttttacatttgtattgtcatatttttttacattattactgtataaaattttcaaaaagactgagttaaagttttaaaattataatgatactgtatttcagtaaaataaaaaaataactctaaaacaacttgacaaacaacatgaaaataataaaaagataactacaaagcaacgaaaaataacaaaacaatgacctaattgcaatatgcaaaataatatcaactcctcaatatgtttttgtattacgaaatttattttttactttttttttggtcaacttgatttatctttttatactattatattatttttttccataaaatttatttttatttttttctttttcttttttgtagttagtggtcaattaaaataataatttattttttaaaagttaaattaataattacattaataatataaataataaaattttaatgatttctaaatgtggtatatataatgggaaatatataattaatatgtcactatct

SEQ ID NO: 182285 - DNA, 973 bp, Cannabis indica
gagaattttagtcagtttaaaaactgaacaagaataaagcacttaacttaagcaattgtcattattatcattattaagatgatgtaaataagaagggacactgttcaaactggcaattacaactttacaagtaacttagtcggttttcctattattccctaattcaattcaagtttcataatcatctccaaattctatatatgctcatataggaaatcagattatttgagacttaaaaaaaattaataccaacaaactcatgaaactcttcaattttgacagtaaaaaaaaaaaaacaaagcaaaggaaggaaaaactattaatcgaatgaaagattggttacctagttaggtagtataaaaagccataatgcttcattaatctcagtcaggatgttcctaaatgttgcccacccttttggtgcttccaccaggaacaatgataagtactgcagtttcaccagcctcgtcaacctcaccatcacctgcgacaatctcattggtatactttcagcagagatggcgtcgtcttggatgggggtgtggccacgatgatactcttcggcgtgagaaaggcagtggctgaccaaaaataaaacagcgagaaaaacaagtatgaaaaattaggatttgaaaaataaaatatggtattgaaaactaataataacaaaaatatggcatactatataccatataaaagttcagaaataaaaaatatccataaaatgtggccaaacttaaaaaagccatatttaagtaaaatgtttttaaaaacccatatttcatgtaatttttaccaaaaaaaatcctaaaaaaaaaggtcctaaccaagttcggaccagtcatcgcatcattaatcgtttagtcagatttggcgggcccacgtggacatttttttattattattattattattttgataaatgacctatttattttaactcctactcctaatcgtatgatagtagcatgaa

SEQ ID NO: 182286 - DNA, 721 bp, Cannabis indica
agtctttaattaattaggtgtacgtatatacatactataatatatataagaaaataatattttctaaacacgcagtacgtgttatttttataaccacatatgtatagtaatttgtttctctctataaatatttagaatttagtgataattatttttatttattatatatatatatctttatatataaatgagtaggagaaaaagtcaaaataaaaataaataaataaaaacaagtttaactgagtttaatgtaaatccatcataaaaatgaaagtttttaaatgaagagcgatggaattttctttttaatagaaaggatggtcattcattcggaaaaattcagctattacaatgttcgttaaagcagaatgagcattcaacgcactaaaattataatctcacataaaatagggccctttaacaacataataagagctcgtttggtacgttgtattttattaaattgtattgtattgttgtaacgccccgatattttgccttattttacaaaaatactattttcatgcataatttgaaaagataaaaaaaaaaaatttaaatacaacagtggattttaaaaaaaaatcaaaatgcaacagagaaggatccttcatttgtaaaacaagatacagtaagtaaataattttaaataatgcatttccactgtgttagatttatcaactgcttaaaataaaactaaggcaccaccggcgttctagat

SEQ ID NO: 182287 - DNA, 673 bp, Cannabis indica
tttattatacattaataatttaaacatataattttaatacttggtataatttgctgtttttattttctctaatgcaattttattaatcaaaaatagatatgcagtaagcagggccgtcttaaatatttttgaggccctgttctaatttaaatagttgggccctagtaaaaaaagtgcaattgtaaataatattttcaaatattatcatgtactaatatatattttacaaaattaagcaccaaaaaactcaaactaatttattaaaattgttattcacttttgagtgaaatataaactgaactcctgatatatgtatatcaaataattttttcagcaactcttaatattaatgatactttactttatttttttttaaaaaaaataaaatctagaaaatagaaatatgtataataacacaaacgattaatttttttcctctcaaaacaattttgatttttgatatttgagggaaaatggatagaaatatatatatggaacatttcttaatgggtattacccatgaatggttactaaacaaatttaattataaatattaattttaaaaatatcaaaccatcgaattttgtatctaataacgaataatgaaatcacaaattaaatttctatgcttaatttaactacttaattacaaaaaatataaaaaaatatactc

SEQ ID NO: 182288 - DNA, 607 bp, Cannabis indica
acttatctttagatttacactaaaatatatatgtatctcttactaaaataaataagctagtatacatatatttaaatttatgtgtatgtgtctatgtgaataagaattatttttcttgtgtttttattataaaataaataaaatgcaccaactcaatatattactaaaaatgattaagaaattagaagtttgtgtcttgttttgattaatatatattatatattataattttttaaaaatatatataattaagtgcggattggattggatcggttactttttgaggtcaaacaacatccaatccgcacaagtgcggattttggatttttcaatccaatccaatccgcacaagtgcggatatccgcattttgcggattggattggattggatcgtgcggattggattggatcggatactttgtgaacacccctagcggactgtagcattaacctcaaaatgcaatcttccatagtgcttaattgaaacaaacatgaacaacataaccacatagattgaaatttgaataatttttttttttttttgtgtatgtttgtttactaatctcaaaaagttttaatagttgaatatcaatcacattatctataa

SEQ ID NO: 182289 - DNA, 961 bp, Cannabis indica
atgacatcgcattatatgagtttttttttctttcccaattctctatttttccaattttctcatttatttagtttataatcattattttaattttattttttactctattaatatgtgatactgtataattaaatattcagttaattaaaaaacaaattactgacttaatgaactacaaatttaaaacattaacacattaaaaaaaagtccaaaaaagttcaagtggcatcttatattttttttattaattaattataattaattataaaaaataacaaatatataaattattttataactgttagaagagtttatgaggagttcataatcttataatagtatattgttaatatcctttcattataaaaagtttcactatcacaatttgagactttttcttacattgcaaggtgatcaaattattggtttccaagacggaatattataccttctttcttatatataaagcatatgtgatatattagaaaactatatatattaattagtttattttattaatattataaacgcttaaaaacttgtataaactattattattattattattattataaatgatttaactgtaaagcacttgtaaattaattgaatattttaattagttggtcaaatgtagcacatctcaaattaaagtgtatatatttataaaggagaagttatatatattctacactcttagtattattaagtgcacttcaaatatttaaatacattttttatccttttgtgaaatgattaaaaaaaacaaacttaaaaaattaaattagattataaaattaatatttttttttaacacacttaattaccttactaaaatttattaggtagttaaaattgggtatcttcaaaccctaaaaaaaaaaaaacttatcaattgaacaaaatagtattaaagttctatcatcattatctcatattgatgttataccactatgcaata

SEQ ID NO: 182290 - DNA, 644 bp, Cannabis indica
tgccactgccacttgtcatcaactggtatcaaaccagatttgggaatttccatgaagatcccactgttataattttctaatgattgtaatcattgtataaagcagattccttttttattttctgttaagatttgctgccagctgtaatagggtaaatacccttctctgtattttgcctaaaatggctccatctataaattcaatggaaatctctccagtattgtattgagctgagaatttgcaatatcatattttcttaaaattcaactcacatatcttttttttattggcatatttaattttcttttttttaaaaaaataaaaatttaatgatttagactaatcgaaaattgtaacttaacaatttacttaatacttattaacaaaagttctagttgtagaattataacttaagtatttttaataaaaaaaataaatttaaagtatttatttataattaaaaattaaacgtaagtaaacctatttatcttgtgataaatttgcattacaaaactttttgtcatttgaaacaaaaaaaaaaaaggaaaaacgaacatgtgattgagatcgagtagaagccattaaactcgccacctcagcgcccgcatcacgtgtatttctcctcctcctgctccactgccact

SEQ ID NO: 182291 - DNA, 567 bp, Cannabis indica
tactcaaattatattttcactattttgtttttgtcatggcctgaagacaataattattttggatttttctcgaataatttttgcttcttatgattttgttttttttttgcaaatgagcttcttatgattttgttgtttttttttttccaatggagcttcttttactgataaagaggaccttcttatgatttgaaaacaataattgtgtttttacttcaaaaaaaataaataaataattgtgttttttttgtcaagttctcaatttagaaagagataagttaaaaaatattttttttttgtatatttattaattaatattttattaaaaaatatctatttttgtgagtagatttcttaatatacactcattctctctacttaagttggaacatgttgttaggctattttagcctatgtttcggggcacaagtaaagtcgtttttcgatgttttaggacagaattacgcttgttttctatgttttcaagtttcccgtagttgtggacgttcagggcttcaaaagtacaacaaaagaaaagttgagccaagaaaaaaaagctaaaaatca

SEQ ID NO: 182292 - DNA, 770 bp, Cannabis indica
atctttgattctagtagtctctttgatttatttctctctggtgctttttttttttttgataatctctctggtgcttgtataaccattgtttggttctatatcttcagaatacatcttactgtatgtctgagattagattgttttactgttaggttatcatatgggcttctttactactgaaatttcttataagatttgtaatgaaatgttttggacatgtatgtggacttggctccaccattttaacaaattagtgagatgttatttttcttccaaaattataataataaataaataaataaataaaaatatggaagcgaatcagaagaaagagacggtccatttgcaaatgcatctaaaaaatgagtgaagtggtgtgtcttgtccccctactaattgatcctcatgtagaataataaaaagggaattgcatataattgtgtctagtttagtaatatgtatattttattaaggctccaccattgttggtggtaccatttataggcaatgtgattagagatgtggcgagccaccatcgctgtggggggttcatgctccatgtgctatgatgggacctctagtgtgggtgagtaatgtacataatgggttgtttgtggccattccatgtcccaataaattaaaaaatctgtagtgtttgtgtggttttaatcttttctatctggagtcctttcatttctgcatgtgattttcatgtggatattttgcttaaattttacattgcatttggtctgtccttaaatgcccctata

SEQ ID NO: 182293 - DNA, 548 bp, Cannabis indica
tgactccctgcagctgttaagtgtagatggtcatggatcggtttagtttccttagttttgttttagcttatcttttgttttagcttttctttagccattcctttttaggttgttatttggccgtctatggccttttttctttgcttgttctctgtctgtttgcgggtgtggttcccagtttaaccactaataaaaaaaaaaaacccttaaagagggtaatgtttgtgaatgttggaagcaattgattattattaattgataaagagcctttatataggcctgtacatttacaagaaggaatactaatatatactacaatcaaggaaaagattgactaggttattaacaaactaataacaataaaagagagagaatagaggaatatacaaaacaactctaaacgaatataatggtacaaattgttatagtttgactgataatagctggcagtatatcctctacacgcacccgaaagacagacggcctttcagcagaccgatctgaaaacaaatcatgaaagcgtgtctagcaagtggttcgtaagtgca

SEQ ID NO: 182294 - DNA, 740 bp, Cannabis indica
atgttcttgaggaccaagtatctccaactggttcatgctaaaatggagtgttccttttttgggaatttaaaccagaggaagatgatgacgtcatgcgggtacccggaaacgccatttttctcggctttcgccgatatgtcaaagcgagtttggcttctccactctttagctttttcttttggtcaagaagatggagaagttacaatttttcaagttagaaaagactccagattctctgaggtttatatggggtgtgtgaaccaagaagtactattccctgccggcgaaatcgacgccaacccggaagtggagctcagagtgaatttcacggttgttccgggatttaagatcggcaaaacggtgattcagagccaggtttatttatcgccggcaaatcgccgccggtgatttctttcttcaaccattattttgtttatttatttatttaaaaagaaaaaaccttccatttcatgttcttgaaaggatagcctccacgcgctcattgcatccttcggcattaaatacttggggactctgcccacttgaatgtgtgccgtctgattaaggcaagttgttatgatcagacggtgtaacggcggtaatagttagtgaaaacggaagtgtatataacgtggtcggcttctggaagttgggaggggtaactaattcctacgtgtttggaggagtgcggcggcgcgtgagctgcacgaacttggtgtaggatttgagtagctgtagag

SEQ ID NO: 182295 - DNA, 522 bp, Cannabis indica
aaccatgagtcaggaatcttttccagaaaatgtacataagcttatccggcaagtggtgttgagttgtgaggaactgcatttcaaatattctgaacttttaaatgtattttgtgataatattataatgacatgtcttataataatttaaataggggatccccaatcgtaaaaagagactatgtcatagattttatgatttaaattagttggtaaaattttaattaatcacagtttatataaacttctagtttattattataaaatagtttataaacacatacacgtgacgttcctaaggattagggcattacactaagagtatagatactaattttattttttaacttgattaagtatgtttgttgtcatggttgttatattatttgagttttatttttgattttgtatttattttttactgattctaatcagctagagcttgacaagaaacctaaactaaaagatttatgtaaagtaacaccaattctaatatgagataacaacaaacaacccaaatagaaa

SEQ ID NO: 182296 - DNA, 575 bp, Cannabis indica
gtagtgaattttttattagtttcataaatattaattaatataaaatatattattcactcttaaatttacttatttttttattttttttttttaaataatactctaaaaatattgatattttatttattagtttagtttaactctaaactaattgtatgcgctcgtaacttataattataaatgtttttataaaatatatctaaaccatatataaagttatacaactattaattatgaattattcaattttgtatctttcttggggatggagttatgagttagaattttaaatagaaatattttaaacactagctatataaagaagattaaggtacacctactgagaggactagaaattctatcaaaaacttactttgctagaaaaccctacttgataattctgaaaattatatcttaatgagttcccttaaagcatttccaaacatactctttatttttagcctaattttaattaaaatagttaaaaaaattaaaaaaagagaactaattttttatttttgcttccaatcttgctctctattttagttaatgtttaattgttttaataatatttt

SEQ ID NO: 182297 - DNA, 750 bp, Cannabis indica
cttgggttggttagggttttcatgactgtggtgactcagtgactcaactcggtacttccccagtccacaacaaggtcagttttttttttttttttgttcggttctgttttctactctctttcgttttctttcttttttgttgattaaatttactagttttgtaatagattaatctgttttttccttgggtggtggaagtaggagagttctatatatatcgtggtggaccctaccacatctgatccagtgtgacggatcttctgccacgtggtgaatggacacgtcatctgtgtaggacccgatttgtgttggcctttactaatctaataatttactatatattttacgggagaatctctaacaaaaattaacttaactgtttctccggtttacttccacactaaatcattattattactttagttaattaatcacacataaataaaactgattaagaactcttctttaaatcctgaccgtccatgaattatttcttgagataaaatattttgtttggaccttattaagttaattttgaatccacttataagattagaaataaatttaggggagattgagacaaatataagaattgtaaaaatgtttttcaacatcattaattttgcttattgttttgaaagaaaaaataaataattgaataaataaagtgatgttggaaatattattagtaaagctcttaattattggaaacttagtgaattatgggattgtgtgtttgtatatgagtac

SEQ ID NO: 182298 - DNA, 577 bp, Cannabis indica
tatgacttttttgaacaaaaaacatttcatgctctaaacaactatattgttttttcaaaatttaaatacgacttgttgataattaaaaaaatagacgattcattactattaacaatttttttcctatcttagctgcaacttaaaatcattcatcattttaaatttcaaataaccttttctttattaagtaaataagtttttcttttttttttaaataataataataatatagcacttattattacaaattgtttccaggggtggaaagttttggtacgtaatagtttgaaactttgtacctgaaaattgaaaagacagatttaacgttttatatatctttatatattaaaagtgtctatctaacggcatttcttggtttaacattcttggtttaacagaatatacttaaaaataaaagaatattctgttaaatttaacgattaggtttgatctcccgttaaaaaataaacccaataattaaacccaaaaaattaaacaatcttttaaataaacaatctattgagaatattaataatttttttatttattttttaagaaagaaaaatatagataaaat

SEQ ID NO: 182299 - DNA, 717 bp, Cannabis indica
ctttttctatggccaaaaatggcattgaatccttgggattttttgagtttttgataaaatatgagtgtttggcgattggattcagtagcataggctatgtgtagtgtgttttttagatctggtttgatgtaatttgttgagaaaatgaataactttgaagctcttcgttgattgtgttcttgaatattgaaaaataccatgaacataaaaaaatttcattttccctccatttttccaattttgattctcataaaagggtaaaaatgtatttgtggggatgtgatactcttttggaaaaatatttggctcggaacaaccacatagctcgggtatggtctagcaaccattgtgtcggggtacatatcccactaccctgagcttggcattacaattacaccaccatttggatgtagccctcacccgagatgaggtttgatcccccctgagtttggtctcttaccccgagactcctattaagggtcggggtgatgtgcaccccgtgagtgagtgttgatctcgggttaccccgagatatctccttgggggtcggggtggtgccccgtgctctattcataccccgagtaacattccattgatggtcggggtttatccccaatggccacaacgcctgagatgggcctatgatgataccccgagactagggggtcggggtacaccccgagtaaggccccatcttctttttcttaccgtcggtta

SEQ ID NO: 182300 - DNA, 560 bp, Cannabis indica
aacaataactacaggtccgggttctgggttcaggtcgggttcaagtccgggtccggtctaggtcggagattagtgttgaccacaaatcctttgtaaatattataatacaagctaatactaatcatttattatgtattaaataatacaatatacattgtattaaaaaatttggccataataattaatgcaatacattgctttatccaaaacatagtgttatttattatttaatacaatacgacctttatacggcgtaccaaacgagccttaggtataatttgatacatagataatcatgacgttagcgtctattagtaaaagttgaatataagcctttaaatttaatgaatttcaataattaaaaaaaataatagaccgaaaaatttaggatgacatgattttgtaaagtaaataaaaaaacaaaaaaaaatacttgaattaaccttttaatattataaactaacactaaaattttgtaaattatacaaaaaagtacctaaataattggtaatacctttaatctaaatactaggaaggttgcacgtgagacaataaaaaac

SEQ ID NO: 182301 - DNA, 795 bp, Cannabis indica
atattactgtatgttggtttatatataagggttcaggaattcaaatatttagaagaaaaaaaaatcagttagggatttgttatttagatatttatcgtattaacttttttttattaaaaaaaaacttgtcaaaaatataatagtttgatataattaattaattatatggtttgaacaagttataacctttttttttgaataaaaattgggaacagaaaaacagaacgtaccctaaaataatgttttccaatttaaaatatatttttttcttaatatattagttgtcgtttatcaacgtcgttttgaaaatagggtcgtttttattatgtagtttgtttacgatctttttatgattgtcaaggtctcgtcaaagtttttttcaaagttataatataaatattaatgtcaagaaataaaactaaagatatattaattccctaaaaatcacgaaagagtaagccttaataaaaaaaataagtaacagaattgaaaaaagagtttgaaaattaaaaagaagaaacaaaagttgatgaagcattcactaattaattagcattattggtacgattcctaatatacacgcagtactgataagctccaagggttagcccactgttctgtttgggacaattcaaaaccacttttggaataaactcacaacactgatcgctaattactgggcaatctttgtttttataactcgacatctctgcataacatgatgtaaagttacaattattaaagccattttgaggaacatcagtacttggaatcaaacgcgaattatcatgtggt

SEQ ID NO: 182302 - DNA, 723 bp, Cannabis indica
atcaacacgtatacgtaactatatatgtaaataaaatacgtatatgtcaaaaattattatgattgatttttatttatcagaatctttgtgtaaaatttatatattcatgtagtgaacttattaaaaaaagaagaaatgttaaaaagcattagtagtgtctagctaacaccctactatatatgtcaatattactattaatttaattaagtatcgaatttcatatagtttaatgtaataatttttaaagactatgctaactaattgcaaaataacacgttttagatgatgttaaacaccactaatacttaatagggatgcttttaaaaaaatagtgattaaaaataatcgctacatactataatgataccctatgaatatttatatatatatatatatataatatgtaccacaggtgatggcaatggtacatggtcgatcgatcaggatagaaagaaaagattcatataaatttcgtatggtgggttgaacaaaacaaaggtatgatatatttcataatattatccgatttttaagtcaagaaaagaaaaacgaattggggccactatatatcagagcagccacttgcatatataacttcacctccataccctagagagctatatctgctagttaagcccatcaaaatataatacatatatcaactattatttttgggtaccaatagtaattacttataagagacatcgtcattaaattagatag

SEQ ID NO: 182303 - DNA, 685 bp, Cannabis indica
aagaatttagtgactaaggttacatgaatttatttaagtctttagagttatttggacattggcttaataataatgttcttttatttaaaaaaaaaaaaataattatgatatgataaaaaaatttattagttgtttccaaaataaaaataagaaaaaaaaatattacgcttctaatttggtacttatttttggaaatgaaattattggtctaaaaagacaactgccaaatggttttagtgggtcccatttgtttaacatttcctagtttgtaaaattattttccaaatgaattaaaaaaaaaactaattaagccctaatcaaattaagaaagggaaaaaaaatcaaatatgtattgagttgtcatggtataagacttgtgaacaatatttgtctcctattgcaaaaattgggtggaacttagaaataattaaaaataatattggccttttattaaaaataatatgtagtaattgtaaaaaaaaaaataataataataataatatgtagtacttttaaatggaaaaatttccatttaaaataattaaaaaaaaaaaactaagaaaatttagtaggtgttagtacggtatagtagaagtttcacacattttcttatatagataggatagtagatactttagtaggctgttttagattagaaactatatatatagatttaatgctcatt

SEQ ID NO: 182304 - DNA, 536 bp, Cannabis indica
aaagctaagaaaggtaagaaacattgaattctattgattgatttctccaagaaatgataattataattttaatttctcttgttattttcactattgactttgattacattcttgacttaattaacatgttatttggaataaaataataataagaaattttaattttaagtttttattttggttctcatgattatctactatctagtaccttcagctgagtgacttgaattttgactgcaatttataacaaaaaaaactctcatatcttgaaaagtcacctgatagtttaattttaagcttttattttgcttctaaaaataacctagcactttcacttttgaatatgcttaagtgtgttgagctatgcctgcaatttttaacaaaaaaaatttcatatcttgaaaaaagtcacctagtagttcaattttaagtttttattttgcttctgaaagtaacttggtactttcacttttgtaatatggctaagtgcgtgagttgtgactccaattttcaaccaaaaaatcatcatatcttca

SEQ ID NO: 182305 - DNA, 865 bp, Cannabis indica
ggcgttttggagttcccaatcgtcaagacctgccatcccttgatcttcacgagctttctaagcgaatcagaggcataatcagagacggagacgatgatccacctctccatccaaaaattcgcataaggtgaacccttatcagtgattggagtaatcgaattccaattcactttggggaactcgatcttctccaaagcttcaacctgattctcgaagcagacaagcgtcgtggtatcagcgacattccggagaaagaagacagcggcaacaatcgattgggagtgggagtgggagtgggagtgagagatccggttaggttagggcttttgcaactattcgtaaggttagagaaggattgttagagaaggatggtcgtataagattatagaagtgttaacttcaagcgttaatcttccgttaaatttaacagaatattctttatttttaaagcatattctgttaaaccaagaattgccgttagataggcacttttaatatataaagatataaaaaatcattactaactacgtggccaaaattaagaaggttccatgtgtttttctatttactcccacctaacattatttttaaatgatatattattaatttattcagtatataaaacttatataattagttaaaataatactattgataagtactaagaaaattttagtttaatttaaattattatgagctatactgatgtatcaataatatttttagtgaaaaacagctcaactttgtggcaagtattataatgaaagagatgctaacattaatttaattattttgctatataattaattaagcatgcccatgtgattagagtcaacttattgcttatattataacttgagtttat

SEQ ID NO: 182306 - DNA, 622 bp, Cannabis indica
atatatttaatgactagaatattctacaaagacaacaatgagataaaaaaggaataattacattttttaagttttaatttttttttttttttttttactatttttacagttttacatagaaacaacacgaaaataacaagaaaactacataaaagtaacatttaaacaacatctaaataacatataaataacaataaaaaataacatacagataacacaaaattaacaagagcacaccataaaaagactgtattttctgtaaataaaataaaaaaaatcgtaaaaatatttaaaatttcgtgaaaccatatttttgtaatttttttgttgtttttatgtatttgtgaaataaaccctaaaaaaacctaatcatacgttaaagagtagaaagtgaaatagaaaaatgacaaaattaaaaagtaagtcataaatattcatataaaataaattaataagatgtcattgtaaaataaaattaataataatgagaatagctaaaaatcgttattaatttaaaattaaattaaattaaaaataaattaataaaactaataatgagaaaatgtgaaagatttataccgaaagtaattaaattaatattaaaagtaagaggagtgctaat

SEQ ID NO: 182307 - DNA, 506 bp, Cannabis indica
aaaagctctttctttaatgttgtacaatgaaagctaaatgggtgggtaaatatatataaaaagagcttctagaccaacattgactagaaatggtaaaatgtgtttttggtgtctaatacttttttttaaaaaataataatattattattgatgtaattaaaaattagattttatataatttaggattaatactattattttgaactatttattttgcaaaagttactaattatattctgttattttattaaaataaacaaaataaactatatattttctaaaataatacaaaatgagacgatgaatttaattttcgtataattctttttaattataattaacttgaaggtaattcctaacatgcaaagatgcaaaaaatagtaatcaatacctgttattaataacttttagtatcaggttattgttaagttttaatttttaactaaaaactttaattttaagggttacgtattttattactattttaaaaaattaacataattcaa

SEQ ID NO: 182308 - DNA, 731 bp, Cannabis indica
tcttcattaacctattaaaatataagatatctatgaatattattgagagtggaagacatcaaaacatatttatatatatatatataataaatgagtttttcatttttacattttaaaacagtttttttttaattttatgattctacataaaatcctattgcaactagcactgcaacttaaattgtaataaaaaatcgtatagaaactcctattacaactagtgctgcaactactttagaaattacaaacggtaaattaaaaaaaaaaagtaaaaaaaaaaaatatgtagagtaattccccaaaatataatgagtatattattttttttttttaaaaaaaataaaattgatttgtcaacaaaaattcagaaaggattgaaaaaggatatcaaggtaaatttagacaagagaaattgactaagcataatgtattaattaaaaatataaatatacaagaaatgtatattagaacaatctagaactataaaaatcatgtgtgataaatttaaaaagaaaaaaaaaataaaataaaaaacaaacaaacgttagagatagatacgtaggtttttattgtcggcacccactcattattatacaacaaaaaaaatggttaaatcaatgaaaatgatgataataaaagtcggtctattaatagtaaaatatcaccaattatagaccacaataactattattttaatctcacaaactcacatggggttactaaagtagcta

SEQ ID NO: 182309 - DNA, 529 bp, Cannabis indica
aggtaaaaattcaatattaatttattgttagctttaaaatatatttacaaaattaattaaaagatatgattctttattatcttatattaatacgattttaattaattaattttgttgggtttggcttggacaggttctgagtatgagtaggttgggcggtgcagctgctgtagctcctcttgtagctgatatgtcctctgaggtattataactaaacccaattttaattaagaatattaatccaaaaattaccaaatttttcattttttatattttttttagaataagattatgaaataaacaaaattctttttttttttttttattaacaactcatttcacctactcaactgaacaaatcaagaactttcaatcgtaagaaaacgacaaaatatcaaaagtagcacgcgcgcctcaccttttgcagattccactttaattatttttattgtttttttctaactaatttaattttattttatattttgtatttttcttctattggtctttttctatgtctattctttct

SEQ ID NO: 182310 - DNA, 872 bp, Cannabis indica
atcgggtcgggcagcgttgtgtgtgagagagggaaagagtttgaagataaagtgcgatggcgacgccaatgaggaggaagatgagtcgttgatctcgaaatgagaagcgagtgatcgtagccgttgatcttgatgagtcatgttgatcttggttttgttgttgttgttgagcattattagagttgttgttattgctacggtgaataagctctgaattcattattaattgtttggtgttttccagtttttgggaaatgatcaaagaaatttgtggggaaaattggaaatggtgaggagtaaattttgtatgattgattgagttaatgaaatagtagagagagattgagtgttgtgttgtgtgtagaaataagaaaagtgaggagtttgatgcatgaaatatggctatataatcgctctaatttgctgccacatcttctctttcaaatatttatttaaggaatatttttataaattattgacaaatattagttaatatttactagttatatttatattatcttttttgtgagatttgattatatatttttaattttttttttattttggtaaacaataagtaataataaataagttaagaattggtttttaaaatttatataaaatggaataaacaaaaatgttacaaggtattatatggagttaagtatataataaaattaaaatttgtctaaacaacataacaaataaattaaagcaatgagaattgataagttgggtgaaatttattttaatatttgattgcatcagaagaaactcttgcagcaatggcaaggactcttgtagtacttgtctatctgggcaactaaaacccaggggaaggtgtatctttcttcacaattattcttctcaat

SEQ ID NO: 182311 - DNA, 1053 bp, Cannabis indica
agtgcctaacactttcatatgtgtcaatatcggtctaactaaatatcgggtctcatataatttaatataatagcttttaggaagtatcgctagccaatcgcaacgcgacatgtcgagaaaggtactaaacaccactggtactttatagcaatgctaactacaacatctttggcgtttaatttttagagtctttattaatatgtttgatacaaaagttaataacgaggaggagggtcgacttttttgagtctagagggaagggttaagtttctcatttccactgtgtacatttctaatgtacacactatcttttttcactattccatgccaacacattattaacttaaaccaaaatcaactgaaaatttgtatacagaccacaaaacccgtctatctcatacgtcgacacttatgatcatctacagcaataatgacatcaattgatagctggcttagaaacaccgatgataacaagaaaaaaaagtgttgtttagttggaagtaatgaaataaaatggaatagaaaggaaataaatttcattctattcatttgtttagttgtttttgaaggtattaaaatgtcattctaatgtaatacactttctactattttgatagaataattattgcattttaaaataaaaagaaagactattctaatataataacataagaaaaaatttaataatttttttattattttttttaatgtattttaaattttattttattctattcttattcttatttcattattattcttatatttttattcctcctaactaaacgtaactaaaccagtaatttatatatatttatatacattatatgtatggtaatggtactcgtcatcagctaacccaaccataacagagtgagaaagagataatggaaaaagtagggaagtatatatacatatatacataatacatatattgacttcactacttgtgtactgtgagtaaagtagttgtgatcttgtagtgttatttcgatcgtggttacaacgttaaaaatagactagctcaactcaactctcaaagatagaactggt

SEQ ID NO: 182312 - DNA, 677 bp, Cannabis indica
aagtgacccgttttacattattgaggtagtcccgtaatatccgatcagactcacatagtgtagtcaattcttcaatcgaggggccaccgctgatctttaggccagtgatcaatccaaactcagaccttccaaatctggcctcggttttacccacgtaaaaccagactttatcattttttacctaacgtaacttcatattcctcaacagcagttgatgcacaatcaccccagagaatttcagttcattcgcattccaaaaaactccaaaaggagtttccttcaccctcttggtcaagttgaaggcttcaaactttgctttaattgaagcaaagtacccattccctctgtaagtgatacgcccaaaaaatctaattaattggactaaatcgcacaataatcgcataacaatcgcacatacatcgcctaaccaaaactacaaaatttataactacctagtaaaaattgcacaataatcgcatagaaatcgccaaaatgtcatttctatgtctaacaaaactttcaacacttaaatcgcataaaatagtcgcacaaaatcgctcaatatcgcatcaaaatcccaactccaaaaaaaacttcaactaactcacattatatcgccaaaaacttagacaaaatagttgctctaaaatacgcataaaaaactaatctcacacaat

SEQ ID NO: 182313 - DNA, 664 bp, Cannabis indica
attgaacaaattagcgttctttatttttttttagtttttttttttattctgtattccattatataaaaattggaaaccggccagatttaaggttttttttggtattttcattaaattaatggtcaagaggttcgtattttttttgtttttttttttttttttaaattaaatcattgttaaagtggtttgagtagcgggtttctgttttttcctgtctgccttaccaaataaaaattaatggaaagatcaccaagtaaaaattaatgtcacattacaaaagaaatactaaagggtattcagtgtttgcgtgaggtgtaatatcactataaatacaattatgagtgacgccacatgtaaactaaatggtgcggttgcatatagactaagtggtgcagtcgatcctagtttggtgtagtcgtgatttgacgctcagatttaaataatgtttttggacctttatacaaatacttttctagtcaagattatttgatgtagtcgtaaaagcctttttaaagttcacggatgatacaagttttactgtcaacatcttcgttttaatttgtttttttttaaaaaactaaaatatcattgttgggatttaacccccagatgaaaatataaaataccattgtataaaagttacatatgttgttaagaaagaagt

SEQ ID NO: 182314 - DNA, 832 bp, Cannabis indica
gccacattataatataagctacaaaattacataactaagaaatctttacaaaattacatcttaacaaaagttataaaatagaaatactcctactgatataattatcaatatcacatcttgataaaattcctctaagaacattgacagttacttctaatcactttcaattatcacaaaattatagtccaaaactattgaagtctctaatctaatataaattttgaaataaaaaaatttaaaaaataaaaaatattataaattatgaaataataatattaagtgtactaatataaacgtgccacatgtacaagagtagacccgaccttaggcataggcaggctaagcctgtgcctagggcccacctagctcagggcccaaaaaaaaacttctctttttaaaattacacattttttttattaattttaaaaaataccacattttttaataagggcccaaaaataatttttttcttatgacttattaaatttcagggtcagtcgtcaattataaaaaatagatgacactttaaatttgttaataatttaatagtttagaaagtcttatcactaaaaatttaacttagaggattaattacaaacaaagtaataattgaagtagtttagcagaaaaaaaaactttctctaaacatattttaattctttcaaaatactaaaaaaaagtatttataatagtctttttataatatagattctccaaataagaaaataaaaaaaagggaaaaatgaagaagggtagttatgtcatttcatttcatacataggtcctttctttgtttctcctcttggatttgctatctctgatttctgaacac

SEQ ID NO: 182315 - DNA, 923 bp, Cannabis indica
aagaactctctttacataatgtttacaacgatatttttgaatttttgataatccccttcataaagaattgtaatcaagagaaatttttctattttgtttaatgataactaaattttaaataaattaaattgaaattatttatatatatgacaatggataaatgtatagaaaattcataaatgatttccaaagtattgttatcatcatatctttcttgtatttgtcactacatttaaagtcgtcattactctttatttgtgacatttgtagataaatttccatgttctttgttgtgaagaatgtgatatgtagattttgatttggagggtaatgtaaggtagtgagagaaagaaagagggagggatattaaaaaaacgtgtgtgtaaactatacattatatacaatgactatattaacttttaaaattagatattttaaatagatttatgtttaattattttataaatagaattaaaagttaaaaaatgagtcaattaaggagagaaaaaaaaataagttttgaagagattttagaccgccacatcaccgtctcatacttctcctttatatatatatagattgttttttttctttcatattttctatataaacagtaaaatccaaatatctctctgaataatgatctgattctagagatcttcgtaccgttgaaaagataattcaattttctaaatgttttatgaagaaactattcaccaattattgattattctaagtccaaattattattttattgttatagttcgaaatccatttgcttcaggatttctaaaaaactgtttcggtaaaatatctatatctcttgcgttataactccaattttaaagattttagtgtcattaaaaagggaattcgattttctaaaacttttatgaagagggagtattctctgatttggaata

SEQ ID NO: 182316 - DNA, 572 bp, Cannabis indica
tttttataaacttgggtttctatttttattaaatcatacatatttaatgattaatttgattaatataatgataaatttgattgcattacccaaaaaaatgataaatttggattaaaaaaaactattaaaatgacatgattttttttaagagctctctacatttaactagccctttcatgactatattggagagaaataaagaatggttggaatgttactatttatatttcactccctattattctccaaaagctttctaatctctataatagctttttagctataatagggaatgaaataagcactctaaccccaccttgtatttactctccaaaatagagttataaaggagttagctaaacaagctcattaagtatttctcaaatttttttaatagatttttaatcaaacttatccttttgcatgaatagaagtttaaatagataatatatattagctgaaatagatagcatggttggaatgaaagttaaaaaaaatactctaaaatctaaacaatttttggtttcttcttgttaaatctagagtctaaatacttgaaagtcgttggagat

SEQ ID NO: 182317 - DNA, 778 bp, Cannabis indica
ctaagacatttcattcgatagttcgtttaaaattatgtacgataaaaatattaaactacattaaaaaaaaacatgggatcttattattataaacaaaaatttaatttatatattcataaactttaaaacataaaattttatttacaaaactcgtgagttataatctttaacaaaatatttaacaccaatacaacaatctcttaatatatttgaacttatgaccttatttcagtacgtataaaatagcttaactataatactaaattactatatatattttaattaacttaaatacataaagactgtccccattgattacctctatatgtggatcttcatgtaaaataacttaactatgcataacgcatttattctaatgatcttcatgtaatgctgtacacatcattattatcgataattataacggtaaaaaatgggtataaaataatataatattgctttcactattttaaattataaaaagttttgctataaaattttaaataatttaagtttaaaaataaattgttaaaagatccttatatagtaataaattacaaaaaattaattgttaattataattaatttaattttaaaatataattaatcttaattaaagttttataagaaaataaattattaggttaattttaggttacaagttatttatttttatttaattttcaaatcaatcacaaccatttaatagtagtccaatgacttataaaaatataactataatggctacaataaaaatgtaaccattaaaacttcttcc

SEQ ID NO: 182318 - DNA, 763 bp, Cannabis indica
cttatttcttatatattgatgttacagctatggtggtattatacatgaattaaagtacaaaaaattccctctaatgtcggtaatgcttaggcaatctccaatcgaactctaaatcaactaaatataatttcacactatatttactctaataaaacactaaagttatactcataaataattttgtctacagtatccaaccaaatttagtaagaccctattaaccacacttatttttaaatttttttaataattaaataataaaaactaaacaattatatatatttaatattaaaatattcttactataataataaaataacaaataatataaaattgggtgtaatttttaatattatggttggaattgaacaaaaaaaattaatattaaaataataattttttggtgttgattcgacactaaatttaaattttcttattggaaatgccttaattaatattcgagtttcatgtactcgggaaagataacacaaatctcaaaaaatatttcactgacaacaactaagcctcaatataaataaaataccatttaaaattgagatacactatagtacttaacatgataataataataataatattacacgtcacaatatactaaaccataagtattctttatcatttctctttaaaataggtacatcattatttttttcatattaataaggtgattgtgctggtgcagacaatttatattgatcttattttactatttcgtttatattgatcgtctgggttgtgttct

SEQ ID NO: 182319 - DNA, 784 bp, Cannabis indica
tgcgaagtttacacagactgatacggtctgaatttgtccaccgtacacgcattctcctccttacgggatacaaacagataaaagtatagttcaatttgccctaccaatatccctgtttaaaagaatttttgaaccatggctatcacctcgcaccccactatctcccaatatcctctatagaaatatctcggcataccagtcgggtcccggggctttcaaggaatgcatagcatccaccacattccatatttcatctgcagtaggaatttttttatcattgtgttctcctccactgaaacaacaggaaaaagaaaatcatagaaggcctcatctaatattgtgtcttcagagctatacaattcctaaaaaaaactcattgaaaacactcccaatcttatgcttttttcgtttcccaactgccaagcttgttcttcaccgcagaaatctcatttctcctccttctaattaccatggaagcatggaaaaactttgaattccaatctcccactttcaaccagatctcccttgattttttgtctccacatagactctttccgagtccataactcagaaatttttgattgtaaggcagcttcctcttgcagaagagagtctaacacgggctggccttgtatccaacctaatctctccttagcttctctaatcagaatatcgcaatccccaaacgcctctttttccaattttggagagcaatcctcgtatcactcaaccttccacaaatgttttgactcctactacccctcaaaccccacgccttcttaat

SEQ ID NO: 182320 - DNA, 638 bp, Cannabis indica
actggattgatttatgcacaccctatctctctctatatataaatgaatgtgtcctttttttgaacaacttaaagaaaaaaaaatatacacaatacccgaggaagagttgtcaaagtagaagtgtatattgtcaagaaaaaattttggggtgttaattattaataattattatataatttaattttttacatatttaatatatacaaaatagataattttcttttggaaccttcttgtttataaatgaatgtgtccttttttgagcatcttagaaaaaataaataagatattcttttcttgtctttgtcttgtagttaaaagaatacttactttgacgtaagaaaaaaaaaaagaacacttacttttttataaattcttatttattactgtttagaaagaaaaaaacccttgtttgtagctatacctatcaaattttagttctatggagaaattacttcttcttttgtttttaattttattcctttgtttttttttctttttctaaactttaaatttacttaaatataattacaagtcactctaatttctctaaaatataactactttttttcttcttctttttgtttattttctttaattaattaaacaaaaatacattacaatttttgtaaattgtt

SEQ ID NO: 182321 - DNA, 747 bp, Cannabis indica
aatgaattacaagtcaaaattctactttgatgatataattagactctttttgtgtgataggttgagcaattattaaaatcttattataaaattgaataaaatatcagacaaatttagaaaagagggtcttatgtattgtccattacaaaaaaaaaattgaggaatttacatgcccttttggaaaatttaaaataattgtataaactatttaactttgtgtcataagtgagtcaatttcatgcttccttacttcatttagaacatcattttagttttttttttttaatactaaatcatactaaacatagtatttcttcaatgacaagtgctaaggacactctatattgtattttctgagagataattacaccacatattacaattttcaacttttttacttttataccctggatcagaattctttttaaaaatactgtattttttctttaaaaatatttttttaaaaaaattactgtgtaagttttataccgtgtactgtgttaagttttcactgttattttacgattattttttagtttgttctgttttgtgttccactgttgttttataaaaacaactattttttaaaaaaattaccgtgtggcaatattttgtaaaattaacaaaattttagtacttctgtaaaaattaacaaaaatttacagtattttttgtaagtttctcctctcttatgtctacttttttttttattgtatttgagcaacatgtgtgtaactatctaaacta

SEQ ID NO: 182322 - DNA, 514 bp, Cannabis indica
  modified_base (439)..(439): a, c, t, g, unknown or other
aaaaaggaaagtaaactggtttttcttcggcggttggagaagaaggatcgcggaaaatttcgacttttctgttttttgatttttttatttattttaattttgcttttatcaagagaaaagagcatcgctaaagatacgcatcacttatctgagtttatcacagacaagtttaaaaccgtcgatttcgattcatgttagggtctcccatcttccgttgagttgtctgtgacgttagtaaataaagcagactgtgattttaatataatttttctgaatttgtttttagcttcgaaaggagatataaaagaggtaactttctttccacgcaagcgtatgtacgtggcaaaagaatgatacttcaatggccttattctagccacgtcagtttatggccataggcagtgtctgtatgggccgagctagagttggggcttaaagntactcggccccaattagtttgtcaataaagaccaacataaacatgctattatttatcaaaaattatagtttatta

SEQ ID NO: 182323 - DNA, 738 bp, Cannabis indica
atttgatttggagtaacagtggtgtttcctctttgtctacaacatcttgtgttggtttgacagaggaaatgggatcttctactcgagcaaacgtgaatgaaatatctctaggagtcaattttgacatcatctcctctaatactatcatgctgcgaagtttgatgtcaaagatagtctttatcaagaaagtagcatccattgagacgaacactttcttatcttgatcactatagtatagtctacccctagtctctttggaatagccaacgaaaatgtaagtcgagactcaagtttcaaatctttcttcctaaggaaattagtgaggcatccccatattctgaaatgatgtaaactaggttgtttaccattccgtcattctaagtgtgtcttaggaattgacttagaaggaagcacataaaatgtagtgttttgtttctatagcacatcccaagaagaatgtagatagatgaagtagctaatcattgacctaacaatatccaacaaagtgtgattccaacaatattttgcaacactattttgttgtggagttcatggagcagtcaattgagatagaattctaagttcatttaaattatctttaaacttcatatctaaatattctcacccctatcagtttgcaagatcttaaacttttacctatatggttttgtagccatttccagaaattctttgaactattcaaatgtgtctgattttttatgtcatcatgctagaaaa

SEQ ID NO: 182324 - DNA, 595 bp, Cannabis indica
aggttgtatcttttaaaagaatggtatgacattttttcttgtttaaataagatattttctaatgaaaaattatttttaaagtatataatattgacttaaaaaaagtaaattaaaaaaattatattaaaaattagaggaaattgaattgtatattattttattttatttattttaatttttacttttatttttttaaaaattttaagatatactcatttttatagatgacgctctcattatatctcaagattggagagagtatatatttcctcagagttacttcatattcagatttactttttaaaaatactgtggacactcacattaagttttcaaaaccagttttaatcttttggcttgggactattaaagttgattctttcttttttcttttttgcttaagattattaaggttttttattttatatgatgttgattcttaaagcatcacttctctttttattcgtacttcaagtgacacaatgtacgtagttcttacaaacaacagaactcaaattctccattctccatttctatttttatttatgaccgaccaaaaactaaagttataatcaataaggtccacttgtcaaac

SEQ ID NO: 182325 - DNA, 491 bp, Cannabis indica
ttaggtacttttagctcctaccataggaacgttttctacttttggcacctatagaaattaatcccaattctctatatatgactgcgcacaatatacttatattaagcaccctaaaatagtattcaaacaatcagttgcacttatgtccgcatgaatattattttcaatgccataaattattcagaatttttcaaaaaaacaagtaaaatgcctgttataactacaatatacaacggtcctacaaaaaaaaaaaaaaactacaatatacaacattatataaaaaatcaggaaataatttctctcattgccgaaaatagaatacgcccctgcctctgccgtagggccaaaagtgattccctatctaagaatctccctatatatttacatctatagatatatatatatatatatgtatatataatgtgtgtgtgtgtgtgtgtgtgtgtgagagagagagagagagagagagagagagagagagagagagagag

SEQ ID NO: 182326 - DNA, 655 bp, Cannabis indica
gagcctaaaaaaagttgagatgacatgatataaattttctttacattttgtctttttttcacatttttttttaatatatttttctttatatttttagaatatgagagttatttttataaagtcccacatggtttagaaactattatggtgatatagatctaggttatatatagatcactattttttcacttcagtttataccaaagttagtattatttatttattttgatgtaaatgattgaagaacttaatcatgcccaactagttgtaatttttttaatgaatgcaaaacacattttttttgcattttttaatttgtcaaatattaaaaaactaaaaaaaaaattcatataaaagtacttcatataaaaattattttcttaaaagtttttagttgtaatttttatttaaagatatttaaaattattaattacataaaatagtgatgataaaaattaataaaaatattaaatacattaaaaaaaatagagaaagcaaggaataggcaaaaaaatactcttataaattgccacataatctttctaattctttcatatgtacatactaggttgatgttatatgcaatgcacatataattagttttctttttaattaagtttaattaggtgatgttaagtgcaatacatgtatgctt

SEQ ID NO: 182327 - DNA, 655 bp, Cannabis indica
caaaacaaaagctggcggcagcaaccaaccaactcaaaaaactactagcaatttacaacatttatagcatagcaatcttttctcttagaactggtacaatgaaagccaataattctagtcttaaccacatttttaatacatttactaagacaagaagctgacaagcaaacagtattaaaaagacagtcattagctgcaaaaaccgtattctagtcttaaccgtattcatagactcatagttgacactatttgaagagcaagaaatgatgagatacacaataactatctatatagcatacattattatattaattctattgttcattgtcatacagggtatgatcactctcttttgtctcctttataaccttctcctgcggtcactgagtgggaagctctatgtgtgggtcggatcaaacttaactacgatgtggagattagataagggctatgatgcttgcagtggtggctcgagatcatatagggaagatgattttgggttggtaccagcaactgcatttggctagtgattctgacatagttataaagttttcaaaagattaaagctaaagtggaaaattgataactatgtagctcattgtaggagtcgtatgcctccttttttgtgttgtaattttttgaaagtttttaaatc

SEQ ID NO: 182328 - DNA, 701 bp, Cannabis indica
tctctcattggagatggtctaactgggtcataaaagagcacacaattactaattcataacaaaacttagtttacctagttcaggctagctcaagtggtacataaaaaaaatgcgtgtgtgttaaaggtcttaacttcaaatttcaaattatatattgttataatatataaacgctaaaataaataaaaacaaaaacaaaacttagtttagagacacacttagaaatttaaacgactaacttacaatatcttttaacacacatgaggagattgacattacaaaaaactgctacttttagtgacaactttttagttacaatataatttttttgtgactaaatgtgacttttagtcacaacaaaataatacttgtaactaaaacataatatttagttacatgttgtcattaatttagttttagtcacaacaaatattgtgactaaaaatatatttataacaaattgtaatttttgtgattaatacttttaattacggacattttactcacaacataagaataataattaatttataattagtcacaatttttttacttttagttacaaattttgttgtgactaaaagtaagatttttatagcgtgataaagctactgctgcttcataatttgattaaacagtatgcattaaaagacaagcaaaaatatctaatcaacagcaccatctaatttattgtgaataat

SEQ ID NO: 182329 - DNA, 833 bp, Cannabis indica
attcagatagtttttttgctaatatacttttattaaattatgtttagttttaacttttatatatctaaataattgttaatatatattttattaaaaattttaaaatgactgtaaaaggtttaaattgatttttaaataaatataaaaattaaattatctagaccaatcacagagtgacacatggacaatgacctgacacttaacgactaggtactcacgaaagttctaaaattttaacagaagatatttttactgcaaattttgtttacttaggtatcaatctacaactgaaagttaaatttaagtgttttcaccgtaaattattttttaatatatagatagatatatttgttttatagtgtacaatagaaacaaatgtgggtagttttagtaaagaataattagcaattttatcttttgaactttttatactaccaagttgtgttctctaagttatacggtttgttaataatacctatcgaaatagggtaaatagcggcataagtacccaaagttttatgtttgtaagctgcataaacctaatgtttatttttagcggcataagtactcaatgtttgtaaaactgtaataatcttccattttcgtcagtacagactctgttttgaatttattaaaagaatatttggaagtaaccaatactgcatattgttggaaaattattttaccaggatcttagatctactcacaagtatgttgattaacaccctaaatatgaactttctaaaacgatgaaataaacacatataaagtttagtaaaccttacattgggtgcagcggaatataatgactcattccgctcagatatctagcc

SEQ ID NO: 182330 - DNA, 633 bp, Cannabis indica
gtgacctaatttatcaatttgtagatgaggaaagcatgctgcaaaaaagagaaaaatgatcttttcattatgtttcttaactcaagcccaacaaagaataaggaaaatacgaaaaaaaaaaaaagataggcaagcacaacaagggctaagagatctcaggaagtcaagtgagagagggtcaaagcttaaagtgggcaatgatgttggggtccttgtgttggccactagttctcaattccacacagttttggcaagctagcaagcttagaagaagtccccatgtccataagcccgagtctcatatctataggagaaaggaccacgatctattaaatcactctctatgctcattggttcacgtggctccttttttcttcccacttcttacgaatgtcttctttctcttagtagagcgcaagccgagctcaaactgcgattgaccctacttttcttttccactcactccttatctcttcttctcttttgttcatttaattgaaacgatacatctagggctcccacattgtcacgccagctttgtctcaactcttacgaacgatttggttaatttgacttatatatttatgtaaagataaaaatataaaagaaatggaggctaaaaatttgcatgat

SEQ ID NO: 182331 - DNA, 657 bp, Cannabis indica
ttttatagtttcaattatatttaagtaattttttaacaatattttgcagccaatcatataaaaaaataatttaaattattagaatttgaatatttacttataaatactcaaaatttttatatcacactctataaataaatatttaattttatattatttaatagcttaattattgaattataatattcatgtaagttttattattttaatttatttataatttataaatataatatatttattattataattattaaataatagggtattttaatattccgtggcgtgctttttgggcttatcgcgtgtcgtgtctttcgggctagtctattcgtatttatgtgtcgttttttaattacatatttttcgtgtcgtgtcgtgctaatttaattatagcatcgtattgtgtcatgctcaagatttttttgtacctagtcgtgctcgtactgattcgaaccgtgaatcatattttttttttcagtatccaatattttagtctaattttttttataaatctatacgttgtaattattaagttatttataaatttttttactcaagtaattattcaaactttattttagacaccatatttaaaaaattaaaccgtcaaaatcttcaataattacttaaatactaaaaaaaaaaataagaact

SEQ ID NO: 182332 - DNA, 589 bp, Cannabis indica
gctcccttctttgccacccatggtggtcttcttttcaagatcttctaagtgaaagtgaaagtgatgatgggtttgaaaaagatgtagtaatctctcattttgttctatttttggtccctgaggggcagaaagattttaattgacttctttctttctttcttcctttgtgctagtacttgtactggtacctcttcttcttcttcttaggtagtgtttgggataaaattatgaaccctgagaatcaattacaaacactagttgcgaaaagttaaaaaaaataccttttgataatattaaatgattgttgaaatggggcttacataggctcccacaatattcattttcattatatttgtcccttttaaataatccactatgatatgatcatcttatttctttatttacttgctttagttttgacatcaaaattaaacaaagttattttggtttagtgccaataagaacatagtattattggtaaaaaattcatttttatgatatagttgtatactctagtctaccacccccactaacattatcattatttattttcagtctattttaaataacttattttgggtcaattttt

SEQ ID NO: 182333 - DNA, 703 bp, Cannabis indica
taaaattaagggaaaagaaacaatataatcatttaatagcacaatggcaaagatgtttgagagaattggaaaaagaaaaaaaaaaaatggcactcaatgttgatgctctaagtcataaatcaagagattgttagaatactttgatatacacattatatagttgtggttacaatgtctttcaaactaccttgacaacacatatatgctcggtagacaatgaaaatttccaagtgtaccaagttggaaaatggatttaattccatgttatactaaacattttcaggaatttcaggcaaagcagtaaaaactacctgttttttttttttcttcttttttctgggtaataatgttagataaaacaatatactattaattacctgagaactgagaaatcgaagagcggagatctccgcaaatgtcactcctccaatgaagacgacaagtacaagggagcgccttccatcagccactctgctaataaaattaggaaaaattaaaaatgaagatataattgcatttgaaatttatctcatcaaaacaggaaaaagggcaaaacaaacaaatgattgataacaactgatttagttgaaaacctcaacttgaaacataatttagactatttatatatatatatacacattaactaattacagcgtatgccaatcattaaaaaaaaacttaataaaaaaaaaaactaaataaa

SEQ ID NO: 182334 - DNA, 806 bp, Cannabis indica
tatgtttctttttggctggaatctgtctggaactggtggtgatttcagttaaataatgtgttgttgtgtgtgctgtgatttagtagtttatttaattaattattggataatattattttatactgctacacgtttaaaatgataataaagaatatgtctctgtggattgtacttgttatggtttatgttataaccaaaaaaactattttaatgagcttctccaatgtgcaatgtgcaaagtgacaagagaacccaagaaactaattagtagaaacaaaaaacagttttttaaaaaacaattttttaattataatgtcatgcactaaatttttatagtttttttggcaatgtttacaaaatatagtttattttttttaaaaaatattttatgaaaaattaaaaaattactttatttgttttaaattttctcataaaataactttttttttttaaaaaaaaaactacatttttacacaaattgtaaaaagtccataaaatgtgtaattttgacaaggatcagttcgatccaatatagcccaattcgatttaatgggtacttcaaattcaaacgggagccgccaaaattaaaggcccatataaaaatcagtttttcgttaaaaaacacgactttgaagtttgaacaaccaatgctctatactctcttccagatcggaaccaaatcaaaccaaaccagagaacccaagaaactaaaagcaagggctcatgggtcgtggtgatgggatttgggtaccaacgcagagcaagcttaaccagtagacggaaatggttgaagacgcgagagacat

SEQ ID NO: 182335 - DNA, 1178 bp, Cannabis indica
ttcaaggaacacgaatagcctttcaagattgagcctaatcataacaggattaagatcatttgatctaggatcaactaggcgatattgacttgaatagatattacggtaagtttaataaatctaagtcaaagttcaatatcggtcccttccgatgcatactccatgcatccaacctgagctttactttaaccaatgctctggaaagaacatagcacttctccaaatgcaagtaaactctgttgtagattatcatatcagtaaaaccctttgtctgataaatctaggaaactttattcacatagtcatgtttactttccaatgtgttgacggcacaataaacaggatcaagtatgcgagaagggtttcagatgaatttatacattatgtacatataatcatgaaataaagcatgtgaaccatgcaacattaaaaataataataataataataaattacaccatatattgttaccgtgtttatccaatccaatttacattattctgctcataatgtatttagtgtaaattttataatttggatccaatctaattcctacaataattctatctaatctaatttaatatgcaaaaatgtgaattaaattaattaattacttttaatattaaattatttaacttttattaaaatatacttccttcacataactaacaataaattaaaataaataaaataataaattcgaaaaaaaaaagattgtatgctgaaagaaatatttaattttattttaaattgtatgtaaaaatatatataataatataatatacatttaatttattaaattttaaaatatatttgtattatattgtattagtaagattttttaatttttttatattaaaatgtttttttttttttttttgaaatgaaatagcaacttcattgaattaaaagcattctgaatacaagagagccttaagatcggcccaaacattgtgataaaaaaatgctacaaccagaggaaaatcgagcatgcctagcaacaacatgagcaactcgattggctgatcgtttaataaatcttattttaacactaggtagagaagacaacaaatgacaacaatcctgaataaccaggccgaaaatggatgacattctctgactgtttcggattgcttggacagtgagaagactatcagtctcaagctctacgttgtgcc

SEQ ID NO: 182336 - DNA, 591 bp, Cannabis indica
gatgaagtcatcaattacatatataattaatgtaagtaaataaaaaaataggctttttattttgtatacttctaaaactagttttttttgtttttttttttttacattttttacagaattctacattgaaattctagcgctgcaatctaccggaaaaatcactttaaaaatccaatctaaatcgcaacaaaaaatcgtatagaataattcaaataaaaaaaaaaactatttacatatttcttttaaaaaaacatgtttaaaaagaattgaagtggggtaaaataaattagtgatgcaatagtacattatggatggttatgtggggactcatgagcaatttatgtttcttttatctttttcccttttttcaattataataaatttcagtgtctcttgccagacaaccacatacacaattgttggagagagatagagatatagatagagagagagaaagagagagaggatattaaggtacatatatacatataaatacactagatatatgttccatatataataagaggggggcctcaataagctttgctattatatatcatattcatccttgcagtgtatatattattcctt

SEQ ID NO: 182337 - DNA, 638 bp, Cannabis indica
aacaaataataaaaaattaaaaatcatcaaatataaataataataatgtaaaataaataactactaaaattattttgagtaaatacaaatattttttgtcttaatagggaaaaagaaaatgctctttcgcaccttggatttagttttgtcaacaatttgtttgtgtatttgttaaaaaatcaaagaagatataaaatagaattttaaccctccttaaattttaattaataattataagcatcaaatttattattgaggaaaattttggcggtagaccctttaacggaggcattctattcttcatgggtatccaatctagtactagtatccaaatccaataaaaagtggagagtatgcattgatttcaccaatctgaacaaagcatgtccaaaggactgctttcttctttctagaatcgatcagcttgtagatgccacagctggccatgaaatcttgaacttcatggacgcgtattcaggttacaattaaataaagatgcatccgccagaccaggagcacactagcttcataacaaacttaggcctatattgctacaaagtcatgcccctcggcctgaaaaaagtaggggccacgtattagaggctggtgaacatgatattcaaagatctcattggccg

SEQ ID NO: 182338 - DNA, 614 bp, Cannabis indica
tcaagccacgattgggagaccaaggctctgtccaatcttatctccaccaaatgaccggactctcggcctctttccccaagtatagggataaccacggagctcaatatcgtgcaaggagcaatcatggagtaccgactgaaaaccagtaatgagggcagtcgggtatgcacgacctcctctttttttcagattggttagctatgttattgaagtcaccgattatgcaccaagggaggggagattcagagagaagagtgcggaggagagtccacgttcgagctcgaaagttgcgattaggctcaccgtagaacccagtgaggcgccaaataattgttccaggaacagagatttcaaagtcgacatggttctgtgaataaccaatcaaccgtgcttcatcagatactttccagaaaaaagctagcccaccagatcttccaatcggatcaacaacaaaacatgattcaaagcccaacttagattttactcggcccaccacttcttgagaacaaagagtttcacacaaaaataaaaatttgggtttcttttgacaacaaatgtcagcaaggaattgttgggcccgtgggttcccaagcccacgacaattccaactcagg

SEQ ID NO: 182339 - DNA, 1268 bp, Cannabis indica
ctattttttactaactatttttactaatttaactttatactttaattcaaatccaataagaaaatttaaagacatactaattaatatttattatttatgttaacttaatatcctattattaattgttaaaactatttgtattcttctaactaaaaaaataaaaactattggtattctttatataactcttacctatctatgtgtatatatatagtatctcaaatctcaaatacaagataaaactttgtatccactcttcactcttagatttagaagtttttgttattatttatcttttctaattcttaattttgtatttttaaattatttagccatgactatttatttttaaagttttgttattatttttttattttctaattcttgatgttgtttttcttcttcttcagattactatgacaaggaatatccatacacaagttttcctctcatggtagattatcatggaaatgactatttatagacaaattctttttcactagatatttgcatcaaacataaggagaactacatccaatccaaaaggtcatgtagtgttctcttttaaagttcaactttatttaatttataattttttttttttctgttttttcgtatttaatatttactaataataaaaattaattgataaaaaatagaaagccaattgacattttatattggatttttttttacatagtgataataataatgatatttattatctcataattcgcatactatatctacttaatttaataagaaaaattaataaaataatgtatgaatataaataattcatatatatctatgaatttgtaagtaaagagaattatatatgaatattggtgtaggtgtaggtatatataacacataaaataatatatattaacttttttatttataattatttgtaatgataataattgttatattttaatagctatatgcctattacaataatatatatttatgtatatatattaattaaacatagttataaccaattattaataataatttagttttagttatttatttatgatagtatgtaaatttatattttattaaaacttttataattaacaatatttatttttatgttaccgtacacttttatgaatttaatttatttatttttcttaaaaaaacatataatattatttacattagtttacaagtaaattttttagttttatttttgggcacatatatgttatatatagtaattagatatagattattcatttaaaaattgtacatatact

SEQ ID NO: 182340 - DNA, 654 bp, Cannabis indica
agatggtatcttgtcttgacaatatctttgtttccgtcactttttttaaattaatttaatataaattatttattaccaaaataaataattactatattactaactcaaaatagatttttctcaacatcattttttgtgtaatccatacccttgacagtgttgtatgttgacctcacttttagccaacgacactgagtttttaaagcaattgaattgagtgatcaattactaataaaataataatagtttagcaaataaaaacacaaggaatttgtagagaataagtaagatcacaaggtttgaccaggtgagtttcttaatattcttgagaaatcttacaagtaatttagcagtgttatctgtattcctagatgcctgatacatggcaatcatagaaaggtgccactctagatgatcagtgattaatatattcttgtcgctagaagatgctaaagattattatgtttcagaagccaatcaaaggtccccaacattagcgagtacggatagggatccaagactcttactatccatccataattgggaaggatcaagagttacccaaagctttaagtattccaaaaaagaagtaggtctatgtgatctaggaaggcgttggctcgttaatctcggagcttatttgacaacacctta

SEQ ID NO: 182341 - DNA, 774 bp, Cannabis indica
  modified_base (93)..(93): a, c, t, g, unknown or other
atgggaatgggaatgggaatgggaatgggaatgggacattgaaactgaagcctgttaaaagaattggagtggttttttttttttttttttttnttttttttttttgaatggaattggagtggttttaatcatgcattaaaatggtcatttctcattctttccattttaaaataaaattgtcattctatttaaattgtggaaaattctattaaaatggtttagtcatttcaatacgttctaacactttaatatatgcaactaaataaaataaaataaaaaaattattattttttattttattttattacctccaactaaattctactttatttttatttatttgtgaatttgaatcaattgcgcccttttaagcctgggaagattcaatccaattgtttgaggtgttgtggagtcgagaccctgttttcagggagaaccccttgatgatactacatttcgtatgactttattggatttagctgaggctaagaaatattctattttgagtctgaaaaaactcataaattggttggtataagagtctgaaaaactcataaattgtgtgttgtctatcagcttcatcttttgtatatctacgagaatggagttaaatatcaccactacacatgatcaagattgttgactttcttttatgttttaatgatttatcttttaattattaggactgagaatatgttaacttaatctaataagttaagtaatagaattaagtttttcggttagatttatggaattaacgatgaatacatattc

SEQ ID NO: 182342 - DNA, 710 bp, Cannabis indica
aaaactataacagtacgtggcttggcacgtaacgatcacctagtatatatatatatgtatatagcaaactttgatatttattaaaaaagattgaaaaataaaataaacacatgatttacttgttttatcatttaattatatatataaaaataagggtacatctaattatattggacatgacaaatatagatgtcatgttcagttttgttggacgtaaaaattaataacaatatatatatataaatcaacgccaatttatgcttttattatgttcagcattgtttgatatataattaaatttttttacgttcattaatgttggacataaaatctcattaaaatttttttttatgtctaacactatttttgcttgacatagaaaagagacatggaatgaattctttttttgcagtttcactaagtgtgaaactcaaacactaaacatattgcaatatctacctatagatatataattcatgattgtcaagtatttattttattttatgaaataccatatatagattatagaaatttttcatttttttgtctttcattagtttattatgattgtgttgttgagatcagtcctgggtcgtttacactcaaactcaaacatattaatcattaataaccatgcttaatttatattgaatatctcgatctgctatggaataataacattatgtgtatatatatatatataatatata

SEQ ID NO: 182343 - DNA, 807 bp, Cannabis indica
tttcaaacgcattttttgcagtacggtgtggtgcgggcagtttgaagacggtttgatgaacacccctatttaagcctattatcagaaccactgccatctatttcaccaataatccatacaagagcactgtcctcctttaaaatgatgaaatctatacctatctctcagcagtatttctctgccataaatctcagatataagcttagctaccgagtggcagtccctgcaaacacgaaggtttttcaccacacgaatggtttgagatggcgcagtactagctaaaactgccagttttttcaagaagaacatcgggggcaatcttcagtcgatccttctttgaagatcccttcttgatgggaaaaaggcgctagctctggtccttggcgcaccatgccctttggtgctcctcctcccttgttgaagctgagtgcctcaactggctgtggggttgcacctatcagtcctaccccggctgcgtccctcacccctgctaggtaatctgcttgcgcagcccgcttaggggcatcaggatctcctgtaccttcccatcctgctcaagccacaagtgctgatggcttggctccaattgcggtgtctgaggaagtaagtcgggaccgccctaggcaatcgagacgcaggccaactccaatcgtccagaacagcttgaattaaataaaaagaaactaaagagttatctttgattccagttatttttctcatgacggtaaagaaacatatacttcctactattaagatgatcttattgaatagtaagtcacaatagtgcaaaagaccaaatgattatcg

SEQ ID NO: 182344 - DNA, 671 bp, Cannabis indica
atttgacgagcatgtcatccacatatacttccatattttgtctgatctagtctttgaacattttgtttaccaatcttttgtatggggctctagcgttctttagaccaaatggcatgaccttataacagtatagacccatatctattcacaaacttgtatgttcttggtccagtggatgcattctaatttgattataccccgaataggcgtcgatgaagcttaatatcttgtgttcggctgttgcatccacgagctgatctattcttggaagtggaaaatagtctttggggcacgccttgttgaggtcggtgacgtcaatacatactcgccattttttgttgggcttgggtacaagtacgtggttagctacccaagccgggttgaaagcctcgatgatgaagttgttgttacgcagcttttctacctcttctttcaatgcttgtgcatgttctttgtccaacagtctttttttgctaaacggaccagaagttttgactgatgtttagggtgtgtgaaattatagaaggatcgataccgaccatgtcctcatgtgacaaggtcaaaaatacctagggtttgctcttagaaagttttactcaaagctgattttacttcaagaaacaagccttttccaatttttagattccttggcaggcattgggtcatttcta

SEQ ID NO: 182345 - DNA, 1169 bp, Cannabis indica
atggcttatttttggaattgtagcaactgataattattggtccaaatcataaagttactttaatttatttttttttttaaaaaaaagataaataaattattttatctttttccgtttcttttttccattcttagcctgacccttctcttctctctcccattcgtcttcatcctcttacacctgaacctccatagccactagctccaactatcatttttgcctttcccagtcactgtcctacctcacttgaacctcgatctaaacaaccccattgcatcaccccaaactacaggccatcgtcctcagcttctccctttctattcaacccaatgcttccctccattcaagcttttctttactcagttctgtttgagctagaccgccccaagatcacactgtcatcccccatgcttccctttcactcctcgtcctactcgctacccaaaaccacccccaccaaaaatccaccacccactctaatttgggagcgcaaaatctaaattttggaacattttgagaaaaataggtcttttaacgagaggtgtaaacaaagttgaaaggcaaaaaatagataaacctaaaaaattactgatgccgagttgtaacagccaagttatcagatatacaaccccaatcaactacagagaaaagtttaatgtaaaagtccatctagaaatactattaacaaataaaatttttctattaaatggtagacttgccttgcaaccttcatctgagattctaattcaacaaatatttaatcccttaaattctaaaatatgcctacaatagcccttaaatggactcttgcaaatttttactgtagtaccaattgcaccattatatgcatgttggaaagcatattttaccaggatcttacttttactactcaagtatgctagattaatctaatctagcaccctaacatggattctttaaaaaaaaaataaaagatttgagaaatccttaaagtgtgtaatgaccacatatttatgatatagattagtagggttattagcattaatcatttgcattttattgttatatattaatagtttgtgttgtgggttctatttttaagaaataggcattaggattataatttttcaatttttgagattttattaaattctaggtgtattgtttatgctatatgtgaaaattaatat

SEQ ID NO: 182346 - DNA, 588 bp, Cannabis indica
gtataattgtctactttatgatagatttttatggtatactttttttattttgatgttaatttttgttatttgtatattattttttttatgttgtttggatgttatttttttttattattttcatatattttttgttttgttatgtttgtattgtttttataacattaaaaatatatagagaaaaaacttttgaacgtaaaaaatatataaaaaaaatacaaatagtaatttatgtatatttccttcacatcaaaaaaaaaaaaaaattatgtacatttccaaatacctctgccatacatggctaagcccataacttgagctagacaaaagaagcccaaatcaaagttcggcccactcttatgaaacaaggtttaaagatagctaatggacttggcccatttgtctcgttcagaatcaatttaattaaattaaatgtgactttttgaaaaaaaaataaaaagaaagaaaataaaaaacccttctggaatgaaaaaagaagaatttatttttatttttaaacttattttatagcatttgacatgttatgtatatgtaaatttacgtagtgtttggtttattggaatgtaa

SEQ ID NO: 182347 - DNA, 1356 bp, Cannabis indica
aaagagaaagtgaatgagaacttctgagttgtttattccaatggagtgaacccctatttatacaaatacaagagtgagatattaagaaactaagaaaaagggaaactaaaaagaggaatattgattataatggtaataaataaaagatttggacattcacataattattaatatttataacaattattatatatatttgaattattggcagcaaaatttcatttttttttacagttagtgacacttaaatctgaatcaaaaaactttgtggcattggcctcttccgtcaatcatttgtgctatcacatctctttccatcaaaaagtgattatagtcattacattagtatatttgtgacaaataccctactctttagagttagtagcataaataccctcaattaaagttttagtgatagttatactatattgatcacaattttctcctacttttttttttaaaaaaaaaaaaactagtatccattagaagtaaagcagaatccgagacacaaaatcatacagagatatcaactcgttttcaaaaagtttcctgatctaagtttaaggcatacttggccagacgatgagctttttcgtttgctcctcgagatatgaagccaatagtagcttgaggtagagaaaatagcaagcgtttaattctatgacaaatttgttcaagtgtatgttatgggaagcattactactaatatagtctataagaattttacaatgagaagcaataaaaattggttgaaaatgaatgagtgatacaccaagcaagtgcattgtgcaatgcgtgagcttccattaacaatggtgaatggattccacggtgtgactagagttaaaaaaaaaaatctactatttaaaaaaaaaaaaaaatatattaataatgtaaaaaaaaattaaattataggaaaataaaaatatatattttttttgtgttggaggtataatttcatgaaaaaataactaatctattaaaatatagagttggtaacacttatgtcattaaagaaaaattagtgacttaaattttaattgtatattattttttaaaattgtgaaataataatttatttttaatctttgaaaattcatcaattttaaaaaataatacatagatttcctaagattggtgttagtgagcctctaaattatataatttgtaacagtaaagatgtaagccatcttgttaggaaaatttacaaaaatactagaatttgggttaactttttacaaaaatactgtcacacgaaaaagttttcaaaaatactgtgtttttataaaacaccagtagaacacaaaatagaacaactcaaaataacagtagaacaaccaaaaaacaccaggcact

SEQ ID NO: 182348 - DNA, 553 bp, Cannabis indica
acaattttttcttttaaaaaatagagactgaaaacgttgtaaacaaaaacactaccggggacttcttctcagaatttgtaaggtcagataaactttttgtgatctttgcaatacccaaatccttcaaccaccaccaaaaacaaaagtgaggaatattatatatagatcaataaataaaatgaaaaaaggagtgtgagtgtgagtgtgacctcaaatctcttcttgttttcctcaaggcgttgcttgcgaacctcttcgtaagtgttggaatcgccattggaggtcattatcatgagtgagtttttaagtctgaaattatttattatgagaaatgtgttaactaaaaccaccatagaaatggaagagtgtaaaaatatagagttaatagtataaacctgtctttagctcacctcacacactattagtattacttactgcctcaaacgagttgacttgaccgccccttttgaatttcaaaattcttttctctcccctctcaccctcccctatatttttttttacttttgttatttactttttattacggttcggg

SEQ ID NO: 182349 - DNA, 572 bp, Cannabis indica
tagctaagatttgaaggtcaagggttcaaattcaagtttggctcacactcttttgagtgtcagccttggcacatttcgttcattgaccttaaaaaaattttaaagcgctagttggttggatagggccaaataatacaccttatcgaaggtgatcctatcgagcaaagtatttaagctaacattcaattgtgtattttaacctagctattcaaaaaatttatgtgagcgcgcattaatttatatcattcaacaattattcgattaaattaatcaaatatgaaacaaattaactctaagctataaattatcaagtatatataatggccatagaggaattactctatatactattttttattttttttttaaatttacggtttgggttgcttcagtaatttctatgtgggttgctatatagattttaaatgcgatttaggttgttccgttagttgctatagaaatttttgtgtggaattccgtaaaaatgacaaaaaaaaaaaaaaaactaacttttaagtgtaaacatgaaaaaactctttatttttattttcataaaataattaaaaaggttc

SEQ ID NO: 182350 - DNA, 888 bp, Cannabis indica
gtaaatctagatcctggtaaaatatatccaacaactggcctcagagccatggtaatgatttactttcatgaaatatgaattaaaacgatgttatgtgttgatttggatggtttcatgtggtttatgtgcttatttgatgatagtttagaaatcgcaatatatgttactgaaatattttttatttcgatctggaattattttttttataaattagttattattttttgaagttgaacaaaaatatcaggttttgagtgtcacacgcgcgcgcgcgtacttgggctcgcttagacaaacacgcttcagacaacatgcgtgtcccaacatgctcgatcaaatgaggctgcttgcagcctctgtcctcgcccacgtcttgctttccgcgtgcccaggggtatgcaatgcatacccctgtgcctcaaacttgttttcttcataacttttgattcaaaaatcgtttttcattgaaacaaaagccaatttttggtagaattttgtgtagaatctaaattttcaattaaaaatataattgtcagaataaaattaatttttattaattttttaattaattaaaaattagtttctgatattagtaggctttgaattttgaaaatttgatttctcacaaaggagccttatggttatttttgaaattttagattattttatttattttaattataagatcagatattattttttaattaaattttaaatgatcttactttgatattaaaatattaccttttaaaaataatcttgtactaatttcaaaatttgctaaccatatcatatttctttttcaaatttgttattttcaaaatatattctattaactaaaattataagattaggaatatgtgaggtttaacattttatcttattatt

SEQ ID NO: 182351 - DNA, 909 bp, Cannabis indica
agtataaatttgaaaatttttcagtccactgcaatagattagattggatttcatatttttttaacaatgttatatatattttttaatgggtactactttatttattcataaatagttattttaatattaactattacattaagatctaataatctatattaattaactatttgtcttaaataattcttatttaagattattttagattctatctactttccttattcatctttcatacctaatgacaaatttaaatttataatcttaactaatttaaaagtattgtctaaagttattttttttttgcctaagtaagtcttttttttttttgtgaaaatgaaataaaatttcattgaaatcttagtattcagagtacaaaagaaattcaagatcagaccatacattgtactcaaaaatactacgaccagagaaaaatcgagagtgcctagcaacaatatgggcaactcgatttactgatcgtctaataaaacgctaactcacataaggtaaaaaaacataatatagcctttttagtttgccattctttagaatctttaacacttattttttaaaaaaacataatatattttgtttatttttaatttttttgaaaaaatgtatatagccacccaattttgtctcattacaaaaaaagactatttttattctttagtaacaattttttagtcataattttttttttttataattaaatgtcttttagtcacaataaaaaaattacttgtgactaaacatgagatttagatacaagttgtcactaatttaattttagtcacaaatattgtgattaaaaacacatttatacacaacaaattatgatttttgtgactaatatttttagttcacagactttttagtcaccatgtacgaataacaatttataattaa

SEQ ID NO: 182352 - DNA, 578 bp, Cannabis indica
acgtaaatcaaatattgtttttttaaaagaatatatgtaaaattttaataatttttttatattttataaataacatggttaatattttgttttattaaaaaatatattaatttttttaacataatatgaaagatttatgctttcaactagacgatgtaatctaattaaatgaaatctgattaaacattttcatacattatcaaacacacagtaagctttcttctaattatattcctcttgataatattttttttaatcaaattattttaaacgcctcgtattataataaaataataaaattgtgaattttggtttctaagaagggctttagctgggaagaggaaaatgaaatactaactaccacgttgattgtaatagatggatcgcctttcatgctagatggaaaataaatcaaaccagttctcccttaactaattttttttaatttgtcataaattgacctctttgttttgacattaactaagttgcgtaaaatatgtatacaagtaactaaattggtcaaaagttcataaagctataaattatacgcggaccatgtcttgtttcgggtcttcaaa

SEQ ID NO: 182353 - DNA, 1179 bp, Cannabis indica
aggtaaaagaatttctaaagaggaatgatttcaatagatttccataattttcttcaagaacaaaaaaaaatgaaaacaacaagttgagtgatttccttttttccttttgagtatacaacacagagaaaaattgacattttgtaatgtagaatattctagaagaactttgctatttagaaaaaaaaaaattgtacattttatttaataattccctaggtagagttttttattctcctttttataaaacacatatatttttctatttaatttgctattgttcttttattaatgcaatacatttttttttttaatttaaaagaaagttggggtagggaaaaattggtgacataataagttaataaaaatagcaaaaatagaaaagaataataataataaaaaatagggacagagagagagacatagaatagaaggcttaaatgctcataaatatttcaaaagagagaacatagttggtctaagtgggggctctgtgtgtgatattgtgataaaaacaatccaaaacagagcacaaatccagagaaagataaatagaacaaaaggggtttagactctacaagtgggagacagtagtagagctcttacttcataccaaagcagattaaatttttgttctttttactgctgtgcagaagaacatcacattcaattcatccaatcctttcaaggtttccaagcatttataacttttttttttctgattctgcaataacttctcaagatctgcaattcaaggctcgagctttgttgggacacagctttttaaaaacttagtattcctcttgtgttgtgtgtagagaagggaggaagcaaaaaaatatggaggtgggtcagatgcagagacagtgggttgactatacaaagtccttgttcatggaggtaaagtaaaaacacttgaaatgttattaataataaataatataaaagggtttatttccttgatgggtttgttttgtttttgctgattttggtttatagatgtatatttggtctgtttgtttttgtcttatttctttctttttgttgttgttttggtgagagaagaggtatctggactcccagttcttacagctcctgcagttacaagatgagagcaaccctgattttgttgttgaagttgtgtctctcttctttgatgatactgaaaagcttcttaatgat

SEQ ID NO: 182354 - DNA, 723 bp, Cannabis indica
aaagtcattgttaacattcaagcaatacatacactaaattgaagcagtaattacccaaccccacttcgagttagacaatcttgtcctggataaacaaagcttattttcacctgcaaagtacttaaaaacagcataagaaactagctcaacccattgcgtctttaatactagtgtgtgtaacttcgaccaaacaaacaaaagagacaactgaaatatttacaaggcagagattttgtaaactgctccttcaaacaaggcaggcaaggtaacaatatttacaagataaaaaccataaattattttgtactagaccccaccatatctccttttagtgaaattgagaagattatccgtaatctctgtcagatgtcacttgctaggaaatcaatgaagtgaagccctactttggtggccaagcatctagctatagtcaaaaacaaattacttttccactatgttaactaagtctaagactctgagataagggtcactatcataatctttaaaacttcactcaaacttccttgcttattagaatggttacaaaaatcatggccagagaccaagaaggaataacaactgagatatcagtaaaagattaacctgcttttcttctatgctgtacttcttcaggagattttgtttctccttattagtcagaaactgataccttggcttcaaaacatgctttgtgacgttaacaagcaagtcagtaatctgaca

SEQ ID NO: 182355 - DNA, 812 bp, Cannabis indica
gtgaagtcttagaatcctttaaacagcagatattgattgtatcaaggatcagcctttgcatcgttatgttaaacaaatggaaatggtaccagtggccacatcaatccatacatctcaaaatgcaagcatgagaaaccattaagatagtaatgaataagctactctcattggaaactccactgagccccttttgatgagtaattagatatatgcatttctctacaaaggaaacaatctactacaaaaatggaataaatggaaaaaggaaaaccaggaaactgccaaatgcaatatcaggatagtctgtcactaagtttgtgtaaaaataattaaattctttgattaccactgcaacactaagttgcatacgtttgacaagaatttaagctacaacttattagagagaaatcagaaaacacatttgtatttgcactttcatttttggaacataagtacatcaaatccacctactcaccagttcaatcaaagcttattcagctttgcgaattgaggacccatcctttgatttaactctgacaacaaaaactgaggctctggttccaaaaaactaagagcaaatagaaaatagacatattaggacactacctaactaggataattatgtatataaaattgtcgaaattgaagaaagggaatggtaaattatttactcgtcaatatcctttttgtttgtagacaagatccatttttggagtaggaatattaactatgggggtaaactctaaggctgggacctactggtcaggagagaggatgcccgatgcaccccacctaatgaacttacgtcacat

SEQ ID NO: 182356 - DNA, 718 bp, Cannabis indica
gtaacaagctgtcatgcgtactgtctgtgtttgttttcaggaagctctgtacaacatagctcgagcataccatcatgttggcctggtaacattggcagcttcatattatgaaaaagttctggcaatgtgtgagaaggatcaccccatgcgcaatcatccaagtgagagtcaagacacagagaatcagaggtctggctattgtgacctccgcagggaagcagctttcaatctgcatttaatctataaaagaagcggagctattgatcttgctaggcaagtccttaaggatcattgcaccttttgagtcttcatgttggccacaatcaacaactattgctgcttcagcttgttggtggtacatttcgtgatcctgcattttcttcaagttaattgtttaaacggggattagatctgcaagcttatttgcaaaatcgagattgtttagcaagttgagacttgcagttggaagaagaagaacacatgagcatgactacataaattcctgatggtgtctgattatgatgaccacctgtggtgtttggatctagactgaactcctatcctatggatctttccccggtaatcgaatcacagaactatatatagctatgtaccggagaggaaaaatgcttttgcaagttaattgggcgagaaaagaggaaccaagtgagtgacacccagtactgtaatgaatcacagaaccatagctatgaacttg

SEQ ID NO: 182357 - DNA, 523 bp, Cannabis indica
gttttctttggtgatcccaagctccttgaagaccattacaatactaaacatactcttggtaagagttttattttttatcattaaattttttataattttttttttaatttatttttttactttgtgactaataattttactttttttgttaaaaaaaattaaaaaataatttttactgtgacaagatgaatttaatgttttttttttcatacattaagattctttttattaattatttattatttcttctctctttttttgataaattagaaattgtattgttacaaattttatttatgaactagacagtaccaacaaagaaagatggcttgagttgtttagctaatgttttaatgtacattgacatatatcttctacaatttgtctatacatgctaaattctgttgttttactttttttagcaaaataaaagatattcttcttttaatatcatgttttatacacctaattttaaaatatagatggttactacatgtaaaatatctaatgcaggcaaagaact

SEQ ID NO: 182358 - DNA, 781 bp, Cannabis indica
aaagaattctacaaatcacgatcgtattcattgtccgtgtgtagattgttgtaatgtatctaaagggaatattacaatgattaaggaccatgtgtatttacgaggtttcaatagaagttatactaattggtattaccatggcgaacatttacctaatgatccatatccattaggaaagcggggggtagatgatatcgagggtaatgatttcgatgattatccattggacttgcttaacgaagcacaggaggaatttcttaatgatcctgagaaattcgataattttcttagtgatgctgataaacctctgttcgatggttgtaaaaaactaagattaccaacaatggtaaagttttacaacataaaagcagaaaatggagtgagcgataatttattattatgattaaagcaaagcaacctagacactaacatatagtttaaaaaataatgatataattttcactatgtagagctcggtaatagtaatgagaaaataacaactgcaatagtataaatttgaatcaaaacaaaagtgagccttaaatatatataggtttttttgtaaatgattgacttttacatatatatatatatagtgtaatgtacatcccaatactcccaatatcaatcactcaaagtcaagagagatacaaaaaactaataaatatatattgttaatattattttattttgttgtacttgagtatatttgttttgtgtaatattaataattaatagaaaagtactataagttataaatactgtctggatgatgctacat

SEQ ID NO: 182359 - DNA, 553 bp, Cannabis indica
gtttatttagacaataccaatgcccttgactcatatgttagtgccataaattggggaaaatcattattagaaaaatataggaaacaagatctggtggcacacatgtgatatgtggctccactgtcaatgatctaagaacgagtttgagatgaaaagtgtttaccaaccatgttggatgctccaggggtgttgtttgtgtcatcacgaggagtggcttggctaagtttctggctgagaagtgatataagttgctggcattgggcagacaattctacatgggttaagtttccaggggccatgtccaagatggtgctgacttggttagcatttgtttggattttttttgacttcttttggtcaccataccctggaggaaagccatggataaagtagcatttatccacattgtggcatggtttgccacaattggtgcatgagggccttggtttctttgatcttgggggaggattattggaagaggagggtcgaatgatgttgccagagaggaagtatctgaggagccaagagttcgttgcctctcttcttgaacaat

SEQ ID NO: 182360 - DNA, 593 bp, Cannabis indica
accttggcgctctgataccaaattgtaacaccctaaataattaggcacgctacccaagatacttatgaaatcctaatcccctatatgggattactaatgagattagcgcgaaatttaaactttatgataacctaaatgaaaataaaacttgtaataatttaaactttacaacagttggggtcccaaaaatatttacaaactttattacaagtctttttcagttagtcggtctaagcggcaaagtagagtttcaaaaatttaacactggtagacccttaacccgcttggtctgatatggcccgaacatgtacattcttcgtccagctcctgcactcatggcttatcaatgacagtcttaccctttcctgcacagtagatcacccatgagccaagcccagcaagacagtataaatcttaacaaatatgatatgctcatcacgctatttaaatagtaatgccattgatatgtctgtatgtcacagacctacatgtactcacatgcttatttatgtctacgtggcgtaggcctatgtgttgcgctcacacatatatttatatctacgtggcgtagacctacatgttgctctcacacg

SEQ ID NO: 182361 - DNA, 670 bp, Cannabis indica
tcattaactcaaaattcagcttttactagaataaattaaataaggtcaaaagaccaaaatgcccttagggccaaagcacacatattcaccctcacaagggtatttttgtcattccatgcatatttaataccaaataaaattcagattatcaaatatcaaataaaatgccaattcattcaatccaattgcatttcgggcccgaacccggttcggcccgaaatacccggttgtgactataccgcgccaacctgtcagaacacacctgaaaagacaacataggcatactatataataatatagttctattaagcacgtaattaaattaatttcatcattttacccttctcgggtcataattaccaaaatgcccctggctcaccaacggggtcttaccatattataaatcatattaattcacataaattgaactatataataatataattcctcaattattcataattactaattagggttttgctaatccatttcttaattctagggtattacaaccaatgttgtgagcatcttgacacctcaccaagatcaccatctttacatgtgcctcaccaagagtatctcggcatgctcttctccaagagcatcttcgccaagcatgcacttcaacgagaacaacatcacccattcattccatcaagtacttgcattc

SEQ ID NO: 182362 - DNA, 721 bp, Cannabis indica
ttaaagatgattcttaatataaatcgagttaaccaggtcggattaaattgagtgaattcgttttttaacgggttaagtttaagttttagtttttgacacgattgataaatgagtcagatttaaatttaacatttacttataatacgtaagcatcgatcaacacgaaaacaacaaatttcacactaaaactttatataacttgtacagttaagtttgaaactttctttttttttcgacaatgagtaagtttgaaacttatggttaggataaagtaaaatcctataaaatttgtaattttatcaaatgtaaaaggcccaattgagttaagcagaagaggaaattacactctataccatttttatattgttctcttttatttttaccttcttttttaaaatctatcatttttacctctttttttaaatattgtatgtaacgtccccgcttcaagcctccattgggcccttacacccacggaatgaatggctcttatacacgagtacgccactctggctgcttcctggattgatgactgaccctacagaccaacacgagtgtttccagcgtgctttgtcctcactcacacgcatcctgggaaaacttcccaggaggtcacccatccttgaaattgctccaagccaagcacgcttaactgtggagttctttcgagatgggctaccgaaaaacaagatgcaccttgttgatataggtagtaccaatc

SEQ ID NO: 182363 - DNA, 720 bp, Cannabis indica
tgaaagtaggtaggcagcatgatttgaaaagtttatttatttttttaaaaaaatccgtgtgcttggtgatgttatacttgtgactaatttcaattttatacttgaaagaacatggaatcatattaggtaattttctagtaattgaattggtttatgtatgctaattggaacatgtggaaagttgtttggaaaattctagaacttgcttgcttgctatttaaggcgaaataataaattacgcatgactaggaaagtgatttaggcaattttttggatcgattgtgcctttcaagccatccttgtaattttatcctagttaccctttttgagccttaacttatttttttctacacatattgagcctaaaaagataaacccataaatatccaaaatatttgaccctaatcataccataagtagatctttagtttgggggaatttggatgggaagtttgttgtatgtgtgtggaaaaggtgtgaaaattgagagaatatgtaaaaaaaaattgattgacaacaacttgaaaaaaaagaaaaagaaagaaagaaaatactgacaatcagtgtcaaatctagaaaaaaaaaaacgaataaaacaataaagttagttagtaatacttgttgaaaaataataatatactctcatgtaattagaaaaagggtaattagggattagtgtgaaaatatttgggtgacatgattggagaaacttatggtata

SEQ ID NO: 182364 - DNA, 619 bp, Cannabis indica
ttctttctccttattctctcactactcctaaccatgatgatgaattgagaaatacgtatgaataatcaattaattataattaggcccttaatataatgcatttataaataaagatattttgagtgatttaaatacggcattacagtttcctatttttatttttgtatatttgtttggggaatcatttaattttatatcttaatttcctaatttgaattaatgaaggctattaggtccaaaaaaatagtttatttaaccgaaattcccgcaaagaaaaaaagcaataaaagcgaaaatcttaaatacgcgtgatttaatttgagtttgtttattttattttcttattctttattttatttttttgtgaatttttgtttccatattttaattaccataattgtgggttatgttccaagcaagatatagcattagattttttttttttttatttttaaaatcgtagaatttctgttaaaaaaaactctacaaaatacacatacattaatcatacctgaccatatatttatgatcggttttataacgtaatcaaagttgacataataagacattatggctcgttggtaacgccgtattggattatatatctacatttttaata

SEQ ID NO: 182365 - DNA, 966 bp, Cannabis indica
gtagatatacttagaaaaagagaagggaattccaaacataatctctcgtgttaaattcaaatcatcttaactaataattttagggtgtatacatatttggtactctatgttttattgaaatacaagtttagtatcctgtattttcaataatatttatttggtaccctgtattttaaaaacatacatatttggtacctaaattcaaaattttttgataaaattttatcaatataattaaattatctttaattttataaattctagattcaaatttaattatttaattacatataatataactaagaaccatttggccaaatttaaaattatattgattaaattttattttagggtaccaattatatattatttcaaaatataaggtactaaatataccaaatatactttaagagaaaaaaaaaaaaaagggtactaaaatcagtatattcccataattgataattctatttaaagaattgagaaattcgagtgtcacaattttgttaaaatttagattttttttctaattagcaaaaataaaaaaaaaattaatgataaaaatgatatcaattttttggtaaaaaaatacgggaaaatgagtcttattataataattattgtttaattgccttatatttcttttccttgaaatggaggcttcacatgcttcggccgcttattataagcaacgtttctctttcttcccacttctctctctgtctctctctctctctctctctcgctctctctctctcctcaaccaactccgttccgttcatcccttaattccctcctctttccctttctccccataattccattccatcaaaactcaaaactttccccccatttccaccaattttcatctcacctcaaaaaaaatacattccattatcgattccatatttataggagagaatttcaagaatcaggatcaggttgagttgagttgagttgagttgagtt

SEQ ID NO: 182366 - DNA, 514 bp, Cannabis indica
ataattttttttttaaatatttacctttcattattattttttagaaagtattttatcgtattacctaaaataattatgagagttatgttgatatttttatgagtttttttcaaaaatattttattattattattattattattattattattattattattattattattattattattattatgattattattattaatggtgttattttttgttgtattagcttattatgttaattttaaattctcatactaaattgtattaattattaattatatatgtacctcatatacttattttttttaattttttttttctaaatttacggtttgggtttctaaagtggttgcatcgctagttgcaataggagtttctatgtagaatttcgtaaaaatgcaaaaaaaaaaaaaaaacaaaaaaaactagtttaaagtagtaaaaatgaaaaagtccctagattttattatgactatcaatggtattagttattagagaattttatttcttagttatt

SEQ ID NO: 182367 - DNA, 693 bp, Cannabis indica
agatcagatcggatggtaaaaatttaacatctaatatatagttagatcggatttagatagacctaaaaatattggatgtgttccaatgaacacttataggtgttgtgtttgaccatattttttttaaaaaaaataatttttgaaaactcaatttaaaaaacaaaagtctcaaaacgtaaagaatgttgttttctattaaataatttttttgtcgaacttatttttctttttctcatattttttctcacatattttttttttcatcattagacctaaccttgtcaagggctgggttcctcgtacagatcgtctggggtccttgtctaagtctggagtttgagcttgagttgggtactggaccgagatcggggataacgttcgtagttcatgccgaggttggggttgggttcgtgtctaagatgtgaaagcttgaagtttttcttttttttttccttaataatctaaaatcaatttttgaaaacattaattaatacgtcttcattttaaaactacaaaaaatatttctatcttattgctgaaatacattaaaaaaataaaaaaataaaaaacaataccaaacaactcttaaaggttagttatactatttttatgtttttgtttggttgaaattccattttatgttggttaaacactaagttcgtgctctcacaagtcacaacatatatgtgatga

SEQ ID NO: 182368 - DNA, 679 bp, Cannabis indica
atgatcaatggtttggaaaagaataatattagattttgggagataataaagcttcaaacaatctctcccaattccctcactaaaacaacaaaacccacgccccaattccgtaatttcacaagaagaatataacattttcctttccttagtctaaactccagaattggatttgagttgattttgttaaagataaaatttttactaaactcttcaataaactcattcatcaagatctgagattgatgaagtttctctctcaaaaacactaaaaatcatcagatctaaaatatcaaatctcaattacgcaatcatggtgaccaatcggacccaattcaccttctttcttacgattataatggctttctcactctgtttgttgaaattcgattcttcgagatacaaaatgaggtacagccgattgtctctttagacaaatttggattcacaaacaagtgtcgtctcgggctcaatatttcgaagatctcgattactggtaagaatttagagcctaatattgctaatgtctgttcttcctctgtatatgggaatagtcgattcatatctttcagcagcttgaagatggtgagatcgattgtgctcatagatctgatatttttgcactaatgagaccgatgcggatcagtacatgcttcttttttgctaattgcaatgctgggtc

SEQ ID NO: 182369 - DNA, 915 bp, Cannabis indica
gaaagagaaaatcgagagggagacaaaattgcgattatttattattatagaaattaaaaaaaaaaaaactataatattctcccaagataggtttgttagagagatatgtggcttaactaaaagttttttttaatttaaaaaagagattattaatatttaaaagattgtttaatttttggtttaattattgggtttattgttaacgggagatcaaacctaatcgttaaatttaacagaatagttttttttatttttaagtaatattctgttaaaccaagaattgccgttagataggcacttttaatatataaagataaagatttaatttccttttcaaactcttatagatttttgcggaagagaaaaacagagaaaaagaaaatgttttattgattaatcaacaaaatacaaagttacagtttatatagtagagtagaaaaagaccagctgtattcataacagaatacagttagagaaaaagggaaaagttagttaagaataactaactaagatacaaaatggaaaaaataaactatgtaaacttaatacccccttaagatggactgtatatgttgtatacagccagtttgccaatatgagaagccaaaatagtacaagagaggggttttgttaaaattgaaattcgtgttttttaatttttttgtccattaattaattttcaagatacatactacgattagattgataccgagaatgtctagcaatataatgtgctactcggtttgctgatcatctaatgaaaaataaattaacatttgggagggtagataacaaaagttggcagtcttttattaaaaggccgaaagtgggcttcattacttggttgcttcgaatagctactgaaacaagattgtccatctcgatctgaacatgttgccaattattggtctttac

SEQ ID NO: 182370 - DNA, 715 bp, Cannabis indica
attaagataagagagagatttccaagcatggaaaatatcagaaagcacaataacaaatttagtaaatcgggtttcatgacgccagttagagacaatatgtaaaaaagggaattctgttgtatcccagtaggagatagagtagcaagccttgtaacaaagctacaacatctacaacatggggctcaagcgcaccaaccactagggttgaagattggttggtttggtcaagttctttctatataaaaatctaaaattcagttttcggtctggattggtgcaatccgaaaaccgagtggtcaatccagaacctttcttaaaaccgaccgtttttagcctcagtttggtcagtttaaaccatccaaaacgaactttttttttcttaaaatatgatccaatttattctataagcacattattctatattctaccactataaccatataatttaattgttcaaaaactaattgtcttattcttttaactttaatattaataaaataataatatattattattatatattataagtaactacaatatataaaacaaaataaaacttaataaattaatatatatgtataatagtcgattttagttttttggtcgatttattctaaaaaaactaaccgttcaatgtgtttaaccgttagtggttttttgattttggttctgctgatttagttccgacagtgtttttatgtcgatttaagcagtt

SEQ ID NO: 182371 - DNA, 575 bp, Cannabis indica
taacctagaagtataaactcactgtggtttctaaaccatgtgagaaatttcaaaaaaactcaactactattaaaagtgtaaaacttaattgaaaattaaaaaataaaataaaaaaaaaataaaaatctctacaaattaaaaaaatatagattattagaaggatatgattccacatggcccctccttacaattctctttttatatatgtaaagcccgcttagttaatttggaaattagcagttatttatgttaatcaggaaattatttatagctatttaaataatttatcattgttatttatggaattcagatatgcataattatgtcatcagcagtttttatatttcgcatttccggtgtccggtattttggaacgcggcgtttggctcagtagaaatcacaacttagtatgttagtattttggggacgggttttagacattgggaatgtcgggaatggccgggaatttagaatgtcccaaaaatacccctttagtatgattttagtgattttatggtggaggggcaaaatggtctttttgccccattagtgttttgtcttttagtgatttttaa

SEQ ID NO: 182372 - DNA, 990 bp, Cannabis indica
atatacaagaacatatacaattaataataaatgaaaataaatactgagatcaatcatacttcaaaaaagcctcaaataattaaaatattagatacagtattaaaaataaaaaataaaattaatatctcaaatataactattagtgtatataataaaaataattacatataagaaaaatattgtactaaaattattaatgtaaattatttcagcaaagatgaaataaaaataataaacaaaattcatataaaaattattatattgggaaataatttttaaacaatataacataaaataaatttaattttgaaatagcagatattaaattaatactaacatatattacccaaaaacatgtgtctataataactcaaaattaaaagtacaaattttactttgatgtcgccataattaaggaaaaggaaataaatgtaaaaaatatagatctatatataatttaaaatgaccatttaatgaaaatgattaaaactttacttaattagagagtcattcaaaacaaattaatttataaaaaaccataattcaaataataaatacacaacgttttgtgtaaaaaaaaaaaaaaaaaaaaaaaaaaaaaactaaagtaatctatagtaaaaaattgcacttaattaagattttaaaagatgtaaattataacttaacgtttatatatatatgaaaacaactcacacctattaacgcaaaaataaatccatttacaaaaattttaaactatcataaatataaattgacttataaaataaaaaacaattttaataagaaattaataataataaatacattactacaaaatagcctaaatatagaaactgattatattttaataatagaaatagtttaaaatatcataactcacgcccataaatacaaatcacgccattgatagcgccatctcgcaagtcatagttgactatgaatgacaacgaattctgcagttcgatcgacaccaacggtagattgttt

SEQ ID NO: 182373 - DNA, 564 bp, Cannabis indica
taaaaaactaaaaaaactaaaaatgaccatattagtacataattagaattaatttttttttaaaaaaaaactatgtaaaataaatttatttaatatagaattactatatataagaacatatacaaccaataataaatgaaaataaatactgagatcaatcatacttcaaaaaaagcctcaaaaaataatattagatacagtattaaaataaaaataaaattaatatctcaaatataactattagtgtatataataaaaataattacatgaaaaatattgcactaaaattattaaatgtaaattatttcagcaaaggtgaaataaaaataataaacaaaattcatataaaaattattaaattgggaaataatttttaaacaatataacataaaataaatttaatttgaatagcagatataatagagtaaattaatactaacatatattacccgaaaacatgtgtttataataactcaaaattaaaagtataaattttactttgatgtcactataattaaggaaaaggaaataatgtaaaaatatgatctatatataatttaaaat

SEQ ID NO: 182374 - DNA, 827 bp, Cannabis indica
aacatgcatattccacccatccgacaacataattaatcgtagagcctaatttcctatggatgaatatctaagatattcaaactccactaaataatttttttgaagtttttgtgattatacctttctctattaaagctagttatttttttagaattttttaattaaaattataatttggaccaacaaaaaattgacatgtggcattatattagtatcgaacagaacagtttgaaaaaagactaacgaacttacaaaaaacgtaaccttaatgactaaaactgccaattttcaagattgaagatttatctacatcaaacacaaactattgggaacgtataccataattttcccttataataagatgtaatccaaaagaaaatgatgagaatcaatgattttcacttttattgggtcctaactcgactttagaccttttattgaaaaaattaagaaaagtaaaatctatacaaaatatatttggtaaaattttgatattttatggtcaaatattttttttttgtatttttacaaaaataaaaaacaacaattttaccctttttatttccttaattacaatttgatggtggtaagaaaacataaaattaacatgaaaacaacttacaaataacaaaattacaataaaaaaaaacaagaaaataacataaatatatttatagtctgtattttttggtaaaaaaattacaaacggttaaaaaatttaaaatttcgtagaatcgtaattttgtagtttttttttttggtatttattaaaatatattttttaaaaaatagattctttggctaaggactcctaagtttaggcttag

SEQ ID NO: 182375 - DNA, 762 bp, Cannabis indica
tattaagttattgcactttttaatattttgtacttttgagcattgtttaaatattttctctttgtgtcctgttgtgtcaaaatgtttaacctatatgtacaacacaaaattaaagtaatatttacaaaaaggatatatgatcctatatttcatctaaaaaataggttaaactatgtttcatgatttcggggatgacggaaaaaggaacacaaaaatactctaattataatgttagaaatatagtactctagtcaatagagacaacataccaatttcctaacaagcaaaccactaaatttaggtacaaaccccaaaatattcaaaatttgaagtgattacatgcccatctttgtgtcttaataagtccattgccatttttacatgtcttaccattttttccataaaaattataatattatttcgttccaaattatttataaacagaacattttttataattaatttccatggaactaatttaatccattaatactataaaaatccatcaattcaaataattatatatatattttttttcattctatatttttgtagaacgtgaaagcatttaaacacatttatatattttttttctttgtaataataatataatgaaattacaaatcattaagttaaacgacgtcgcattcaggtggtagaccatcaggaaacccgttgaaggtcataacgagtaattataaatcatataattattctgaatccatctaagccgttcttgggtggccgagtcaagctgatcag

SEQ ID NO: 182376 - DNA, 866 bp, Cannabis indica
ttatatcatttgtgggtgcggctaactcaccatgaggtaactctatgtattttccaaggtaaaagagcccctgaccaattcgaaacaaaaataaataaaaacagagttccaataaatggaacccatgggccatattcttctccaatctgagttttgctcacgtctcgaatgaattcaagaacatattcaaaaaaattctgaccgtctgtaggaatagtttgtggattacgaacagctagaatggccgaacctaataagatagcaattacaacccaagaagtaataagtacttgggcatggacttgaaaacctcctatttgccaataaaaatgctggcctacttccacgccggatatatcgtataacacttttagtgtgttgatggaacataataaaaaattacatattaccctctgaaagaaatcgaactttaaaagaaaattaattttgtattcacctagctctttttcgtactcgcccaccaggaattgtctattttgtaatatcaactaatcacatcaaagcctcagttatttttattctcttttgttgcgattcaggatatagtaaccggttcaataaatctatattatatggagttccaaactaatttccttatttccttatcttattattaatcaagaatttcgtatatagctagaacgaccctcacaaatcgcaaatactaattgtttaagaaataattacggattgtaagctatagcgtcatcattcgctggaatcgaaataatctgctaaataccgggtcgacaatttgttatcgattaaacaaaatacgttggaagttcccaaacgtagatacattcttcgaagagccgtatattcttcttgctgatcaacaatta

SEQ ID NO: 182377 - DNA, 1015 bp, Cannabis indica
aagagtccatattgaaggggtgataaatgatgtaagccttttgaaggattcaccaactgtgtaccatatgaaagttcagcaactctgtcctcctggaccgtttaccatttcgtttagcctgccaggtcctgttgatccccgtttgttttctcctagttttcgacctgatggtatattggaagtggtggttatgaagcacagaataatacctccagaagaacttccatgaacattttgtagtttgtagttttcatgaacctccacaagaataatacctctctccctctcttagaaaataagtttgtagttttttctagaacttcttttattatagccaagttgcaaagactactgtatataaatatataagaaaaggattgctacactttatcaatattgtgactactttattttctttaattagcgttcgcaagtaccatatctgtcctaggggtgcaggttaaaggtgttttaataagctaatttaatgattgcggtataaataagttattatccatttaattttttttaattgtacaacttaactcgacttagtagaataatataagaggtaagttgaattggattcattatattataaacaagatgaaattattgaatttagtgcatacacaaaaaaaatgaaatatatatatataaaaaagtagtaatgtgcgagagattaataatagcaattaatttttattagtggtagaaataataaagtaactatagactatatttaattaatgattgttttgattaattcaaacttaaggttatctacaatataatatatgataacataaaatatattttataaatgtaaaatatattttgtgtataaaaattgtcttaaatttataagatcttttaagaaatagattcgtttaggttatataaaattaaaatatgtccaacccataaaattatggcctatcagcctagcctactcttaacattaactttttattaataaaaaatggattgagttagtcggttgagtggtttggct

SEQ ID NO: 182378 - DNA, 655 bp, Cannabis indica
aataatattttttagtagctaatgtttaatatggaaagtttttagtaattacacagtgtaattacatccaattctcaggggccatgagaattggagagtgtaattggaacccctcaattacttgtaattacacagttacagtgtaattacatggtcagacaaacatgccaaattagtataattacctacctaattacacacaaatccaattacattgtggctttccaaacgcaccctagtgttttactttagcaattactccatatattaattttttaaccttttttttttaaaaaaaaaaaaaattacaagttggattgctccgataattgttatatagattattatatgaatttccataaaaaaaataattttaaagtgtaaaaataaaataaaaaaaacaacttatctcatatactattttttaattttttcttataaatttaccggattgcttcggtggtttctatataaactgttgtgtgaattttaaatgcaatttaagttgctccattagttgctatgtcgatttttatgtatattttcataaaaaaataaaaaaaaaaataactattttaaaatgtgaaaataaaaaaactcttttaattatcaatttgtactggtctttttttttttttattattacaatggcgat

SEQ ID NO: 182379 - DNA, 650 bp, Cannabis indica
tttagaaaaggcagtgatgacttgttccaaataattttttatattattattatgtgatatttaaagtgcttaatattatactaatgtagtactcatttctaaattatttattaaattaaaatttatgagagttgatattgaaatgcatcattaataacggtatgctacatattatggtgcttgacaccttaatgcgacccttaatattttcgttattaatatgtacatatctttattaacttcgtttagaattttaaattttttccttaaggtgctcaatagtatatcgatgtggtacttaataattaattaataattttccaaatcatttatcaaatttaaatttgtgggagctgatattaaaatacacaaataacagcatgctaccttttgcggtgcttgacatcttaatgtgccccttaacattttcgttattaatatgtatttttttttaattaactttgattaaaatttaaattttttttaaggttactcaataccatatcgatgtggtacccaactagttgattagaaatttttttaaaattttaatttatttaaattaaaatttaattgtagagttgtatattaaaatagcaccaactaaaagtaatgctactttttgttggtacttgtacatcttaatgtgt

SEQ ID NO: 182380 - DNA, 711 bp, Cannabis indica
aacattcattataccaactatatcctctcatgatcacattcctccgaaactttggctctataaatattaatcaagatgaaacagcttaatcttcaccaacatcaccttcctcaaaccaaagtgctcatcttgctactcaatctacttcaccaactcctacaatatccctaatttctaataccgactccacttctggtactgacagtattgaagaagttgttatacctgttgttcatatatccccatctcctctaccattacctataggtcatcccatgcaaaccagattgaaatctggcatctcaaaaccataagtgtttcttgtcaaagcttcccaacaacaattgtatgaggaaccaaaaactgttcagcaagcccttagtgtaccacattaaaaaaaaaaaaaacgactatggactaggaaaaacttagctctagttaagaagaaaacttgggttatggttcctagaagtccaaacatgaatgttctaaccaataagtgaatatccaggactaaatacaataaagatggcagccttgacaagtttaaagctagattagtagtaagaggatttgagcaagctcctagtttggatttcaaaaatacattcagccatatcacttaagcttctacaataagggtaatattctaactgtgacttatgcttgggacgacccaaccaaattgatgtcaataataccttcttaaat

SEQ ID NO: 182381 - DNA, 635 bp, Cannabis indica
accaattttaaattttttacgaagccatcgggctccattgggccaactatcggacctatcgggctttcgtctactttcacaattttgtaaccccattggacgtcggacctacatcgggcttgtatcgggcctcgacaaaatcaaaccccaaactcaagtttttgtccaaatcacactttttaagaaatcaatacctaaatcgaaccttaaatttaacaaaattcacgatgtacacataaacacatacattataatcctaaatcaatatctatcaatactctcaaattcataaatcacctaaaaaaataatgacaaaaataataaaaaaatatcttaaggcttaccttcgacatctctgttcgaagcttaggggtagagggttggagttgcgtctcacggtggttgtgggttggttggatccgttgctccgtggtctgggtaggcccttggtgatttggtgtgggtgagacggtgagagaaacaacgagagagatagaggaagagagtgagttgaggtttgaaaaatgaaaatggtatttttaaatttaatattaagtggacttatttttaaaatttaaaatacataaatttaaggtattaatttctcccattaatatgcataagaattaaatttc

SEQ ID NO: 182382 - DNA, 792 bp, Cannabis indica
catatcacaatgatgatcatcagtagatcaccctaaatcctgagtatacataaaatcctatttgtgttcattgagttctttgattcactggttaaagtttctaagagaagatgattcttacaacttctgttttgggagcttaataacattagtggttgggaacatgttatacaatagtggaatccaagctttcctaacgtatcaaatattacttcccttataatgttaattttgggagtgctaacagttggatccaaatctataataagttatagattatctgttcacattgaattaatgaaacctaatgaatcaggagataattagaaaggtaaaatggtattttgaccaactctaattataaactaatagttagaaggcgaactatttatattgattatatcaatggactacaagtaagaattctatgaatataattctatattgtcaaagtgtgcaattccatatttattgtggagtaatactggaattgataaaccagattatctattgataagatggataataatcttgggtttattagagttttgaaatataaattcacggtcattgagtcacctttatacaatactgtacagggaaaagttttatttgatgaacgaatttcgagtgaaaattaattctatgggaaataaatcttaagggcaaagtagtaatttgtgaaattattattttaattaattatgacaattatgaattgtgtaattaatagtatttaaatatttaagttttgttggtataaaactatattaattagttaaatataatatt

SEQ ID NO: 182383 - DNA, 694 bp, Cannabis indica
ttttcttccaaataataatctagatgattttttttgaattcaaactcaaatcaacataataatctccattaatgtgtatttaaacccaggaaacaaagcaatgtatttcccataattaataaagtaatgaattataggttcatgagcatgcataaaaaataaaatcaataacagttataggaacatgtgaatttattaacaattgatatattttttccgattacaaatgcctccaccaaacctttattatgagtattaataatttatgttaatgacatgagtgaatagaatctttgtagaaacatgtgattctaatcaaattagaaatgcctccaaaaacacaaacaataatctaatatcgtgaaaattaagaatctgttcatagcgcagtgtgtgatttcactaatttacttttttccaatcacaaggcctcctcttttttttttttttttttttttattttaaaataaaaccgaaactaaaaaaaatgtgtacagtgagtatatgtgattcgaatcaagcagagaaatcaaatatcattgacaattgacaaagtagattacatgttatgctttcaaggaaaataactaattagaatctcatgagatgatcatacttaattgatgttgaggaaaaagatatgcatgttactgagaattgtgaaccaggattattaatttaattttaatagagg

SEQ ID NO: 182384 - DNA, 505 bp, Cannabis indica
gaagtcttagccttatactcatgttttcaacctttttatccacaactacactatataaatatatatatatatgtacattacaatgcatacatatataaatatagatcatgatcatgcctgtccttctccaacccactggttctcagttctcactccaaacgtgtccactttagatttaaatttagttgattgttacaataaataattataagaaggagaaagaaattcaaagaagaagtaattaatttgaaatattaaatatctcaatgagttgaaaaattatcttttgaacacactcttatatgaggaatttatacatgttatataaatatatctttatatattaaaagtgcctatttaacggcaattcttggtttaacagaatatgctttacaaataaaagaatattctgttaaatttaatcccaaaaagaatcgtccaccattttttgaatagtggctgtcaaatctacatattctctttctgaaaactcttttgtttctct

SEQ ID NO: 182385 - DNA, 804 bp, Cannabis indica
ctttaaatgagatttcggtagaccccaatctgttttagcattaaggagtttttttttttttacatgatggtgtaccttataattatttgaactatttaagatttaaatattttgttatacgcacaactatttttatacatttgataaataattgtttaaactttactttctaacattgtaaactattcggaacttttttaaaatttacacatgatcttatgaatagctacctcatatataattttgaaaaataaaatagagtaaatcatttttttggatgcgtaaacgaaggatttagcataacatccttgttgtactacataaatttccattatatatatgtatatacattttggtgctcattttctgagatattaatgtaaatcatatatatatacagttgagaattctaagtcatgtatttcttttgatcaattgtactaactttatattagaggatcctagctaacatttcagatcataaaattcaagcctagttgttgtgcaattgatcaatcagtttaaagagtaattgaaactttcagttgactgttagagaataaatatatatatcttatatataatcctcttgaaatttcattgataattgatttgagtttagttgagttgagttgaggctctatgttggactgttgactaaactaagtctttgcttaaagttttgaatcacattgtacgtaggatttaataattacaaatgaaaaaaactgtcaaagagtctttaactcatacacaactagtaatagtatagtatttggtatacatcttgacatgttgatatga

SEQ ID NO: 182386 - DNA, 525 bp, Cannabis indica
aatgtaaaaaaaaaaacccttttttttatatttgttccttttttttattttttattcctctttttttaaagtattatttgttttttacctatttttttttaaatatttgtaccattttttgctcatgtcacttttaagatactttccatgtgactcctttatgtgaaggtattttgagtacaatacatataaaaagaggtacgtttcaattaaataaaaattagagataaatttagttaattgattaataaaaaaaaacatttttcaacttatccctacttttgaatcttcaaagcccaaaaacagtttttaaaagcacaccaataattagggtcttggaccattgaaagaactttctttccacctatctattatgtttacatattgctccatttttcatatgaaactcatgcataatagttgatgtacgaattttttttttttaattcttttatccttttctcaattagaattgttgtttttatttataaaaaaaaatgaaattattgtttctcatgtcaacag

SEQ ID NO: 182387 - DNA, 832 bp, Cannabis indica
gcttgggccgccgcggactattcagttcctaaaagaccttgttggtcaaaaaaagcctatgattgtgtttttatgtgaaaccttatgtgataaaaagaaggttgagattgtgagtaggcagttgggctttgaaggatgttatgttgtggaagcccaaggtagaagtgggggtatttctttactttggcaaaatagtaatgatgtcaaaataaatagcttttctaaaaaccacattgattgtgtggtatctctgaatgggttggctaattttcggcttactggcatatatggggaccctaatagaactcaaaggaggcagacatgggacttgattcgaaccctcaaggaagagtccactgatccgtgggtgctcataggggacttcaacaatgtgctaagtcaagcggataagaaagggggtagaccatacccgtcttggctcatcgatggttttcatgaaactcttcaagcttgtaacctttgcgatttggagatgcggggacatccttacacatgggaaaagagccgtggcactgaccgttggattgaagctcggcttgacagagctattgcgtctcaattgtggttagatttatttcctttggctattttgcataacctggaagtatccacttcggatcactctcctttgttgttagatattcagcctcaaaaattgggtgttatgtcaaggaaatttcggtttgagaatttttggttggggaacccggactgcgagcagattataactgagaactgggggactgatgttaatgtggacattcagagaaagattaaagtgtgtggggaggctctctttgcgtggggaaac

SEQ ID NO: 182388 - DNA, 998 bp, Cannabis indica
aaggaggccacatgtcacctccctaggcagccaccaaaccaccaatttaaatgactaaaatgccctttaggttaaaacttaagtatttctaaagctaggggtaaaatggtcaaattccataaccccgctcaaccccgataatttattttctctaaaatatttcccactaagaaataaggttctaaacttacccatgtgatcaaactagccatccatcgcattttccgttgtcgccgagcaaaaattacaaaaattgcatatttcacatataagttaaataatacccctagagtttaataaaatctctggaattgagaaattataactctaatattcatttctaaatattggggtccacaaataaattaattcataaataattataaaattaacagaaattaatgctaattgcctttttactaatataaattactaaagcggtcattacatttactattttgtttgctattatagagagttattttttttatggatggagtttcattttttttaacctattttaactaaaaaaaaatgtatttagagaatgtgattgaaaatgttcttacaacatatactcaacctgcttttataatttaaaataatttatattcaattgcgcttacaatgtttaatttcgataatagtcatatccatatttttatgaaggaaaataaacaagaaacaattttattgtgttgttttcattaacatagcctagtaaccaacaattcttccactaaattttaatctttccttttgagttatatgtcaaagattagaaaaacaaatatacaaaatatattatggaatatattcatttagtaccttgtgtgtttttatgaaaaatatatttggtaccttatgttttcaataatacttaattggtacctcatatttttaaattgtacatatttagtactttaaaataaaatttaatcaatacaattttattaatttaaccaaacaattctcagttatctgtaatcaaataaata

SEQ ID NO: 182389 - DNA, 684 bp, Cannabis indica
ttctcaccagagctcgcacctgtgtttttcatgggatatccccaaagaattaaaaggctaacaaaccttacgatataaataacaatcagttcttgttttcacgcaatgttgtgtttcatgaaaatattttttctttttcaaaaattaaatactgatgacgatagcatagaccctttcactcaaggggttcttccccattctatgatcactaacacacctgtttgtgagtatcccatagatcaagttaccatcgtgaatccttctcccccatgtaaatgacacaaatgaaagagatatacattaggagattcctacgtctgtcgaaacaacaaaagcatctacaacacctcctcaaaatcctgctcaggatgcacgatgaagatcaaacagacaaactaaaccaccaactacttaagggattttgagtgctattcactcattcaggataattcttccacacgtcattatatcaaatttattgtttcttattccaaattatctggcccctacaaggctttcattcttgtagtttcctctatcaaggagccagaaacatacctggaagctatacaaattgtagaatggctaaaggctatgcaatgcgagctaaaagtactcacaggtaacaaaacttggactatagttcctctgctagcaaatcaaagagctataggatgttaatgg

SEQ ID NO: 182390 - DNA, 497 bp, Cannabis indica
aatgcattgaaatttaaaccgtgtgcttgattcataaatctttttaaaatgaattggatgccttgtaaaagaaagaggattttttatatagatgtgaagtattgatttttggatagtatcacttttattctacttgggtttgtggaatgtttgcttgacatggaatagaacttgtgtgacttactctcttgaagcgaaattcttgatgactgttgcttggaaaatgatttaggcaattttctttggaccgattgagcctttcaagcttacctgtaaaattttgtccttagtatacccaaagttgagctttagcctgtttcaaaattttaaccacttaattgagcctaatgtgttgtctttaattactttcattctcaatgtaacttattatgccatatgcctttaattaagtttgggagtcaataaaggattttgagtgggtattattttggaagtaagagattgagaaaaaaaatgtgaagtgtctttaccatcta

SEQ ID NO: 182391 - DNA, 693 bp, Cannabis indica
attaagttgcagatttttgttagtcagaagtttcttttggtacatgaaacgactattatctttatgttatctaacggtttacctagaattaatttatatacttgtttgcttttgttttttcctctaaaagctatgagggtactggccgatctttgtccctaaaacttattcagcaattggaacagcaaagccagacatcagctcagggtgtagagggtgctctttctggtattgtatactgcccatgctttgtttataaagttctactgacaaaaataaacaacacgcttgagaacttcttggccggctgctgtgtatttcctatgtttttgtttgttttctgtgttgtggggggcaaaaatttggtgctaaaatgttactcaaagtaaataaagggcacacaatcaatttaagtcctgagttttgattaatcaaatatattaggaatctgtagttctaccttgtgtatcaatcattttatagttgtcatacatagtttttctagcctttcattttaagtcctgagttttgaataatcaaatatattaggaatctgtagttctattttgtgtatcaatcattttatagtgttgtcatacatagtttttctaagcctttctagtaattgttatgtgagctattcctgttgcatcatctcaagtctctattatcctgaaaatgaatatcagtttg

SEQ ID NO: 182392 - DNA, 505 bp, Cannabis indica
gcttcataaaaattcaagtgtgactctcgcatgcatgtgttttcgttgcatgaaagatcactggagtacgatacatcttcaacctcctctcggaatgcagggactactgaagactgtcctagtccacgtgatgtttctctttcatcttttaagtgaattctaagcttgattttatgcaacttcaacgttccttcccagaagccgaaacattcttcataaaaattcaaggtgactctcgcatgcacattgttttttgttgcaagaaagaatcatttaaggtacgatacatctttaaccctccttctcgtaattgaagggctgcttaaagtctatcctactccctgtgatgctttctctttgatattatcaagggaagtctaagcttgaattttatacaacttcaaccttccttcttaaaatccaaagctttcttcataaaaattcaacgtgactctcgcatgctagttgtttttcgtgcaagaaagatgactaggggtacgatgtg

SEQ ID NO: 182393 - DNA, 533 bp, Cannabis indica
gttcctcgtctttactatgctatcttgaagaatgacactagaactgtactgaaaatcataaagaataatagcgcattgttacgaaccgcaatcacaagagcagaagaaactgttcttcacattgcggctggagcaaaacacgtccaacttgtgaaggagttggtgaaattgatggaagaaaacgatctagctttgcaggattgcaaaggaaacactgcgttttgctatgctactatcagcggaagcatagatattgccattattcttattaacaaaaataagaatttgccacttattcgaggtggccaaggcatgacaccactttacatggctactttgtttggccataataaaatgtcatggtttctctatcctaattaaaagagattcttgagcaggcgaatggattggaattttcttcacgtgtatcaattctgatttgtacggtaagggaacatatatcttacaaatatataataataatttaacacacactatcacacaaatatacgtgtaacacttctcaatatact

SEQ ID NO: 182394 - DNA, 784 bp, Cannabis indica
ttcaaatcatgaaacaataattttatgagtgagataaataatgatttagagtttgcatattaaaaagaaaaaaaatgaagaagaaaaagaggagtgtgactaagagaaaaaaagaaaaagaaatattttttaggtttaggtcaaatattttaggctaatttatagcaatatataataatatatgataggtttgtttagatttagacatttagttatttttaataaaaaataataaaaaagagaaatctttagtttaccgttaatatattatacatatataaaaaaagttattttaaaagttattgaatacatatacaatcattatttttttttatatataatttagatagagatattttgttttaaatataattgttattttttttatgtatttattatgtagcttagatagagatattttgtgttaacgcaaatttttgtttacctgatatgagcttaaacggtaataaacttgcacaggaaaataaaaacagtaaagaaaagagggtgaacacaaagatattttttacgtagttttgcaatcaaaattttgcatagtccacgaatcaattttattagatttttgatagcctttttctcttatgaatttttcgtccctttttcagtctagacttgtctctatttataatttcatagcccggaagttaattacagagttaactgatatctttacgacaattatctcttgaaatcgtgggatttgattgtaaaataaatctcttttttgtagtggtgggtaccgtcaattgtgtaagggtagcga

SEQ ID NO: 182395 - DNA, 514 bp, Cannabis indica
ggtgcattcaccaagtgcgctaggaaaacctattttaccgactaggcattggtggcgaaaatttgcggcacattgtgtctaattttgccgaaaaaaatttgtgcagaaaaaagtcttctttcttgtagagtcaaatgtgaattaaatgcataatattaaaatataggctataaatttaatccctcaccactttcttttcagatcggtcactcacaatatatattgaatataataatatataatgtgagtactttgtctttattttagtaagataattatatataaaataaaaatgaatgtactatttagtactaccacaccttctatagctaataactcaataaaaatattactctaaacttttacattatctaataggtgggtaatttaataaaatcatgaattttgtgttggacaaaaaatgtaaacttaatattaatcatttatttagtaaatttagactttcaagaactaacttatatgtatatggagcaatatattcatacaatagtaa

SEQ ID NO: 182396 - DNA, 551 bp, Cannabis indica
catcacaagtcttggccaattatagtcacacctaatatgctttctttaatatacaaaaagtattaaatgattattataaaagaaaataaagtaactagtgcggaggtgactcagtgagccaactcagtgactcggttgattgaaggaagcaaaaggataattttgatttttttttggtgctgtgaaacaaaacgtatgaatttggtagtgagatttttataaggacaaataaattataatttggagggaaaatggaatttggtgggatcactttcaccttccacaactgcccgccaaaattctttcactttaaacaaaataattatgataatgtactaagattcaaatatatttatgttgaaataaaaaataaaaaataaaaaagttttagttcatattttatttttttttattttttttttagggtagaaaatacattgtttaatttgattcgtaaatataaaatgggttttaagctaaatcataatcgttattcatatttttggtaagaaagacacgtgatatttccagtacaaaattaatagattaag

SEQ ID NO: 182397 - DNA, 549 bp, Cannabis indica
gtatgtgtattgctgtagtggctagagatcattttggcagagtgcttagagttcacacagctcgggaggagttctcggatgctctgtgcggtgaagctgcggcttgcagtttggcggtgtcaatcgctttggattccggctataagtttgttattgtggagaatgattcgagggtagtcatcgatgccatcaatggaaagggttcgcattgggctttagtgaactatatctcattttgtactaaatcttctccttcttttaatagttgtattttctcttatgtcagtagaacttgtaactttgccgctcataatgtggctagatgggccttcgcccaccagatgtatgggtctctaccggtctcttctattccggatactctattttgtaacgaccgtgaggtctaactgaattttattctataatataaacgattttcatcaaaaaaaaaaagaattgtattaattcatattctaaatacaatcataatatttaaattaatatcatcgtatcattaatttgatttttttttaaatttttaactacttt

SEQ ID NO: 182398 - DNA, 989 bp, Cannabis indica
atatagtttaatataataacttttaaagagtatcgctaaccaatcgcaagacgacacgtcttaagggtactagacaacactagtacccaatagcaatactcgtgaagcaatttgttattgggatacaatgattgagcaaagttgacttgtgtacacataatcatcttaattaaatgataataagatggatgttcagtcaaaaaaacaagaaattttttgggaatatgatatataaaatatagggggaccgcgttgtgggttggacgggaataattgtcacggttaaattactaaattatataatcaaaaaaaaaaaatccaataaacacacttataaaagttttttacctgctaaaaatatataaaaatataagaatcaaaagacaaaaatagtcatcattattataaaaaaataagtaaaaaataattattatttttattataaaattaatatatatatatatattgtggtacaattcctttaaatgaaaagatcttcaagagtcttattattcctggaaaattgtggactcgcagaagctggtcttggaaggctttcttatccttctaagaagggtctttagaaagctatagtcctctccgaaaaggagccttggatgactagttgttttttcaagaaggtagtcccggacagtcaattccagctggctctttcctatctaggaatgtcctttagcgagtgcctttgaccgtgactccgaaagccctcatactcgctcccggatgcactcttacttaggaaaatacattgtttgttgttaatcaacaacaaaaggaaaatacattataatatagggcttttttaagttttaaccaaaaaaagtaacaatgttacaaaaatacttccagttggctaaataaacaaatatacagcccaaataaaaaaattaacacaaataccatttacacacaccttcaacccaagatccatgcttcatgggcaactatcgcgcaatcacgcagcaacc

SEQ ID NO: 182399 - DNA, 692 bp, Cannabis indica
gcctttaggaccaaagtatatatagagtgaaagtaatgtaatgggaaagaaaaagaaaaatatctacacagtgccttacacttaaaaaatatgagttaatgatcggggaaacaggcagccaattactattgaaacttagtaatgtgggacctatttaaaattgctattttttttatttgaaatagttctattacatttttattttcaaagttctataatatttttattttaaaaaatattgtatataaatacaataataataataaaaagttatagcctgctatatatttatttatttactttttggaagctatatttttagagttatcaaacaaagatatatgtagaaaatttatataggttgacatttatatatagtaaatctcaatataattttttttaataaatttgggctaataagtaatttttcatcttgaactttgacatgtatcaaatcgtgccctctaaatttttttggccattaaaaattccccccaaattattgagattgttaaatttaaggatttttgtctaatttcattcaattttactgtttcagtgattgtttatgtactaaaccatgctccccagactttgatatctatcaaatcatgcccctcaaactttgatatgtactaaatcatgccccttaaactttcatccatgttagaattttttactaaaattagaca

SEQ ID NO: 182400 - DNA, 1263 bp, Cannabis indica
atatacgacaacatgttgaactctcgtgcgacatcaaaagcgtcggtgccgaaaaggtcgacgacaagagcactgaccgagccgaaacgcgagaacattgacttgatgatgtttctaagggcagggagagaacgtgccactgtgagagtgatgatagtctcgacctttgtgtcttctgggaggtcgtcgaagttaaccggcggaaggaaaacgtggtcaatttcctccggtaaggcgctcagaacggacttctgggtctttgaaggtacggggccatcggtcgaaaccacgaacgtgatggtgaaatcatgagctctgactaaacgcttggcgaattcgacgagagggatgaggtggcccatccctggagatggaagaattgccaggtggggtttctgatgagcttgaggttgttcagccatggtgaattgatgatcaattaagctgtttttcagtttttgtagtacttgtatgtaagtataagaaagagggagataatagagaaggctatacgggacttaatttttgtttgatttataggttcaatgtttcacttctagaattgggctttatttttaattattaaaattagtagccaatttttgaataatacaaaagaatggagaaaagttttagagagaatttttttgttttttaaaaaaaggtaattttatgaaaattgaaaagtattaggattttgacatgtattaaatcttttctgatcgttaaaatttttaattgagattgttaaatttaaaaaattttatcaattttagtaagaaaagtctaaaagttcatgggtatgatttgacaaatattaaaattggaggggagtgatttggtagatattaaaatcatgatttactacctaaacaattactaaatttgtaaaattaaataaaatatcatacaatttcttaaattcgataatctcaataatttaaggaaatttttaaggttttacagaagttcagcgtataatttagtatttgttaaagtttgaaagtaaaaattttaattaacttaatttattaataattttttataatttttaataaattaaaataaataagaatcacactctttatgaattctattttatgaatagcaaggatgatgtgtcagagtcatataagtgcaagagagcatcatgacatgttgtaggggagagagagagagatgatgtcaattcaaacgtaaggcttatgttatcataagatattagccactaccttattatagatggttgggttccacttccac

SEQ ID NO: 182401 - DNA, 568 bp, Cannabis indica
ttttgaacaaaattataaatacatcttaaaataaataaataaaagccaaaataatacaaatatattataaactataaacgtgaatacaaaattttatatatttaattaaatatttcatacaaactaaactttttatggcttaaaccttattatcttttatattccaagttgatgatcatttaaccaaataaagaaagtaccaattgggttgtgaaagttgaaatgtattatgacaaatttttcactatactaagccatacagaatattgaaaaagaagatgagctataaatggcaaaaaaggacaaatccaaaaattacttattaaatcccataacctttaatatatggcaggctgcgataagtgatgatctaaattaattaattttttattatatatattttgtgataagatttccattatattatttattcagagttacatattggcattaatcatgtacctgcaacaccactgtatctggtgactataaatctctataattctaacttcttaaatatatccaaattcttcctaagtttgttaccttaaaaaaaaaaattagttcc

SEQ ID NO: 182402 - DNA, 1020 bp, Cannabis indica
cttgacaaacataggtataggagatctaaagagaaaggtagaattatttcaagactttctattatgctctagaactagagcttaatttgttatcaaactttctttgttatgtagaatagttctttctcattccaatgtttatgcagagaaacaaaattcattctctacgagacaccatgaaatcccatgttatagtgaattagtgttgaagttagagagaagtgttgaaaatcaagctcaataaattatgagctgagaacctctttatataggatgagtacagattacagagtttagtagagtcaagaagtagttagtgcaactaaacaagattctgttcaatcaacttgtacaaagaacagaattaattaacagctaataaactaaattctaactaactctttttagcgaaggaaatagttctaacacccccctcaaggttacactaggatttctaagtgttaacttggaccttagtactcaaactgagatgttgaaggagcttttgtaagtatatcaactatctggtgttctgaactgccatgtctgatgtcgagctgattggatagaaattctgtctctgatgaagtggagatcaacttcaatgtgcttagttctttcgtggaagacaagattcgtggctaaggatgtagcgccaagattgtcacaccataagacagggcatgtggagcaagggaatccaacttctttgaacagagactgaagccagatcagttcagttgtggctgaggcaatggcatgatattttaactaatttttagtcactattttctggttcttctcacaccagatatcttatcctttcttctgcgttttagctttactgttgaattgttatcttttattactagagcatgtatttttagatgtgatctgtatgataaaccaaacattccagatgaagaatccatttctttaaactaaactaatagaaagcaggaatagggaccaactagttgttactaacttactatccttctcaagtaaaagagaactttt

SEQ ID NO: 182403 - DNA, 768 bp, Cannabis indica
atgctcacattgagcttcgaaatgcattaatcgaacacttgtgggacgaatatggtaactcacaaaattaatataatttaattaattttaagtgtgtgtttcaagtttaatttaatttaatgtaatttttttgtcatgaatgtaatgtttgttctctagtaatgtaatatttatgttattgcaatatgatattttaatttatcgaatttcgccgattttacagtattattgtctttaatcacattagtaagtttatttaaattattaattaaatataacaattgtggtaattttgttaattaatatgatattatttttttaatttattaaaaaattaatataataataaggaatatttttttagtgtaatttttggtgttgtggttggagtagaaataatttttgacaccaaatttggtgatagtgtaacaccaaatttggtgtctctttggagatgctctaaacactaaaataggatttcataaagcaacaatgattgtaaaaatgactttaccaaaagtgcttgaacaagaatcaagtggcaaaattgtgtgtatttttctattttcaagagtctccagactaatcaaacaacaaaaacatcgtaccatcttattgtggtgactcaaaatatgtacataaatttaaaacaaataatagaaaaaaaacaatctaggggtggtggcagtagtagtagtagtacaatttacagcatagttacagaccaagtctgtatacaataatatatatatatatatatatatatat

SEQ ID NO: 182404 - DNA, 524 bp, Cannabis indica
agttaagcgcgcttgacctagggtaattttaggatgggtgacctaccgtgcgagtgtggacaaaacacgctggaaacactcgtgttggtttgtagggtcagttatcaatccatgaagcagatagagtgacatactcgtgtataagagtcattatttcgtaggtgtaaaggcccaatggagatttgaagcggagatgttacaataattgttgaattcattttatgggaactaagtgcaacaaatttggagtattatggaatagtctatgaacaaactcttgtattgtgtggtcaaaaatatatataatattttatgtatttaaatttaaattaaacatccttaaaaaaattatattaaaatattcttatataaaaatttataaaatttttatttataaatatatataatattataaaattaaatattaaataataatatattttgttaaagtttacaaaaaaataaaaagattaataccattaaataaaaaatttcacacgttatatatatatatatagtttaat

SEQ ID NO: 182405 - DNA, 582 bp, Cannabis indica
acgccggttctgaaatcaatcactggtggcttcacctgcgcctgagaagacgatgtcaccgccgaatttggggaaacactgcgattacttcccttttttgatgatttaggcgatgttgtcgttttccagtatatccaaacagccatgaatcggagaagttctctaatgggtaagattttaggggcgatgattctgaggttatccacaaaggctcgagtcgcggctttgggaagattcttggctaagtggaagccgagccgtccttgatcatcctcagtctgtaaacaacatccgtacgattcgtctctcgctccgtgatgtgtacggaccaagcatttgagtctgaacatcgatttatgctgtaacgatctcttattagtgaggagaatcgcacaaccaccggacctgaacaaacaattcgaaaggatcatagatctatcgttaccggaataccaattcggactaagcgattcggaggttacaactacagcgagtttatctgacacgatttgaaaacgtttctcactatatcaaccgagatcaaaactcgcactgcaacccattccagtaagattataaacc

SEQ ID NO: 182406 - DNA, 664 bp, Cannabis indica
atatatatataaattagagtaaaaaatatctcaaggttaaatgaatgacaactgaattaacatgactatatattaattaaggataaatattattttgaattttgtgttttgtaaacgttatcaattaaatctttagttttattaaatgttaaaatagaccatatattttttaaaatagtaaaaattagatactaaattgattttttgttaaaataactctttataataatccgatctagagatgttatgacaaattgattatatttttttctatatgttcatgctaggaattatcttcatgttggttatattaagaaaaaaaaaaattagtaaaatatttacctaagggttctatttttatcattttcgaaaacataaaatttattttataatttaacaaaatagaggatccgattaataatttttataaaattcagaatctgaaattggctggcagggagtttgtaattaattgtagttacgtacataaacaaactatttgtgatgtgagtaaaacgtagcctttgtgatgatagaatatataacgtagtgtgaggtgaggcagaccgaatttgattttctagaaaactttggggaaactaaaggagacttcatcataatccttaagaataatgcataactacttaagtttaattcttaattc

SEQ ID NO: 182407 - DNA, 701 bp, Cannabis indica
ccactttttgaactcattctttgattcattttctttaattttacagttatattcatcgtaaccataataaatttatatgaatgcagagtttactttatattaacatttaccttattttttaaaaaacttaaattatatatgacacatatataaatatttaaatgaaattcaacttcattaacaaagattgtctttaatcaaagatgataaactagcgaaaacaatccttccactataaacactttcaacatgaaaagtagaatcacgtgataactctattcgcatattgtataacaaagaaaaaaaaacattatctaattatgaaattaaaaactaacaattactaatgatatttcgatatggagaaactatataggttgtcttgctaatatcaaggaccacatttaaacagttagtctccacctatacttccgacattttttcttttaatccaacttaaacctctttcaccctcatagtttcaattatgactggactaaatactgccgaatgacattgttgcactgcttctaatacttgcccaatagaattcctagcaccccaacgaacccatattttccttcagtagaaaaaatagctccatcaacattaacttttaactttcagaaattcgatttgacccaccacccactcactttcggcctcatctgatcactcactattggaataaaagacttatc

SEQ ID NO: 182408 - DNA, 626 bp, Cannabis indica
gtatagtacctcatccaaaagaactttcgtgacgttgaataagtaacatgtaatttttgcacttagagaattctctttctctatctctttgtgtatctctttatctctctaattacaactcacatctctaactaacatgatcctaaaaatataaatatataaaactagtaataccaactaactaacattaacagaaaaaaccaaataagggaaacaagaaataaaacagttacatccacaactaacacactgaaatcaattatggtagcatgaacatgtggcaaagttggctaagagaatgagctgactcaataatttcaacctcagatcaaattttcatgcaagttctggcacgttgtttcttacattgtcccatcattccttctgaacatggcatttctaattccatctattggacaagctcagacattaccaaatatcactttgccatatttttggactctcaggtctcttatctaagttttatgtttgccatgttgaaggtgatcctgaatcaatgatccactcattcttatgaggcacttcatttgtgaccaatggttctgttgcagactgtcccatgaacacctctccatcttcacaatgctctccataattggctgttg

SEQ ID NO: 182409 - DNA, 641 bp, Cannabis indica
atccaagtataagtgacgaagaacctaccacacataaagataattttagaagtatttgattaaaattatcatgatagatatatcataaataaatagaaactaaaaattaagaagaaacattaggcaaaaagataaccattatagatagagataagttccaatggtctccattaaactttttcgatgataccttcatatatgtatggttattttaacttgtacaaagtgggataggttttttttttttttctaatggtacttagctggtacatataagaagaagaagttacaattcactagttcaacttaaattaattagttttagaattaaatatggcatttatttatttattttatatacataaaatattatttaacaacacttatctatgagtgttactattgtttattataattaaattgattttgaaatacaaatttaaaaatgtatgaattatttagcaacactttaattttaagtgtgatcaactatataaagaagtaaattcacaacacttttttattaagtgttgttgattaggtgttgccaaatataatttttgtagtcatcaataaaagtaataaaatacattttaccacctctagttagaattccatttaattcacacaattcactatga

SEQ ID NO: 182410 - DNA, 1101 bp, Cannabis indica
ggaatgtactcaaaattgttgcccttaaagtcaatagagcattctataaacctctctggcataaaattctcaggttcattccaatactttggatctcttccaattgcccaagcatttactattactcttgtttttttaggttatctcataacaattaatgttacatttttccatactttcccttggaagtagcaaaggagctggaggatgcaaccttagagtttctttaacaactaattttaaatatttcatctcactgattgaagattcattcactgatccttttgtgccaacaacttttcttacctcatcttgagcttttttcatcacttttggatttcttatcatttctaccatagcccaatctacagataaagctgatgtttcactcccagccgaaaagatatcctgaaattaagtcaccataagtaatattttgttgtgactatataatagtcacatttagtcaaaaaaaatagttactaaaagtagcaattttttttgtagggaatccgcccatattctataaatctattataattttatatgtgctagaaaaaaaaatataatgtaccccaattataacacttcacaaagtatcttttaaaagttatgtattctagataaaaaaaataaataataaataacctttttttattatgaactattattttgaaatactacttgccaatataaataagttgatattgatgagaacttacaaagattattgctttaatattgtcatttgatagggtgaaccaaccatcttgtttattcttatgaaacttcaaaagaacatcaaccaaatcttcatcttttccacttttctctttcatatgctccttgatgatattttccattatttttgtatgaccttagtttaatgctctcaaaaataggacgacttttccaatcaagaaatctcaaagctggaaacacctcagcgaattcaaagcctacacccgccttgatagcttcctcaacaatcgaaatgaactcgtcgtgatcactgcttttcttgccaaaggcagccctagatgtgatgccataagaacattttgtaaccatttgagtaagattgattgctgatgatccatc

SEQ ID NO: 182411 - DNA, 549 bp, Cannabis indica
agccaaatggaaactcttcaggtagacactttggcataaaggcactcagggagcgagatctagagactaagaaggccaaggagaagaccattgcctctactcaaaaggaccttctaaatgcttgagaggagattcagggactcatgaccagactcaaggctcttaaggacttacataaagtcgacaaagaaactacagcgggaatgtcggttgagctcaaggagttgcatgagttccgagaccggacccagaatgaagttgtgaaggctgtgagggatgcattattaactcttgtgacttgtaagcattgtgtaaagcgctttgaggatggagtttttatgtgctggaaattgaacaaatttgaacctcacctcatttcatgcctgattctatggctacaggggcttgattctgggagaagaacagaagcttaagtagcccctggctaagcgggatgggtcctcacctttctctaagaatttattaattaaacccattttttcacttcgtcttactattacccccactaagacaatattttaattttta

SEQ ID NO: 182412 - DNA, 614 bp, Cannabis indica
cttaatcccttgcactcagctcggatataatttctctggccagaatgttgctccccttggacaaatccacctaccgcttactgttggacaagctccgaggaacataactgtgatgaaacaattcctgataattaatgtcccatcagctttcaatgtcatgttaggccgacaagccatatatgacttaaaagctgtcacatcagtttttcacctgtgcattaagttcccaactaaaagtggagtgggatgtctcgaagaaaaaaatattgcacgggaatgcaattgttgggttttgtgccctaaataaaactcattacaatgtgattagttatcaatttaaatgatttgaaagtgatttatgttaacatgatatttttcatgtttatggtttaatatatatatattttaatatatgcacaaaatcagttaagtccagaacatatatttattcacaatttacagttattgtctaacacagtggaatgtgattgtgattatatgatttcaaaaagctaaagtccctgtttcattcagtgttttggattttacactgatgtgataatcagcgatggatgtgtactttacacttcgagtaagtgttatgttcttttcca

SEQ ID NO: 182413 - DNA, 820 bp, Cannabis indica
caaacttgttatgtagcatgtgtcctaaaactcaaaagaaaatttatagctatatatatcaccacacactatatatatggcctattctaatgtatagctagatcaatacattattaactttaattatgctacctaatatgtggaagtggaaccacacacacactgtacaaaatttttatatatattgttttcaaccctagctaggtttagccataatatttatgtaggtagttagtgtatctatgtcatattattaagattgagtattgctaataggtaccagtggtgcctagcatcttctcgacatgtcgcgttgcgattggctagcgatattccttaaaagctattatattaaactatatgtgacccgatacgtaccaatagcgatattgtacacataggaaggtgctaggcaccactgatgccctttagtatttttctattattaatgaccatttttattgatactaatagtgcctaacattatttaaatgtagtattttttttattggttagcgatattctaaaaattattaccttaattaagttatataagattcaatgcttaattataccaataacaatatatgataccaagaagagttctaaacagtaagtaccactactgtcttttaacttttttttattattaattagaacattactattagctaccagtagtccaaaacacattttatagtgatctacaattggttaacgatattttctaaaatgtaatttttttaaaaattatataaaaaactgatacttaaattatactaataaacagtattacaccgaaaaaaatactaacgcggac

SEQ ID NO: 182414 - DNA, 891 bp, Cannabis indica
aatattttaagaaaaatgttcaaatgcttaaccctggatcttctatttttgaaaaagctcagaatgcaggtcaaagaggttttgctggcattggatcaaatggtatggaaagttctggaatcacgaagtttgtaaaatctagtgttccaacgaatcttcctgaggctacaaatgtgaagtctgctgcaacagtctcacaacctgtcgtagcagaagcagtttctgctgccgcaaaatctccaggatttacaaaaagagtaagatctcaggtaaaaagatttgttcctacttgtcatttttgtggtagaaaaggacatatcagacctaaatgtttcacgttgaaaaatatgtttaaaacaaattattttggtaatttggaaaaatctcaaaagaaacataaaggtttgaaacaaatatgggttaagaaaaattgtctagctggtttttctaataaaagtgctgcatctcaaatgtggtattttgacagtggttgctctagacatatgacaggtgacaaggactttttgactaacattcggcctatgcaatgtggagaagtcacttttggcaatggcttagctggaaaagtcgttggtatgggaactctaaattttgaagggttacctagactgaaaaatgtgatgttagttgaaggactaagggctaatttacttagcattagtcaaatttgtgaccaagggtatactgtctcattttgatatgtcaattttgttgcaaataggtgcattgcttgcattatatattaagaaaaattttaaattagtatcaaaataaatttataaaaaaatgagttttacatattatatattattttctaaaaagtaaaatgttttaaaaagatttagcgtatctaaaaattagatttttttg

SEQ ID NO: 182415 - DNA, 822 bp, Cannabis indica
catgatcattgttgtgattttcctcgtgttttctcttattctctttatttcctccatttattctttgggcttccacttagcagcgttgtccttctttatgttatttttgagcagctcagcttcaagagctctttccaacacctcagtatataccatgttggccacaactatgattttcacatccgttttaatcatggggttcattccttttagggaccttaaggctcagagggcctcggttggtacaatatcttgtgtgaacttggcaaaacggttgaattgccttgcagactcattgacagtgagattgttctactttaaattcataaactcatcttcctttgcagctaatatggtaaaaatatagtacttcctattgaacacttctacaaagtctaaccaggtcatagttgctatgttgcgactttgtcttactacttcccaccagattcgtgcgtcctttttaagtagtctggcatcataggacagtcttgccctatcattgaggtccatatattccaatatggactccattgagcgcaaccactcttcagcttcaagtgagtctaagccctcaatgagatacctgaagaggggccttgttaggaccctactcttgaggttgtcccaaggaaaaagaacaaaaagtcgtagtaagagcagagagaatacatcagcgaatggtaagtgaaggcttgaattttagagctctttcaagtcatgtctcacactcatcatatggaaaattctaaaagatttcaagtctaaaatttgtccccaagataagtgcaatttttccgttagattactcgaaaatgatcc

SEQ ID NO: 182416 - DNA, 566 bp, Cannabis indica
tgcctctagtgtgaaacgtgcttcgtttcactctcatcagactatgttggaggctctcttaggtcgtagcttaaaagggctcaagttgatgaaatagatggtgtctcctcttcatttttcctattcctctgaacaggtgggtgatgctgggtacacccgcccagaaaaatgactcttattagctggaatgcacgagatctagggagcacttgtgcattcagaagactctccctattggtgaaggagcatcgacctttggttctttttttgatggaaaccacaatgtcttctcatgctattgatagagttaagatgtctttggggtttgattttggttttgaggtctgtaacgccctgaccctcagggacgccacgtgtgtgcttttataaacttattattactagtctataaattttggaaaagtgtggtttagtttaaatccttaattaaattcaaaataaagactttcattttaaatactgtcgtaatataggaatccccggttcataaaaaaaaattacttttacaataggttacatttccaaacatagaaaggaaatcgatc

SEQ ID NO: 182417 - DNA, 740 bp, Cannabis indica
acattgtgaacaaattaaattgttagcacacatgcatgctataaataaccaggtacctcgacttgctcttgggcaatggatagtccacactgatgctgccattgaatttgtttccaagaggcacaattatggagttgtggttagggatgctggtgataatctaaaggcagtgtttatagccccttttacatgtgtgattccttctaaggtagcggaaggcaaagcaatcctagcagctatatcttggattcaagcagccaagttgccagtttcaattattgctttagattgtaaaaatgtggtggacaaaattaatagctcttattgtaatacaattgttcttagtgacattattaattgcattaggaactcattgttgtttagtcctaacttgcttataatttatgtaccacgagatagcaataagttagtctatagtcatgctaaggccgacttagtattagacagtgagtaattttggaatggttccttaccttttatattgggctgattactttgtatctcaactttgtttctgtttctttaatgaaaattttcaggtttcttataaagcaaagaaaaaaaattgagtaacttattaactgatacaaagaatgatatataatacacactctaaaactatgtaagaaacaaaaaaaccatttatcaagactaagaagtgtgctgtatgacacttttatttagtaggattctaatggaacgaacttactgaataatca

SEQ ID NO: 182418 - DNA, 679 bp, Cannabis indica
gatattgaattgaatagatattacagtaagtttattatatataatccaagttcaatatcagtcccttacaatgcatactctatacatccaacccaagcttactttaaccaatgccctggaaaggacatagcacttatccaaggtgcaagtaaactacgttgtagattatcctatcagttaaaccctgtgtactgataaatcataggaatacatttaatcacataatcttgattactttccactgtgctgacgacacaataaataagaatatcaatgtgataaggatttggatgaatttataaatcaaataaacatataaatgatcacatgaaccaaatgacatactaaataagtaatgaaaataaatctgtttctttattgataattgaatagaaaagattacattgaaatagagttttatttagggcacaaagcccaacacttaatatgttacttccacttagttctgatgtgaaggttcaacaataccaatgagagaaatggctattatgagttcttttgcaggactctcatctgaatttgactctggaaagtcataggttatttctgcatctgatgtctcttcttcccaagatgtttttactcgtgttttttgtgcattggtgagtcgtaaaaattactacacaatagaaaaaatactactccaattggatacaaa

SEQ ID NO: 182419 - DNA, 501 bp, Cannabis indica
atagcttcagggaagctaagatcacaccagtcaacaatcaactaagcagttggaaactgttgtaactaaccgactaaagtggagggaaataaactaatatacagaatacaaatagcagtctaaatagtgtatatgtatgagaaacttaatagttgcaactaaaagaattacatatagtacttaaaaaaagataaaataaagatgaagtaaatttttgaaagagaagatgaagtaaattactacatactattgtatatatatttatatatatggacacacatacagtcccggccctgagcataggcgggctaggcctgtgcctagggcccacctagcttagaggctcaaaaaaaaatattttctttttaaaattatacaatttttttactgattttgaaaaatattcaaaataattttttttctatggccactaaattataagcggctctgcacacaaataagcacttatatggtattgtcacttgtttatttgtccactta

SEQ ID NO: 182420 - DNA, 1029 bp, Cannabis indica
gttaaccgagtaacgacgtgaattattattaaaattaacaaaaaaaaaaaaaagagaagaagagagaaagatgaaaaaagaaaaatgcatgcatatatataaaaggtattgaaacatatcaaacaaatattagtaaaacataactaagctatttttgataattagatcaaaaatagattgtgaaatgcaaaatcccaatattattttacacttatagtttataaaaattaggatgagattctttttggttaaataacaaattagatttgtattttttaaatagtatctaatattttttttaatatattcaactttaaactaatttgtaagacgaatatataaaaaaatgtaatcaatttggtcatgatgtctttaggccacattattattaagttttattttgataaaaatcaatttagaatattattttatactatgttgaaaaatacaagattctaattattatttaataaaataaatagttcaattagtaattatacaaaatacaaagaccaaaatagtatttattcataattaaattgaaacaaaaaaaaaatgagaagaaagaaaaactaatgtatatgcataatattaaataaaattaatttgcttgctgtacagtctaagagcaaaatcattatcaaactagatggtaaacttgcaaatatcatatagtacatgtcaaacttattgttgaggccaaagttgttccttttgtagctgtaattacatcattatagagagagaacaaacttctcatgtatacttcaaattgatggggaggtaacaaatccctaataactaccctctcgaaatgtgaatacaaccatatttcaaatcttaaccaaaaaagggaaagaaaaaataaataaaaaggtagtatgaaattgaaaaatattgcaaacaacctgtaaaagcataattatggttcaatttgtttatagtttttatattattatatagtaaatgctttaatagtgttgagagattggagcttaaactagagaattaagtcattccaaggtcaac

SEQ ID NO: 182421 - DNA, 621 bp, Cannabis indica
atttattgatttgatttgtgttcattttttttttccagattaggagaatcactttccctttcgatctagaaactcgaactcattcgcgcttcaagacagaaactagaggtttaatctcctcttatctctactttccatttttttcagtttgagttgttaattattttaattttagagatcaatatttgttgtttatggattcttttttgttcattgtgtgagattgtgaagttgtgtcgttgggtttcattacatagattagtaatgacatttttattactactattgcaagaaattagaatagtaacaaaataataggcaattgagtaggtttgcctttttagaatagattttggttgattgggtgagtaccaggtattttcctatatgtcatactggtgtggttttcttagcaacccataagcaagtattggtgtatcatcgcaagagtagagaatggaaagagatgtactctatgaaaaatagttgcacacttccattgtggttctcagcacatgtataggagcacccttttaggaaccatgctattaacacgaacacattttgaatagttctcaaaactcctataattatactatgtttttcagtatgttaagaaaa

SEQ ID NO: 182422 - DNA, 696 bp, Cannabis indica
atttatttttgttatcattgtgatttttgacttctactctttggatggaaggttgagtgtgggaagagggaaaaataggggttgatgatgacctagacttatcatcattgcatcacatgctttggaagagacaaaattgatgatgagcttcatgggctaggcttaacctttttgggttgggttgctttggacttcaacaaaaatgccatttttttcttcatttcttttcaactttgctccttcctctttctttcaacaaaaatacactttaattcctacaagaaagacataaattgaatcaaaatcaaatattttcatttataaaatatattacaataatttcatgaaaatatcaattaaaactcaatttattttatcatttaaaataaataaaagtgtatttttaaccactaatcacatttaattaatcatttaattaaataatcaaactgggaatattaaattacgaaatttcatcttagataactcaatactgtccctattgccttccaatgattcacacttggattactaggaaacctactaagtttactcatcataaatgatgaatcataccttgtacattgtacatcatacataaagctccttgtagcactggcatactccaattgagccaccgctctaacactatttttaatagcagtttactatggtcgaatggtatgttggcctctt

SEQ ID NO: 182423 - DNA, 982 bp, Cannabis indica
taatatccacgtataccatacacaatcataaattaattatattaataataagaatcctcatcgtatgtgtagtgtacgtacggtaaattatacttataattctcatctatatatacaaacacattctcagtttctctatcccattggaccaattatatatttatgtatattccttccaactaagttcacaagatcagaaaaagagagagaaagaagattagctaatatttctccggcgacatatacagtgagagtgagagagaaatcaatatatttgatctaattattattattattattacaaaatgggaaacagcttaaggtgttgtttggcttgtgttcttccatgtggtgccttagatttaattcgtatagtccatttaaatggctacgtcgaggaaattacacgtccggtcaccgccggcgagattctcaaggccaaccctaatcatgttattagcaaaccatgctctcagggagttgttcgccggattttgatactttctccggacacagagctcaaaaaggggcagcatatatttcttgatcccatcttcttccttaccggccgacaagaaaaaatcctccggcaacgctctcaagaaaatacccacaaaaaataagatcaaaataaagtcaaccaccactactactgctactacaaccgctgccgccgccgccaccggtttcgtcgactccgtcgactgtgatcggtacttgtcgagtattatctccgagaagaaatcttcacgccggcatcatcgaagaagtagctcccaaatcggagtatggcgacctcatcttgaaagtatctccgaagattgatttacttctttttactatttctttttttgttccggtcgccggacgtgttgcgtttttttaaccgttttcgttgtgagtatgctaaaacggacgtacaactcaactgtcgaactgggtccggggttaccggtttttttttttttactttttttttccg

SEQ ID NO: 182424 - DNA, 584 bp, Cannabis indica
catttatctattgctgatgtgaattctagttaaactagtagtaacaaggaaaatgatgatattaagtcaatcgaatattaatgataatgatggcctttccattttctggaatataagagaattgtaagtaattgaaagttaaggaaaagctaaatgcaacatgaaagactagtgtacagatcaagagtttagtgtaatacaatgctaagagactgggcaaacaaattgttaaacaagctttaatatcataatgaaacattgggaagatcagtcaacaatggactaaaaagagacttcaatatgatttagggaaaagttagcaaacaaaacctgataataatgtttgaaactaagcaaccctacaaggctttagtaattgtttaagtagctttatctgcggattagagtgttttaatcacctatatactgttttaaatcaaactatagttttgcttcctgagatctttccttgatctttgtttcatctctatctttttcccctaactattaacacactaatttcttttcaagaagtaaagtgaggttatatttaatttattcccgtgtgttactgaagattggtg

SEQ ID NO: 182425 - DNA, 979 bp, Cannabis indica
tccagagactttactccaccatcaagagcaaaaaagttcatgaattatccgacgtaattggccatgaatttcaaagtgtttgcaattttttctcaaacagttttcaaccctttaaaaggaaaaaggtattcctagttagatataatttacacgtttagtttaatttgtttgtttgggaaataaaagtacatattcatcatatcaatgcgcattaatgttgaagttgtttatttgttagttgcagcaagtgttggattttttcttgcgtgcgataataaccttggggaaccacattgaatttgttgtgaagccaacattgcaagatggaatgaatgttggcatcaaatggaaattaggtatgaaaatgtttttttttgggtaagacaattgtatttttcaggttaattagtacttactaggatccccttcttgttttctgtagagtgtagaaatataagtgtgcctctaggaaagggggtcagcttacatatgtaccacgtttatcatggaaagatagtaataaggtgttaaattttcttcaaacttaaaatcccaaagcacttttgattcaattgttgaggacttgaccaaatttacagtactactttttctccaggaatttagagatgttattggatccgctgctttccgttgaaccttttaacttggtaatttttatttatttatttattattttttttttttgtaaaacatgcataattcacttgaagagtgctaccatcaatctcatattacaatttcttaatcgtatcaattttgtcttattttgatttttccttcagagagctataagatacgtgacgagtataatgaaaaagttgagttctctcttgatcttcagggacaaagacaaaccacccgatagaaatgcatacattttgctctccctctttatcatggttccctttataatattattcagtttaactacgtattaaacttcttatttttttgagtc

SEQ ID NO: 182426 - DNA, 679 bp, Cannabis indica
atatactgatattgaagaaacaatgctaatatcaccaccaataatatgagtcttccaagtagtttcattttgatattttataactgatattttcatgctgctattcaaaactactaaaatttcaatctttaagctcatactatccatatcaccacctcagaaacttcaatttcttcaatcacagcctattaaaacttcaataaagacaaaaataaaacttgaagaatccaaattcttgaccctataaataccagcacctcaacaccatcacaaggtagcacctaaaaggttcagtacatctaacaggttaccggaaatgaccaaaaaatctttaactactaaccgagagtccttgcccatgcagggaatcttttaactgaactataaggcatgaatttaaaggaatgaagagaacctttcaaccctttcaaaatggaatataccatggttcctcacttggatacaatatctaaattcgatattcttagatacttttccaaacctaattctgatatagagatacttaattacattaatagcaatacaatctataaataccactaccttaaaaacagaacatccatgaatacaaatagctaacaatttctaaagacttcattgaattatgaaacataaatgattaacaaacataacgaagcataagattacattcctgtta

SEQ ID NO: 182427 - DNA, 495 bp, Cannabis indica
catttccttctttttctttaatcttctctctctctcattgttcagtttcaaaactttttttgcttaaccagtcacgatcttagacggtttatttcctcaaggttctatatattttgaattgatcaagtaagatttctttatgtttctgcatttcttttttttttttctgttcttcttctttaagtttttcgaaatagaactgatttttagggtttgtttttgtgatctgtaagagtttgaatgtggtggtatggcgattacgagaagttcgatttctccatcaccgtctggttcgaaaagaaaagatgttggtgatgaggaaggcaatgtgaggaaaatgtctttgggtgatgataagagtgatgattctgttagcagggatgttgtgaatgagaggaggagtaagaagagtaacgatcctgtgtctaaggatgttgtgaatgagaagagtaagaaaattaacgagaaggttgctgagagtgtgaagaagagttc

SEQ ID NO: 182428 - DNA, 931 bp, Cannabis indica
atatatatatagaaatatgagtagcatgtatcatcaccatcatcatcatcatctttcaggcaagaacataaatatgcatgtctcttcatctaataataattcttcaagaaacattcctccggaaaggcatttgtttcttgggaacggcggcggtggtggtggtggtggcggtggtagccatggagacgcgggattagtcctctctaccgacgctaaaccccggcttaagtggacttctgatctccatgagcggtttgttgaagctgtcaatcaacttggaggagctgacagtaagtatatatacatatatatatatatgtatgtgtaattttgttatctatatatatattaatataacatgatattgttatatgttatagaggctactcccaaaactgtaatgaaactcatgggaattcctggactcacattgtaccatctcaagagccatcttcaggtatgtatatgatatttatattatgtatgtataatatatatatatatatgatacaaattacaaaaaaataaaaaaaaatgttgattactaggtgtcatgttataaaaattcaaaataattaatattattttatgatgtatttaacttaattaaattatctaattagggagaaatatggacacataaattttgagattttcactatgttaattagataaataaactaatatacattccaatatatatttttctattacatgcatatattattattattattgatttgtatctattttttttctctgggcagaagtatagactcagtaagaatctacatggacaagttagtagcccaaccaaaattagtaagtaattaatattaattaaccatatcattctcattcatgttttgttttaattattatgtaaaacatacatacttattatttctaatatatattacactaatttaat

SEQ ID NO: 182429 - DNA, 734 bp, Cannabis indica
atttaaatttcacagttgctatctcatgagaacaacagttttagttcaaatgtcactatcattatctcatgagataaccgacaagtaagaaacctaacaacggttttaattcaaacgtcactgtcgttatctcatgagataattggcaagtaggaaacgtaacaacagttttagttcaaatgtcactgtcattatctcatgagataacaggaaagtacgaaacctaacacggttttagttcaaatgtcaatgtcattatctcatgagataaccagcaagtaggaaacctaacaatgattttagttcaaatgtcattgtcattatctcatgagattaccgataattaggaaacctaacaacgatttcagttcaaatgtcactgtcattatctcatgagataatagtaagtaggaaacctaaaagcaattttagtttaagtgtcattgtcgatatctcatgagataaccgagaagtaggaaatctaacaaaggtttcagtttagagtcattctctttcataatagtcatgaccacttcttcactttcataacggtagtgaccgtctcttacttcgtaacggtaatgacagtttttacttttctatataaaccgattcacagacgatcatgaatgtatcttgacatgctatgtggtacaaatgtactgttttttacattgcatttcaatttagggtgtcaaccactaaatggagaagatcaatgatctcgtgactta

SEQ ID NO: 182430 - DNA, 806 bp, Cannabis indica
caactacagttaccatcacaacaaacactgttctccatgttagcctaaacaagtttatactcaacaatgttttcttcttactactcatcatgatggtagggccagcaattgggtaattggtggtaatgaatcttgactcaggccacctttttctagcccacaattccactattcgaaacactggttggattagtacctgcatattatatatataaagattaaattgcatcaaagctagcataactttattattaattaatgcgaatataatatacattaactaaattagtaacgtaatcatcacacctgatatgctccaactaagtgcaccacgatgaagaggttagccaaatcgatgatccaagaagtctcatgaaatccaaagccagcgagtagattctcaggtgcatggtttccaaacgcggcatagccaaagcaaccacacatcagaaaaaatgttgtcatgattgatacgcctatagtactcgctttcttcatcactttgttttcagatggagatgacttcaatgtgtcctgatgaaatcattttattgtacaattatataccatgtttataaatggtgtccaattttacataaatgattaaatttaaaaatattaatcaaaattattaaattaagcaatcataaaatacatgtcatgaggggtggtatctcatgagtaactaacaatttttttatgtagaaatgctaaaaaggcgagagtgtctcagcacctcctcgttatcatatgttatgtgtaattagtatcgggtcctatatatttgctttcatttttttagtttg

SEQ ID NO: 182431 - DNA, 582 bp, Cannabis indica
gttatttataaatagagattatttcacaaaaacataaaaacaaaaaaaattacaaaaatacagttttacagaattttaaatatttttacgatttttttgattttatttacagaaagtacggtctttttatgttgtaatcttgttaattttttgttatatgtatgttattttttgttgtttattttcatgttacttttatgtaatttttttgttgattttatgttgttttcgtgttattttttaaaaaaccgtaaaaataaaaaaaaaatatttttaaacgtaaaaatgtaaatattttataagaaaattatgcctaaattattcctgataataaatatgatctgttaatgttggcccaacctaggctcttcgtgtaaaataatattccaaaatgctaaatatttcaaatttcacgtactgcatttttttttattgttattatatttttactgttatatgtatacaataatttttttactgtctaatttttatattgtgtattaagttcttgacagttttttttttatactttactattatttttttttactattcattcttttatactattcaatagtcttt

SEQ ID NO: 182432 - DNA, 818 bp, Cannabis indica
aaatcaagatataaagagtgaaaaagaaccatcaaaagctttgcatttttgtagaaacatcaaatttggccgaaccaaataaatgaaagctaaaaatatatatcccataaaataatattttttaccatactattggaacatatttttctttaactaaatgaactatattttagttttgaattattatttgcatctccaaactacactaagaacaatttccaattcccagaatgaaaagattgagaggctcctaaacattggcaggaaggagaaactcatttggggaacccttttgaattgttgtctattaatgctattaatgctaggttcaagcatgactgttttgagttctcctgtggatcccaatctcttctagttttgcaaaataaacatgaaaatgaaaatgataataataaaacaagccataaattaattatatgaaaagtgtccagaaatcagaaataagagttttcctaataagaaagcaaaaacaagtagaaaccataatagaaaagtgatagcatatatcacaggaatcagaaatgagagttttcctaataagaaaacaaaaacaagcagagaccataatagagaggctttgatgagaaaagctgaaataccacattaattatctcggaaggctgtttgaagtgaaattacgcaatggattctccctcaacagttgtgtttctgtcttaaggtgttggtcatttccctgtctaagttgaaaattcaaacccctgctgatgctgttgctctcaacatcttctttgggcatctctttttcacattcttcatctacaaaaacctcaatgcaa

SEQ ID NO: 182433 - DNA, 595 bp, Cannabis indica
atggaaaaaaaaaataaaaattttatataacatatttattttatatatatatatatttgtgattataatgaattagattaaaatattatcattattataatagaattttaacaattcctaacactttaaaatttataatttaccaaacattcatatcaattttttctacagtttctgcacagctgccttttccctgcagcacagctacagctgtctttttcccacagcacagttgtgccaaactggccctaaatataataatttttatggaatatcgttaatcaatcgcaaagcactacttttaggtagtactaagtaatactggtgcagaataacaatcctctaatgaatattataagagaaatttgaatttccatactaaattgaggtgtgtggtccaaagttatctcctcaaaaagaaaaatttgcggcaaaagttcttaaaaagttcagtttgatgtagataagtccccaacgtcaaaaaatagcggcaataatcttcaaggtggcatttttcgtaagtccgttagctttttttttttaactgattcgttactcatttaaaaatgtcaagtgttaaaattttattggtcca

SEQ ID NO: 182434 - DNA, 584 bp, Cannabis indica
gggatcgaaacatacatactcatcaaccctagtgagtttgcatatatatcatatcaacgcgactctatgcatgcatagtccttaatcgtccaattacgctgaaccatgagaaaaactcaaacagtaagtagtttcattaccccaaggtgactaattaacatagtgaaatatataaaatagacaaaaataacttgtatagatattatggtttatgttgtgagattctagagggaatgtatatggttactgttagatctttacagtgtactgtcaatgaagttattcagtagtaggaaaagtgatcatggaatgggttttcatgatgtaatattctataaaataataatttaaggagtcccaatcataatatgactcatgaggagttatacctagggacttataaaattcatacataaaatggagaaaaatttacaaaattattgggacagatttttatatttttactgtactaagtttataaaaaacactatgctaaaattttaaaattacaaaaatactgtatataaataaaaaaaataaataaataactagaaaacaaaattagaataacttaacaaacaaca

SEQ ID NO: 182435 - DNA, 616 bp, Cannabis indica
ggccaagatagtaaattcctatcctaaatttcctacaatatcaaatataaataaattataatgtttttgtattttatttattttctgcttaaatattgaaaatttaactatattactaattttaataatatactaaacatgaaggagttaattcatatcaactattttttcatgaccataagcaaaaccttattattttttaaatatgagcacttccaaaagtttttttattctattattcaaaattccaaccaaaacttcaattttttaattttccttcaaacatttacattaaaccatatattaatttctttattttttccctccatatatttaaatattatatttttaatttatttcattcattttataaaaatataataaaataatattacatatatgtaaagaaaagttaaaatataggataattagtaatttttctccataaactttcgacaatacttattctaccacttaaatatacagcttattaagaattccttgaacttttatatttacagagttccgtcccacttattctgttaaaatgctgatatatctttattaattaacaactttatcctctaaactttgacaactatcaaatcgaacccct

SEQ ID NO: 182436 - DNA, 666 bp, Cannabis indica
acatttaactagacttgatactttattaaactaatagtaatattgacatgtaagagggtgttagggtaaacagtaaccttgcaggctctaacatggcaagccttgagaatctgttcatattacacagtttatcaatgaaaccaaaccaagtactagaatatcaatagagaaagtaagatttgtcaaattaagacagaatcaagactctattaatattggtgtcaacacttatcactaccttaatgaccattcaaaaccgaaaccagttgccacagccatgtttgttgccctaatttgggcgcaattgggttatcctagctactacaatatatctttgcttccatgaaatttgcattgccaactctatctttattattgttgcttcatttggcttccttacttcgtttgtgatatttggtcctatgttacatattctaatacctttttttttgctgctggtcacagttgataagtgggttgaaaacaggtgggcaaattaatataggatattcagaataatattaattatcatgatgaattctactactatattttttgtacttataatgcttttcgtttatatatgttgtggatattatttaattatgtaattgtttgctagataatgagaagaattttggagagattagttaaatggaagaagtt

SEQ ID NO: 182437 - DNA, 666 bp, Cannabis indica
cttaaacaataatttttaatttggagccaaacactctattttttcttggtaatgctaaaaggtattagtgttctctaacacttagtggttgttatattacgtacatttaaatattatgtttcatataattttgaacactactaatatctaataacaatactaatatgtactattacaagtgaggcgcctcttcaaaataattgatttttattagttgaattaaggcgtcgacttatattacctacctttaagcctaaagcaccctattttgagcaatagaagccatgttacgaattattaatgatatctacaatacgacatgcaaatggaacttaaaaatcatatttagtgagctgctaactgctttcttcgcttatttatttttgggaaaattatgaaacaatcaaggtttgaatttaagataaagtaacaatgtatagattatagagttgttacccattgacattttatgaattagattccctgtttcgaggcacaccatgcctataaaatttaataccaagttgtaacaactaataaattgacatttagattaaagttcatcaatatatatttgaaaagtactaattacaactcataatcatattacaattctaaaatcaaacatctacgttgtaaaaatacatgctagaaaaactcttttta

SEQ ID NO: 182438 - DNA, 952 bp, Cannabis indica
gtgcttgaatatgtggcagctgtagttctctttataaattggagttgttgggctgtcctattttctcactccatatctggaaacataagtggggttatgttggagaggggaatatatgccatgagctgtggctcttttctttctcccatcttccatttcataccaactttttctttaaaaaaagaaaaaaaaaaacaattatttgtttattaattgattttttctttcttctttgacttgaaaggagtggagagaatctctgatgcagcaagaacagagaaagcaaacatagttcaatttgagtctcaaaaggagagaaaagaagaaaagtgtatggtttgtttttatcttgatgtttttccacatccctctctctctctctttctctccgttttccatatatatctccccatttctctccttgattccctacttaattgggctgccccaccatgatgaataatgggtgcaacttaatagcatgagaagctttgaaaggtgaaaaaaaaataagttgatgaaaatgctataatggatatttctttttgtgactaaaagggaaattcaaatgagttttctttctctctcttctattttattttaatttataggagggtgtggtgtgattggcagattcttttgttctttgtagggaagaaggaatcaaagaatcttacattagattttaggacccaggccataacatatttttcttgtaaagtagtagtaagctgagggaataaaaggaaaaaaaaagaaaggttgaaatcaaacaagaccttgtaatgaaatgaagatgagatacaaattcctatacaatgacacccctacagtatatgctttattgtaaaaaaattgaaagtgaaagaaagccatgatttgtaggatcatccaaataaagtggaaatctgaggccctgaattttatactcaaccctgtcatatcaagtcta

SEQ ID NO: 182439 - DNA, 733 bp, Cannabis indica
aaataaaatcaaaaaaatcgtacaaatatttaaaattcggtgaaaccgtatttttgtaatttttttattgtttttatgtttttgtgaaataatcccaaaacaaaaggcaaatcaagaacactagatttacaaacttcatctgaccttagaaacacattctaggtgactattgtttgagttccattgaatcgggtaagtaactttcactatgaaatcctatgaaatcaatcaagatacaatatccaattctgattacaactcaatcaaagtaaacagagatgaattcatacgaaaaattcatccaaactctttcaaaaataacttttaaataaaaacaaacactcataatagttagttagttagagcatagatgaattaaaatagatatttactaattgccaatacaatgggaaatgatattctagcaaagtatgattgacttggttggttatcagtttgaagattaaagaatctccaggaaccaatctgttgtctttagcaaatgcaggccatccaccacataaaaccactccaccgtgccaagttaacatcccaacagttcttccccaccttaagtcttacaactttcgggtttcccttaaaaacctagccttgaaaacggaattggaatgcgctgctgaaaataattcatgtgtagtttctacattaataataagagtaaaaactaataatactatttataagtatcatatgctagctagcaacctactcc

SEQ ID NO: 182440 - DNA, 891 bp, Cannabis indica
cgtcccctaccatacctcctacattgactgctgatttggagttgttggtcgaacctgcggaacttttgaatgtgcgtcaacggcctacacctacgggagctcctatagaagtgttgattcgttggaaagatttgcctcttttcgaagctacttgggagaagtttgacaccattgcaacccagtttccagattttaaccttggggacaaggttcgggattttggggggggtaatgatacaaatgtaaagcctcctattaagtttacttatgctagaaggggtaagcaaggtaaattggcttaggagagggtattttggtaattgtctttagtagtgagctaccttttgtatgggaaaggattgtgtgttttggttatgcaatttgtaatagagaattctctaatgcatcagtagggagctaccttagctctctgccgtgtgtagaagggaatctcatttgatttcaattcaataatagctcaccattgaatcattctcattgtgcctgtttatttgtgattcttgctgctggtgtactggttgttgagtttctgctgctactgtgtgtgttgtttgttgctggctgttagttaattgagttgcaggttctcatcacgatgcttcataggaggaggttgcactactgaaaaaatgaggcttctaacttcagatttttacatattttttctctttttgaataacactaaccgagttaaaaaagcctttacatcacttttaactccagtttttggattcaccgcgacaaagaaataaggaccgcgtttgattacgagaaaaaaaagatataaaacttccgttataagcgaggcaacttcatcccatattcctaattgcaggctaatcacatgtttatcatctgcaaattaatgat

SEQ ID NO: 182441 - DNA, 740 bp, Cannabis indica
gtatttcctccataggtaggctcttactgtccactccaaatcaaaacacttcaatcttaaccacttttttctacataaaaataaataattattctaatacccttttggacctttcaacaaattttcacttattttaataattacaacaaatatatgttgtacaaaaataattttgtataagtatatataataaaatacaaggcttcccatacttaaagctttgagaattgcagttgttggttgagtttgcccatatacctaactcatatccaaccaaaaagtctcatcattttttttctatcatataatgtagctaaataaatagtataatgtatgaaatacataataagatgcaacaaatatacaaaagtatgtgataatatgaatatgaaagatataaaatcactttttttaatatgtttatgtgatatatatttaatgagaattgctaattacaaccttttattataatttttttctcaatttcagtgtctgaagatacatgtcagaatattttttttctatggcagtatttgatatacttataacataaccctgtaaatttttagaaaattttaaataatttatagtgtcgaaaatatgtttgaagttatttttttttactacgcaatcaactagaatatcaagacttctgtaattaacgtatttattaatgcatttaatacattaactacaccttaatatatttataaaatattaaaatttataataattttcta

SEQ ID NO: 182442 - DNA, 661 bp, Cannabis indica
actaatatttcaaagttaccatctactctcgtattttcttttgctttaatccgaaaccctcttaatttttgagctttgcaaacacaagttacaaattaaaaccttgactcttgtgcaaaacagacagttacaatctaaggactattatataacgctaactaggtcaagtaaaatcttgaatatcagaactaagtagcaaatcatgggcagaaggatgttccagggctggttggatgggttgttcaacccgcctaactcacaactcgggttgatatgtttgtttgtgtgtttattaaagtctgatctgaaagcattttgaaagtttggttctgatcctggttgaggattaaaaggaagacacacagagagaaatgggaagaacaccatgttctgatcctctatatattaatggagagggagagagagagaagaagaacattgacttacttgtacaagtaacaaacgattcccagaattctacataggacaaggcaacatcttcttcgcgagcttctccggtggcgataccctctgtgatgtagcaaaggagtttaagaaccctaaaaacaactaataagaacaagaaaaatgaatcaacatgcaatttgtgtagtcatgtaaaattaacaaggaaagtgctctgatcaacatacaattgaat

SEQ ID NO: 182443 - DNA, 697 bp, Cannabis indica
gtttcactccattttattttttatttatggtgtactttatacagacgtttctgattcaaaacataaagatgtcgtttggagtttaccgattagactctcttccggcaacgagaacgacgacagggtgagtgagatcagtttgttctttctttgttgagcatcctcatcactgcttttttcttagtgccattcgatttctcattgtgcagtcatgccgctaatcgccgtctccgcggattggcctatgcgatttcttggtgctatgattcctgaaacaatctgtaatctttggtattgggggctctttctcggtaagaatttatagcctttatgttgtcatctgagaactcttattgtgagaataaggttttgttctttgatatttacgatctctttgaaggaaattcaaatgtcgaggtgctttgatgcctgagcggttccaatatccaagaacaatgagagtttaggcagctccaagaacggagggataacgctcggcaggctcttggacttgagcggttctagaatctgagcttcctcgaggtcaaggcggcttcaaagtccgagatagcggtaagagtcattccttccttgcaaaaatatattatataaatctttaattctctctgtttgctgcatggagtttttctcaggtttgtttatttctacgcgtggatttgtggataatctcaaacgg

SEQ ID NO: 182444 - DNA, 849 bp, Cannabis indica
gtgtttgcagacgatcgctccatgacaagaaagattaaaagctctgataccatgttgaagtctaagcaaaccagagaaagaaaagaaaagagaagaaagagagaattggctgatttcattaattgatagaatggtacaaagaaacacttatatacagctgaaaaccagcaacagaaagcagcagaaaaacagttagagaagagtaacaacccaactaacagataactaactcactaactaactaggtactcttaacagtacggactggacacactaactaactcatgatattatgggaattgggaaatgccgacattataaaatatcttaatttctatgttaaatattataggaatgctatatgctaattattgagtgcttttataatacacacttctaaaaaaagtgtaccaatacatttttttatttatttcggtatttaaaaaaaaaaattctagtctaatttttttatatagtcgtatacgttatagttatttaagacacattgtaaaattctaaaaaatttaaaataatttacaatatagaaatcaatattcaaacagtttctttcacacgcgtacgtgtgcaatagaaacgtatatgactatataaaaaaaaattaaaataaaaatttttgtcaaatactaaaatagataaaaatgcatcgttgtaaaaaaaatttatctcactatttacgcttttcttttttattaattaaaacttttataaaattctttttctttcccatatatgtctttatctttttttttagtgactttttttttctctcattttcttttttggtctgacttttttttcatttttttttcctaattttcttctctctct

SEQ ID NO: 182445 - DNA, 603 bp, Cannabis indica
atacacaaagtttcatgtcctcacacacatgaacaaaacggggtagttgaacgcaaacataggcacatagttgagagtggattgactctattagcacaagctagcatgcctttaaaattttgggacgaagcctacagatctgctgtttttcttataaacagaatgccctcacctactctacatcatttatctcctattgaaattctcttcaatgttaaacctgactatagctccctaaaagtgtttggatgcttgtgctatcctaatttgagaccatataacagagtcaaaatgcagtatagatctcaaccctgcactttcattggatacagcctctcacacaaaggctataaatgcctatccaaggaaggtcgtgtctacatctctcgagatgttctttttgatgaactggatttttccatatgccaatgaggctgtgcagtcatcttcttctctgtcaacttccaatactgcagccatgcctactgctatagcacctcagagatacccacttccatttcctccccctgggttctctcccttacccacatttcctaacactgctaccggtccaacaacacccatgcctcctgtttcagcacc

SEQ ID NO: 182446 - DNA, 877 bp, Cannabis indica
aattttttttatgcattttaagttttatttcattcttattctcattctcatttttatgttttcattctttccaatcaaatgctatcatagtattgaggaattacttagaaggatcttttttatggatggacctacctgttaaacaacaatttttatttatttatttattttgaaaggggctgtcaaacagcatttaagaattattattattattactgatattgttattgttattattattttgttttgatggatagtcaggagttgttttctttttgataaatttcacaccaaaataacatttagtgataatttgatcagggcgtgcgtctgcatccttaatacaataatatgttagaattattataatggactaatacaatcataggtttaattccataatacacaatcattaactatgtgcctaatgttactcataaccataatgggatggttagcaacttaattatatgttagaggcacatgagagcacccttaatactatagttggcccattaaattatagtataccataaaagacctcaaaagccctattagttaataaccccttagggttataagggtaataacatgtgtatatatatgtgtgttatgtgtggtaagaggtgataagagtttgtatggtaaaggaaaaaggggttagctccacaagtgctctctctagtttttgctcaaggattggtggtgattctcatggaagacattgaaggataatggctcacatggatggtatgggaggtatgtgttttattgtatttgatgctctaaataaatactagatcttggctttaatgattatgagtaatcgttattttaacaattggtatcaagagccaaagttattgattttagggct

SEQ ID NO: 182447 - DNA, 635 bp, Cannabis indica
agtatttttgctcacccctactttctacactcagaattttctaaaatttccaattgtgttagatctaagctctcagttccttcaaatacataattaggaaggtttcccaaaattcttcaatgctcaaaattggtctccaagttcgaatgaaaggaaacattgctccaactcgttttataaacaaaatttgagaaattttaccttttttttgcaaaagtcgcggctctcatttcctgataatctgttgcgatgaccgatagtattttagccataactctcttgatatagctcggaattggatgattcaatatgttttggaaagttgaaagagagatttagagctttaatttagaaagtttttcttaaaagtggatggataatggtcaaaaattagcttgaaacttcaggctttatttttagtcacaaacaaagcgtgttaagcatccaaaatttaaaatttttcactcattgtatcttacaattccaaaactaatgctaaatccataaaattcatattatttagcatatttcttctcattttaacccacatgatatatttgactattaaaatctgaaacaaaaagaaaaaaactgtaaatctgaataaaagtaaataaaaactactaaaacatata

SEQ ID NO: 182448 - DNA, 623 bp, Cannabis indica
tcctttatctacataagctatctatacgtagaagattttttttttttgtaattcactaagtaaaacatccataggagcactaattctaagaagctactagttcaagaaagctatacaacattatcagcataaattctaactaatcatagaatacttacgacgacatagtgagaggggtctttttcgattttctgtatgtatactgtgggtattcttcgagctaacgaacgattgactctgataccaactgtagcgtcccgatattttttccttactttacaaaaatactattttaaatgcataatttgagaatataaaaaaaatccttaaaatacaataatgagttttagaaatcaaaatgcaatagagaaggatccttcatttgtaaaacaaaatacgataagtaaatcattttaaataatacatttccattgtgtttagatttatcaactgctttaaaataaaacagacaccaccggcgttctagattattttcccgtccgtagccgctcaaagtatatacatactttccagtctaatacctgtaggggaagtaaggggtgagctaaaagctcagcaaggaatactatcatacaataacacataatatcacacataccatt

SEQ ID NO: 182449 - DNA, 656 bp, Cannabis indica
ttccaagtcgtgtaccactccaatgacccctggctacaagttaactacaacacctagtgatgatttctcagaccccacactctatcgaagtactgtaggtgctttgcaatatttgactctcactcggcctgacttatcttttgctgttaataaattaagtcagtatatgcaatctcctactctagctcactggtgtgcttgcaagagggttctacgatatattcatggaacattaaatcggggtcttgtttttaaaccagctaaatggctttctctggagggattttctgatgccgactgggcatgtgacatcattgacaggaaatcggttactggtttttgtattatgttaggaggcaatttaattacttgggcttccaggaaacaaaaagcagtgtctagatcgagcactgagtcagaatacagggccttatctactactgccacagagttagtttggatcacatcagttctcaatgaacttggcctcactttgcctcaaaagcctaactttggtgtgacaatcagggagctcaaatgcttgcctctaatcctgtttttcactctagacaaagcacatagaagtggatgtgcactatgtcgtgatctgtttaaacagcaaatcgaagtttctatataccttctgaagagcagcc

SEQ ID NO: 182450 - DNA, 601 bp, Cannabis indica
gtgttcatggggcttgtttacatccgcagcctgacatgggactttgcatctgaagtgctagttattttgattgtgtgcagtgtcatgggaatcattgccggattgcgcaccacctttcctctttggatgtctttgttggccattttgctatatccattttctcttttgctcgtctacatcttaaactacgtatttggctggtcttagctaaacaaatcagaccatatacccttatagcttcaatatatagtttttacatcattttatatagatatatagcatcatttttatagccttctgatttttaatttaattgtaataatttctttagttaggaaggggtatcccatgtaaaaaaattattaactttagttatgatgggtttctttagtttctttagttattttatttttatgtattataaaagatagcacattcaattttattttattttttaaagaaaaactgtggtataatttttttaaatgaaaggtctcccaaagttattcctgaaaagttatctatctcctggaagtatgttcttggataactaatctgttcatctggaagaagtctcgtgaaatgatagttgccatccgaa

SEQ ID NO: 182451 - DNA, 831 bp, Cannabis indica
cagaatacaagtgtacataaaaggaaaactaacatggcttgagaaatcgagtaataacttaattgaaaaatagtataagactaaagaacttaactaattaactaactactaagtggactgcataaattttgaatgaacacgtggcataaattttagtgagagttgatccaacactcttaatataaaccattctaacagcatcatctataataaagtgctaaaaatgtatactgtatagttatatttgagtgcacttcaaaaaaaaaaaatattctaaaaggtataaaatttgacccatataattattatgattcattaattattataaaaaattatattaattctttttttttattcatactattatgattttgatttttttctttttaatttatatttagtgcattgaagcacactttgtaaataatacgccaaatataatataatttcaattttttgtgctaaatttagctaagtattaagttttatatcaacattagagatggttgtgctaaatttagctaagtatcaagttttatatcaacattagagatggttcacctactcccttcttttagctttaatttatttttcaggcatattttaaaaaacagaaacctcatcttgatctaatttggtcgatttattattaattattattattattattggtagaaaactaacttccataatatataataaaacttgttttaattccttaatccctatctcaaatacatatgaatctgcccttttttgtgtagcaccatatgtacaaaaaaataagaatgtcttgggtttgtaatttgattgagatttgtctggactaat

SEQ ID NO: 182452 - DNA, 599 bp, Cannabis indica
cttgtatggatgataagccacgaaattaagagagaaaaatagagagaaatttcgaaatccttgtgagatgagtagtgcccacacacatcaagtggtatctcaatcatagtatggaagactatggaatttctgcatcaaagaaggagaaaagaagatccaggttcagatcttggtgatgctctgctacagaaaggaatcaagggctagagatctgaacggaaggagtcatattattccgctgcacccactgtaaggttttctaactttatatgtgtttattttcattgttttagaattcatattaggttgttaatccaacatacttgttagtaaatctagatcctggtaaaataatttccaacattagggacaagaaaaatagatgccacattaaatgaaatgcatctacccctcttacctacaggcagttcaacaacttcacccataataagtaccagctaccaatacacgcacaaaaaccacaaaacaaaccgagccccacaaaaaagacagaccaaaaatggaccagacaaaaggaataaagatccaaaagatagtaattaaagaaagacaaaggtacaaacacacaacaacaaagg

SEQ ID NO: 182453 - DNA, 508 bp, Cannabis indica
ataatcaagaaaagaaaatcaaaagaaatatatgacaacacgttaatatttttcttatatttttttttttatttccaccattttattataaagacgattcattaaatttaatatatttagttaaataaaagtatatttggtaataaatttataaaataagtagattttaattaattttaatatgtgactatttttttgattaatttataaaaaaaaagactggatttatcccataacaaatactcacaagatcattataaagacaataaatatatacatatttattcttgcacattaaaataagagtaagttaaaaaaatcaaaactctttctttgtttacatgtacaaacaacatacataaaaaactaacccaaacacattatgagataatcaaaaacttaaaaaaaaaaaaaaaaaaaaactactcctactagaaacaatgaagtttactaagtaggaaaaagtaaataaaagtaacactactaaacttaaactaaacccaactac

SEQ ID NO: 182454 - DNA, 786 bp, Cannabis indica
aattattttcttaaaaaatcacatctctactaataagagttttaaaacctcctttccctcctgtagactttaacaccctctggatatcccagaaaaatacattttagagttctaggctcaaatttccctatgctttgatgggcataagctgcacatccaaagactttcaaattacataggtcaggtggtttaccagtccaccttttctcaggaattttaccttctatggcactagatgggcttatgttaattaggtatgcagtagttaccactgtttcaccccagaatccatttgagagccctacattgaaaagcatgcaactggctttgttaagtattgtcatgttcatcctttcagcaacaccattttgctgagggatttttctcactgttctgtgcctctgaatcccattatcttagcaataacttataaactcatcattgcaaaattctaatccattatctgctcttaaggtttttagtttcctgttagttagattttcaacaagttatttccagtgtacaaacttttgaaaagcttcattcttgtgttttaacaaataaacccataccttcctagaataatcagcaataatagataagaaataggcactgcccccaaaagttagggttttctcaggaccccataaatctgaatgaacataatctaggatgccttgtgatttgtgtgtgccagttaaaatttaagcctatggtgtattcctatagtacacaaaattcacaaaaatctactttagttaccttatccttaccaagtagtttctg

SEQ ID NO: 182455 - DNA, 1355 bp, Cannabis indica
ttttttaaaaaatttaagaataatttgtaatataattgatgttgtataatttatatacataaaaaattgaagaaaataatagtaaaattaaaaaagtataatttaatataactttattttataaagtattaaatttttttattttaggaaatttaaataaaaaaattagtttaaattataatcaattatataaatttttaaatgataataatttgttttaaaaaattattgatttacatttgtttaattttagaaaatatgtttagtaatatgatattttttaaataaattaataaatatcataaatattaaaaattaaaaagttaatagagaagaatttgtttattttttaattccaaaattaattgtaattaaatgaataaattttttatttaaatttttaaaatattattgttatacttaaaagatgaaataatatgtgtgtaattcataaaataatcataacattttacaaatatgttaataagaaatagttgaaaagaatatgtcatagctttggtaaatttacaaatatatatcatagctttgttatatttgaaaatttcgttgattttggataatttgggagttccttgcaggagcaacaatttttttccaactcctattcttaaccaagctgagttgggaaatctaacactgggtttatcatcagatcaagcatatgttccttcttgccacggccatcgggaactcgtaatgataataatgcggatcaagactttataactcgagaccttaatgaaaattttatggaataatttgtttatgttttttaataatttagtttaattttaagacaatattgtaatagaattaacgtcgaagtagtttatttttagacatttttaaattattaataaattttattagatttaaattatattatttataatttgatttattatatttaaattattttttataaatttattattaattatttgatatatataaataatattatttataaaattaatatatatttttttgctttaaaagctatgtgcggcggaccattagtgacgaggtcccgctgctaatggtccgccgctaatactattattagcggcgggacccaattctgccgctaataatagtattagcggtcatttattagtagcggacctttagcgaggaacttccgccgctaataacctattgcggccgattggagggctattagcggtggagtggtctgccgctaatagagtgatatgttgtagtgtgacggttgtccggtgctcagtcgagtttctccaatatacacctagctagtatttctagtttctaagacaccaaatgtgactctagtgagggaagatgtaattccagtt

SEQ ID NO: 182456 - DNA, 576 bp, Cannabis indica
acacagggaggaccaactcttccaatggattttcctactttgatttgtaccgccccaccataattgagccatcatggattccaccttttgataaaagtagtggggtaacttaaagcaagtcattacataagacggaatcgcttgaaccactgatttgagaagaatttctttgcctccttttgagaaaaaagttgagttccacctattgaggtgggaccacacacagtcttagaggtaaacaaaggcttcgtttttcgaacgcccaaaagattgaggcaaacctaggtatttttctatagaagtacgaataggcacattaagcaaagttgtgatctgatccttcacagaggcagtggtattgggtgacaaatagagggatgatttgtcataattgacaagttgacccgaggccaagctataggtgtgaaggatatccttaatttgtgcggctgtaataggggaggcagcactgaaaaggatgttgtcatcagcgaaaaaaagatgggagatgataggcgcattctggtagatcttgagtccaagggcatgcttccagggaatgcgttgatggacatg

SEQ ID NO: 182457 - DNA, 655 bp, Cannabis indica
aactgctactaaatacatgttttcattttattcgtgcaaattaaattaaatcgagtattccatgaacactcctaaattagacacagaaatttgaacttttgctgtcataaatcaacattgctatgaatttaccgtgacttgacagaaacaattggtgacatgcagattcttgattgcctaaaatgacattccgattgatcatctgtcagactgtcaggtacatgatatatgcgattatgaaatgcttgatttcttctctaatctttagtttcgtacacactacctcaaataaaggttgtaaaaaataggagtatcataatcagatatgcataatagagcaagtaggagtactagtacacacacacataggccagactgatggaaatagaggagttttaccattttctccatcagtttttatcgaaatattagagggatttttagaattttccctagtttctataggagattttctacaaaacatcgtttcctgatttcgttaaaatatctttttagtggctgtaaatacttttcattagctgtcttttgtatattgtattctctaaagcctactgtaatctatgatatttttcaagaaaaggaattcattttttttcatcaaactttcagttttcatcttgcaatgctcaggagg

SEQ ID NO: 182458 - DNA, 623 bp, Cannabis indica
tgttaaatatgtcaattttttatttgtgtcataacgtacatttataaaatatattattgtatcgtgcgatctgctaagaaattgtattgtattcgtgtttaaaatcttaatataattaataatcgtgtaaaagtgtcaccacgaatacaatacgataacagtaattttcagctctaattgtagtttaatttttttttttttaaaaaaaaaaaagaatgtaaatgtcaaatatacatatgttagcaaaatataattaaagaaaaaaaaaaggaaattgtacattgtgggttatataattttcagtattaaatgtcaaaatataacatattttaaatgtaaaaataaaaagttaattaaattttaaataatatttttataaattaaattgatatatgtgtatgttgaaaatattttatttagaattaattttatcgttgtttatagttaataatttaagatttttttacagttcagtagtcccgtgatccgtaaggggaataccgcgtaagctgtacaatcccacaccgcctgggaaaggtcaaatgggatgattctgagactgtgtagatagtgggactacacagttgaagagagcttaaatagattgattggtactacctata

SEQ ID NO: 182459 - DNA, 690 bp, Cannabis indica
aaaaaaagtaaattgaattggcgaattgattttgttttttttcccttgttttttatccactatggataaattattgaatgtataaaaattctactacatttcaaattgtgcaaatgtcttgtattgagaaaatatcattagttgatgatgaaatataattttaaataaaaaataaaaaagtagagattgataattgatctttatttttagcttaaagtaaaactctttatcactaaatcaaataatattatatttttttattatttaatattttatttatatattaataattttttttccatatttcggtaaacttaagttggatgcctgactcgcctactcttattgcccatcaaatacatttttatttgaataatagctcacccactcacacacgctcaagtcaaattccaagtttagtcctccttatgcctaagtttttctttgaattttagtttggttaggcaagatcttcatatagcctcctttaaaaggagcataattttgttccatttatctccataatcattggattatgataggattaatctaacaatcgttaattatggatagttaaattacattggagctcagactatattcaactttaataaaagtaacatatgtacatatgttatataaatgagacacatgtttgagtacgacgagttcgagcgagtcctcggttgc

SEQ ID NO: 182460 - DNA, 846 bp, Cannabis indica
aagggttggtggggctggctgaagaaaaagaaaatctttgtccgctaaggattcacctaaacaaatctaaattcatcaatttattactaaaacatagttctttaatctacttaaaaactcatcattaagtctaagttaatgcttttttttggtttgcaagctttaagttaggttttttgtctaactaaaagtagatgtcatatttaattttaaattgttaattattaattttttttataaaaattaaaattataaaaatggaaaggcagtttaaaattttaaaggaaaaaaatgataaatattattttagaccctgtattttataaaaatatcaatgtgactctttattttgttaaataaaaaattagatcctgtatttttcaaaatagtacaaatagtacattgagtttattttttattcaaaataaaacttaataataatctgatctacctatatgtcttatgacaagatttagtatattttttacatctcttcgggctagaaattgtcttcaggttggttacattaaaaaaacaaatcagtaaataattcattttaatttgttctaggacttaaactcaaaacttatttttttaattgataaatatggaaaaagtttaaatatggagaaaacactagaatcgaggtgcccaaatctggcctcatctgggtaaccggatttattaaaatacagggtagcgctccaacttgaagcccaagatagtaaaatacaaggtccaaaataatattaaaccaaaaatctaattataaagagcattgctattggccacttgctcagtgctttttatggtaagcgctccacgattgattagtgatattttcta

SEQ ID NO: 182461 - DNA, 620 bp, Cannabis indica
ttcactacggatgaatatctatcgtcaataaactccattaaataacaaattttaaagtttttagagattatacattttctccaataaagatagctataattgtccactcatcaatcaacacaaagaactcgatacctagaaaatatttaaaatattaaattaaaagcttactcgaaaaacaccacagtaatacctaaacataattcaaattaacaattcgaaacacttcaattttttctaacatttttaaatattgaataaaaaagttttaatagattactaagtctaatatagcattcatgtttttttcaaaggctatcaccataaataaacactgacagaaaattaacaatacacaattaaaaatattattaaataaaactaattaaaattaaacttataataaactttttttcccaaactatagttaacttatacacaaatatttatttatacctaaattaatactattttatatttttactaataaaaataaataattttacctaaactaaattagaaaatttaaaacatttttacaataacaaatgatataaataaaacttttactaataacaatttatacattaacaaataacaactatttttaaattaaacac

SEQ ID NO: 182462 - DNA, 658 bp, Cannabis indica
aattctcaaagtaatcaatcaaatgtggctctgataccactagttagaattttttatcactcataaaatatgcaataacaagattcaattccatagatgaatatattacatataattataagtgtataactaaagatctaaagaatacctttgttgattcaaagagaagaactcaaatagcgtaagatagcggaagcgtaccttaatccttagatagtgatgatctgaatccatcttgtgattttggggaatgatcttccaagaaaacaagacttaaagttttctaattttctctcttgatgggggaagatgagaatagaaattggttcttgtttcttgggtaccactaccaatttataaccttatagatagattattaattttaagtatttctaatttagtctatcaataaattagaaatatcacttagggcagtgacaaagcaaaaatttcagctaagtgagggcttaaatattttatttttcaagggcttgaataaaaattaaatcaaatgatttttattttttattttaaaaaataataaaaattgaaatgaaatgaaaaaaaaaattgttaaagagactattacaaatgtattttgcaacaaaaaaaattgttgactgttttacgaaagtggtgttaaaatttagtgatatag

SEQ ID NO: 182463 - DNA, 643 bp, Cannabis indica
aattcttcaataagattatcaagatttaagatttttttattcatgtcaatattctaaaatgttcgagtcaactaatccacctttttgttgaaactttagacaagagaacaaagttctttgtgacctttgtctacggttttaatgatgaggagggaagaaaggagttatggaaggacctaaaggagctcaatagtgataatgcatggttggtactaggagactttaatgacatacttgaaaaagaggagagagttggaaatagagttcggttcaaaaagtcttcagcatttcgagaatgtgttgaggattgtaagcttgaagatgtgaaatttgttggtaagttttacacttggtgtaaccaacaaaaaggagatgataggatatactccaagattgatgggtcattgcgaacccagaatggttgaacaccttactgctgctgaagtttgtttccataatgagggaatttttgaccattctcctgctgtggtcaccatccgagaggaaatatcagggggaaaaaaccttttagatacttcaggatgtggtctaagcatcctgagtacgcgaatttggtagctgaaagttggaatcaggatgtgcaaggcaccaaaatgttcaaagttgctacaaagttgaagag

SEQ ID NO: 182464 - DNA, 600 bp, Cannabis indica
cttgatccctggaaagggtatgtaggcagctctacggagtgcagccccctatcataaccattttttttcctttttaggataatgcgtcattcaagctatttgacatacaacatccatttgatagtttcatttgacaacccaccgaacgaaaataaattcaagacaatattctactgaagtagaagcacaacacatacaacgaaccacatagtccaaacatcattccaaaatactaagtctaagtccaatttggctgacctacatttagactaaggggaaaatggggcaccagacccatgcaagtcagccaaccagacaaaagttcatattacaacattaaaaacataaaacacttgacatatagttaactcaagaaagatgtgagtcatccaccgggagatcgttcgtagtcatctcttcaaacgagttagccagttggctagttcgagcgtcttcctcggccctcatccgcagcaattcttcatagtcagcaatgtactggggtatgtcccaagactcggccttgttgtctcgatactccatcgccatctttccgcgacactggatctcagcctccagtccaatttcgactaaccgacc

SEQ ID NO: 182465 - DNA, 634 bp, Cannabis indica
tagtgtccattattgtcgccgattaaaatgcgaaacattcttcctattactcagtttttatttatttaatcatatattaaaatttctctaattttatcttaatagacaaaagttaaaagtacccctccctcgcaatcttcgccgaataaaaatcacaagtgacaaggcttaccacccatgttccactttattacaatccctttttcatttttcaccattattattataaaaattaagatttttatatgtgaattttcaaatttgagtttagaaggatattcggtaaatattaaagtttagtaacataatttaataattagtaaaatagtaaaattgaatcaaattagataaaacttcttaaatcaaaaaatttcaatagtttacgaagaatagtataattaaatgaaattagataaaagttcttaaatcaaacaatttcaataatttactgaatatttttaacgatcaaaaaataaataatttataacatgttaaaatttgagagaaaaaatcaaattagtctaaaaattataaacaatatacactttttaaatttcttttaatttttattaaatttattatttaattttcgttttaaaattagttcatactcatactcatacattcggcatta

SEQ ID NO: 182466 - DNA, 616 bp, Cannabis indica
ggctcaaacacacacacacacatccataccgatacatgtgcaattagtacaaaaagacaaagttaaaccacacaaacatcaccaaaatgaccaaaaacacctctctttactgtaaagaaacaatattttaaactaaatagagacataaaggaatttaaaaaaaaaaaaaactgaccataaaatggaatttcattctcatcatccttaggaataggccaacccttcttccttccagcatattgcttcttcctccccatttaggggtgttcaaagatcaaaaaacactacctgaacaaagatctccacatacttattatgaaagcactatatgaaagattcccacccaaacttagaaataaacattaacacaaaaaaaataccaaaactcacacctttgattttcgaatttcagctactgcgtagaaggagaaaacccaaaaaagatggagacgcgagttcgtggctggtgggtcgtcggtggtggggctgttgtgtctggttggagtcgtgaccgtgcgtctccgtcggttccagaccggtggtgggtgggggtggctaggttcgcgtggctgggtgtggggttcgtgtggggcgtggctggtggggtatcgtgggg

SEQ ID NO: 182467 - DNA, 959 bp, Cannabis indica
tcaataaattcataaacaaataaatcagaacaattcaaaatctcaaatcaagaaaattaaaagtttagatttataatctttacaaatataaaaaacttaaatagatttatctaccattgttgttgccgttgctcagttactggattcttaaacaaaaaccactaaaacttatataaaactaatatttacgtggctcgccacgtaactctcatctagtatataaagaaattttatcaattattatgaactttatgtctagtatctcaaattattgagatttttctttttttttattctagaactaaaagattcaattataatgtaagctaacgataaaaaaaaaatgaagattataatatttacaaataccataatcacaaaaataacactactataatattgcttatttatatatgagataattataaaaaatacaaatttttttagtaaaaaaaaatacatttttatgttgaaatatattttttttatatttttaccgtttataaaaacaacaccaaaaccaccaaaaaattacatataagtaataagaaaataacatccaaacaatatcaaaataacaacaaaaaaataacatacaaataataaaaaaataacaaaaaagtaaaaataatacaacataaaaatactatattttctagggatgatgagcatcatccaattcaatccaattgagccgaacattcaatccaatctaattataaaaagttggatatccaattacaattgtattggatgctaaaagttggattctaattgcattggatcggttattggatgtcaatcttaaaatataattaaaaatcgatcaaatccaattatatttatatatgttaaaaaaatatttatataataaaaaatataatatacattaattatatttttattagatttttttgtgtgttgaatttgtaaaacttgattgttttgtgtatttattt

SEQ ID NO: 182468 - DNA, 866 bp, Cannabis indica
aaaactgccaagtatgcagtgacagactgtgatgcttaatcttctctctctctctctcttatattaggcaaaaaacataaaaatgagtattttttttttaatttttttacactatgtttggttgagggtagaagaggagagagggagagagattaatgaattctctagtttggcagggaagggagagatttggtgaaaggagactctttcctttaaaatatacaatttctaatcccttaaaaaataggagaattgaagaaaaaaaaattaaaaagctatctaaaatgatttttgttaaaaaaaatttaaaatttaataatttggatcaatcaaaaattactacataataatttacttaacatttcatagttatgtatttacaaaaattttaaaaatataacttatgtattattacctaaaaaattaaatttaaatatttatttataatttaaatatataattatattaaaaataataaaataataattttaatatttattttactttttacttcttaatatcaaacaatactaaagagagtctccatccttcttgctctcgatccattcacctcttctccattcacctcttctccattcctaccaaacatagcttaaggctttaaaagagaataattttgtcaaggggatgagggaatgaggacagtttggtaagtaggcctcaacccaacctagatttggagttccctcttcttgggttgactctctctctctctttctctcttgaagacctttactttaaaatacttttctttgtcccaaaaaaaaacttttagtttgattttaggtaaattaatttttgttaccctagtgattaatgctccttctctcattactgttcacctc

SEQ ID NO: 182469 - DNA, 707 bp, Cannabis indica
tgtctcgggagacgtcaaaatggtcgcaaattgattgaatagattcttcatttaataaacactcttcacgagatatgccataatgaatgttaaatgtttgggctgatacagtctttctgtctccctatccgtcagatcttcagatgccaatttggtgaatgatctaggtcattcgcttcgcgtggaaggcactcctcctggtacatattaaatactcatagcgttctcatctcctttaaagtttcaaattttttgcatgctctccacaccagagcttttgcaccttgtttcatcctactttttgctttgcaaagctcaatcaatcgaaccatcctcagtcgtgcacgtatccgaacacggcgcagttgggccattcctcgtaactgacaaatatactaatatttatttctaatacctccaattattttagtataattgtaagtaagggtcgatcctacgaggactatgtttttttaatactcaaaaattgtgacaaaagttgaaaatgggttttatgtttagaagaaataacataataaaataaaacaattaaaagtgagactacaatatgagaaactagttaaaggttattcaccaccctcaacaatcatttctaatttctattagtgaatgtaatttaaattttcaatcaaactataatctcgcagataaagctgaaagcagtaaatattcatatctccctattc

SEQ ID NO: 182470 - DNA, 738 bp, Cannabis indica
aggggctatgtaagtttctatctcatggtgacatactacaagctgttatatgaccacaccggtgaacgattctttttttttttgtactcctttcagatggtcattcaatttcttcttctataatagaaaacttaagcgggttgtgagcttccgattctgctgtttaaggtagggataaacattccttcaaactccttagaattttgaggttttacagttattacatttgggatattcttttgaggcttatctcctcatggctctatgctgtagtaacatggtgtctgatgaattccacatcgatgatctacgctacgaggaagatggagaaatttttgatgttatggacatgtaaggtggacatgctgttacttggttaggatgctatatgtgaattatgtcaaaactcttgacatgtacctatattaactttctaggttatgtacccttgtgaccctaatagtagtattaattagtttgttacttgtagaagtagattagcctttttagttctggttgttcttactagtcgtcctgtagataggaatgttgttgctatgtacaggaagtcatgtatctcgcgggtatggatgaggccatgagccaaagattattctattatgtgtaatattttatcatcgttttctgaacactagaagaatctgaaacgttctttcagacacaagctctcatagaaatggacttaatcttaaattcatgctagagcattgtattggg

SEQ ID NO: 182471 - DNA, 789 bp, Cannabis indica
catcctataatcccttcatcaaaatgcgactgtactttcaaacagtagcactctctgtcacattacaaaactatgacgttatactcattatttggtcattggtacacaaaataagatgcattcatatatcttattttttctttcattactctcgtgctgaaattatacatgaccatcatatagttagtccatgcataatatcaccaagaaaggaagaagtatttaggattatttgatatatattagatcttgaatttgaattaattaatttttgtttgattggaggaaaaacttatgaatatattggctataaaatgttagagaatttcacacatgataatatgtaaaaattaaatactatacatataagattagctactcctcttatagtcaattggttttgagatggaatatcatgcatcttattttcatgtttctcaacatggtaatcaaactaaagctctaacgagtaaccgatccaaatccaaaaaccattccaaaaaaaatcacttgtgatcgagtcgtgtaaaattgattaacaaataaatagccaccggatgttaaagagtctcacattgataatatgtgaaaattaaatatcatacataagatacatgaactactcatctcttaactaattggttttgagatgaaactcaatatatattatcccatgtttctcaacaaaaaataaataaataaataaataaatctcatcatagtgtaattacttgagtattattttgaagtttaacatgtttttttttcaaagtatatacttcttaaatg

SEQ ID NO: 182472 - DNA, 726 bp, Cannabis indica
agaggggcaagtgaagagacctcaaggagtagtcctatgtggcacatttctgacaccagttcccacaaaatcaggggtttgtctcctgtgtcaggcctaagaaatgtgcacaacaccaaaagtgacataccttttgtccaacaccttcttctctaatgggtactgagcatgatcggcggcacatgcacctgtcactgtcaaatgttccccttccaaatggataaccattgtctcacaagttggggcttcacctaactaacacaaagtcaatataattattatattttacctcattagtgggcttagttaacacatgcaaactcgtaaactgactttagcctatacatagagcatcatccattcatgttagggtttgtaactcatttcacaaattcaaggataatgtttagggttctaaaactttggtaagaatactcttgtgtaaaaaataatctatagcttttctagctcaataatattgactcatggactaaggctctttaacgccacaactcgtaaaaaattatcttcttatttatctcttgaacatttttccttagcttaatttatgattcattcattttctaaaaatatttttcattaagatgtgagaaagtattatccattgttgtcatttataataatgttcgccactagattcacagtgttcgtcaagactgtgaaaatgatgtcgcagacaatgagttaaactgccccccccccccc

SEQ ID NO: 182473 - DNA, 611 bp, Cannabis indica
gttgaagagatattggtcactttagtaatttacttttatatataaattgataaaaggaattattagtaatgtagcagctcacttttttgtgagtgcctctatattccatcttgataaccttttcaatttaaacactctttcaattgatttgttactaagtttggtaactgatttaatcgtttagtaaaatgataactttcatttcaaaagaaaatatatatgattatacggaaatttaaatatttttattatttttaattttatttataaaaatatagtttttaatgtattttttgttatactcttgttaatttgtttttaattttttattatttgtatgttatttttattgttattttgatattatttgaatgttatttttctattacttttatataattttttattaattctatagaccaccattcaaatgttaaaaaaaaatatttttaaacataaaaatataaaaattttacaaaaaaataaaataatattttatgtaattatcctttgataaaataaaatacatactatttatccaaattatcaaaactctatgattgattaagatttgatagttactagttgtaatataaatatcataaattact

SEQ ID NO: 182474 - DNA, 676 bp, Cannabis indica
gctaacagaaatcgcacaaaaatcgcacaaaatcgcataacatcgctcaaaattcctaacaaaaacttgaattcaatattaaatcgcattaaagtcacataaaatcgcataaaatcgcacaaaacaccaaaatgcagaaaaaccaattccccctagcctacattcatccctaaacacaaaaactagcaattcgaaactttaataaactacatatttcagttatatcacagattcacaatttaaaggataaattgtaaaaaaaaattaaaggaagcccatacctggttcgtcgacggtgccggggacgatgatgaacggatggagtggctcgtgggtcgactgggatcgagtggctctcgtgggtcgactgggatggagtgggtctcttgggttgtcactgttcgtgtggggtcgaatgggttcgtgtgggtcgacgtcgactgggttcgttggtcgactgcgtgtggtggttcgaatggtgtggtggttcgaatggtgcggtggtgagaatgagggttaggttcgaataggggaacggtggtgagcttgaaaccgagaaaggaagagaaagagagaggagagagagggaagttagagagattggggggaattgaaatgaggggggtattttcggaacaaattgaaagctaagaataattatcaaatgtatattttt

SEQ ID NO: 182475 - DNA, 514 bp, Cannabis indica
aaacattagtgagaatcagattgtcatttatggcaatggtgccactttgaaatacagacatactctcattattagggaggataagtttggtcttagaagtgcaatagatagttcgaaacaacctggcattattgcaaatgtgtctcgtagctcctgaatctataatccaagactcatttaaaggagacatagagtttaaagataagatgatacctgtcgtaccagttgaggtacttggatctgaattggtcataccagtgttttggttggcaagtaaattcagtaactgctgatattggacagcattgagttgagggaaaagagttgtgctttcctcgcaattttctttcgaatctttgctggtttgcacctggtttgcagcagcttccttggactgatttgacttgtatccaaggggataaccatgtattttatagcactttttcgatcgtatggccaagacactgcaatgagtacaaagggtctatttcttttgtttgctgcccttttgaac

SEQ ID NO: 182476 - DNA, 582 bp, Cannabis indica
tttgtaatggtaaaaccgtagaattatacacaactgaatattatgattcatgggcagaggtttctatcacagaatctgggtacaaagacagtgaaaaaacaccctttaacaagttcgatatgatgttgtaatttaaaaaagaagaaattgagataaactataatccataatagagatacaaaagcaaaataaagccttagaaaacaaaataaaaaaacaaaaaaaaagctgttaagaactaatgagaagagaaaaataccagtggtatattatataattatattatattattatatttacctatttttttttatttaaacgtttatatattgcaactatgttttaccgagattcgaatccaagaccttcaatacacacacccactccacttatggccacttgagctagcctcgggtggtgtattattatatttacattaacttctatagccatttttttaagcttttagaattaaaaaatctattgtttagataaaaattaaaagaataaaaataatttaatttaaatattagaacattataaaacaatagtgctctttataattattacttttaaatttgt

SEQ ID NO: 182477 - DNA, 574 bp, Cannabis indica
atttacaatatgcaaattgcgtaatttatagttgactatgattccaacagtggcgaagcacggagagagatcagcgatttttaaaatagagaagaaaagtgtttaattaattttttaattttttcatagataaatatgatataggtgattcaacaatgcacctcttaaaagcgatatacttattactgatacaccttgacttatttcggcattaagaaaaattttttagtctattttttttttcatattcatgtatgttatagttatttaagataatctataaaattttgagaaattctaaataatttataatatagaaaataatgttcaaatagtctattttacacgcgtataaaataaaatagtcacgtgtgcaatatactgtttgaatgtagtttttggcgtgttaaattttttcaaattttttaaaattttgccggatgtcttaaaaaactataacgtacatgactatgagaaaaatttgactaaaaatatttcgggtgctaaaacaataaaaatatatcaatatatttattttaagagagtgcattgaagaattacccgtaaatatata

SEQ ID NO: 182478 - DNA, 578 bp, Cannabis indica
aacacagtacccatagtctccacagtaactttagtctcagaaagaaaaagaaaatccgcattagaatcgcggataagaccccggagggtcctctctgccgtggatcgtcttaatccacggcagttccatgctaggcaccacatgaggacggtgggggcatgcttccggccgcctcctcgtcgcttccaaaattttgaatgctaccatattcaatgttaacctcaatacagttgttaagaacttcattgttattatctaaaccagctgtattcccagcatctcttccccgtcttcgaccacttctagtttttactcctgaggatcgtttagcagagcgattatcctctttgccctttggttttcttccacgagtcgtagcttttccaggattcgatgcttctccccccgagccaatacagaatttctcctttgttggtgtccactgtgtttttgcagtttcctcacttgtagtttggtttgaggaacttgctaaggagtcggctggataaggctcataccacgtgtgaacctttcttttcctacgtatttcccaactaaaaacaagatcatttcagata

SEQ ID NO: 182479 - DNA, 510 bp, Cannabis indica
gtgtcactaaaagccagttttgtagtagtgattattttcgtgagttatgatatatatccttgagcttgaatattgattgatgtttacatcataagaaactttacacaatattcagtcacgagtatttattcttttggctagctataaaaatcttctatttcacaaaattatatttcaacctttgaaattctatatattattattttatatatatatgggatttaaaaaaatatataaagtaatgtatgaagagtttattattctaattcttaggagaaatgcaggaaatcaaaataatatgtgtatgaaatgaaaaaataatatatagggtaaattgtgtcaaaaatacttaatatttcagattttatatacttaaatatctaatgtttatttttagaagtaaaaatatctaatgttacaattctcttacactgttgctaccactttcgttaactcataatacagacacgtggagggccgaaatagcatgcattacatttatttatttta

SEQ ID NO: 182480 - DNA, 901 bp, Cannabis indica
attaaaataattaaagtgttgtgttgtagtgtatagctagttgataatgactacttgaaaatgggtgtggggtcttttgtctttcacattatatattatttaaggttttgtatcaaattccatagacaactttttattacactcatatcatcacatggtgtttaggtaaaaaaaagtactttcatccgtatttggctaacttttttaatttaattttttttatttattattgaaatatatattatgtcctttttttttaattttaggtaaaggagttgaaattatatgatttcatcttcatctcaaaaaggggtagtttttaaactatttgactacttaatttattacacacccaccaaaaaataaaaataaaaaaattactaaaaaaaataaaaaataatttataacataaatacttaaatttaactcacaaatatatataaatatttgagtttaattttaacggtaataatacttaagttatatttttaaaagtttcatatatacctacctgtcaaattaatatttattttttattagtatatttgaataaacttttaaataaaaatataaatttaataatttggactaattaaagattttatgtggcaactgacttgataaaagttttaaaaatataatttaaatattattactgttaaaatttaaatttaagtatttatttataactgagagtttaatttaaatatttacactgtaaattactcaaaaataaactatgtatatctagatcttagaattcaaaattaggaaccatatacttatataatataatatatttgtgactttttaagctatagtggttaaaattggtgcatgttattcatcactctatttaacaagtaatctatatattaattaattaattaagttaatcacc

SEQ ID NO: 182481 - DNA, 615 bp, Cannabis indica
atgtatatatatatttataaaagaacaaaggaacatttttctttacaaacttagatggcctaacttttcgattctgcattatttaagaaaaaatgttgtaaaatattgttgtattaatgtaattaatggaaattttcatttttctcaaaaaaaaaaaaaagagaaatatataattaaatattagatcacacatattcaatttaataattattataaaaaattaataaatattgataagattgtgctaataacaatactctaattatattcattataagtaaatgttctttgatcttcatcggttttaggttactctatggagattattgtttttcagttgacaattttggactcagcttctaagacttcatgattgagtatttattttgttgttgaatttttatgaaattatatatatacatatttttaattaatgtagagatattatacgtattagctatcgagaccaaacacttcttcaattaatctttctcattttttgaaattaatcttggatttggggatttggcctgttttggtgtaaataaaagtttttctctcttcaaaaaatatatatatttattatgatcattcacactgtatattttctttcta

SEQ ID NO: 182482 - DNA, 872 bp, Cannabis indica
aataatataagacttttaaataagctaataaaaattatattgacttttttctataataaaaacttgaagctccaaaaaaattataaaaatactttaaaaaggattatgcaaatcttgttctaaacttaaaaatggttaataccaaaagttagccacttattataaatcttcctccgataaatatttgtcctttaggtgatcagttttcttaaaaaaaaaaaaaagagttgatgatatctttttcgaaacaaccacgacaacatcaccttctcacataaatactaactgccatacaaaataaaattattcttccaaacactcttgttgatagcaatagaataatataatatcaaaaactaaaataatcacaaaataaaaaaaaatgagaataatgcaatattaaaaattaaaattttaatcaacaaaataaatagatgactaaataaattcgatgtctaaaaagataattgatgatactcactttatatttagttttgccttcaaggtagaggagacaacgaacacaattattttagctttaacaattattaagtgtttcaactaattttcaatataccatgttgaggtgcctgttaaaaaatacagaactataaaaaaagaaaaagtcagccatatatgaaatacatatataaatatatatgttgaggtgcctgtcaaaaaatatagaactatagaagaagaaaaagtgagctacatatgaaatacatatatttatatttttcaataaaaagagccttaattagcgacatgatcatgtacacaaaaaatatctaacaaaataattaaaccaaacaatacaaactaacaaattattatagtaagaaacaaatcatcagaacaaaaataattat

SEQ ID NO: 182483 - DNA, 669 bp, Cannabis indica
tgaagcatcgagaactctttgaaccttattctgagtcacaccacaacattaaattgcagattttgtttcacttgtatgcaattttgaagtctaagaaaataacttcaaaccttatagtaacaaataaatagacttgaagtcaccatgtcaaaaaagtaagacatcattcacaaaacaaaggtgattcaacttcaaatctctacactttttatggaatttgaagccttctctattccccactttcatcataattcttaataaatattccaggccaaatatcattttacctatcagaaatttataaatagtattttaaatattcaaataacctatataattttgtaaaaatttgaaaaaggcttaatttaagatattttgacatataatttgaaaaattatcatttatttattattttattcttaaaataataattgtctaaccatatctattttaaatttaatttattttgttattttaattttattaaactataagattagaaaatgatattaaaattatctaattggttattttcaaatcatttatttattagatatttaatttaatttgataaaattattcaaataaccctagatattttaaaattagtttgaactttaaaattttaaaaaaatatctaaggttgtttctaacaatcctaaatttgc

SEQ ID NO: 182484 - DNA, 516 bp, Cannabis indica
taacattacactttaagatcaagctttattgtgagtttggacattcgaatatgacttggacattcaataggtttttttagcaggaagagaagagagagagagagatggatggggattaggttttttattttattttttaaaaaaattatttaaaattttttaattttttgaagaaaaagaaattttttttatatttttatattttttatttttaaaataatttatatttttatttttttaaaataatttttttacgtggaccaataaaattgttccacgtgtacactgtgcccaatccaacatggcacttaacacctaaaaaatggacggaaatgttaaattgctaaaagaatatgagtattggggtttgcaccgcccaaatttgagttttgggggttaagtgaaaccaaaataaaagttttgtgggttttgccgccatttaccttatatatattaaaaaaaacaaaaaaatgacccctgacagtcatgatcgagacccctcgtctctctctctct

SEQ ID NO: 182485 - DNA, 586 bp, Cannabis indica
atatattaagaagaagaaaaaaagataaaaaagtgatgtacagactagaatcatatgaaaagatgcttattaatataatgttggggaaagtgtgagatggcagctcaactgggaatgatggctataaccagagtatgataatgtttaaactagtctattataatataattcatatatggattgaatatataatggaatattgattgagtcgtgtagatacgattctgattttcttggtccaccaaaaattatataaaagtttcattttaaaccatctctcatctcatctacgtgtggtttttatgataatgccttaatattatagattattttttgttggacgtcccactcaaatgatattaacttattgttttcttaaacatctgcatttgtgtgttttgtatgtgaagaggaatatctagttaaggtctatgcacatgtccttgaaaaagtttattattagttaatttaatatagctagattaattattaatctcattgctaataattttatgtttacaaataaaataataaattacgtataatggacgtatttagtaaaggtctgaaatgccggggaaacaac

SEQ ID NO: 182486 - DNA, 586 bp, Cannabis indica
aaaaattattgtaacaagtcatacacaagatctatatatatattcattcgttcattgtatacaacttttatttctatttttttttattaatttaatatatttaagaaagtaatgagtaattgagagagttcagaaaaattaataaaaaaaaaaattgcagtctaattttgactatgtaattgagcaatattgtgagcttccattttcttatctttccatacctaaaatacattctaacttacttttagtatttaacgtctcaaacaaccactagaaagataattcttatttctaatgaagtaagcatgttagtaaaaattaaaaaaaaaaacatgtagtattctaaaaagaattatcaatgtttatgtccattcaaaaaacattatcaatgtttatgttataattacaaatttttatatttatatttaggtataacaaacttaatacatatggaatatttttaatggttacttacaaaattaataaggtgacaatttggtgaagttatcaacatatatattatttcttaaaaaaggtgtaccgatgtaatctcttcgtgtttttgacatctaaataattttaattt

SEQ ID NO: 182487 - DNA, 791 bp, Cannabis indica
cccactttttgtctagtttaggttttttgagctctgtcatctagcaaaaagaaatatatatatatatatatatatatatatattaattcttttgactcttatgatagaaatgtggaatacatgaagtattgattgtaaacaaatgtacataagactgaagaagtgaattttgtcagtgtcgttcaaagctttgagttggtgatatttacaatatacattcttacgtaagaccataattcatatatagcaatttgcagaaatactaagtttaattcttagttgtaaataaatagttaagtttaattttcgtcggtaataataactaagcatctaaccagtaaatgtcattttttattgatatatttgaacttaatttttttttaaataataaaaatttaatgatttggaccaattaagaattgccagtggcaatttattgtaccaaatacctaccgaagttacaaaattataacgtaggtattattaccgccaaaaattaaaattaagtatttatttgcaactaaaatttaaatttaaatatttataccgcaaattatttacagtaaaaatatctataattcgatcagtatatatgtgtagcatttataccctttcattgcatatataaatgaccctttctgcttttgcatgcctacgagaattggccttagtttcatctctttttgattggatcatctccattatttctcgagttttgtcctcaggcattgagatttctcagcaatactctgttaaaaaccaaagttttttgcttattaattagcgttaat

SEQ ID NO: 182488 - DNA, 543 bp, Cannabis indica
attcgcagggtcctttagaccattctctttcaattaccacaaatttaatattatcaatcgcttgttttgtggtgacgtaaatatatataaattatttattatgttagtatttgattttttttagttcaaacattgatatttattattactattattataattatttttttttttaaattgaaatacttggtaaaaatacaattaataaggtttaacgtggagattagtttgccattttgttatacacgtgatttttttagaaagaaagtatatacataacgtggagattagggatttcagttattatgttgatgattatatatgctccatttttattttaattattaattaatatagaatatttatttgaaaagaaattaatgtagattaaaattgagcaaattaaaaaattagaaaaataaaaaaatagtgtagagtgttaatgatgttatgtcaacgcctatatcctcaattttattctaataataattttttttatgacttttcatgaatctcaagagcctagcattaaaaatgactttt

SEQ ID NO: 182489 - DNA, 568 bp, Cannabis indica
ctgcttgtttggttcgcagtcttaatatgtgcacatactctatctattgaaaatagttgttgcagaaaataaaatgaacaaatttatcgaattaaaatttgggttgagtcgcagactaggtcgctctctttaagacgtttgcgccactgcttagaattgtgcaagcagactatcaacccctcgtcgccccaggatagaacaacctagtcgaacaactgtattggagctctattgcacgataaagaaccgtcaaaataccacactcaataatcgtattactgctcggattacatttgtaatataatcgtatataacatgtttaaaaactgttttaattaattaaataaaataataatttaataaataaattttctccaaaaaataaagtgacaccacacccgcctgacagctcaacacggttgcacagatagacggcgtgagtcctcatcagtgcgcacaaaactgggtaccccttgagacctcaacccatgttccaaatttgcacattatatacacttctaatgaagtattcctatcccactgtgagactcaaaacaaatcacacaca

SEQ ID NO: 182490 - DNA, 528 bp, Cannabis indica
acactataaatagagctctttggttcacttgtgaagacatatttttttgtgagtttctatcgaagagagcaccttgccagaactataagcttgataattaagaaagttatttccattctttccttttccctatgtgcttgtggtaggagaactaaacttttgggacaaaggtgtaaccttgttcaagtttagtgattattctattatacacatgtggtgtatatatgtggtgttgagattgctctcacatctcttatatatatatgctatttatatagtgttttatgtgtagcttattgctttgagttgtaattcttctcttcatctctattctctattttacgtgtatgttttgtttagtgttgtaactttatttaatctataattttgtcctttgtattatttatcatagattttgtaatcttgttggtttggtatttctattagagtcacaataatttccaataatcaaaagcttatcatttcctaccttgtttcaatggatggtaagaaatcaacttgtgataa

SEQ ID NO: 182491 - DNA, 542 bp, Cannabis indica
atgtagactgaaaattattttataccatcaatttagtgatttgtttttctggctattgtgttttattttgtacatgtatagtagaatgtttttgtagtcatgtggcttatttggtaccatattttatcttatatggtagtttgttttgagttaattatcttaagaattattcttaatggtgtgagatatcaataacacaccatccacttcacgtgacagcaaagattagtttttctcttcataaaataatattttggaatgtttatcaacttttaaataaaaaaatttgttttaatttaatattactatgaagtagtgggttgattaaattttatatatttatatagatgtgatttatttcactcacttagtcattctaaaatacaaaaacttaaaaataaaaaaatcttttggtctaagaaaaatcaaatatgatggttatgctcgttaccataaattttacaaataagttatagttattaacattataagagaaatttcatatttaattatttatataatttgatactgatatactttct

SEQ ID NO: 182492 - DNA, 509 bp, Cannabis indica
ctgcagcttccacctctcaccctgcaaaacactgctgatcgaaactttcttagcactagcacatgaaggcataatacctccattattgtcccaaatcacaactctaactgcaccaactccatcttttgaagtagtctacatttgcccgaattcttccatggcgaggcaaatcccaacgaatctcaaaactccccctaccttgaaataccacactacaatttgttcaattcttccatggcgaggcaaatcccaaggaatctcaaaactccccctaccttgaaataccacactacaatttgttcaattcttccatggcgaggcaaatcccaacgaatctcaaaactccccctaccttgaaataccacactacaatttgttcagagtatttcaatttctaatataatttcactttttataatattttctgcatatgttatttcttgtttaagaggtataattcatgaagttaattggagtctttcacgtagggaggaagtgcttgaagcatg

SEQ ID NO: 182493 - DNA, 608 bp, Cannabis indica
caagtcatactgaatccatctaaacctgaagatacattaaaataagtataaatccacacaacataaacctaaatacctaaaacttaacctaaattaacaccttaaagtgagtctaaaactcatttacatatgcttggttttttttgtttgtggatggaaatatataatatactttaaatatttggctaaaagaaattaaatgtttatatatataaataaattcttggaaaataaaaatataaatcattttttttttttaaaaaaagtactaaattaaaataaataaaagataaaatattgaaattaacacaaaacattaattaaaaagtcaataaaattaccattatttaatagtaagaacttaatattattcaataactaaaagtttaggaactaatttgctaaaaataaaaattagctagtgacgattttgctaaaatctaatataccaaaaataaagtgggggaccaattgaggctaactcaagtgatcatagagggtacgagggtgtgtatagtgagtgaggatcgagtcttgcattatacaatatagtgtatatataaacgcttaaaatattaaaaaaaaaaaaaaaaaaaaaaaaaaaaacg

SEQ ID NO: 182494 - DNA, 503 bp, Cannabis indica
ataaggattggatggctgctctatatagagttgtaaagaagttttgtgttcaatacaatttcatctgatttcccaaacaaaaaagtacacacaaatagtttaacttgggagtcaagtaatctcattttcatgggaaacgagaaacacttgagtttagttttgcataacaaaaacatcagtgttttacttttgaaacctgaaattttttgtttaattcacttgcctgcatcaataaacctccatcgcgcaacgtatgtatctctgcttcaatctctgactcattcatcctcaatctataactgcccggtccacctcttaccatgtcaatctacaaacattttggcatagtttgaacaacatatgtcaatagaaaaatgaaaaagtaacacatatccaaagaaagaagaaatagatttacaatgccatcatttaaacatactgtatatttgcttccttcaatgttcaatgccacttgtgagtgtacaagcgaaatgtgctgcaat

SEQ ID NO: 182495 - DNA, 611 bp, Cannabis indica
aaaataaggtgtaagtgtaaacttctccatattttatgttaagtgagctatattttcactttgcatctcaattggtaacttttgggtttatggaaattttattttatattgataaataccaaataaattgagtaacctaaaaaaattatcactactcaaatcaaataaaaagaaaaactaaattcattgtgattatgtggtaagctactaaatattccaatataatcactactaaatattattgaaaatttatgtagtacacttcttaaataggtgttctgatagatttccttatctattttgatatctaaaaaaaaaattagacaattcttttgtagttatgtacattgtagctatttaaaattatcttgcaaatttttaaaaaattccgaatagtttacaatgtcgaaaataagatttaaacaattacttgccacacgcataagaaaaacagtcgtgtgtgcaacaaaatatttaaatcttattttcggcattgtaaactattcagaagtttttaaaaatttaaaagtgattctaaataattataacgtacacaatcataaaaaaaaaattaagattaaaaaattactcttaaatgctaaaacagataa

SEQ ID NO: 182496 - DNA, 662 bp, Cannabis indica
cgatacgtcaaaaattgtgtatatattgaccatcaaataatataataattccatttaaaagtaaaatttagactttttggtctactactttatctttctatataatatattttaaatgagcatatactttaagattcccatcgttaacagtacaccattatagaccacatttaatatttataaatataatatttataatgctcattaatattatgtatgtttaaataaacagatccaagtgctattggagttatctacaccgattcaaaaggaaaatcacacaaagcattaatacgtaacaaaggagaagtaatactaagtgcaggtgcacttggaagtcctcaacttttgctactaagtggaattggtccaaaatcatacctctcatcacaacatattcccataattcattcccaatcaaatgttggacaattcatggctgataatccacgtaacaacattaatctcataatcccattcccatttgaaggatcaggagcacaagttgttggaatcactaatgattatttcatagaaactgtatcatatagcttaccatttgctccaactacattaccttttagctttttacaccaatccattaactcaaccacaatttagtctagcaaccatagctgcaaaaatcgtgggacctttatcaa

SEQ ID NO: 182497 - DNA, 537 bp, Cannabis indica
tatgtattaaaaataaaacattaatctacatatacaactttaaatgtagtgatgactacaagtaagatacgataatgacagttgttttgaaattatatgatgatatttttttttgtttttttacagatacatcgtcctttttttattttgtatgagaattgtttaatttttaatgtttcttcactatagcatgcatttgaagatatttattcatgtgcttttttttttttatttatttatataagaaattgtacgatgatatttttttttagtaattctttagaattttctatatatttatcattttttaataaaattatacatacaaataagtttgaaattatttgatataattttattgttcatttaatattcatatatttaattttaattttttataaacaagcatctccaatgaagtgttataaaaataagtgtataagtattttttagtctcatgtttataaattaaaactccaatggtgtataatgtaatttaaatttggtacatactaaaagtagtcaaatttaagtcac

SEQ ID NO: 182498 - DNA, 622 bp, Cannabis indica
gcaaaacttagtatggtgacgaatcattgtcgacatcctttaccagggaaaaaattttcctggcaaaactatgccagggagttatgtatacttttttcggcaagaaaactcgccagcaaaagtgctttttcttgtagtgtctagagtccaagatcaaatcttttctcgactctgtttttgtagaaacaagcacatctgcggaatcatgaccatcagcagtcagactagcctcactcttgttgtctttttcattcttgtctttgctcttgtctatattattcttgttcctcagagtataacatttatccttgagatgaccttccttcttgcagtatttgcataactttctaaccttgaatttggattttgaatgactagagtcattgctcttgtttatgtgattcctttgttgatttctacttgaaccattgccctttatgtcctttggttttatttgacctacctcgagccattagacctttaccatttgatccattcttctcatcaaacttcttctaagtttccttagaatttagtgtagctttgatcttggacattgtcaaagtctccttttcatacaacatggtgtcaacaaaatgttcataagatcttagcagtgaac

SEQ ID NO: 182499 - DNA, 561 bp, Cannabis indica
taacagaggcaccaagaatcttatctatgatagagacaatgaaaaatctactggctctaatcataagttgaaccctagagtcttactatttaggacctcccactagtttttcatttaaatttttgtaataatttatagtagtcaaaaaataaaacttaaaaaaaaattaatttcataatcatatgaaataaactaaaaagtacaatttattttatatatttgatattgtaaactaattataatttctacaaaaaaaaaaaaaaaattgtgagagattttaaaagctacattgctcattgtcatattgaaaaaagtgggattgtaatcgatcaatgtgccaaaaatacaaaaaaaaaaaaaaaagtactttttaaaattgttttatacgcacaaaattatttcatataaaaatttataaaatttctttaataattataatatatattatattaaatgtaactatataataaaagtgttcttcatttttttaaaatattataatttaaatttaaattcattaccatatctcctttatcaattatcttaatttttttttacatg

SEQ ID NO: 182500 - DNA, 819 bp, Cannabis indica
tgaagatggagaccatagctctatcaggtaacgatttcctggaaatgtgtgtgatgctcgaagagttcctcctttcacctaattaaattcaagtggcaaacaaacattaattagcatatatgagatatctatcaatggggaaaagagtgaaacatgaagaaaaataaaactgtacaaaatagagataaaataccaacgtttttaatactttccttttttttcgtaatgaattgatgagagtttagtctaatggatcaattttcaattctaaagtaaaggcaatttttcttcacttatttaccaaattactgtagtatttcttttttctacatgccttttattatgtaatttttctttttcagtttggaaacttttttcatcccttgtctacgtctttaagtatgaaattaaattgagaaatgattggaacacactcgaattatacaaactttttacaaatatataataatgtgtagtcaatctccatcatataatcaaaagtgatatatttctacctaaaaagttaaatgactaatatttattatatattactgtgtgtgcaattttatagtgtatctattactctacatatatgtgtagatattactaattaatacagtcaaaattataaatggtcgtagtcttatgatgtctattagtgtagtgcaacttaagatatattatagattagacatgctctaattatattattattaattgttttggttgatttttatttaattgcaaatcaatggaaaatttcctttaaccactgtgccatgatgagggtaaagcatacagaaaagaaagttataaaaa

SEQ ID NO: 182501 - DNA, 688 bp, Cannabis indica
actacagaaatataattagtaaagaataaaaatacaaaaaaaaaaaacagagaaaaatttagggattttttaataatatacataatcaacaatttatttacaaaaatgacattatacaaataattagttattatataacgttccatgtcagcaagaataccgtgtatatgtattcagttatatactattaattaaagcatgtacttgactcattgcacttaacattttgacctttttttttaaaaaaaaaaccaatatttatttatctctttttgttttaaaaaagaattttaattacactactaattattttgtctcaaaagaatactattgcaatctattttttaaaatgatcattttaatatgtgagaaacatatattttttgtcaataaaaaaataaaacaaaagcatcattttaatttctttaatatttagtaaatcaaagagtaatttttttttacttaatattcaaagtgcaactaaatcacttaacaaaatttattatactaactaatttccaaaagttattagaaattgttttattatttttgatttaaaagttacaatgtaatatttaaacaagtttattttatagtgtaacaagttacaaatgtaatattactcaaagataccatataaggaatttatcacatagtttattgctaaaatttataacatatttattta

SEQ ID NO: 182502 - DNA, 743 bp, Cannabis indica
ccactctcctacttgtagatagactgctttgttgaccttacaactgggattctttatattggtttgtttcacccaggtgatagaaattcgtctatttcaagtgggttctccggctgagtttgagtagtctcaccttcacccgccgcgcgcgcactgacttctattcgtcttcaattgctcctgagcttgccagaaagtagaaagcctactctctttctgactgaatgtctcgcgtctccatgatactttttttttaatcattttctcggggcctgactgaatacaattctcgcccttgattaggtaggctattctatttattcaataataagctcattctcaaagtcctacctttccgaaattcccgactttcaaactcaaacttccgaatttgcttcctgcgtctattcaatcaactacagagacagcccgccttgattatgcttttgattctgaaccgttctccaatcactttgaaaagattgtctttctgcacggacttgatctttcttttcattcaaaagaatcaaggcgggctcgagagaccttaaggacccttcgctcgcccgcgagaaccgttctgttctaactagaagctctgagttgagtacttctcaacaccactactactttgcctattccttgccttcggattctgccgtaaatgaatccccatgctatttattcttctttgaactctttgaaatcacatgtctgcttcacctctgctaagcaaaaaaact

SEQ ID NO: 182503 - DNA, 642 bp, Cannabis indica
aatagttagtaattatacaggaaaataataatttgaaaatagaaagatttgagtaattatacactgtaagtgtaattaattaagatctctcaattacctctaatatacatcttgatggtataattatgtggttagacaaatacgtaaaattgtgtaattacctttaattacacccaattctaattttctcgtggctttctaaatgcgccctaacaatcccctcacaaaataaaaaaatgaagaagaaagtaaaacatatatatataggtgcactcttaatagggatcgttaatacattatgggatatatgggatcgttgcttaatacattatgtctggtacacacaaataatgatgtatgagaaatgaagcattattggaaatggggtggagtctgtatagcaaactctaaacttttttaaatcttcgtcgattgatgctcttcaacggtagtgtgtacatattaaatcgtgttcaaaccaaagttgtttttcaaacatattttgagttgtgataaagttgaaaattgactttatggaaagtacaaactttaaaaatacttgtatacagttagagtataattgtgaaaggtaaaaactgggtccaaataccataaaatgaacatttcatcagaaatgatata

SEQ ID NO: 182504 - DNA, 534 bp, Cannabis indica
gtttaagagatgcaaatgaagcaattcatctgcaagggacacaagtatccatgatgagccatgataaataagcattaattgctttgttagtcaattcatatattattagttgaatcagactccttagtaattgtgtttgtttttatttttctttaagagacattcttctgatagatgaacaacttccatttttatgtataatgcattattaatttattcagatattagccattattttctaaatatatatatatatatatatatatataataagataaatatgcaaaaacaaaagtcattcaagtgtagtggtagagtgttatttgacgttagtaaagatacatttgatttggagaggaaattacaaagtagaaaatgacactacgactaagacagtcactttatgtcgtttcgtttggacccaacaacaacaacaacaactactcggtagagcttctttttgtgtttgtttctatgtggagatattttaatgcaatgcattcattacaactccccccatgtgtcctcactcat

SEQ ID NO: 182505 - DNA, 707 bp, Cannabis indica
gtagctgtaagagggtttcttatattttgtgtgtagcttcttcttgctctgacatctttctatgttgatctgtgactacttgccttactctcaccacctccgggtcttcctcgtagtctttatcagggtttttgtggtagtcatctctttggtcctcatttcatccttcttagtcatcttcctcaattggagtttcatcaatgtatttctcttagtggtggccttttcgaagcagacgactacccgcttttaacgtttcaccatcccttgcaatgtccatttgagtgtctactagagggggacagtttagattgtcatcagtaacatcttcatggtcttggcgagtatttggcttgatgaccgtattttgagtgacaacaatggagaatactttctttaactctcaatcaaagcaccaaaatatttattgatattttcaaaaactgaattaataatagattaagctaaggataaatttttaagaaatgaagaaaaaaataattcttatgtggttgggggcattagcgagccttaggacacaagtcaatattattgagctctttgactatgaaatattttactcaagagtgttcttgccaaatttttatagagtttctagccaaaattcgtaaccctttgcatgaagggataaaaaccctatttataggatgaaaccgagttctcgagtgaacccagacccgttaggg

SEQ ID NO: 182506 - DNA, 553 bp, Cannabis indica
attagcctaaagtaaaacctcccattataacctcctgtctcacatatttttttttctttgaatagcttattattttttatctttcatgaaagttatttgggggcttttttcattttttatacttttaaaactagttttttttttttttttttttgtcatttttactaaaattctacatagaaacccctattgcaactagcgctgcaacttaaattgcaacaaaaaattagtatagaaacccctgctgcaactagcgctgcaaccactttaaaaacccaaaccgtaaatttgaaaaagaaaatagtatatggggtaattccccaagttatttttataattataatattatttcggaaaattattctatatattatttttttttaaatttacagtttgagtttgtccggtagtttttatgtggattgttatataaattttagttgcgatttagattgtttcgttaatttatgtagaatttcgtaaaaaaatacaaaaaaaaaaaaaaaaaaaaaaaactaaaaacgtaacttgggttaggtaaaagtaaaaaagt

SEQ ID NO: 182507 - DNA, 593 bp, Cannabis indica
tgaaactgtgtttctcatggccactattgttgtagatgtaaaaaattgtaagaaattttttcaactctcaatgaaagtactaaaatattaccgagatttttagaaataaattattacgaaaaaataagctaaagaaaaaggattaaaacgagaataacacacaatgtaacgtaatttaggcgttagtgaaccttagtccacgagacaatttcataagttttaagcagtggagttttatagctctagtatgtatttttcaggttgtgaaccatttgcatggaagatataatgtcatatttataggaaactatgcttatcgggccgggcaaatttgggtcgcattagagttttattccataaagcccactagtggggaaaatacatagtttaatattatattttgagctattgagcctagtaggtgagatccatttcctaaaagcagtctaccgtatgatgcatggtattgttaatagtgatggaggagtcgtgcctccttattaagaaagagaatgtcaagtagtggtgtattccccaaataggttatctcctttttgttgtgtgcctttctaacatcttgtagaggggacaaa

SEQ ID NO: 182508 - DNA, 683 bp, Cannabis indica
catcaatctctaactgctttatctcctgaatacgcaatcgaagcattatcatgttctcatccacaatccttgatcccccgtaatctcgaccgttcgcatctctactaccgcatgctatcgtgccgttacgctgtctctgccgccgcaacagtaccggctgaaaggagcaaccttcgctatgtactttcggcaagaatgttgttaataatttcgtcgttgatgccatattatttgaccagattttggtgccaaaattattatacttatctcttaattagagagctctgaagtgaaatatatatttctgcactaagatataattagctcgcatatatatatatatatatatatgaaaagacaaaagagcttaattacgtgaaatagttgtatatatgtgacttatgagatatattagatatatgtgacttattagctagcgcgttgtgaatgacacttgtgttgtgtacgcgttatatgtgagtgaaggaaatgcgtggaggttacgtgtgggtttatattgtaatttgtaaggagatgtattataattaagatgaaaagatttgtatcaactttttttagtattttgatttaagttaaaattgcaaaatttgaccaaaaaactaatatttttattaaaaatgtattaaaataatatctgtatcattaattttatattataatat

SEQ ID NO: 182509 - DNA, 825 bp, Cannabis indica
aaaataaaaatcaaaatactaatactatatattgggttttttgattccaacctgctcaatacagctgcaaaactgctcccgcccgttatttataatttatttaatacggagtaggagcagtagaaataagtgattgaggaacaagttttgattcaatcatcttagaacgtaaagagtctttattccaaggataacaactatacaaagcacccgaatcgtactctattttacatggtccactgtcaatgacaaaccacaaacacggtgtagggtacacacatgtggttcctttttatcattggagtatgcaagaaatgtctttggcttgtaaatgcctaacttggacctagtgaccataggatgaaaattgatgttaggacagatgagtgggttgtcaactggtggagtggctgaaccagaagaagatctggtgttgacaaagggttgtctgtcttctggtgatgttccgtttggaggtattgtaggagtgggaggtggtggagtgtggttttgggttggtgggtgaatgatgtttgaacctggtgtgaggtttgtgttaggttttatgccctaaataaaactcatttcaatataatcagattttacttattaatatagatcagaaataacatttaatgttgcatggttcacatgatttatttcatgattatatgtacataatgtataaattcatctgaaaacccttttcacatacttgatcctgtttattgtgccgtcaacacattggaaagtaaacttgactatgtgaataaagtttcctagatttatcagacatggggttttactgatatgataatctacaac

SEQ ID NO: 182510 - DNA, 650 bp, Cannabis indica
agagaaaattaggtcatttttattggaataatgtgtgttaactaattataaataaatcacatgatataggattctttctatgattgggaaagttataggtggtccaaaccaaagtcacttcgcagcaagaagtttggtgttgactttctctactgaaacacaagtttgtattttgggaaatagtgtaagatagattacaaactaatgagaaattttacatattaaatataactcttgatgatacttgttgactatgcggttcagaggacaatataaaatattgttgatggttggttcaaacttcaattttttataattacatatgtgtgttttattgtagatagtttagttttgataatatgtataaataattatgcatatatatgtatatatattttacatttaagatttttttgtcaaaaaaaattatgagattaaaaagagaagtttttggtatgttaaattattgattgatattgtatttatttttggttcggaattatttatttctagattttttttttaaatgtttttccttcagttcatgaccgaagtaaaaaaccaattagcatcggtgcactggttttttgcttcggttatgagcggaagcaaaaacctttttttttgcttcagttcataactgaagcaaa

SEQ ID NO: 182511 - DNA, 781 bp, Cannabis indica
aataataatataatattttataagatattgatcacttgtgcattttatatctttaaggagtatgagttaacatattataattacttttaatcacattttacatataaagtagtataaaaatagcttaaaattaatttactatattttttaaatgaataaaagtttaaatttataaaaatgtacaaaagattgtagatccgtgcttttgtaatatataattttttgtcatttttttaagtatttaagtatcaaatatgggaaagaagaaaaaaaaatcccataaaaatgtgaaaaggcaaaaaattgtcatatttagaaattaaaatttccccttatttttctttttttgaaaaaaaaggtggtaaatatcaaaacaggtaacatgtttaatgtgttttcattataaccaagttttatgtcacacacatttgagctctcaaattagccatataaaagtaataactaaaatgatgtttggacatctcataagcataacaacataggatgatcacaacaaatcactcatataccaatatcaaaattcaaacatcataccattgattggaacattatcacaatccttaatataatcaatttcaaaacttcttatacatataataatagggaagaacataagctaatgaatcagaaaagtacaacagatactaagtaaaaaggaaatagcagcctttccttacaaatgcaatctcactgtacaaagtttacatcatactggcaacactttctaaataaactctacaatatcatctaatcttagagc

SEQ ID NO: 182512 - DNA, 857 bp, Cannabis indica
tgaatcggtctgtttgtatacacctaatttttgatacaaaattatatgaaaaattgaattaaaatttaatacaatttattacttaattgtcattaaataaaattacaatttatttttttatacataatttaaaaatttttaaacatccgccgcaaatcgcaaattgtttactaaaagataaatttataattattattattaaataaataaatatcatcttgtaaatctcacattaataattgtgtctcaccgcaatatatattttaaattagatgaggaagatataaatattgtaaaaaatatatatttaattaatataacctctttaattactatttaatgaaatttatatattatataaactatagataatataatataattttatttatttatatttatccttttgtgattaataattaattatgtaattataattggtattttcgttggggttatatacagtaaatgttttttttttttaaatccgaatatggaagtaaatttgtctaataatattaaaagtttgattttaaattaaaatagcatattttatggccaaagttaagatataaatcaaaacttaattaaaaaacgccatattattattgtaaataacccttgaaaagtattagaactattattttattgggcccatacatagaaaagcagacagatcccaatggacttcaaggtattgggttatgtgttgagcttcggctctggtgcatcaggagaacgtttgttactgggcccgagaaggagggaatcggtcctttggggcttcattccgtaccatttctcctcagattgagaaatagaaactccattgggcttctgctctggtccatcaggag

SEQ ID NO: 182513 - DNA, 557 bp, Cannabis indica
actagacatattcacatcttcaaagaggttgtaagtattagggttgttccgtattttcttttcatctttctaaactttttttcttttcttctccagtaaatcttcttattttctctttggtccactttgatctatgctttttaagccataaaagatcttcaaaagtgagatatagccaaaggaaaataagagaatttaatgtctctatgccgttatgctgtccaatttttcatagatttttatgcatttctttgattccctagacttcagaaaataagtcaatatgagagtgcataatcaaagaggaaaatagaaatcttaaaacaaaaaataaaaaattgttatgctgtcaaattttttattgatgatttttatatttctctttgatttcctagacttcagaaaataagtcaatatagtggggcataatcaaagaagaaaataaaaaatcttaatgctaaattttgattaaaagcggtataaccaatgaaaataaattacttgctataatattagttgtctcctatcgtgatgatctaaaactaaaacattagctt

SEQ ID NO: 182514 - DNA, 576 bp, Cannabis indica
tttgtccatgatttgcagcttcttcgtcaaaatgggctttcggtaaccgccccaaaatgttatcatcagattccaaattgttgaagttgctcttttctgtgatttcatctggtataatagatccacggccatggatcggcttctctccaaccaaatttggctttgcaggggtcaccggaatccaagaaacatgattcagtgacttacttttgctctgaacttcactgttaacatcatccattcctcaacttcttttgaatctcaaaaattacctctttacccttgctatccagctcttttccggcgtgtaagcttcgtcggagggcagcttttccgacttttccgaccaagattcgttctgaacacaaaaaactaaataaacaaaataagttaaaggaaaactgagaaccagattcatccaattccaaaaatacaaatttaaagcttaatttaaattaaaaatgtaactatttgtcatcggaaaatatatacagagctaaataatcatataaggtctattactcactagatcttatgactgtaaaaagaaaaagaaaaaatggcagaacagaaacc

SEQ ID NO: 182515 - DNA, 522 bp, Cannabis indica
attcaaatgaaatactttagttaattctatttcttacaaattttcattagtatcttaccttattaatgatggtaaataaacacaaaatcatccaatggatcaattctattctatatttattggaataatatgtagctaattttaaattcatatcgatcccaagtgaaaaaaaaaatctttactttctatctttgcttcatttatcacaaaaatcattttgatatgttgaattttgtaaatagaagtgttaaaggtactaaaatactattaaattttatttattttaatttaataatcattataaaatatataagaatgtttagacattattgatgctactattttatattttttttttctaatattgttggtgagaataattttgtagctcctttctagccaaaatagctttagattctaaaattatactatctaaaatgggataattttgtttattgcaaaaaatgttatttttacaaactagccaatttctttgtaatcgtttttggtttgcttaataaa

SEQ ID NO: 182516 - DNA, 576 bp, Cannabis indica
aattaatcacttaataagcatacattattttttaacatgtgtaattatatgattgataacaattaattttttgacgtgttaaaattttattaaatgccttatataattataacatatacaataattaagaaaaattatactaaatatttttttaaatatcgaaataaataagaatgtattgattcacctattttaagtggttatatggtaaaattttccaatatttttttgtgattcataattcattgacctaattattgtacacttctcattaatttattactaccccaaaccccacggtaccgtgttgttgtttcatatctctaatttttcaagaaaatgacactatatatacatggttgcattgcatataaaaacaaagtttgataaaaattatctacggagatggactagatttattatttttaagattaaaatcatggttaaaatttaattatagatatttaattattaattggggatactttgcggtaaatttttttaatatttataattgttttatttatggtttttaattaaaaaaaaatccggttaaacaagtggagatattttttt

SEQ ID NO: 182517 - DNA, 364 bp, Cannabis indica
aaaagaaaaaagaaaaaattatagacaaaaataataatcaaagtagttaggtagttttgaaatatgagtgatgagaaagggaaagagttgtgtgtagaagtttaaaatatattaatggtacaaaagcacgaaacttgtccccattatcaatctttttccataattgtaaattaattgagttatataattatttaatgctaaatcacacatatatttatgtagtagtgcaagctatatatataaaaaatctagttattttagagtattttattgatattattataaatatattacttacgtccgaataataatattatataaaaagtgccattagtgaataagcttttttatattttaaagttat

SEQ ID NO: 182518 - DNA, 631 bp, Cannabis indica
ttctcatccgtcgggggcctttatttcataagttgtattacctcggtccccttttagtgtgctctagttactttctccgtcggcgttttcaggtatttcctccgtcggaaaggtatccaggtgcctcttctggtcctggtatgctatcttacttgtagttagtccttgattcgtcggcgtctcattccttcctgtttcttcttctacttccgtcggcattccctttactcgttccctgttgtttgtcgtcttccttctttttgtccgtagtgcccccttatggattggcaatctggattggtggctaggtcatatcgggttgggcctacttttatatttttgggcttgggtatatttattctaatgggccctttcaatgtgggccttttggtagtcctttattttgttgggccactttatatccaagtccagtttttttccccccaaacactactccccccagttccaattatagttttataatctggaactgcccctggtaactgccttagcagttttaatgtcagttttgtttgttattactgatttctcatcatatatctttttttgttgtacagttccctaacttttgtaatttttctaattctttaagaagtggcggttacccttg

SEQ ID NO: 182519 - DNA, 618 bp, Cannabis indica
gaaaggtggctgaagattttaagagtcaaatttatttgtttttaaatttgtaagagagagatgatgcgaacacatgaaaggcgttgttatgaacacatgaatttccaatatctatattgcaacattaaaagaataaagagtgagttttaaaatggctgaaacttgaagctagtcaattttttttcacccggtgttcttcttcttcttcctctttttgtaatatgtagcacttgattcttttcagttcttatttatttatctccttgttttataaatttgtaaaatgaataaagtatttgtgacatttgatgaggttttgtttcccctgatattgaagttgcttaactgatgtcaagttctttaggtattgatatcttggtttagttttatgttctgttgtgatcttacctttgcgttcattctttttccagaaggaagtggaagtgagtctgatgatgataattaattgtctacgttattactttttagttgtaggtaccaaacttaagtactactttctgttgtacgcaccaaacttaagtccaatcatatgatagaggagtggcaagtgtgtgcaggattatggagttaatcattccagtgttcatggagtctaat

SEQ ID NO: 182520 - DNA, 555 bp, Cannabis indica
cctttatatacaaagaaagtgtcattttagttacataaaacttaatcagttatagaactgttttatattaaatattaacattaaattgaaataaaaataaaataataaataaataatagtttaaatccgtttcactaaatacaacaacgtatgtgacttccatagcgcaagttgcatgttcatcttctcgcacaagcttgcaggcttagggtgcattttatcattctaaaggaggctaacgaatcttgtactaaggtatctgggccttggtcgagtcgcgtatgtggacactattggttttgtcccctaaataaaacccattacaatctgattagttatcaatttaagaaatttgaagtgatttatgttaacatgtatttttcatgcttatggtttaatatatatatatatatatatatttaatatatgcacaaaatcagttaagtccagaacatatatttattcacaattacagtattgtcaatgttgggttttgtgccctaaataaaaccctttacaatctgattagttatgaatataagaaatttgaagtga

SEQ ID NO: 182521 - DNA, 815 bp, Cannabis indica
ctgccagattaggaggagaggtttgcagaatgcaacctagacttcatagataggatgaggagattcagagactcatgcaatagggtcctctttttgcacctcctcctcacgcaccattagttacttttttagtgttgcaagttgatcaacctgctgctgataaccgaatggaactattttatgaaaggttccggaagtaactctaatatataatataattgcacaagtttaggattgtaataatatattttggtttcatttatgcatttcctttattgatttacttgcataggattctcaaaaaagcaaaggaaaatcaaagcattttcagtggagaaactatgatgccctgaatgaatacttttggtattattatatctattatttcttaaaatacttgctttggtaattatgagatccaatatcataatactatgtttctgtatctctaaaattctaggactgttgattgttttaagctagattggtctatgcataagtgagtaagtattttattgtataatgtctaaatctatatttaaatctttctatatacaactaggtgattatgaatctatatatatatatatgtttagtatataaattataaattgttaaagaaataaagtagtatactgctactattctaagtacagtaggtgcacttacaatagatactattctaagaaataaaaatataaaacaattaagtaaatttagagttgacttttttacttattattgtatgttctaggtgtaaagagtgatttgtgtcgcgtatatgaaagtagagtcacatcgcagagatgattacg

SEQ ID NO: 182522 - DNA, 608 bp, Cannabis indica
gtgggagacctagaggggactctgccttcttctccctcggctatttcagctccctcctcatctttagtgcctccttgatcttcctgtttaatttgtttaaagtgagctagcatcttctcggtattagcaccaaggaaaatgaggtccatattcctattgacaacccaagctatgtaaagtgaacgattagccattttatttaccctctagcgagcatcaatttcaagggatcccttcacttcctataattcatttttgtcttgctcagagttatcaagaaggttcttatttaaagtcttgacctcaacctttaagtctttcttggagtttcttaatgtttctccttttttaaggcaagatacatctttgtcaacatcattcctttgagtggccaattgttggaatatgttttacgaggatctaaatttactaacaagtatgtttcattaacatcctaatatgaattctaaaacaatgaaataaacacatataaaagtttggaaaaccttacattggtgcagcggaatataatgactcttccgttctgaatctctagcccttgattcctttctgtagcagagcattatcaagatctgaacctggatctc

SEQ ID NO: 182523 - DNA, 932 bp, Cannabis indica
aattgttaataacttatcaaaaaataaagttggtaataaaagtggaattaaaagagaaccttttatgccgatatggaatttgctcccattttgaaagttcatttgcttgtagttttcccttggcaatctctttgaagagggaatgccaaggaatggtctgttgtttctccttattactcttccaaaaataattcaattccatctttttcttttctgaaatgcacaaatattacattaataatttaataataagaggtactatgatataaaatctctatactgaaaaagtacctttagtcaaaaatgtcaaaataataaattactttgtattaaatacctctcggaaagtttatagtacatcatttaaatgggaatttggtagacattctttcggcatttatgagagtttttttagttttttttttttttttataatcgtgtatgttataattatttaaaatcacttataaatttttaaaaaatttaaaataatttaccgtacgtgttgaaaataagattaaatgttttgttgcgcgtgtgattttttttttacgcataataaacaatgtttgagctataattttggtattgtaactatttagaattatttgaaattaaattcacgagtaattttaaataattgtaccggatcataaaaaaattaattaaaatactctctccatgttgtactagaaagggtgctatcaaatacctcttttatgtaatttacaataaaatatcaattgtgataaaaaaaaaaaccttatttaatcacaaacagacacaaatatagtttatgttacgatacttattttttttagtaataaagttctttgtagttgaaaatgcatttacttacaacaaagtgttattttgtgacaaatacacttctattggataatacaaaaaaaggtcccttttggtttaagaaa

SEQ ID NO: 182524 - DNA, 550 bp, Cannabis indica
aagttagtataccatgtaaattctcctattataattcaaatactataactattagaaatattatatctatatcacaattcttttttttttttttctttcctttttcttggaaaaaaaggaacatatagagtaagagaataatattaattaaacttgaaattattcaaataaaatgcatgtacaatggggaaaaaaatagaaaattataagtacaaagtgtaaaatgtcaataattcaaaaagattacttgctttgtactatatggactggatttgacacttaaagtgaagaaaaatgtcacatgggaacaaataataaacctacctccattttcacaaaatcaattaacattaggaattatataattcattcattcatctttaaaaaatatatatatatatataatatatttatatatttattatataaatgaaacgtggggaggacgacaagtggccgacatgtaaatgtagaaaagatacatatgaagagaagagaagaaaatgtgttactcataattaattattattattattattactatatataa

SEQ ID NO: 182525 - DNA, 638 bp, Cannabis indica
tgtcaagtgagatttaccatttgtatatttatatacatgtgacactaaaaatctcaaaagtcaaatgaaaaatatatggcatgtatatacaaatgtacagtggtaatccaattagcatttaatggtagaatttaattgacgtctcaaatttgcaaacaaaaataaagttaaggagatattgccacaaaaataaataaataagaaagttaagtgtacaaaattaaaatataaagactttcgccgccagttaccctaaaaattaaacgaaatgcaactaaaataggtgcactgatataacccctaactgtttcaacatctatatgaattttttagaaaattttttttcatagtcgtcgtatgttatagttatttaagacatcctgcagaaaaatttaaaataatttacaatatagaaatcaatgttcaaaccttctatttcacacgagtataaaataaaaaagtcatgtgtgcaacagactctttaaatcctgttttcaacgtataattttttttttttcggaatttcttaaaattttatcagatgtcttaaataactacacaatatataaccaccataaaataaaattaagtactaaataatttttttaaatttagccgaaacagataaaagtagtatt

SEQ ID NO: 182526 - DNA, 1291 bp, Cannabis indica
atactcaactcgtgcttatctaattatcattatttttgtttttgctgtcttttcttaattgaaccataccaaaacactagcgtatttggttgcttgttatgtctcatgaaatctctttcaacagttggtggatcggtatcctccttgtcagggttgtacacgacagcaatgaaagctgcaggagcaagtagaagagttttccagctactagatcgtgtctcagtcatgccaaaagcaggagataagtgccccacagggtcagtttcactatgcctttggtgtcctggtgtcatgcaaatttcaaattccccacagggtcagtttcacctaaatgtacactaatgcttgttatatattctcacttgtgatgttgtgtcttcgatggcagcgaccctgatggagatgtggaattagatgatgtctggtttgcctatccttctcgcccaagtcatatgattctcaaggttataatatggttatttagtcccataaaatcaactttgtaacattcttggaaggtgttcataagttttgacaatttctttttgtattctatgcttaaactgcaggggataactttgaaactgagtcctggttctaagatcgctctggttggtcctagtggtggtggaaaggtaatattttgatatcttttgaattgctttcctcattctctgctagagctgcctgtttctcctgtatcatctttcaatagatagctcaattttgatcgaaatctcacttttgatttgactgcagacaactattgcaaatttaattgagaggttttatgaccctgttaaaggaagaattttactaaatggagttccattagtcgaaatatcccatgagtatcttcataaaaaggtaagcttttatttctctctttcatatcaaagctaaaatatttgttgtttgttggtcttttatcaagaagccaatagaatgactttgaaacagtcttcatgttatcatgattttcaaactacaggttagtatagtgagccaggaacctgttcttttcaattgctcggtggaagagaacattgcatacggatttaatggaaaagctagcttgctgaaatgagatgctctgtaagtttcaattataaagtttgtaactctattgaaaatgaaaagcttaaaacgctttcccctggtttccatgctgataaagatgatgtatctcagaaaatggctaatgcacatgacttcatgtacaaatttcctgtaaaaactatcaaactgtgtgggagaacgtggattgaggctgtcaggaggccaaaaacag

SEQ ID NO: 182527 - DNA, 1125 bp, Cannabis indica
atttatataggagagctacggtaaagtagaaataagtcaaataactataatccttctttcaatcactttcttcgtcagtatcctcaaagttcaaatgattcatattcctttcgagtgggggaagaccatcctcagaatcagaagacccctccacctcagtccttgatgacttgttttctcctgtacctactaatagaccacatgttcaattattttaattgcttgaaaagaaagtagtaaaaaaaaaaactattaaaaattagaagtgaatcctggttcaaatgtgttcaattagaattttgtggttcggataacatataggaatgttaggcaacaaatttattatttgccaagcataagttatgtgtatgtgcctcatacatcatagggttttcccacatgataagacgagacaacatgatccattgaatggtcatatacaccctcaaaatgactgaaaattaaataataaaatatcactactcaaacttcagattagtcccttaaaagaaacttgtggattagttcatcatgacatatagaatgctgtctaaaacccttagaccatcaccaatatatggggtaaaaatatgctatttgtcacaaaaaattataaatactatattttgcattttttttttgcaaatgtgtacataatagcaaattaatatacaaattgataattatcattgataataatcaataaattaaatataatattttaaaaaaatatatgaaagtaactcattaatgttaaataatgataatgtaaataaaaatgattatttattgtgctaaataaaaatgccaaatttgacacaccactaaaggagttttaacaaaaagtataaaatatagcattgaaccacttatttagcattctattagaaatactcttataaaaccacatttcaataaagtagaaatcatttttgttctgtcaattgtgttgtttacacattttattacatgattaattgttattattacaaaggtttataaaattctgaacatacagtaaggtcacggtgaaatataattgtaattatatgttcaaaatacttttgtcctaagactaaatcacccaactggattttttgttgattcggtaatctacgatataat

SEQ ID NO: 182528 - DNA, 620 bp, Cannabis indica
gattctaaaattcaaatttaaatattaaatgttatttgattatatacgcagcaaattaatctattaaaaaatatgtatataattcaaaatatttatttattaactaattaattttattaataattcaatttcttataaaaaaatatatggtatataatattattttaatctttattctatatatataaatgagaattatgaagcggtgatatggcattttaatatcactctaaatgcatcaatctcttctctccttcattctctcattttttcgaatattttattagagcttaaatctataaattactattttactattattttaataaatttattataaaaaatctagcattaatttttttttttttttttttgaaaaaacatctatatataaactttaatatagtgaccaatatcgttgacctttaatatttctaagccaacatattgacttgaatgtgacatgacaattgcaagcaaaacacgaagaccaataaccttcacttcactaagactctcttgcttaagcagttctaaaatcatatgattcatggcaaaatcaagattgtgttctgctatggtcacagagaactccacaagtttatcatgttggacatcct

SEQ ID NO: 182529 - DNA, 581 bp, Cannabis indica
aaaaataataatttatataaattttccttaaaaaaagtcagccccaattacaagtacagaccagccaactagtgagtggcccaagctcccttagtaaggcccaatatgagcccataatacaaaggaaggcccataggagactttaagtcttcctttagtaattgccatttagaatttttaggtaaatgtttacaatttttatcctatgaaattttttacaaaaatactatctttttataaaacagtcttaaaatagaataatttaaaacaatcaacaattacaaaacattcgtaaaacaaaagtgaaaacttaacacagtaaatattttaggatttaatcgagtttcaaagcataaaataacaaaaaaaaaaagcgggggtgcattgtagaatacaaaatagatattaacagtaacaaaaattgaaatttaatattgtagtgattgtacaatgtacttccttaaaaacgggaatgtactgatgcacccttgacttgtttcggtcatccagaagaattttttaattttttaattttttttcttatattctacgtacgttatagctattttaagataacttat

SEQ ID NO: 182530 - DNA, 667 bp, Cannabis indica
tacaaaagcttagaaagaaaattaagagaagagggaaaaaataatggaagaagcattactcaatagagtgtttttttaattaaaaaaaaaaaaaaactcttcaccgcacttacaaagatgttcaaaaacagaaaacggttgtacacaataactaactaattaaaagaaattcataactaattagttaggtaatcggatcattaataaggttgttataacagacaattacatcaagatttatgatttacatttgatgtttgagattgaaatagtacattttagcgcaatttgcacatttgaggttgcatgtttgagttgatagtgcatataattgagagtaatgaaatttatattacctatctattgactcaggatttcaattaagtgtgtgcagaatttctatatatatacctattttattctacataattaatttctaatttaattttttgtatacgttatgaaaaaaaaatgatcataataagtaaaagtgttccaccttattctccattacggtccgccactgtactcatctatctgatcatttaatttggtttgagaggtatcagtaaagatatgcatgtaattcaaaaaggttgaataatactaaatatatatagtaaataaataagaaaacttaaaaagaatatgcatgatctccgctttc

SEQ ID NO: 182531 - DNA, 901 bp, Cannabis indica
attaataacaaagactcgtagactacagctcattaatgttctaaccacgttaaaatcctctgcattaattattccaaggctctcctcattatatcatttatttggttgtcaaaaatctcggtcaacactaccattggagatgctcttagcacttaaccaaattttttaaaatttatttatttttgctgacatattatattcgaacccacaatgcataattttttttttaattatattttgctgacaaatatatatttaatatttatattttttttaataaaataaaattaaaactacaagtggaagaaacatatatttttttattagctttttattatagtaggaatgtaattcattttttattagctttttatagtactaatgtaattcaatgttcttttactaataaaattttaattctctacatacaactatacaataactaatttataatatcaaaagtctactatttttatagttaagaaaatgtcctattatagaaaacaaaataggagttctcttactataaaaattttctatatatttatagaaaacaacaaaaatttatagcatgaaaggtaaccattttgattttgttttttctaatgttacttaaaaaattttagtttttccttagtttctgattaattaagcagaaaactgtttttttttaatgattgctgaaaacaaactttacacaaaaaactgattttttttattttatttatcataaatttttaaaatatttttctttctgtaattattgttttcttattaaaaaaatccatattaattaaattgttttagaatttgctatccgaaaatagaagagaagagcttaccaagaggactcccttgacattgtttatggttagagaagtatctccaaaaccagtttgct

SEQ ID NO: 182532 - DNA, 1089 bp, Cannabis indica
taaaaatacatatgtcaatatttgtattctaatatattactaaaatgatatgtaactaaaatttaaatacaaaattaaaaatatatatataaacatatatatttacaaattttgtttatattttataaacaatgtatagaattatttattaaatatttaattattattaatgtttatattactatttttaatctaatatatttattatgataatgtttcaaagcattaattataattcgtttgttaagagtttataaataagtttaaaaataaatatttaattttaaaaaaaataaacacttatgtttataagttattcattataaatgtgttttaaaataagactgcaactaaatatgatattatgtataaaaactatgtttatattttatattgataatgttaataaattattaatctaatatatttattgtgataatattgttaatataatatgtttattaatatttgatatatcgttttataaataaaaaatgtgtttattatttatttatataaaacttaagaacttattatgaccttatatagattgtatagaaaattaaaattatatgtttatgtatttaatataacaaaattataattaaatgtacataaattattttatatcatataatataataaaattatataatatatgtaaaactataaatttttcataaactaattacactatgtattaatatcgtgttcatggtgacaaaataatattaattaaatcacaatattatttagcattataaacaaaaaaaataaaataaaatgtttctaaggataaaaaaaatatatatatatttatatatatatatatatgtatataaatatgtacgatatatataataccgtttggacgaagtagaagaaatcataaggtataggagcaggagcagggaacaggagcaaaagcaagatcatcataaaaggaagcaataactaatagtgatgatgatagataccccattagtagaagcttcatcaaattaataaaaaatcaaactaatactcttcatgttcatcttcttcattatttaaaatatatgtatatgttaattaatatgatttttgtgc

SEQ ID NO: 182533 - DNA, 812 bp, Cannabis indica
ggatcttgaatgtatctgatctgattcaaaaaaaaatattaactctaaaatattgaataaatttaaattaaacctatatatatgaaatacatctataatggataaaaccgatcaaattcaatattcaatggatattagatcgattggattattaaaattaattggatcggaaagtatgctaaaaaatctaagatattgttaagttgttaggtgtgttagctaggcttgttagttagtaacactgagtgaactgttttagtaactaattggttactgaattgtttcttcattttttattaatgataatacatttctaccattcttacattctcttaaaaaaaaaaaagtggcttttgattgtgtagtggacggatttatgtaaatgttacatgttggaggcaaattggtatcatagtggatacacaccaagcttggaagaatacattaaaaatggatggatatcaattgcagaacccttaattctagtcaatctttattgccttataaccaatccaataaaagaagatgacatagactgcttgcttcaatatcccacctttattcgtatctcaggaatcattgctcgacttgttgatgatttaggaacttcatcggtaagttagtaactatatactcttatctttttttttttttaatatataacaacataaatcttttgtttgtcacaataaaaattacttgtgactgaaacatactatttaaatacaagttgttaataaattagttttagtcgacaataagtattgtgattaaaaacacatttagtacaacaaattgtactttttgtgact

SEQ ID NO: 182534 - DNA, 699 bp, Cannabis indica
tattacaaccgagtgtaacagatcaatgtaatgaatgactgttctttgattcaatcttttactgcctttcattctcttctttctctctttgatctttgatctttcatctttcaatatgtcaataaactcaacacacttttttttttttgagaagttttgcctttcgatcaatagcaaagccaaccaacacatgtaaaataaaattatttactcttaattttaaattaacttttacatgtaattttaaaaaataataaaaatttggagagccatgcatggcaccctccgtcaatgctcttaacaatcaataagatttcatttatttttaacgaaaacattgcgtagtggcaacaccgaataacaagaatagcagtacgagatttaatgatatagaagtaaatacatattctatacatcatacatccatacatatgaaccttcgaggaaactatatataccataagatttgatttgatttaggtctaccaaaagtcaaaattccttatacaattgcattaaagaggtttcacataaaccatcactataacaactataaaaaaaaatcaagtagaaaatatattaataaactaaataaagacactaaggtactaaggacataacataagaaactcttacctataagaattttgcatcacgtgtacagccatactcatctacttcattatgtctatagttatt

SEQ ID NO: 182535 - DNA, 828 bp, Cannabis indica
aaagaaaatatctttgattggttttggactggttcataaaatttgctaccataatcatttaatacaaaaagtcatgtgatatattatattacttgttcttaatttttggataatcactcttgtaatcgtaatcattaataccaaacacttcaaaatcaattgtcatgtaaggcatttattttgtcattttctttcaagttgaggctcttgaagaagcatttataatatataacaataataaattagactaaatatattttcttaaaaaatttcaacttttgccctccaatttaaaatttttttgaggtttttaaaaaatcccattttgttatgttcttcttaataataattttagaaaaattaacaacctataagaataccaagtcatatttatatttatttagtaaacaagtacatgaatatgctcaatagttaaaacatctttagaggttacatttgcaattttttttttctaagaaaagttacttttttgaaaatttagtaataattttagtcactttctttctaaaagtactataactatggttttttaggatctttttttaaagccttcattattattattattatttatttatttattttttcctactaatttaggggtaaatttagagagaggtcccctaaagaaacttattgaggaaatctaaaaggaagagaagagatcaatataaaagcaatacacctcataaaggaaacttagaggtcactagtttttttgcttctaagaacattttaaataaggtatactaactacattgagatagatattacaattcaaaaaaaaaatgtacaatcactttatta

SEQ ID NO: 182536 - DNA, 796 bp, Cannabis indica
atcatgggtaaagtaccttcccctgatcgagttttcttataataacagctatcaggcaacaatcgggatggctccttatgaacttttgtatggaagaaaatgtagatcgcccattcactgggatgaagtgggtgaaagaaagttcttgggtcccgaagctgttcagaaaacaagtgaggcagttgataagattagagcgcgaatgctcgcggctcagagtaggcaaaagagttatgccgatccaaagcgtcgagatattgattttcaagtcggggacatggtatttctccgaatatctccgatgaaaggcataaaacgctttgggaagaaaggaaagcttagcccgaggttcattggaccttttgaaatccttgagaggatagggcaagtagcgtacaggttggctatgcccccagcgctggcagctgtacataatgtgtttcatgtttcaatgcttcggaaatatgtctcagactcgtcccatgttctgagttatgaagcattggaacttcagccggacttgtcatacgaggaacaaccagtgcagatacttgatagaagagaaaaagtcttgagaagcaagacagtggcactggtgaaagtactgtggaggaacagtaaagtagaagaggcaacctgggaactcgagacggatatgcagcagaaatatccggagttgttcaggtaaatttcgggacgaaatttctataaggagggggtaattgtaatacccggaattaagaaaaaggattagcaaagccctaattagataattatgagttaattgaggaattat

SEQ ID NO: 182537 - DNA, 1083 bp, Cannabis indica
ggttttattctagcgcatttatttttggatgggtttgtaaatattctatggagttattgatacttgtggggaaatggatatggaggaataaataatctgaaataaatgaaagagaagattttgaaaaatgtttagaatttgtatgaaatttatttttgttgtagaaatattggtaaagtgggtttgataaatatttgaatgacttagaatagcatttttagggttttggtgaagtagaggagcattgttcttgatgtttttgatttttttctataatgatgtataaaatctgaatagtgtatagggactattttataattgatgtaatgcttgagaactagtggtgaaatatagtgtgtattggtgggtatatatatattttgatgaagtttatttttgtgtttagaaaataactttttatttataaacatgataggaaaagaaaataaaaggtaaaaaaaattaatagtgtttgttgggcgttggactaggaagttttagtattgggtcgatttggtaaaatagttaaataataggaaaatagtattttgtagtatttgtgtccatccttgaattgttgagtagcaaagaatgtgttattgtgttctcatccatttaggaatgttgagataggaaagagtgtagacccaaagctatgtatttatctcaaaatacagaattccaaagggggtttatcttcgtgtagttgattattttctaatagtattgttactttcattgagtagtggaaaggggatatccctcattcttttgtccctagtatggttgttagatcaacacattccaatattgatagtggtcactgataggttgtggtcattacggacatggatggtgattttgatcgagaggttctggatgcctcgtctctcgttcctatcactatcacagaagagtactatggtcaggatgtagatgaccatgatgcgattgggttagcagtggacggggaggaagtctcagtaataggttatgccttagcccaattagtgaatgaggatgatgaaccgcgtttcttaggtaaatctcagagtattttacgcattaatcccgtctctaaat

SEQ ID NO: 182538 - DNA, 680 bp, Cannabis indica
ggattttagataagatcatttctcctttccaaagtgcttttatttcaggtcgtggaatttttgataatattattattgctaatgaactggtgcatgctattaataatagaaaatttggtaaaaaaggctgggctgcattgaaacttgacatggctaaggcctttgacagggttgaatggaattttttatgtaacataatgtttcactttaatttccctgttcgttttgtttctcttattcttaaatgcatgtcctctgcttctatttctttctctattaatggttctgtgcatggtaatgttaagcccacgagaggtatcaggcaaggagatcctttatctccttacttgtttattttgtgtgctgaaggtctttcagccattcttaggaattatcatcataggggtttgcttcatggtatttcaatttctagaaatgcccctcctatatcccatctactgtttgctgatgacagtattttgttctgtgctgctgatcgtaattcttgtcatgctttgcagcaggccctctctctgtattctcaagctttggggcagatgattaatttcactaagtcctccatttttgttttctcctaatactcaaaatgatattagagatctttttcttaggactttccagcttaaggataagccgtttatcactaagtatctggggtt

SEQ ID NO: 182539 - DNA, 784 bp, Cannabis indica
ctcaaaactgatttgtaaagaggtgagaataattatttgattttattagctaaattgtcctttctgatataaaataaataaataacccaaatggcatcttttcggagagaagagtttttttttactttattctatcaggtgacctcactcttcaatttataagtaaactatatgtgaatcagaattatatagatacatataaatataaatgattcaacttataggcaccacctagcactttctcgacatgttatattgcgattggttagtaatattccctaaaagctattatattaaattatatgggactcgatatttaattggaccaatagccacattgacatatagtagggtgctaaacagtactaatgcacactaatgccctttaacatttctaatatcgtaaacattagaaataattttgttcttttgctttgttcagaattgaagaattttaaaagatatatgtgagagaaaaataaatcttttgtttgaatcaaaataagtgcacaaattctatttgcacataataaaatcaaaagatgtggtctattataccttcatacgtatccattcttgttgaaaatcccttaagtacttttattagtactatgatgatcagatgaggaggaagtatcatcatcatcactgctgtagaagtatctaaaaggtgctctaacttgaacattgtgctttttacaaaatggaaccaaagcctagcaactggatgcttcaatgagagagtaaagtataataggagagcatccatcatctgacacgtagc

SEQ ID NO: 182540 - DNA, 560 bp, Cannabis indica
aacaagatattgggcatacatgcatatatcataactacataaataagtatttgtaccaatgcttaagaaacaatttacctctttcgaccatggacccttgatgagttcaggatttaaaaccttttgccacctatgtagacactgaacatctgttcggtctttaaagcattccgctgcatattacataatttcaaatgttaagaagaaaaaagagtaagaagtcagcacattatatcccacaaagtatatctgttaaacaacccaaagggaattcaaattgataagcaatacaattaaagtaatttaagtttcccctggttacctatctttttccagttttttcctttataatgatgaactgccctcctcaatatctcatcctgtttataaagggcaatcattagcaacagatacaaaagaaacatgaaaagaaaagtaaaaacaatttactaacaagaaaatagtagaaatacactaatttaactaactggagtgtagctgtaggaacgttcgtaaaagttttagttagtaaattctaaccaaactaatccaagtactaa

SEQ ID NO: 182541 - DNA, 890 bp, Cannabis indica
agtgttttggggggagctttttcttgtttgaactttaacagtattttcattttcaacagaaacatcctataaaaatatatagaaattagtttcattaaaatcaattaagagagtaaaaaaaacaataaagctcaaaaactagtttcataaaaagcttaaaacatactttagcttgtcgtgcagatttccttgatcgtactttagcctttttacaagggttaaccttgttagtaagagatagaactttaaaatctgataccctttccatctaacaaaaaatgagtgaaaaataaaattagaccaaaaaaacttctcaatcatgaaaacaaacataaaaaataatttgcaaaaacactaaaaaaaatatcaaaaaacaatatatagaatatttaataattacaaggagaaaacatactaaaaaccagtttctatcaaaattacaaagaataaaaaatcaaacaaacaaaaaaaaattttaagaaaaaaaaacacaacaatgttggttaacaaccaaagacaaatgagtattatttgctatagacaacaaaaatggtaacaatgatgagatggagaaaaaatatcatacaattcaaaagaaaccaacaatataatactaaagacacatccaaaccaataaaaaaaatacaaaatccattaacaaaaagaaagatataaactctaataaaaatgggataagagaccaagagggaaataaggacatcaataaattagggccaaacatggtttctaacaataggagatacacaataataatgtctaaaaatgacacttgaatcatacatacataataataaattcaacaatgcaacactaagctctttcatttttaacattggctcccaaactaagaaacatagaacacaaaaaaa

SEQ ID NO: 182542 - DNA, 514 bp, Cannabis indica
tgatcgaataaacccatgaaataatgattcaaatatatatacttttctacaaaggtctcttcataacaatgtaaaataattttaatgcttaaaaaaatgcataaatttcaaaaattcacactaacctacttaatatagaaacatatacatatatatatgaagaatgactataattaggggagtcccaaaagaccaaactatattataaatttaagtgtcaaatttttgaaagatattttattaatttcataattaaaattaaaattatgaaagtcatcgttaagtaaatttattctaaattttttggcgatttctcttttaatatacactaacaaacaaacacttcaaaatttatcttctatcttgttgcaaagtgttcactgtattcataaatgaaaaaatattttgtggtagcggtaaaaactgaaagtgtaagaataagagttatcactttatacacaattgagagaatctctgcttttctagtttttacctaaccaactagacatcaaaa

SEQ ID NO: 182543 - DNA, 1056 bp, Cannabis indica
ttgtaatcgcgtcaaatagttaattatttaaaaaaataattaaatataaattctcgctaatttaattattgtgtaattaattatttgtcatatatatacatatagatatattgtgttgtaacaatgatgttaatttggtatacgtaacgtttttatttatttttttatattttaaataatgacttcatatttttgcttttcctgtgatcagttcttattttagatccatattttaatactttatatgaaaataataatgtgatattataagggcatatgcaccaaacaattaaatgttagtagtcaatttcaagtttaattaggtgtaacattatgtgggtgagtcattgaaaatccatattgattgtattcattgatttgggtagcctagctgtgtttatcacacacactgttcccatccaagatattttattgtgtgagaattgtgcttctcttttttacttttatttatgggcattattattcggtatcagtaatgtttaatattttttataaatggcgctcaagaattagttagttatattctttagaagctatttttttttaaattatataaaatctgatacttaattacactaataacaatatgacaacgaaaataatattagagactttatttatacgtaccatatattaagaaaaaggtgataatatttgtgcaagaattttttaatttttaatcatattttattaattattttttttcttaaaagaaagtaaaaattgatatataattttcttttaaataacaataattttattataattcttgatttttttttttttcaaaaaaaactgtaactttatacgggaaaaatgttagattacattaggccgattaattgggggtaagttgaaaatactatttttttaatcaattaatctaatttacctctaattttgtatttaattgaaatatacctctttttatattgtattgtacctaaaataccctgacataagagagttatatagagattatcttgaagtgacaggacaaaattggtataatatttaaaaaaagaggtaaaaatt

SEQ ID NO: 182544 - DNA, 746 bp, Cannabis indica
tattttcaaacttcccttttcgtcaatttttataaatatagaacattagcgttatccttttgttagagaaaaacatactttctttataattctaaaatatattatagaaaaaaagataaaagcatcattagaaattaacataaacattgattaacatcaaaaactcattcaaggagaaaaagggaatcacagaacaaaacaaaataaaagtgaatagcaaaaaattagaaaatgctcataaacagttaagttgaacgtacgattcagtagtaaaattactgagaggaagaagcttcaactcattttctttcctacttctttcaatttcagcttcacacttttcaagtttcagtttcaaatctgcaacttcctgtccatataaaatgccagatgaagcacaatacataagcatgggataactagtttaatgtctacacgaaattttcttcaatagatatcaactaaaatcattcacaggaagatattcaagtgaattattgatttgatgcacgtatcttgaggtaataggacaattgtagctaccttttcaaattgttgtcttgcagatacttccttttctagtctttctttgtaatcgattttgaacttgatcaagatgtgtctgctcaaaataaggatcatatcatcatgaattaattgaaaaaaaaaaaaatctcgaatgaatattcaattttgaataaaattgtagatagacccaaaaaaaaatcacctccaaagcttttata

SEQ ID NO: 182545 - DNA, 1096 bp, Cannabis indica
atgtcacttacaaacttaaaactttaggtacttataccactatttaccttttttattaaaggaaaataagtagaacttaatattaaattatattaatattatactttaaaagagtgctagctacaaaggatactttttagcatttcttctatgaaaattgttaaaagatattataagtgtctaacactctcttcagtgtcatactactattgatgcaattaagtgtcgagtattatataatttaaaaaaaaatagtttttagggaatcttactaaccaatcgtaaaatgtcatctataaaaactgatgagcatcactgatatccttatctcatatgacgagtactaccatcaacttcttattacaacttcttagttaactttcgtgcttgaaaacacatgtcggaatatttttttattttttttaattggcggtgtttgttatgattacaacgtcaaccctgtaaatttttcgtaataattacagtgccgaaaatacgtttgaattttttttaactaggcatggtaaactgaaatattaggaattttgttttcgtacattgtaaattattcgaaatttttaaacttttacaatattgatacggtaactataatgaatactattattaaattttaaaaaaaaataatttttactatgtaatttcgtagcatagaaattgactaactcaaaaactataatagaaagtggtaattaagagtctctttctcagatacccgaggccaaatgcaggagaaatattccacttgtcatttcaaactattgccacataaattctctcaagactattatttctatcagtgggccctacgcatatattcattttcattgctgacctcaaacttgggaagttgggattcttcttcctctcaagaaattcttttattcttttttttaggtgcctcctccagaacataagatttgggttgagtaaataaaatattaataaaaattctgcaaaaaaaaaaaaaaaataaaagactttaaaaaataaatcaaaatagagaaaatttgtaaaattttgggtaaaactaatcaaatttgcttgtttttgtggttgggtacaaagaaacaaaaaa

SEQ ID NO: 182546 - DNA, 740 bp, Cannabis indica
tcagagagtaattcatctgccaaagtatttggaaacacaagtaatgaatttataataaaataattcacttatttataaaaagtgagtagtgaactaattgacttatttatttcatgtacagacaaaacttattaataaggttagttgcaactaaaagtggaattgacgactataattgagatacagtaacaacaaatttaaatattgtggcgaatatatacaaatgaggtacggtgatgataacaattttgaaatcatatcataagttttctatagatttatcaatggtctttttctcatgacttaattttgtatgaggatattaatttatttttctaagtaaaaaatattgtaaaataattaattttactaataaaaatattatatctaaaatattaaaatatcaaaatttaatattgaatgtatttataatataattatcaataaactaaacaaaaatacaaccacacgtgaaacgcggtttgttttctagtcaatatatatctatatataaatgagaagtatgagacagtgaatgacattctaaaatcactccaaaactatttttcttttctctccttaattctctcaattttaatattttattaaagcataaatctacaaattgatatttaactatttttttaatgatttttctataaaaaaagtataaatctacaaattgatattttactattattttaactttctatagaaatataaaatatttttaaaaaaag

SEQ ID NO: 182547 - DNA, 802 bp, Cannabis indica
ttctctctctctctatcttcttatttttatcttctattttctcttaaactattttgtttgtttccttaagaaaaattacagagaaactatttgtggaaggcaataataataaaacatggcttatgaatagttaataaattaatattcatccaattcatttgtgaggctcttatgcattcacatttataattcaagcttttcttattttaatattggaatgtaactgtagaaaaattgactttatgtttgatttgaaagaaattaaaatggaatgcttacaaaaattattcaatgtatctaaaattgaagtcaaattttgacaaattttttaggtagaaaaaatgaaagaaaattatcaaaatatatatacttgtgtatatatatatttaaagtaaatggaaatatttattaataggttaatcatataaaatttattatatgaaaaaggtttaggtgttgcggaacataattaattgaaaatgtgaaaatatgtctagtgttgctttggaaaaaaattaatctcggggtcaagtggatgtgctggagggacctcttctttaagagcattaattgttgtgggcgagtatgaacaccaaaggagggtcaatactcgtgtaaagaggcatttggacgagtactggccgtaggaaagtgtcaatacttgtgtgacaagtttggtgaggctcctccttagaccaaaacctacccatattagtattgaccatggggatagggttagtactcgtgtagcttgatgtgtggctagtgctgacccctatgttgttgtcagtactcgtgtact

SEQ ID NO: 182548 - DNA, 973 bp, Cannabis indica
aattgatgatgatcaaacagtgaaattgattccggaggtcggtcgtcaattttcggagcttgaatcacatctgcgggaccttttttgggtaagttgtagttgaaattcgtaactcttttgagtacgaaatttagacttgatgtcttcagaattgcgattagagtgtgagacattacttaatatatcattgaaatagcttcaaaacataagtcgaatcgcgtctatcgggtcattattgattgagttatgattattgtactgaaggtcgtaccatccaccctacgacccggttggcactccagcgtttaggttggcacccaccaccgggttgacattctgacatcaacctggacgctgggtgagtgccaaaatgtccgaggctttgaaatttttgatgcctaagttgatgtgtttgacaccacttagccagttttcatgttctagtgaagtcgtaccaccagctcttagaaatgttgttgtttcgcagaatcaggatactcgaaattacctaattcgtgactaagtcactttgcaaaaaagtgaaattatgaagttgtgaatttaacttatttgagttcaaagctcttgtttactatgaaaactagacgaatgctcgagacgaaatcagaatgggaaagtaaaaatccagtgcaccaagtcatacatcaacctaggcactgggtgctcttttcagagcttccgagttgtcgttttgatggtttcaaggtcttcaaaattgagaacgagatctcctaccccgttttcggctagaggaagaaaaagggtctgatcgtgcgtgttatggggttggtggtttctaggtctttagggtaaagtggactttctaacttcgattggtacataaacgacaaaagtcggaaaggagtattaagggacctgcatgttgggtaaagagtagatttttttctttataaacagaatgttaaaagtgtttttcttacgcttccatctg

SEQ ID NO: 182549 - DNA, 717 bp, Cannabis indica
tcgttggatcaaacattctaacttctcttgcatgcaatgaagcaggcaaaagaagagaaaagttaccgagaaaaatacgaagtttagtgtgggaaaagtaaaaagaacaccattgagagcagtttatatttgaaaaataaaaccggcctttgcaagatcaatggttaagattttgtagttgatctaacaactggggagataagaggtctagcataattagcccagggcccaccagaccattaagacgagtctcttcacaacatttaactatcagtagcactccaccttttttgaaagatattcctcgacacgcgccaaagggaccaactgagatctttaaggtgtcgcgtggttgccacgcaagtagatactgatgtcaaatctacccttagcagagtgcagctcatatagaagatgtgtccttgattttgatgttcagcacaagttaacagttagtagtaggaaactatgacaaagctcctataattcagagagtcccaaaaagcttgggggtaaatgttatctgtgtttttcaggcatgattaagggatatggtgtattagatgaatggattaaatcgaaaataactcataaggtctcccagagagaaacttcttgacaatcctggaaaacgtgcaatagacacttgacgagatgagccagtctgcccataagtaacatcttttcgaaccttgagaatggttgaggtagatggct

SEQ ID NO: 182550 - DNA, 638 bp, Cannabis indica
cacgtatgtttagtattcaatcggaatctatttttctttctagattcttgagttttgtcagaggttctgtctcttatcatcatttgaatttcaaaatccttctgtcatctgcatttttgggaacatgaaatgtgtaaggtctaacattgtaatgaccgctaaattttattatgagaattagcagataattatgacttattttcagaagtaggcttttaattattattttacaattatagagatttatttaaattttaagtatattaattatgatatatgtgaaattttatatttttcataatttatgtcggtaacagtgtaacacaatgtttggcctatatagtcacttagatatgatttagtacttttgagctagtggggtaacatagttagacatttaaaatgtcaagaatttttggaattgtaattttagaccattttacctaaattgtttagattacttaatgtgtaagcaaaaggggtaaattgtctttttaccttagttttgtccttagtggactttctagtaactaagttaattaagtttaattttgtttagtctgaatttaattaattacctatttcatttagtcaaaggaaaaatcgagaaaataattctctctctcactctctctctc

SEQ ID NO: 182551 - DNA, 587 bp, Cannabis indica
tcctcatcttgtcatggtggaaattctttggtccctaaaaattcctcaaaaagtcaagatctttgtctggtgtgtcattcatgatgctctacctgtggctactcccttgttcgaaggagatcattactgattccacatgctccatttgtagacaagcttggaaaacaacggggcatgctctatttagctaaaaatatgctaaggctgtttggagagctcaaaacttaaggttcgattggcacgcgtgtacatcgatgcgtaatggagactacctgttacatctttcaaaaatctacaccaaattggagatggaacaactttttgtacactttgggctatttggactgaacgtaacaaagtggtacatgatagcaaagcaagagccgccaaggacctagccattttcgccactgtgtttatttagaattttcgagctgctcaacgtaagcctactgctgctactatatctgcaccagcagcttcacatcagcaacgaacagctgctgcatcaccaacatcgtggtctccaccagctgcaggcactcttaaactcaatgtggatgcggcagtcaactcctcaacaagta

SEQ ID NO: 182552 - DNA, 641 bp, Cannabis indica
ggggtggggggtgcactaaaattatcctccttttaattttatttttttgttgtagatttatgtgctgttatgattgtttgcataacttcagacttaagtatcattcatagggagtagctaatcatagaagttttattgctgttcctacaggccaggcacatggtcatcccttatatgccaatgctagtgcctcctaataattggctagggtatggaatttaagcctctttgaatgatttgttttttcatttattattatataaaatatatatagataggtttttggagttcaagttactgctcatatagaaaattgtaacatcacgttttactttgaaaccaaataacctttgtatcaaaacaaatgttccattatatggcaggtatgacaaaggagcctatttgttcttgccatcatatgttatgcggacacatggagcaaaacaacaacgtgaagcagttaaaaggacttctaggaagcaactggaacctgttttagaggtctgagagccttgttggagtttgttttattaattcgttggtgattatgcttcagtgctctgccttagcttccccacaagcagatcttacattcacaaattgatctttcatctttctttatatgtttgccactcttgttt

SEQ ID NO: 182553 - DNA, 639 bp, Cannabis indica
aagtgttacccgatggttcgcctcgttaagttcattagttaatatagcgagatgactgtctcgctatacataacttgaggttgacacgtgtgattgtatttattctacttcaaatacatgaatatcttcattgactatgactctgaggtaggtgcgtgtctcgtcaatacaaattttaatgaccttttatcattatctcgcttgagactatatagtcagcgagttataaatattttctattaaatatttgttaacgagttattttatcttgcatttaatgatataactttattatattaggtgattcatattccattgaagacacgtgtcactttctgaagtgtagccaaatttcgggtataacagttataaaaagcaaagaagaaataaatagcaaagtgtctttatgttgacagagaattgatgaagctttaactgattcattcttagataatttattttttgattctttttgacagaattaagtcaaaattcttttgactatactattttgtaacagatgaaaatttgatgttgacttacatttttagtccatgttttaatcatgttcatctgtaagccttttctttgatattacacttcattagctataatttatttgaagtcagttaagcctta

SEQ ID NO: 182554 - DNA, 725 bp, Cannabis indica
gctttgtttggagcttgaggtagctcttaatcccttttatttattaatttttcttgctgaaatttattgttcaaaatcatgaaaaagtgtatgttgttcttggtttgcatgtggggagaatcaatattaatcttcagaaatttaggtgttaattgcttggttttttaatggattatgttggttgggttctagatgagcttttagggtaattttcatgtttgcattcaggtcttgtttgatacgttgttgctggaaaaaaaattaagtttgaagcttgcttgaagttcaagttcttgattaggaacttatgatgaattttgctctaattttggagcttcgatttcatgttgttgaatctaaatttctagggttgtacaaaaaaatttgtaaaccgcctaaaccgaataacccgcccaaaccgaaccgaaaaaaccgataaaaattacaaaccgaaataacccgaaaaaattacaaaccgcccaatctgttaattgggcgggttgaaaataggtccaacccgcccaattaaaccgaccaacccgaccaacccgattttgcaccttaattttttttttaaagtttttagtttttattatatataatataaatgattaaatatataataatataaagttatatacttaattattagttttaaagttctatatatatggtattgtagtttagttggaatgtgatatttttaatttatttttttaattttt

SEQ ID NO: 182555 - DNA, 719 bp, Cannabis indica
ataatttaatttattttttttttgtgttaaattcaaataactttattttttttttaatttaaatactttcataaatataatgaaattaatattttttatttttatatactctataattataatatttaatttgttaataaaatatttaaaatataccttagtctattctagggcagaggcacatagacctcaagggtgcccatggcccccatcccaaatatatatggtgcttatataaatattatttacatatatatttgctattgcattttatatataaaaatatttgattttgggcaaaattttacaattttactatcaggctaatttttttcaaaaatactatctttttataaaaataactgtaaaacaataaaacagaacaattaaaataacagtggaacaactaaaaaataaccgtggaacaaccatgaaaacttaacatagtacacagtataaaacttacacagtattttttaaaaaaaattccgccccacagtaaaaaagtaaaaaaattaaaaatttcagtatgtggtgtaaaaaaaacccatttttaatttatagttacccacttttggcccccaaaacatatatgtaaggccaatatttaagtcccaatattactattttattttagtttttgtgaaaaaaaatattttttaaggcatttaattatattaattattaataattaattgttagataatattaataattaa

SEQ ID NO: 182556 - DNA, 1070 bp, Cannabis indica
aaaatttgtacttatgcagattaaatattgattatatgtaaaagtaatcgatttaatctaatctacacataaaatatgttaaaaagtattcaatttaatctaattttacatatatttgaaaatatatatataattaagggtgtctatacattttagtaccttgtgttttgtctaaatacaagtttgataccctgtatttttaataatgcttatttggtattctgtattttaaaattatacctatttgataccctaaattcaaatttttttgataaaattttatcaatacaattaacagcttaaaattttatgaattctgaattcaaatttaattatttgattacacataactgaaaattatttggttaaattgataaaactgtattgattaacttttactttagggtaccaaatatgtactatttaaaaatatgaggtaccaattaagtattattgaaaacataaggtaccaaatatgtttttcatgaaaacacaaggtactaaatgagtatattccttataattaatattttaatgtaaaaaatagtaacttaaaaatttaataaatatgatacaaatatattttgaaatagataaaatgtatattcatttcttctttataagaaaagtataatctaaaataaaattgtacacttcttcatacatacaaatttttttcttgtttcgaatttgttattttttgttttatttattttaattttttattgaagatataaattaacaataatttattttattttgttgtcacgtgaaaaaaatacttttaataaatattaactaatttaatattaaaaagtaatcaatttaaaatagcctttctaatttttacttttgtggattgggttgggttggattggatttgaattattatgctgattagattggatctaaaaaatgaaattcatacttagtgcgaattaaatgcactatgaacaaaacattacaaatttgaatagatgaatacccttagtcgtgttcgttttgacacgtgtatgacatgacacaattaaggtaaacacgactacgacacgtttataaacatgttgaag

SEQ ID NO: 182557 - DNA, 848 bp, Cannabis indica
  modified_base (813)..(813): a, c, t, g, unknown or other
tacccttatgatagtcattacctaatacagtttttttccatattttttgactttttttccccataaaataattttttttttataataagttatattttgcgaacttataccttaattccataaaaatgaaaaactccccaattatatgtataggacactgaaagcattttgttttatattttgcaccagttgctagtgtacgggtgttggctgcctatttttctttatttctttagtttccttacaagagttgaggcctgctgccaaatcccatgctccgggtttgagatagaatttcaatgctttaaactgttatattgagttctcttttttattgatctctgttagttcattaaacttaagtaaaagttggtttggaaaaaaaaaatcaattaattgataagccagagcaaatcagagttcattcatgcaatgacattgtactaggtgaggatcaaatctttgttgttttgaaaacgagcatgtctatggtcttagggaagaagatccattcacaacagtttgttttttatttcttttgttgccattaagttttttctttatttaatttctgctgtgcaaagttttgttcacttgtaatggtatagattgttttttaccattattttccaaacattctgagtttataattggatatgtatcactgcaggagcttaatgctatttttgggagagcagttatcagacagaagcgaaagaagacatcttagcagagtttgagagcttagaaaactgaggttttgtatttttctcgtcctgctatttgtgtaaactgaaattgaacgttcatccnctattgtctgcttattttttgtaaactaatattgc

SEQ ID NO: 182558 - DNA, 657 bp, Cannabis indica
ttttttcaatgtgtttgcttctccacttatatttccttattcatatgcgctattaatagtgtttgactttgatatcaccttaagggaacaaatatagaaatctatgtactgggattcagatgatcatgaaaaatatattagtaaaatattttcacagcaggattgttttacttttaataaaaatttatattatatgacaataaagatataaatatattattttaattcgcatatatatatatatataacagtgttcaagtggaatggaacatggacacacaacgtggcgatggtgtctactcaagccgaatacgaaatgtgcacgaaaccaggactcgttttcctaagtggcatcagtcacgcactaacaaaaaatggttcgtacttcttcctttgtaccgttgatgaccactgtgaacgggggatgaagatgatcgtcaccgttgggtctccaaccgacgtgtctcctacaaatgattccacttccatattatgttcgcccttattcggcacattggtcacacttttttatcaaccattgtaattttttctacattacaaagcatagagtcatagtattctttgtgattttatctccctaagagctggtgttgttggttggagctctatgtatatactttatttattgaattcata

SEQ ID NO: 182559 - DNA, 731 bp, Cannabis indica
atataatttatatacatattgttttttaagaaaatatagattaatttttttaatttggagcacaagtacagatttaattatgtttttatgtttactattcttacatatatattatattatattctacatttattaattagtaatacataaaacactttaactagaaatatttatttgctagtgtaaaaatatgatataatttagtagcaataaatttataattgcaataaattctaatatacacaaaatgcatcaactttatattttacgccaatataaaattttagctacaaaaaatactagtagctaaaagtattcatatgccaccaaaatttttagtaacaagcatatttagtgtcattttgattaaaactcattttgctactaaaatttagtagcaaatttttatttagtgctcaaaatgttagctaccaaagataattgtagctaaaaatataaatttgctactaaaatatttggtaggaaactcatatagtatttttttattagaacttgctacaaaatcattttgctacgaaaatttagtaactaatattaattaactgctaccaactacatttggtagctaaactttgttgctaaaaagttggtttcttgtagtgtacaatcatccaaagtcttaaaacgctaaaatgatccatagcaaacttgaacaaaataaaataagttctcaattctcatgtaggcctcaatcgacaatgtcaataata

SEQ ID NO: 182560 - DNA, 684 bp, Cannabis indica
agaaaataaaattatatttaatggggaataattggggtagaggtgaatgggacctagtgagaaattatagaataacccaatcaaacattgattgattagctcacttaataagttaatccatggggtcacttttaaaatagaaaataaaaagagtaggagagggtgtgtcgacatctccacacttcaaatttagggattaatttcttctttttttttttaataagaataaaaaaaaatatatgtataataatactatataataaagggaggtgtacttatatatataatttattatatgtacaataataaagagactaaaatatatgtatatatataatttgggtatagatgacacatacatatacatcaaattaaaaatattctacatgtttgttatatttcattttacattatatattcttttttcttaaacaaatgtgcacctcaataaattattaaggatgatttgagaaaattatttaaataaaatatatatatatatatatatgaaggttcttaagtatacatttgagaaaaataattttttaaaaaaccaaaagtctaataaatacacctacttttatacttacataatgagaaaattgtataattgtattgttctaataataaatattattgtttcaaaaaaacttaataataaatattataattatagtatattta

SEQ ID NO: 182561 - DNA, 855 bp, Cannabis indica
agtgtgttgtttgaacacagtacagttagttcacatttagaatctctctttaaatctcttacagaaacttagttaaggcacacacaaacacaaacacacaagttgaattgagtggattggttatggagctaagctcaattgaaagacacaagaagtcactatttggaggctttggttcaaccaattcgattaaagaggaggaagatgaggaagctcggttgaagtgggctgccattgaaagacttccaactttcaaaaggcttagaacttcactgattgatattgatcatgagggaaaagaagctgaaggtatgagaatggttgatgttacaaagctcggagcagcagaacgccatcttttcattgacaagctcataaaacacatagaacatgacaacctcagattattgcagaaactcaaggagagaatagacaggtataattagtaatcctactgttgtatgcattcatatttagtgtttgaacaagtatacatatcttaagcagtcgtatgatgatgatagttcattaataatcttcttcttgtttagagtgaatgtgacattgccaagtgtggaagtgaggtataggaatctgtgtgtagaagcagagtgtgaggtggttccaggaaagcctctaccaaccttatggaactctgttgtgagaagtgtattatcagtaagtatatggttttttcaatttttcaccatatcttaattttttttttatttaatttatttattttgacttgattctatgtgatgagatttgtatgatcatatcaaataggtggttagaaatgcaatgctgtgcaactcagaagaatccaagatagtattgtaaaagatgtgaagt

SEQ ID NO: 182562 - DNA, 958 bp, Cannabis indica
agtgttccaatgtagtgagtttggctacaacaatatttactttgaatctgattgcaaatgtctttatgttaaacatactaattttggtgatttggactcttcacttggattagtcctttgatatattatttgatgcttgtgattttttcatatatttacattcatgtattgctctagaaagataaagagaaatgctaggactaactctaatgaatgttgtccatatcatattatgtggcaagagagaagagaaaagtaataaaaaaaaaaattctaaaatgagtactatcgcccttttatatttttaattaaaaaattgcgattgtctagtacaaaaaaattatgattgactattttagttgtcccaattagagatgatttaataggttttttaaggtattaagtactctagagatattttattagtataattaaatattaaatgctacatattttaatttaataaataacataaaaaaaatactaattacttacaatacaccatatcaatatagtattagacattttaaggtttctaacaacaataaaaaagtaaatattgtagccttttttttagtagtattgttgttaagtattagtgatgctcaatatatcttatatagataatactttaacgatatcttttaaaaattatttttttaaattatgtaagatctaatatttaattatattaataatgatacaattttttttgtcgtatttgttctcgttcttttctcatatttggggaaagcctttggacccatttttttatttttttgttttgtttcttttgtaagtatttttctacaaaaaaaaaaaaaaaagaaaattaagaaaacacaaaataatattatatatttttggtgaatttggcgcctctcaaaatgttatttcctggaaacaacgaaacaaacccttctttcttttccttttgagtattctttctttgacgtct

SEQ ID NO: 182563 - DNA, 637 bp, Cannabis indica
ctcagttattattcttagtatttttgtgctttgctttcttccattgaagattagtcctcaccaagaacccaagcagaggctctcataagatggaagaacagcttggtggtgagaccaccttcactgaattcatggtccaataataacattgacaatctatgcaactggactaatgttgtatgtgatgtttccactcgagaaatctcgaaaatagatctctccaacatgggcctcaaaggaacactggacaagttcaacttctctccattccttaacatcaccgtcttcaacatcaacaacaacaaactcgctggttcgataccaacagccattggtaatctcaccaagctcactttgttggacttgagtgaaaattacatcgaaggggaaatttcaatggagataagccaattgtcagagcttcaatatttgagtctcttcaacaattctcttgaggggccaataccttaccagatcaccaatctacaaaaggtatggtacttatcacttggagcaaatttttttgagaattctgattggtctaagttttcaagcatgccttttttaacataccttgatctttttaggaaccaattcaattcaacattcccaagtttcatatctaagtgtaggaact

SEQ ID NO: 182564 - DNA, 741 bp, Cannabis indica
ataaaatgaaacaacaatgagataattcccaaaattccaatagtttttttttaataaatagatgataacttatttcaataactcaataaatagtaacttaatcctcaaaataatttaagaaattgaaataaaaaagaattaaaataaaaaatttagatgtcgtttgataacacttttgttgtcaaattttttaatcacaaaatgaaagtaaaacttttgtttttaaaaattttatttttgaaaaacaaaaaagcattctgtaaccacttttgttttacaattaaaaaaacagaaaataaaagtatgttctgtaaagtttattttcattttcattttttgattttatttaagtcgggtctagatttgggatcagattcgggttcgagttagaagtcgggttcagcgccaaggccttgggagggatttaggtccggatctaggcggaattcaaaatactgattaagaaaaaaaattgtttaaaaaaaatattaaaacctgattttttttttttaatttttgtattttctaattaaaaaattagaaaagtaaaaaacaagttttattagaaaatagtttatgaaaaataattttcagttttttaatttttaaaaactaagaaaactaaattaaaaaaatagttatcaaacgctaccttaataactaaaattaaaatttagtagcaacaaatcccttaaaaaaactaaaatactttgtgtttgtacataaaaaaaaaataaaaat

SEQ ID NO: 182565 - DNA, 755 bp, Cannabis indica
attataaatatcaaccattagatatttgatccaatggttaagaataaaatactcatacatgagtaatatccattaagagcatacccatatatatatatggaatacttttattttatccttataaagtttatatttttttctcaaataaaaataatgtattttttttatcaatgcttattttatcaaaaaaaaagtttatttacgtatttatttttaaaaaaaattaccataaataatcttttaaacaaaataatattttacaaatttataccttaaaactataaaataaaattttctgtggagtaattggtgcgtacaagtgcatgctcacattaccatatatcgcctaagaaaatgaagtttacaaaagtggctgtatatgtgtgcaaactgtatgtgagtacatatgggggaccttgccagcccaactgaaaatgacataaactatgtctttgtccccttattctaatcattatatgttgtaactcgtgactaagtctaagatatttatttagatttcatatatacataaacacatttttcttttttaacaggggttgaggttttggtacacgtatttgttgtgatgttatacatacatacaatatacaacacacacctatttttctttttgatatgtagacagttataatctccttttaatgacactttgtagttgttattatttagtaatattttactgatttcaagaagatttagataatttgtgtcaaaataaatttaaatcatggtat

SEQ ID NO: 182566 - DNA, 712 bp, Cannabis indica
cactagcatttctttttcatgtgatgtgacttttggtgtgcgtaaatggatctaattaatgacattgattatacaatattaatattaattgtgatcggatgtttatttttgaatatctaatacatgaaggtaaaatatatatgtacatataaaaattaatattaaaattttactcttttttcttggattgaaatggataccaaaatctaattaaatatatactagactaaaaatattagatgaatccgatactaataccaaaaaaaaaaaaaaaataacttaggttgtataaactcaaattaaactaataaatatatatgaaatatctcaagggaaaatttacatggtatactaacttttgtcatttttttacaaaaatactgtcaggcggtattttttacttttttactgcattttttcataagtttcataatgcagtatactgtgttgtgttttactggtattttttagttgttctactgttgttttgaattgttctgctttgtgttttactggtgttttataaaaacacagtatttttgaaaagatttctgtgtgacagtatttttgtaaaagttcacctaaatttcagtattttgtaaatttccctatctcaatccatgaatgtttgatggattggatatgattgaaataaaatttagagaaacttacaaaaatattgaaatttaggttaatttttacaaaaaatact

SEQ ID NO: 182567 - DNA, 525 bp, Cannabis indica
ctaacacgttaatattttaaatcgtgtcatccgaattttaatatctatcaaatcaagttctttaaactttaatttggtacatattcaaagttcgagagacaaagcattctaaatttttcttactttcatttatataatttgccatagtagagtccaattcttaattttagtttaagaaatgttgatattattattatacttctgctatttgggtcttacttgggtcaaaacaaacatctattataagattatattatatatattataacctatacaacaaatgacatttgattaagctctaattgatgatataataaacctatgtatccctagtttttttaaaaaacttaactagttagttgacttacttaatcaattcaaaccttatatttactgtagcttattcagctagatagatagggttggtttgtttattgtctagacaatgctacctacactacagacaaaagaaattagaatatacatatatcattttgtgttacttattctaccgacactaaaaaa

SEQ ID NO: 182568 - DNA, 630 bp, Cannabis indica
gtaaatatatatttacctaagcttttcattatttttgtattatcttttatctttatataattatttaacacgtatatatgacgtatatatatctctttgccacgcctaatataaaaaaatatatattaaattagttttactttgatctccaattaatacttttatttatctaacaataattaatgatatataataatgatacatatatatatgcaccattcatgtagctagcaattgtccaaaggataagctcccaaaattttactttcaacattatatatataagctatttattccattaattaattaattgcatatgtagttagcaaataacaattttgatcataatacacattgataggaaaaattgaagattttagtactttaatactacccatatttattacacattattttgtgtaataataagtatatatgtgcaatttgaatgtgtatctagtgttacacttattttaatttacatatagtttgtcacttattcaccatatttagttactgctgtctcacaccttatagaccattttcaagtgtaaaaaatgttaaatttggtattaaaagagtgaatgtatattgcacaccttttgaatgtactaattccattacacatgc

SEQ ID NO: 182569 - DNA, 1048 bp, Cannabis indica
ctcacttttattatataatttataatctcaaccccttttacttttagacaaagtaaaagtttgtttgtgtttgtaaaactctaaagtcaaactatagtttttattatgtgaaatatcatatattggaaaaaatttgtgaatcattttagcatatttcaagtagatagatagttatattttcagttttttaaatgtatatgcaccccaaaaaacaattattttttagtgaccaccatcttttagttacaacataaattttttgtgactaaaagtgacttttagttataacaaaaaactaacttgtgaccaaaacataatatttaagagaaaatgctaaaaagggcaccagtggtgcctagaaccctcctatgtgttaatatcgctattggtccaactaatcatcaggtcccatataatttaatataatagtttttagagagtatcgctaaccaatcgcaacgcgacatgtcgagaaggtgctaggcactaccggtgccttataacaatgctcaatatttaaagacaagttctcaataatttactgttaattacaacaagtattgtgactaattaaaagtatatttagtcacaacaaattgtgatttttgtgactaatacctttagctacgaatcttttagtcacaacataagaatgttgatttatatttaatcacaactttttacttttagtcacaatttactaaagataagattttttgtaatcatatcttgtaaactgtagacaaaattgataaattagatttgaaatattttaaatttttttgtacaaagtagttataaagattttccttttatattttatgaagtatatattttaattttttacttttttttaattgcatttttttttacaaaaatctcattaaagaaatataaaagaaaacttatataaacaatatattacaaataagaagcaaacaacatatcatagtagtgtttatttttgctttatctccatacaacaaacacttgtcaaaattaattcctcgtaaagcttcttctttcaaggtaattctgaaattttcta

SEQ ID NO: 182570 - DNA, 464 bp, Cannabis indica
atacgattataccaatggtagaacctcatttataatgtaattatatggttagactagtggtagtcagttttcttatccagtttgattttttttgcttttaaatgttaatattaacattggatattttcgtaatttacatatcttttattggattgagtgaactttgattgtaatttagtacattgctatgtgtggcgtgctgccccatgacacacccataaagaggtcattttgtaacatgagcatgctttagtgcttgattattagtcaagtcttgcaccaaacacttcattgggatggggagacttttgtcattagcttttctttttgtaattccattcacatatgtatggagagctaagattatatatgttcttagaaatcccttgaaatcccattacactctttagggggtgacttggtgacttatgaagcaccttatcactagcatgataggggcctag

SEQ ID NO: 182571 - DNA, 746 bp, Cannabis indica
  modified_base (686)..(686): a, c, t, g, unknown or other
aatacaatctccagtcctaattacaaatcaaactaagtaaattgaagaaaattcatacaaaacttatcgatatttacaatcaagtacaaagatctaagtcttcttagatcgatgaaggcaacacccctttgcttcaattcaattgaaatgcctttggcagtttcatctgaactccctttagcagcttcatctgaactctcttcaaacaatacagataaatattcattcttcagttcatgacactactagaaatgtcacttttggtagcacatttttgtgttggtaaaaatttggtattacgctggtaaaatacaatttccttttgatgtgttggcaaacggggttggcaaatcaatattggtattagaacttttgccagcacaaaatgaaaaagcgcgggcaaaaatgacttttcccagcgcataaatgccctggtaaaagttagactttagccattgcaaatgtgcattggtaaaactttgacctttttgccaacgcagtttgcgaaatgcgctggaaaaagttacttttaccagcgtagtagcgaacttacatatatttgatatgtatgagctccaaaaaaaaaaaatataacatacctacactactactaaaacgatcctttagtaggcagtttttaaggccgtttcagcgtcagtttggtcaaaattcactacagatgctgntcaggtaacgatgtaaggtctaaataactaacgccatagggggacatatgacgtcagtta

SEQ ID NO: 182572 - DNA, 558 bp, Cannabis indica
gaaccaaaaccacccttctcttccacatggctccattcatgattatttccaaggtaaaaaaaactaggcagtgattggcttgctccatggtaaatgcaagtttgaagttcgttacaatgatcaaatgaaataacattcaggtggctacacaacttatattaagcagtaagttaatcgtacaagttaccatgtttactttagtggtgttaataagaccagtagcacaaataaggttgtgctttataatttaaaaggaaaatatgttagggaagccacccgcctctcattatggaagctcattcactccaccactcgcttcaatggtgtcaaaatcattctcccataagtaccttcaatctgattgtacaacacttgttgattacgtttgtaatagctctgagcataacctaaacctccacctatagggatttgtatctgctattcattgcttagccaaaggcctagatcaggaagccatatggattggaaatgctaatatcatttagatttagacttagattatatctatatacatcctgtactcttgatgatcatttt

SEQ ID NO: 182573 - DNA, 1616 bp, Cannabis indica
acggaagacgtagtgtccgagatctgttggtgcggctgaaggtgctattgtcgttttcaatgctaatcccctttcctccactctgaatattggaaagaagactggaactttaccctcttcagaagataatttgaattttgttgaagagagaggtacggattgtagtcctttgacttcttttaggggacagctagcgggtggggctcgttatttcaaagaggacgtgtaaaaagagtgggtcggggccaaggttttgtgggcctaatcctaaggcacatgttggtgctattgggccgagtagtgggctgtccattgggaataataaacacttacctgggatttatgaggaggaacgtgggacaaagaagggagttagtgatttattgtgtgggccgaagtcacatgggcctttttctggtaattatggcaagttgaatgtgcatgggctggtgccgagtacggcttatcaggagcaggttcctcttgaacacacttgtgttaatactgtggttaatgatggccattcttctaagggggaaggtggatctaagttatcaattgttggccaggatctctcggatcatcttgatgaaaggagagctctttccaagttttttcaagcacaagaaggatatctccatgaactgaccgcttttgcttcacaagggccaatcaaaagaaaagcgtgccaagttgatataggcgtgcaaacgacctccgaaaccaatgaaagaaccaccctagtgaagaagaggagaatcgatgttgagtctcattcgctgaagattgtgcctacatggaatatgagaaagagtaaaaatgtgtggttaggaacttcccgtcgtggtgttgaccaaaagggggaggaatcgagattgtctcatgatcatgatcgatcgggtgactcggatgagccattcttttgatgatgaaagtattcctttttcctctaacaatcactccgatcggaggatcccaacacgtggacaaacctatctcggttggccaatccaagcgactcacggcctgaaaggcgagggctcggttagccgatattgctatccctaagaagagtttcagcttggttgaggatgtaggctctgctgtgggaactcttatgaacttagttacccctgtggaggaggtgaacaaccctcctccacaggcgccatgagaggcattgcttggaattgtagagggttggggaagacctctacagttcttgaagttaaagccctagttcggtcatgctcgcctgatttcattttcatctctgaactcaaatgtgatcctgctcaattggtacattctctgaaacatttacaattttattttaatattattgttccggcggttggtggtgctggtggcctgctcttggcctggaaaacaaggtttacttttgagactgtctgtatctcgaagaatcaaatttttggtattgtgtactcagaccctgaccatcatccctggctgttatcttgcgtctacggacccccataatttcatgaaacaaaagcttctggtcgaagttgatggatctagctcttaaatttggagggccttggttgattctcggagatgtgaattttgtcctgaataactctgagagaagc

SEQ ID NO: 182574 - DNA, 824 bp, Cannabis indica
aggaatgtatgtgaagatcctagaacaaaatcgattcctttttcaattttatcatgaaattgatattcaaagagtaatcaatggcagcccatagacttacgatcggaaacaattgctcattgaacggctcaaaccaggggccaatcctaaaaatgtcctgataaatacccttgatatgtgggtacaaatacatgatctccaatctggttttcgaacagaaaaggcagtattagaggcaggccgattcataggggagtatttagaatctgacctgaataacttcacaggcgtttggagggaatacttcagagttagggtgcggattaatgtctctcttccattaaaacggagaatgaaatttcgccgaaggggtaacgattcttttttttatgccaattttaaatatgagaaagcccctaccttctgtttcatctgtggagtgctaggacactccgagaaattctgtctgaggctctacgacacacctgtactggatcgtattgtgaagccttatggcttgttcataaaggctgctagtaaaaggcaaaattttcttaccgcctcaccttggctgcgatcggggaagacgaccactccggttgagaacaacgaacccgaagatgaagctatcaacattaatgcccctgctcaatccgtgcctgaaccagcgaagcaccataatccaagggattcgaatcccgttagctctgtgaatgaaggctcagctgtgatattaaaggaaaatgaaatgacattttcctctgatttagatattgttatatctaaaggaaagagaaagaggcgtgacacattatcaaatgggc

SEQ ID NO: 182575 - DNA, 602 bp, Cannabis indica
aatgttcataaggcacggagagacgttaggcgagaaagagtttcaagtaaggtttgaaatctgatctgtgggatggttctagttcataagtgaaggaagaaagctaggcttcgtctctgtctaaggcaggtgaatccgttacttcaaatagaatagaggtagctcacttctgtgttcaagtgaaagaaataaagtaataaaaacctccatccgatccctatcttttatgccgatctcagcaagcagtaccagaaaaaaaggagtgaaggttagcagacttggttgcctgccacggggcccctttgaaaccaactaagtcaagctcaattacacaaagctaaaggtcaaaagaataaggattaagttagtgttcagtgagtgaaagatagttgcctgacgagaggaaaggacacccggtacagtctttctttggtccccacgccccggttaccgtaccaaacgacacaccacacctcgagaaaactagtactatagcttccgactttggttgaaataaaaaatactcgtactagagaacaaacaacctcgagaaggacgaaataaataagaaaaagactgactgagtgttgtgttcattaatg

SEQ ID NO: 182576 - DNA, 425 bp, Cannabis indica
tgatttagctactttcagtcgacgttgtctatttgacactgggaaaaacacatttactgatgaggctttggcagccctttctgccaacacaaattcactttgggaatgggaagtatttgggcattttgccgggcacatgttgttagtatactaattgtacaagagaaaataaaagagggcaaaagtcttttgtagtataatgtttttatgtaatgttggacaaaaatgttaaaaatgaaaggtgcatatcgatcgttattgtacttaatagtattggatcttatagtattgtactaagtttataaaagtgtcattgttaaatagtgctaagtaccacttatacctaacttagtagcaaaatgctcctcaaatgttagacatacaaaataaatagcaacactcttaactacagttaatcaatttgt

SEQ ID NO: 182577 - DNA, 775 bp, Cannabis indica
aaggggccttggttatgtggtggggacttcaatgaaattagaaacatgattgagaaacaaggagggggtgagaaacctggttatttaatgaaaaacttcaataatgctataaacatgtgtgctttaagggaattagattttgaaggcagcaactatacttggtgtaacggaaggcagaataacatggtttttgagaggcttgaccgtgtactagctaataatcaatggtggaatcattatgtagttgcaaaagttaaacacttaagccgttggtgttctgatcattgtcctcttgtggtgactttcaaagctattccgacagacaacaatcagaaaaaagtttggggccatagatttcattacgaaagtgcttggggtgacaagcaagaatgccacaaaatcatcaaggaaagttaggaggagggccatttaattacttcagcagctgagttaggaaacaagttggatcaatgtggagatgtgttggggcaatggaataaacagcaaagaagagagagccaatctcggattaaagagttaaaaaaagaagtagaaactttgtcttgggatcacacagaccaaggatttattagcctaaaagaaagggagaaagaactgaatggataccttgcaaaagatgaactgttttggaaacacgtagtcgggagatttggcttgctcatggagacaggaacacaatatctttcaccaaaaggcgtctctcgtaggaagaaaaatcagattaatggtctttttgatcaaaatctgaattgga

SEQ ID NO: 182578 - DNA, 762 bp, Cannabis indica
gaccaagtatataatatagtagtgataattcgattgaaattatatcactaagtcactagtcaacctttaatatgtaatagttattattattattttttgttttttttttcacttcaaaaatttataaatatactttaatttttaataatttttattttatataaaatatatctttaattatattagttttttttaattttttatttcaaatcatatttttaaaagatatatctgtcaaattattaaagataaattatttttatattataacaaaaaaaattatgtgaaattttattttagaaaaattatgcatgattaaaaaaattatgaaaataaaattaaaataagtgtgaaattaacacaaaataatatgagaaaaaaattaaaaaattaagagtagtttttaaatatcattttaagtttaattgttttaaatattagggtatatttataattttgtaaagtgcaataatttctcatacttaatttgaattttaagttgattttaaatatattttatttggccgtttttatcttctaactaagaatttcttttattagtttttaatatcattgttaagggattaattcatttttttatctaattttgttttgtaaatattttggggaccattctttgagttgtcgtgtagtattcagtgatacaagctagagttccagttctttaggtgtgttgtttgagaatgttatagttttattgtttaaatttttggagtagatttgtctcatgttgttcgttga

SEQ ID NO: 182579 - DNA, 763 bp, Cannabis indica
cagaatacaacaacatttttaacacctacatctcttaaatttttaagttgcattacgatttcttaatagtttattttccgttttgaatacataataacaattttataaattgacttaattcgcaggtaaagccaataaacgagaccatgttcgaagtcgtagaactaaccagatcatgggtcatcaacctcaaggagaaaacatgcagttgcaaccgattccaacttgacgagttaccgtgtgctcatgcgcttgctgttataaaagagatgaacttgaatgtttacaactactgttcaggttattacacgacaagaacatggcttgaaacatacagcggctcaacatatccggtacacaatcacacaacatgggatgtaccacaaaacataaaagatatcattgttctgccaccaaaccagaaaataagatctggaagaccaaggaaacgaaggtttttatctgaatgggatacaaaaaaacataacaggtgcagcaaatgtggtcaacacgggcacaaccgaaagacatgcaacaatcaagcaataaaatagatacagatgaattatttgaattgtttaattctgtgtgagaattcaaacaggttgatatgttatattctatacacatgggattttatttttaaaaaattttaaacagtttggtaatagttgcaaaatcgttttgttacagttttgacacttcttaaatatttagtacaaaaataacttctttattaaagttttaaaaaaagtcagatagg

SEQ ID NO: 182580 - DNA, 650 bp, Cannabis indica
cgtccaaatgtggctcctttccacaaaaggctcatcatcaagttgatcgattttcaacttctatcacgaaaatgaagtttattttgaacttgtacttttgtgaccacttttatttcataaaaacggaaatacattaataaactatttcatgttatattattggcacaacgcacatggatacactataaaacatttgtcagctggtcataacttaagttctaacctcgttaagtactagcctatttcaaaagcccataccatacataccatataaattcagttaagacacatagctcatatgctcttacgtatattaatggtttggtgccaaccaaattcaataatttcacattagtacgcaccgtccccaaatcattcctgtctgattttagtttttgaaaatggaacccagtcactctcgtttgattatgagtcatcactaatcagatggggtatggccccatgaaccagctcataggttgatgagtttggattgggccccacccggtcttctgagtactctacacaactcaagtctcaatttttttttgtaactttgtaaaagaggacgaatctcttaatatatattacgttacaatagtacgtaccataaatcttggtaagatttgcctagttggattattgcaaag

SEQ ID NO: 182581 - DNA, 841 bp, Cannabis indica
gtaaaaatattatttatttattgtgttggttaactagattttcttaaaaaaaaaaacaattgtatatgtatcatagcttggtgtataatttggacataaaaattattattgtctatttgtaattgtcaataaaacattgtaaaatttgaaaaaaaaaaatatatgagtaaatatgcgagggtaagtctttagtgcacctctcttcgtttccaaaaattaatagttgttttggtagacttcttttttttttcgatattttggaaaaatatttactccatttttttttttcatatattatagttatttagaaaaaattaagaatagtttgtaattttatagagctacaaataagatttaaatattttatttcacgtgtaattattattttttttatacgagtggtaagcagttatttgaaccttatttcaactctataaactatttgaaattattgaaaaatttataggctgtcataaataactaacacgtatacgattatgaaaaaaaaaatacacattaaaaaactctacatgaatgccaaaataagtaagaaatctacgaaaacattcttctggggttgcgctattaaaattcctatatatgaaaaattgtggaaatgttcgctcctacttcaagcttttgctgggcatctacccacaaatttatgactctaatatgtcattttgattgtttcttagaacgacgtctaataatctcgcaaactaatacgagtcttttcagaatactttgttctcatcgtatacttcctgggaaatctttattcacgaaggttacttctgatgagactactcaggtttaagcttgtttagctttgaagttc

SEQ ID NO: 182582 - DNA, 744 bp, Cannabis indica
tacttactatttttagtattagtattttacgactaataaaaagattttacaaaacttaaatattagtattttagtagtaaaaaaatattaaataaattgtattgatatgcttacatttttaaaatgcagcttagagtttctaattattaatataagttaggattaacttggtcaaaatgagactaatgatactactatttgtatgtattcgtacataaagattctaaactctaatttgaggccatctaattgtgaataaattcaaagtcaatattacatgtaactctcacttgctttgcaccttcaataatctttttctaatgcaatttggcctccacttttttcaaccttattttattttattatttttaaatgaaaaagtggaagttgttgtaaaaagaagaaaaaaatgtaccatatgaaagtgtcacatgtttcgcagtataagcaggcaagttgaaatgaattttaagaaaaaaaaagaggtccttattataaaaataaatagtatttttaaaaattattaaaaaatatttttttttggctcttaagatgggtgggccttaagcgcgggcctagctcgccttagcctaagaccggccttgagtatgagacgagagaaaaaatgtcgataaaagattgtaacttttgtttgtttaaaaaattaataagttagcttgtgacatggtaaaaaaaaataataacaagtataccccgtttaggtctacttatgttgtaacttct

SEQ ID NO: 182583 - DNA, 647 bp, Cannabis indica
taatatttacaaagggtctgagattggggactctagtttcaaatcccggacctagatctggacccctgacccgaacttgaacccaactcggtcccaaaccccgaccccgactcggattcgaactcgaaccccgacccaggcctagacccagacccagacccaatttcgaccttgaccctaaacccgaccccaactctgaccccgacccatctcgagtcccagacccgcccccgaccccgacccggctctagaccccaacccagccccaaacctcaaactcggacgaccccaacctggactcaaacccggacctcaaccccgacttggccctggacccaaacacggctccaaaccccaaacccaaacctagaatttgcccccagacccagttcctaggccaggactcggatcccgaacctagacccaaatttaagacctagacccggacttagaccttaaccctaaccccgaccctgactcagcccttaacccagacccagacccagacccagacgccaaccctcgacccaaaacctagaccccggatccgaaccccaaccctggccccaaaaaaaactttgttaggttttatgtcttgaaaaaacctgtaaaaaactatttttgattaaaaataagagttgaacata

SEQ ID NO: 182584 - DNA, 660 bp, Cannabis indica
tatcaatatatattccagaaactacacattggactgtcaatactcaacaataccatacattattataggataaagcttagcatcttttctttttaacaaaacaaaaccattctaaaataagaaaaattatatttaaaaaacggggtaataaaaaaaagaataattaaatatttgtctctccgactccgtaataatacccttaaaaatataatttttacaataatatagttcttttattatattttatttaattttatcgtgaaaaaaataagtagtggaggatatagttaataaaaaatataaaattaaaaattaaaaataaaactatgaattattataaaaatgaaaaagtcttctatcctattattaactaaaggaaaagaaaaaagagttaaatgtatttaattttagggttaatttcactaatgcacaaaaataacaaaaatacggtttcacggaatttttaatatttttacgatttttttgattttatttacataaaatacggtctttttatgttgaaattttgttcatttgttgttaattttttgttatatgtatgttattttttattattttttttttgtgttattttcatgttacttttatgttgattttatgttgttttcgtgttattttttggaaaaccgtaaaaatgta

SEQ ID NO: 182585 - DNA, 737 bp, Cannabis indica
attgtgcgtgtgactattttattttatacacctccaatttaatattttaaacttaattttgatactataaattatttaaaatttctaaaaaaaaacatataaaatgcctactaatactataattagaaaaaattaaaaaaaaaaaaacatcccaacaataaaaacaaaagtgatgaccacaaaaaaaaaaaaagtaatagccacctaaaaattctccataagttatactagttaattatcacatgatttttttattattattattatttaatattttgaaaatttcttttttgtgttgtggttggtaaagtgttatgttatatgttttatttatgtttggttattgtacatagatttttttattatattttgagatacttatatatatatatatatctattctatataaagtgtgcctatataacagaatttttggtttatgagaaattcataggtaactttttatttatattaaaaataaaatgatttattattaaaaataaaatagtttatgagaaattcatggatcactttttatttatatataataaaataaataaataaatcccactaaatccaaaaaaaaaaataacgaattgggtttttatttataatttcgtcttctgttaaataaaataaaagacaacttaaagcattattataattatgctgcttgtacatgccgcgacaaaactagaatgccaatctattattactccatgttctagctataaatg

SEQ ID NO: 182586 - DNA, 640 bp, Cannabis indica
gccaattacgaatacatttttgggccatgtaaaacttctagctgcccgaatagtaatattaaagatatcatttcacaaatacacaaaaacaatataaaaattacaaaaatacaatttatgaaattttaaacatttttataattttttttaattttaatttacaaaaaatacgatctatttatgttgtactattattattttgttgttgattttttgttatctgtatgttattttttgttattgttttgatattatttatgtattattttcatgttacttttttgtaattttcttgttgttttcgtattgtttttataaaaaaccgtaaaaatataaaaaaattctttaaacataaaaaatgtatttttttttttttaaaaaatagtgccttatgtaattataaaaaaaaatagaaaaaacaacaaaaaatttataaatatacagttgtatgaaattttaaatatttttacaattttaaagattttatttatataaaatacttcttttgatatttttcttatgttgtacttttgttatttagtttttaattttttgttatttgtatgttattttttatgtttttttcttattgttttattgtagtttttttttgtttattttggttgttatttttattgta

SEQ ID NO: 182587 - DNA, 739 bp, Cannabis indica
actgcaaaatgagtctgcaatgtgtcatggaaaatgaagtaatacataatattatatgttaatacggtttaattacaatgtctaatgatgaatttgctcacgttgcaggggagaactggactatcttgtcatcgacatgcccccaggaactggtgatattcagcttaccttatgtcaggtgctcaccttttactctcagtctcagtctcccaatagtaatagtctataaactcaacttcatgatttatcattagtatgtgattagtttggtgctgttcttatagtgctatgcattgaaattatatgatgtcccatttggagggtaactatgaaaattagaatctagtctgcatataacctttttggcataaaacatttttttcatcttacaccaagtttgaattcattttttcaggtagtcccgttaaccgctgctgtgattgttactacccctcagaagcttgcatttattgacgttgccaaaggagtcagaatgttttcaaagcttaaggtaatcattctcctgaacagttttttcaagctattgatatcatgtctatcttgccaatgcaaataaggtgtttctgaagaataactatgacaactgatatttggatattatttcttccttaggcaattttattcattataatttcataagcttgctaaattcttcaaactcctttttttcttttaaccatctcatgctgtgtgcagcaggtgccatgtgttgctgtag

SEQ ID NO: 182588 - DNA, 638 bp, Cannabis indica
aaataaaccatcccactatactaaaatactaaaattgtgattctactgagccatacaccgcgttccatgttgtcgggcaccgaaaatgcaaaattataaaatttcactatatgatcataaaaatgcattcagaactcaaataaatcaacataaataattatttcaatatccataaataattttcataattaaatcttaattatctaataatttccaaatttaaactaagggtttttacatctatcccccccttaaaaggattttgtccccgaaatctagccttaacaactctgggtattgtgctctcatgtctaattctagcctcccaggtggcttcctccaccttgctgtttcaccagagtatgttgaccaacgctatggtcttattccgaaggacattatctatttttatcaaggatctaaactggttgttcctcataggacatatctggctgcagctctaaggctactcataactaagtatacgagtaggatactagaaacgtattttctcaacatagagacatggaatacgttgtgaactgctgaaagagctggaggcagagctaaccgatatgccacttgaccaaccttctcgagaatctcgaaaggtcctgtaaacctagggcataacttgc

SEQ ID NO: 182589 - DNA, 799 bp, Cannabis indica
ggagacttaccaaaaaagatcaagatctcacaagacaaaattgctgcacttcacaactcatatgacactagtagatcccatttttgaaagaactaaaatcaagtgaacacatcctagatgaattgctctctcaagaagagaatattgacaacaacgatcaaggacttcatggcttaaatcggtgattccaacactaaatctttcaccaaaaagctaatacaaggaataacaccaacacaatcaaagaacttctcgatgaccaaggcgttttacatactacacagcagggaattggttcgattgttgagaattattttcaaaatatattctctactgctggttttgatgctgaagcagtacaacatgttttaaacacagtgacgtgcaccatatttgctgatattaacagatcgttactagcgccatacactcgtgaggatgtttttaatgctttatcttctatgggtgatgatagcagccctgggctagacgaaatgttggtcatgttctacactaattattggcatatagtgggtgatttggtgtctcaaactgtccttgaagtgctgaataatggtgcggatccttcttgcttcaatcaaactctaattactttgattcctaaagtcaagaagccgaattcaatgtcccagctacgccccatcagcctctgtaatgtattgtacaaattagtttctaaagcaattgtgattcgaataaaaccttatatgtcaatggttatatctgaatctcaaagtgctttcctccaatcaaggctcattacggataacgttttggt

SEQ ID NO: 182590 - DNA, 622 bp, Cannabis indica
ccaagatcaatatcggtcccttccaatgtatactctatatatccgatactggtaaactttaacaataccctggaaaggacataacacttatccaaggtataagattaccttatcaccgattatcatgccagtcaaaatccagtgaactaacaaatcatgagaattaaacttttgaacatataatcatgattatattccactgtaatgacgatactataatcatgaacaaatatatatacatttatatatgttctggacttaataaaatttatacattaaacataatcatgaaataaatcacgtgaaccatgcaacatagaatgatttctgatctttattaattagtaaatttgattattttgaaattaagttttatttagggtataaacccagcaagtggaaactgaagcttacggcgtggagttgcgtacttagtccacatgagtttagagagagaaacaggagtggttccggtgttgatggggtggacaacgtggtgtacgatggctttgatgtagtctacgatggtttttgacgtagagagagagagagagagagagagagagagagagagagagagagagagagagagagagagagagagagagagagagagagagag

SEQ ID NO: 182591 - DNA, 815 bp, Cannabis indica
atattcgtttacgccgataattctcttctcacctttacagaaaagcacagactcctcgaactcattcgctctttcctaatcgcttttgtcctctttctccttcgtttaatcccttctctaaccccaaattacttctctttccactcgcttaagcacaccaaggacggcggcgcgttcgctcactctccgccatccctcgacggcgccgtcgacggggggggagaagtccgtaatcggtcgagcgctttcgcagttgctctcgattatgagcgagattccggtgagttcacggaagtacgaagtggttcggtctttggctgagaagattattgaggataaccggagagaagtttcccctgctttgcgtgaagttaaccggacggttttatcggcggcgttttcgaggactcttgggcagcttgagttggatatggtggagaaaggtgttgttgggcctgaagtttcggccgagagtgggaatgagcctggcccagttgattatccgttgtacaaggttttgcgagtggttcgatccgttggggacttggcttggaccaaggttggtggcgggagagccagggagggagggagtcggagtgggagatcggctgagaagctggcggctgagctagtttggttgacggaaaagatggtggcgtgtgggtttcccgaagaagctgtgaggaggtgggcttcggcttcacgactggcttggcttgctatttcggctgagccgcggcttcaatgttcccttgttaaactttcaggtacgccgccacttattgtttttctttttgaagttcatggcacaaagt

SEQ ID NO: 182592 - DNA, 1052 bp, Cannabis indica
ttttatttataaatttttacgaaatcttgtaattttaccatagttagtgaataaaatcattaaaagatttgttggtatcacactacttaatttatggactaaaagagattaaatccgacgagtgtgtgttaaacaaaatatttgctattttatcttcattacttgggtttgacacaatattagagctgtcatttgctaattctttactttaagcagtgaagagattggcttatggtcttatggaatcttgttttgtaatgttatctttgataccacatgctttactatcaactaaggcatattaagaagtgtatttaacttcatttaatgaggcttcactgtgactttgagtttaagaaatactttgtacaagttagtatcaataatacaaagctttttaacaaagttttccttgggtatctgttcttaaatagataacacctaatttttttttgtttttcttagcctactttgtctaccttctttatgctttattaattagaaaataagtatttgggtgggatcatgaaacaaatattaatgaatgcaactttccttactgctagtatttcaatttattgagaaaatggcttcattaaaacttcttttaagtaaacctaataagaaaaatatcaagaaagaaaaaaaaaagtattaggaaatatcattaaacaataaatttgcgtgtaaagaggtactaatataattagatttgcagcaaacacgtttaataagattattatcgtaccacactttatgatcatccacatgcatatatattaaataataaaacgaaaagatgaacgaaaaaattacctcttgaaaaactatcaagtgttctcaagtcttttagtaagttgtattcacagaacagtaatatctcacaccatgatctttatgattaaccacaacacactagtatcattatgggctgataaatacatatagacaatattattcttggtttaagtcttgtatttcttaacctttttaggtttcctaaatatattatataaatatatacatttagatttataccaatatattaatta

SEQ ID NO: 182593 - DNA, 744 bp, Cannabis indica
tattgatgtaataaattctgattgttgttaataagagtttaattttttaaaaaaaaaattaatagattttatttgacatatttcttttataaaagaaaattattcaaattcacttatttataaaagtgagtagttaactcattatttaatttattttatatatacaacaaacatactggggtcaagtctagcattatattataaaggtgagatacgataataacaacacacttaaatgtaatgttaactacaagtgagatacagtgataagaacggttttgaaatcatataataagttttctataaatttattaatttttataacaattcgaggggtcaagtctaacatcatgttatacaggtcgtgtctggccgcgaagcgcgggttgttaactagcaagaaaataagaaaaaaataatggaagttaagtagctaactaaatttacaaaaaattgaagcttactttcatttgtcgccaacaacatatattcatgcaatttaaaagtgaatgaaataaactgttagggttaagttttgtatatgaaaaagggtcatacatttatatatctacacatatatatatatatatataatctatatatataaagaagtatgagttggtgacgtgacggtctaaaatttctcaaagcctattttctttttctccttaatctcttaattttatatttattaatcataattacaactaatatttactattatttattaaatttctaataaat

SEQ ID NO: 182594 - DNA, 903 bp, Cannabis indica
tatataaaaagataatactaaccattaattttgataatctcgattgacaaaataaaataacataattattatggtatattcatacttccaagctttcattaactcatgtagttactacaaaaaaaaaaaaaaaataaataataataaacttctgggcgaaatacttttttttttttttttgtattttaagcgtttatatattacaatcatgtttcacctgaaactcgaacccagacctccaacacacacacccacctatggccacttgagctagactcaagtggttaattcagggcgaatactttataaatatttatatttatagtatatatttttatctatgtgagttttttttttattaatgtctttgtcacaattaatatcaaaatattttaaaaattaattaaaaattgaaaaattagataaataaaatttaaaagataaaaaatcgatctaatgttctctcaaattatttaattcatgtacatgacaagaacttatccatcaaattacaaataaaaataaagaaacaaaaatgaaaaggatgaaaaactttaaaatcgaatctaatctcctcctagttccaagaaagtctcctccttgttccaagcatcaaaaagtatgtgttctcagtaagagtgtaaatggatcgggtcagatccagctatgatccgacccgatccaaattatgtaatgatccacctcgcctcgccaaattcgttagatgagatacccaaatcggattagattcgacccgacttattcaaatcgaatttgactcaacccgcttatctttttttacccaggtctgggtccctggtgcggctttcggggccggggttcccgtggtctcggtacgtctcgggtatttcggggttcgtttgggtccgtttgggggttttt

SEQ ID NO: 182595 - DNA, 786 bp, Cannabis indica
aatgatattgaaagttcttgcctttgatatggaaaaagaccatcctagaagaaaaaaaaaagaaaaaagaggcaaaataagaaaactaaaaagaaaaagaactttatacctctcagacgaagagaagaagactattgtataatttatatgagggcaatatttcttaacctccaacatcagtgtcgtccctagctctggcgtcatctttggagcagcttcttccctagaaccggcgtacgtcgtcagcctgaaaagaaaatacaaaagaagaagaaaactaataaacgataaacacatagagagaaggactaatcccctaccgttcacgatgtcgagccatttgccttccattggcgccaccaccgcacatgaaaaacaaaaagaagaaagatatggaggactccattgagacctgttgtctgctggtgtaagggagaagatgagagaaagagagtgaataaaggtgcggctgagaagttagagatgattagggttttgtctactttttgttagtctttgggcctatctcgacgggcccaaattggaccgccgagattgggtacaaccgtgtacccaatctcagcggtccatgctggacccgtcgagatagggtctaaaatttataatttttttcaaaaaaaagtatattcttctaatcaatgatggtagttttttaagtagcccgtcgagatagagaccgaatctcggcacacgacgcgcaggcccgccaagattggtgtgtcgaaattgtctatttttcttgtagtgtttatccttttgtgagct

SEQ ID NO: 182596 - DNA, 554 bp, Cannabis indica
ccaaggtaacaatgagaggaatcgtagtggacaacagagcatttctcatatgatcgtgaaccacaacacgcacacctatctttgacgcagcatgttgaacacccggccacatcaacgtttaacatttggtaggattctgacggtttacaacaactattcaattattcttatgtgatacccgaagtcaccccaatagtaatagaatgctccaaaacattggaggcatgataccgagacaaaaaatttagagccgagagtaggggcggagttaggattatatgttaagtggggccaataatgagcaatgcttgcaaaataaggttttatgtttatgaattttagtgtccaacatctccatttcaagataatagtgactatattcattagtagtcttagtgttattctctaaattttaattcaaaagttttataaatatttattgattaattatattaataaaggaccacacttatatgtatatgaaatttacttttttcattttaaaaattacatagtatttgactttttaaaaaaatatttatatacactaatga

SEQ ID NO: 182597 - DNA, 671 bp, Cannabis indica
actaggctcaccattatttcatccttttccgtctttcttattcactgcgcctctatatccatcaatcttttatctttctggtttaaagtagcatttctaaacttttttagaagtgctactcgactgtcccttgcaaataactatgttctctttcctttatttccaatgtagctctttgatcattctcttttttcctataaagaattcgaattcccctatatagaattatctttgtctaacctttgtggttatttttaaacttgttgtcttctagcataattcacttgatactttattgtttaggcaatagatgtagatttcacaattttagtttttgcatatttgtggcgcaccgaacacatagttttgaaggttgtatagaatgcgcgggggcgccttagtctggttaaaacttgaaatcagtttttgggttgaattattcagccaaataaagggctaagcccccgtttcttccaaaagacctaagtcaaggtaattacttaaagcgcatgaatagtttcaaagagaaaaaggctaggcctttttgaagaccttctcctttgattggaaaggccttctattttggtgaatttcagttcaagttggaataacttcgcccttttcgactttcactcctctcacattcgctcgagtggcttcgctcctgatag

SEQ ID NO: 182598 - DNA, 589 bp, Cannabis indica
ctattttagagcatttgatataagtgatcttatattaattagaataaagaaaaatatgttacacataaatatccaaacaactttcttaccctaaactttatttctctttccattaaaaaagaaaaaacagaagaccaataacagtactactcactctatttaagatagacatctcttatattaatcttataatcaaaagtgcttaatcataagaaaaaagaagaagaagaagaagaactatactgctacagcttcaaaaaaaagcaaaaatgccaggaaaaatgacttcagttgcttcaaaaggcctaatgggtcttcgttttcttgaaacaactcacagtgggaaggagaaaggtagctggagctccattgaaaagatgtttaatcagcattcagttgatggcaaactctctagggacaattttggactctgtattggtaatttttttttttttttaaatataacacttgcccacattacaaatagtcttgatttgtatgtttttgtatatattttggtgtatttttatagaatttgagaaatggctaattggttttttttcttttttttaggaatggtaagggaatc

SEQ ID NO: 182599 - DNA, 1065 bp, Cannabis indica
agttttttggtaatttccttattatttctgtgttgtttttatagaataaaaatttaaaagaaaaatatttgaatgtaaaagtgtaaaaaaatttactaaaaataatatattgtgtaaatttccttaaaaacattaggattaggttgatgaagttataaggttggaattattattattattattattatttatttggcaaaatgaaaaatttgaattgtaaactaaaaaaagaaaggatattaaattataaataacaaaataatttggataattgcaattcgaagtaatatcgaaactttaagtaatggagtaagaacagatcttttggccattataaacgctgtctgatcacgtaatcaaagacctcaccacaacacattttgattctcaaataaacgacaaaagggcacccagtcttttataaaatataattaacttaaacgacaatttagcaaaacaataaaagcttaaacgacaaataagatgttttcaaacaatgacaatatcaaagcaccaacagaatagagccaactcatcgttcaaatttaataataataataaataaaaaaaaaaaaaaaaagcttcaaactcaaatagaagaatctacacggaattgacacaattttttttttctttttcttttttaaatttatacaaatgcaaagcccactgaaataaccgtacttattctcaaagttaattttttttaaaattaaaaaaaaaagaccagacagacagacagagacaaatttaatatatatttttataatatatatgatcattatcttccaccatctcgatacgtgatcataaccccacgatggaataatcgcttacgatcaacgccgtccatcaacctaatcgatttctctagaaacccacttcaccaatatcatcatcaacggtccagattgaatcatcatatcttgtctagcttctcagctttgacaagtggattcgctctcgctatctcttctctccccaaccctcttgaaatcgaaactgcacccgtgcttttccgggtacctgtggaccccacagaacgtggtcccacacctgcacttg

SEQ ID NO: 182600 - DNA, 654 bp, Cannabis indica
tatcctacaaaattttgaaaaattcggaataatttacaatatagaaaacaatgttcaaacagtctattttacacgcgtataaaataaaatagtcacgcgtgcaacacgctgtttgaacgtagttttcggcatgttaaactttttcgaatttcttaaaattttgcaggatgtcttaaataactataacgtacatgactatgagaaaaaatttgaccaaaaaattatttcggatgctaaaacagataggggtgcatcaatatacccattttaagggtgtgcattgtagaattttccaaaaatttatttaaatagcaaaacaaataaaagatgaagcaatacatttattttaaaagggtggattcaaattatattttatgatatatattaatatattatgatgtgatacgtaacgtacgtagtaccgttctgtaacgattctcatcacttttcattcaaaaaccattaattattaataactttattattattctgatgactctgtcatgttacatgcaacccatatgatattattatacacatatatatatatatatgacaaaatgatcgagaccatgcaatgcacccacatcatcaccatgaatcgacggtgggaattcacttatatatatatatatatatatatataggttgttg

SEQ ID NO: 182601 - DNA, 409 bp, Cannabis indica
  modified_base (219)..(219): a, c, t, g, unknown or other
acaaaatcaaaaatataaatatataagttcgatcttggttatagatgagcttataaaaattattcccttctaacaataatttttttattaattttgaaaaataccacattatttttctaaataagggtttaaaaatatttttttctataacccactaaaattcaaagctcaacccacatttatatatatatgggtaattacataaaatataattttttntaaaaaaaaaaattacatttttacattaaattttttttttttacatttttacagtttttatagaataacgcaaaacaataaaaaaactaaataaaagtaacaagaaaataacatccaaacaataacaaaaaataaatatacgaataacataaaatcaacaacaaattaataagagtacaatatatatata

SEQ ID NO: 182602 - DNA, 1124 bp, Cannabis indica
ttgtatatagttatatatgtatatatatatatatattgaaagtggaaataaaaataaatatgtgtgtatatctatagtaacttctttatatatttatttcttaataaaaaagtattgtgtggtttacatataataattttggttacataagcatatggtacttataattattatattaatcattgtatctatcaatatatagattatacactatatattatggttcttataaatcataattatataaattaatggagtctaattaaattactaatgtaattactaattaaaaatatcataattactccttaaaaaaaaaggaaaaaaaatattatcataattattataaaagataatattaatctcttttcattttctttttgttatagattactaaatgttaaatataaataattaaaacaataaaaaaaattaaaaaagatagaatattaaaaggagagaatgctacatcatttacattttagaaatattattattattattttattgaaaaagggcaaagaaattgtacttatttaaagtgtaatttttattgacaataataatgaacaagctaatcttggacctgaacaacattggagttaaaatcgatgaagaagattaagcaattattttactgagttccttaccaaagaattatgaacattttatggatacaatcctttatggcaaagacactttaaccatgtctgaagttaaagctgcactcaactccaaagaaatccagagaaaggttgatgacaagtcagagactggtggggaaggattatttgctcgaggaagaccagaaaagagagatttcaagaagtcaaagattggtcacaaatcaaactccaagaataaaaatacagtgggagagaaatgttactattgcaagaaagaggttcacttcagggatgattgctatctactaaagaacaagcttaaaagagacaagagcaaggaaagaggagaagcagatattgcatcgagtggttatgattctgcagatgtattggtggtttccagtgaggattctggtggtgaatggatccttgattcgggttgctcatttcacatgaccccaaataaggatatgttcactgactttgaagaaagcttag

SEQ ID NO: 182603 - DNA, 514 bp, Cannabis indica
atttacatataacttagaactctaatatcttttttcttcttttcatttcttaagcagcttttctccttcttttttttttctttattatgtttcatttcacttacccaagcactatttttccttcattatatcatttcttcttatttttcatactctgaagcagcccttcccccctttattttcttttgctccattttgcttacccaggcaacatttctttccattttgcttacttaataatcaaatacctatttttgttgtaatataatgaacggttgtagaatgtatgaagaagaacggagtagatccaattgtaaatgtgagtttcagtgtatgaataattagattagaaggttttatggctacccaaaatatatatattttcagacatgaggttgataggtgtggtactattattgatttagatacataattatttgttacaatgacttgtttatgaaaaatttcacaatgaaaaaaatgagctctgctagatgggaaattggggagacat

SEQ ID NO: 182604 - DNA, 948 bp, Cannabis indica
cacacatcttagagatacatgcacataaacctatcacttagtcttttgcacgtcagatagtacaacagcaaattatgctatattcccaaaatgtacgtttctgatcagctacaatacaaacattttacaatgtcagcggctgtaggttcagaacgctacataactgtgagaagtaatggaggactgaatcagatgcgcactggtgtaagttgatgagatcgtattaatttccttttattttattaattttttcatctccatatgtgggatttgcacattacattttgttgacctcttgaagttggtttttttttttaaataaaaaacacgcatgtgggtttgcttcttgattctatattgagaatcagttttatctatttaacattttctttttcaatatttagtcaaattttacattgacacctttttaacagatatcagacatggtggctgtggcacgcattatgaatgcaactttagtcattcctcagctggataaacggtcattctggcatgattcgaggtaacaagtgttattatttcatgtttgacatttttgggtttcttttatttcttacattttctttggataccatctttagctggtttattcatatactgaaatgtccaaattctcagtgtgttttcagatatatttgatgaacttcattttattgaaaccttaaaaaaagatattcggatagttaagcagctccctaaagaactggaaacagctcctcgagctcggaagcatttcacctcctggtcaagtgttggttactatgaagacatgacacagctctggaaagactatcaggttgagcttcttgccaaactaggatggcatgttactaaaagtgcattttctatgatctttcagcttcttattatttgagtttttcacagagtgttcaaattcttttaacgatgttcatgagtcagtgatat

SEQ ID NO: 182605 - DNA, 1013 bp, Cannabis indica
acgacaaaactcatcattaataccacgacaaaactcaatctaattaattgtaagtttgatcgtttcttatatatataaatatatattgctgtactttcttgtaatgaaccatctatattatattaagttttgttgaatttataaaaattaatgcaaatgtaattaatcagcaaatatacaaattttgggcatgttttttttttagaaatatgtataataatagagaaaataaaatcagaaacttcaccgatccaacaaacatatatgtattcaatttaataacatatttaattaaaccatcatctaaaattaaataaaaagaacttgataaatcctaagaagtagagtgtaaagcatttaaaactcgcaaagcattaggttcaatatgacatatattggcagttgtaattgcatctttgggcatgcttttttaacatcatcattatttagcatttgaaacttaaaagctaaaatcattaagaaaatcagaaatttttgtgtgcattatatggactaatacttaattaattaatctaaatgtttaaagataaaactaaattttatatattttaatatcttttccacagaattttattaataagttgtaatgaacattgttagatcatgtaaataaatgaacaaattattaaataaaacttgtttttgtttttaaatttaattttttaaaaattatttaattcaaccattaaatcatatataaatgtaatataatctaatatataggaaaaaattggacttttatgatttttttgtaaaataaagtgttaaaataataatatttccaattaattgaattcaaaaataggaataaaaaagtttgtaataattcctgcaacgtttgtgataataattccgtaacagtttaggtgaaaaattccccttaattaaatatatatgtcattgtaagatcatttgggtcaaaaggaaaatatatatcatcataagagtggagtcttcactacaatataaataatatatatatatatatatgt

SEQ ID NO: 182606 - DNA, 592 bp, Cannabis indica
aaattaaatcatagagactaattatattaaatgagcaattaaaaatacataaaaaacttgtttacgtacctaaaatacaaaataatacaaaagaaatttaaaattaaaaatatactctaatatcataatatggagcaaccccattacaaaaccctcaaatctgtgaaaccagtttcaaacatgtgaaccatgtgaaaccagtttctcgaccctataaaaatcataacaaaattaaaatgatgaacaataaagttgaatgaaactagtttcattaagcaatcggataaaaaagaagcacacacacacaaacacaaaaatacaaaaaaaaaaaaaaataactaatcacaaatataaacaaaacaacacacaatgcataacaaaatactaatcacaaatataatctaaaccagttttgaacctagaaacaaaataataataaaaaaaagaaacttaaaataaaaaatatacaataacatcataaaatggagcaaacccatgacaaaactcttaaaacctatgaaactaattttgaacatgtgaaaccaatatcgaacctgtgaaaccagttctgaacttgtaaaccctgtaaaac

SEQ ID NO: 182607 - DNA, 872 bp, Cannabis indica
tgtggataccacaaagacaatttttaaatttgatgaggggccaaatagaaataatcaataaatattactaacagttttgtctgttggtaatataaacggtaatggtccccaatttgcagtatcgtatcttttcattatcttgaaaccccatcatcaaaagacaaaggttacagagaaagatttcactgcaaaatcggaaaatcatatcctttttaagcgattcaatggactctggtacgcttctgctattccttaattctattgttgattctcatgaattaatcaaggctaaatttaatttacagtatttttacaatatatatatatttaattaaattattacaactcttaactatttatatatatatttaaaattttcaaatttttttttcttaaaaaacatttatgttgtgctgcataataacaataattatacaatatttttggagatgtacataagtaaaaaaaaacctaaatttaattgttgtcatactcatcttacatatgataaatctatgaactgacaaaatcattttgttcctttggaagaaaataaaataactatgagccaataaataacattattgatgtcacgatacatatatatatatataaatacatatactatagtttattttgttatataatacaaaaatttaattgagcaatatattctcgaaatgaactaattttcttgttttgaatagtgttatacctaaacacgcttcaatcttatcatatatgaataaaatgagaaataatgtggaaaaaataattcaaatattataacaacggctaatgtaacgtccccgcttcaagcctccattgggcccttacacccacggaatgaatggctcttatacacgagtacg

SEQ ID NO: 182608 - DNA, 969 bp, Cannabis indica
atattccaggtaggtgcaagcattacttgatgtgtgttaccctgttgaatgccacaccatattgtaaaaaaaattgggataacattttttcccccaagttcgtgtgggcaaatgttgggtcacatggagacttccaaggtctgctcatagcttagattggtaatacatgttagaattcacatgttgtaccggagataacgtttgccctgcccgagacgagtgtatcttctttagtctcttcgaatctcaacatttaatactttaaaacgagaaataggggaacgtgttttgacggttccacacccccactcctttaatgattgtacattttggcatttttagggggaaacccaatttcaatttcataagaagactaccctttagtgggtctataagagaaatttccaaatccatttagaacttttactagttcttcaatttccaaagcttagaaaaaaggaagagtcgttcttcaagttgcgtaagcttcgcttttcatccagaccttttccatgaggaaaatcaactctcgacgcaatagtgagtaagttatttcctttttgaacttttttttctttacttacacatgcctaaaactactggaatggatgtgtattttgttgtggcttgctagattctaggttttcttcgattttttttttttaaaaaaaaaaagaaactaaaagaataaacccaagaattgtgcaccctagcttgaaaatgtctggtgttgaactttcactagaaaaattgtccctttttctctatttttttttcctcttcaaagcttttgggttttgtaaaacccgtctaagagtgattttttattctaggatcttcgttattaggtatgtttttcccttatcttgtttcgttttttttcctttctagttggtagtatttgggtatgttattctcttttaaggatgttctaaacttgttcagatactcacctctctattcttcttc

SEQ ID NO: 182609 - DNA, 806 bp, Cannabis indica
caaataattttcaaaataaaaccctaattatctgctaatttccaaattaagctaagcggtctttacacaaaatgtacgtatcaccctgaccaaaaagtaggcttaactaacaaatcaaagaacacgaataacactcttgagatcgaacctaatcatgtcaggattaagatcatttgatctaggatcaactaggtgatattgaattgaatagatattacggtaaatttatcatatctaatccaagttcaatatcggtcccttccaatgtatactccatacatccgatactggtaaactttgccaatgccctggaaaggacataacacttatccaaggtgtaagtatacctatcgctgattatcatgccagtctaaatccagtgaactgacaaatcagggaattaaacttttgaacatataatcatgattatattccactgtgttgacaacactataatcatgaacaaatacatatgttctggacttaatagaatttatacatataatcatgaaataaatcatgtgaaccatgcaacataaaatgatttctgatctttattaattagtaaatctgattatattgaaatgggttttatttagggcacaaaacccaacataatcatggtattagatttgttgagaattattgacatacattttgattttcgccaaaatattatgacgtagtctacgcaagtttactcgcataaactgaagtaaggcatgtagggtgtgcaaataaatatttctaatgagaaatttgcatatatgtatttgtacaaaatgaattgttatacaaagttttac

SEQ ID NO: 182610 - DNA, 886 bp, Cannabis indica
ttttactttacttctcattattctctttctctgtttatcttcttcttctttgtttatcttcttctttgtgagttttttttcttttttattttaaaatctttaggttattattttttttcactctcttattcttcaagttctttctctccataacacatattattttttattttatttcttgtttagttcttccattttctttttattttttttagtttttaaaattttcaatcatatttttgggaaagataggagtgtagttttttattctttctaattttttgaaaccgggcttataaatatagcctctattgcatctggtgttgagtatgtgcagaagattatttattttattaatcctttttttttcttttcttttgttttttatttgtttaagtgttattttacggttgttttgtcatgatttatttatatgacgctgatttcactgttcttactctctctctcaccggaattaatagttattattgggtgttctcatattgttgtagtggttcggtccgtgggtgtggaagatgaaagctataaatacatttcctcttccttctctatggctatttttgtagtttttttttactttgattctcctataaatacatttgacgagctcactggtaaaagggttttgaggtgtatggttcttttatatttttttaagtggttatttctgtttcattgttttaaatttattttttttgttggtttagattaattttagtaatttttttaatctgagtttttcaggactgggcttgcaaatatagtcattattgcatatggtgttgaggttgtgcagaagatggttagttttttttaaatcatttttttcctttccttttttttttaaatttatttttagtgtttg

SEQ ID NO: 182611 - DNA, 748 bp, Cannabis indica
atttaaaaaaaaatatgatagatttgaattatattttttttattattatttaatttataatttttatctcttcatacatatagaataaaaaagcacttaatatttgttatatttgttatacttattagtatgaacttttacaattttttaacggtttatatattaagctgtttattatttgaaatttatataataattaattttttttagtaaaaacaaaataaaacaatttctaaataaaactaaacaaacatgttgctattacctaggatatttttatataaaaaatgcaatttgtattatctacaatttacaaccattcaaaacaaagcttgaagtgttcatcaaggcacaccaagtcaaaacataaaaatagaaaaaataaaagaaaagctaaacatacaacaattttgattttccatatcacaatagagagtagtgtaggaaatttgatagcatgtgctattgatatcaatagtaagtattaaactgcaaggtactttgagggacctggaaaaccactacggactattttactcccttcatgggtaatgatatcaatagctacatatgcttctagaccctcctactcctaacgactaacaagcacattgccactcatctcttccttcatctgaaaagatctatatagacacattaccatctcctcttggtaaccgcttaagcctagcatgtgtatgtctaagtggagttcattcattgccccattctgaactctcatctttgc

SEQ ID NO: 182612 - DNA, 628 bp, Cannabis indica
tctttattatttttaatattaccaacattgctttcagaaagaacggtgcggtttgtgggtcaatccacttcattcatgttgcttgccatgtcttttttatctttttcttttcatgtatataatgaagagtaaatactattttgaactgtgtattttgtaaaacttattaattaaactttctattttattaaataacaaaatggactctatattttccaaaatagtaaaaataggaccatgagtttaatttttaataattttattttttaataaaaccaacttgaagacaattataacacgaacagatacagaaaatgtaatcagttttaccaaaatatctctagatcagattatttttaagttttattttgacaaaaaatcaattcagggttttatttgtactattttagaaaatacaggatccattttatcatttaacaaaacagagagtccaattgataaattttacaaaacacgggtctaaaatagtatttaccctataattaatttggaattataaaagcaaattccttttatctcactcactccacccttattttcatattcttattcagatcattaatttcactatgtgatatatatgtatgctaatgctacactttttatg

SEQ ID NO: 182613 - DNA, 803 bp, Cannabis indica
tatcttcggattcatcgtggccgattctaacggctgctgatgtgggtgagcagtggacacctccgaacggtactagtgtcaaaataaacgtagatgcggcaatgtttaatgatggaaggagtttcggtttgggtatggtggctagaaactccgatggtttgttgattgcgggaaagatgaaatacacagcggttcaagtagaggtggctgttgccgaagctataggcattcgggaggtattgagttggttgaaggagaatcgatggcctcaagtctacattgaaactgattctctgtgtgtggtgcaagctattcatagttccactgatatgatttccttgtttggtagcgtcattcaagattgtaaaactatgcttgcttctcttaataatgttgttgtttctttcgttaagcgatcagctaatgtagtggctcataagtttgctagagctgctagattatatcctgattgtacttgcagtttggagactgttccaactgagttgctgccttgtttggtagcggatgtaagggtttaatttcaataataagatgaaatttccattcaaaaaaaaaaatattattatttaatatatattttactagaatatatatttcatattttaatgaattaatttgttaagtttaatattttcactaaatttgaatgacattcaattaggggtgttccacaagtatccgatccaatccaatccgcacgatccaatccaatccaatccgcaaaatgcggatatccgcacttgtgcggattggattggattgaaaaatctaaaaatccgcac

SEQ ID NO: 182614 - DNA, 600 bp, Cannabis indica
aaaaaaaaaagtatatttcactccttataaaaaataaaattaaacatgactaaaattataattaggagacattttttactatttaaatgattagatggtccttttaagtatttatgataacaagggatccaaattagtctttagcaaaattacagggaattaaaacggtattaattaaagttcaaataatttactttgttaaaaaagagtccaaacaaatatttagttttacatgtataaagcagaatattttgaattctaactttggtcacgtcaaaaaaaacaaattctaaactttgacactctaaattattattattattattattattattattattattattattattattgaaattggtgccatcatattgtaacaacactatcttactaagaaataggtggtgaccaaaaaaattaaaaaaaaaaaaaaaacaaaacccaataagacaaaagacacgcaactatataggttagacttaaattatatgagtacaaatagtaaaagaagaccttcatagcttcggcagtacagtcagagacaggccaaccattgtcaggagttgagaaggtcccatcctccctttgaaatgtggc

SEQ ID NO: 182615 - DNA, 879 bp, Cannabis indica
ggttgtaatcactaaactagtcacacaaggtgcttgtgttacagatcagcatactcagattttgatggcagcatacaccatggatgaagtcaaagaggctgttttctagcattccagcaacaaaggctcctgggcccgatagatacaatagctccttttaccaagataattgggaattggtcaaaaatgatatatttgaagtagtcacatctttcttacatacaggccagctgctcaaggaactaaactcaacaattattacacttgtgcccaaaagcaaatgtccaaatattgtaagtgaatatatacctatagcttgctgcaatgtactttacaaagtagcaactaaaataatttgtagtcgcttgaagctgattctcccagatattgtagcttaaaatcaaggtgggtttataaaagggagattcattgctcatatatcatgatctgtcaagacttgataagaaactatgggaggaagaatgctaaggctaactgtatgataaaacttgatctgcataaggcttatgacacactggaatgggactttttaggataaatgatgcatgctcataagtttcctgctttcttatcaactaatcatgacttgtgtctcaactcctaggttctctttactcttcaatggatccttacatggcttttttgtgctaagagaggacttagcaaggggatccaatgtcgcccttctatttgtactgggaatggagtacctcagtagaatattgaaggcaattggagataaagaagattttcacttccatgaaaggtgtggagcttaagaatcaaccatttgagctttgcgatgatgtctcttttttgcaggggtgattcaaaaagtatatatttgatgctcagagg

SEQ ID NO: 182616 - DNA, 699 bp, Cannabis indica
aatgaaaacataaaaatatggaaatgagaatgggaataaaattaaaatacagaaaaaaaattaatgaaaaattattaatttttttcccatcatgcattggaatggtctttccttccatttcaaaatagaattgtcattccaccaaaatagtagaaaggtcattccattggaatgacattccaacactttaatatgcaaccaatttaatatgcaaccaaataaaggaatagaatgaagattgtttccattactttcttttccattctatttcattacctccaaccaaacgccagtgtatattattatttacttttgaaatttatgacgaattttaatgtatgttttttctttttctttgtatttttttaaaaaaattgtatatcataattaaataaaaaaaaataaaaaatcaaataatattaagcacattaacttatctagtatacacttaaggcagtgtaatgtgacaaaaaataataaattaaataatgagagcaaagtctaactataactaaaagttgttttgttggcaaaaaaataattaaagctagactgctatatgttataaattattacaactgattgggatgttctacatagaactacatatatcttacacgcattaatttccaagttcatgtgatacataaatacataaatatatatatatatattatattatattaattttaagtattg

SEQ ID NO: 182617 - DNA, 545 bp, Cannabis indica
  modified_base (521)..(521): a, c, t, g, unknown or other
ataaatacatataattttttaatatatattaaatataatttgatttgattagattttaattaaattttgagattgacatctaataattgatccaatctaattagaatctagcatttaacatccaatctaatttaattgttacatggatatttatctttttctttttgtaatttaattgaatttgatcacaccggttaagtttaattgaattgaattagatcttgtatggttctcaaaattgtcggaatgggaaagagataaacaccacttgatctcattttttgtcagaaaaaaaaaagtgattgaaagaaaaaaagtgaaatcactttataaaagaaaagaaataagtaaagtgaaaattagaccattataaaattatacgagagtaacgagtgttaattacaatttttcaatcaatcttacttgaccagaatatatatgggtaatattttttttatagagtaatttgacggcgaaattccttttatgttttaatttttattacacttaacttcgtttancttttttttttttagtagtaaaaa

SEQ ID NO: 182618 - DNA, 607 bp, Cannabis indica
ttatgtgagatttaatattaaattatactattatcgatgttaggttatattaggttatagatggcttataataatattatgaagtaaatatataaagagttgtagttgtcttaattgaattagaattaggattctaatttgaacgaaaattaactctactttctctatattatatatcattttattaaaagataatcctattttatttttaaatttgaaaaaaataggttttttctcaattttattgatatttcattttaaattaagtttatttaaattgaaagaatactacgtttgagattttctcaaatgaataaataaataaaaatgattagatatggcttttatatactaaattagattaattatatgaaattaatacataaaatctgtattatattaattaaaatttaaatattttctcattaaaatgaccaaaagatattttagtggagtcagaattcgtatcactagattaaaaaattaaagaaaaagaaattgccgacattaaattttggagatacatattaatatattagattaattaaatctaaataaaaggcagtgatcaaaattcaaaattagaagaaaagcaacaaaaatatat

SEQ ID NO: 182619 - DNA, 936 bp, Cannabis indica
agggtaatggaaagaaaagcaaggtaagtggcaactccgaacaacatcctcagaagaatgccttgaagttcacaacatttaccatcctagcagaggatatagagacaatctttgcaactacccagtttatggtgccacaccaaaaaatcctcccatgaagaaagacatgagaaaaagggataccaccaagttctatcatttaaatacagactacattctggacactaatgaatgcaataacttgaagtaggaaatagaatacctcataaggaaaaatgacccgcatttgcaaaaatatgtcaagacagatcaagagcaaagggacacccaactagataacacccaaaaccagttgatgcctccaccagtgaatgaacgttcatgattcttgctcttatacttttataatcaacaaagtatgaaagtcaagaatcatgaactagatagcctatgaatcaaaggccattgactagtcaaggatgattcaacccaaacgtaccagacaaagcttttaaaaggggctgagtatcgggcaagggtatacatgatctaagtcattaatagagttcctatacaggatctaagtcatggacagagttcctatgcaatatctaagtcatagacagagttcccatataggatctaattcatggacagagttcctatgcaatatctaagtcatagagagagttcccatacaggatctaagtattaaaacagagttcctaaaacaagatctaagagttggacatggtctctaaaacaacgatactagtccaagagtcgatctgttcatcaaaagtcatacattatcaatcctaaagctatcgtagcaaattactaatgtgaaaagagtactctaaaatgtgagattaaacagtttctcaaagcttttaaaatcttagaactcatcaatgcagattcaaagaataaagg

SEQ ID NO: 182620 - DNA, 589 bp, Cannabis indica
attataaaattttctaaatttatctttagccactcattaacatataatagataacttttggaaacacttttatttttaaattttttaattacataaaagtaaatttttatttttaaaatttcacaaaattgtgttttataaccactttagttttttaattttaaaaatagaaaacaaaagtttgttctataaattttatttgattttatttaagttggattcagggccggggtttgggtccaaatccagttccgagtccaagtccacgctcgggtatgggtatgagtccgagtgcgagatttggggtgcggggtctgggtcccaagggctagattggggttagattagtgttgtaaatacagtccgggatttttaacacggcaagaaattggcacaagtatgattaagcacgaaaatataggcttgaacacgacacgatgcgacaaattggcacggtacgacatgaaaaatatgtccttaagcacgccacaacatgagaagcacgaaagacatgaaatgtaagtacgaataaagtagcgtacgaaaaagtcaaacacgcgacaaagtccaaaaaaagcaaagacacaaa

SEQ ID NO: 182621 - DNA, 579 bp, Cannabis indica
gtgagcacatagagactcacctctcagaattaagatatcccttacagttgtgttcaaaaccccatctaacaagcaaatgagccgcttgattagaggagctcggtgcccaaaaaggggaatacaaagaaggaagaaaacaaaagctaaaaacttagaaaatcactattacaaatatcgaaatttgcgacggtcttaaaaataattttttttttcagggaccgtcgctaaaaaaataaataactatttaaaaccgtcaggaaaaatttagtattcccgacgatttaaaatcgtagtaaacaaaatatacgacgttttttaataaaatgcgaatttttaagagagccttatatccgacggttttaaactgtcgggtataagggcctattaaaaaattgtcacctacttctcgccacatttcgcacgtgtctacctactttttttctatttcccacatgtccatttatttcttatcacctatttcttctccacttctcacacccttaaacgaaaatcttaactctccaaaaccccactcacgcctccgcaccatcgccctcctctctcgccgtcttcctccat

SEQ ID NO: 182622 - DNA, 584 bp, Cannabis indica
ctttttggtatagacttccttccatgtctcgatgtaatctagggtttcctataatttttgaaataaacattagagattttacaatttaatataacttaactacatttgtatttgaacttactaattcaaagcgacctttgagctaaagattttgttccttgggttgaaacatacttcattctttttttttttttttaatttttcttgttttgttcaaattgagctagaaaagatgggctagtaaaaaattcccactacccgttgaatgtaaatttaactaattgacacagaatctgactaggatcaaatttcacttatggctatcacgtgcgaaatgataataaatataaagacacgagaatttatagaggtttgacacctttgatcaggtaatgacctactcccttttagttgtattcactcttgagataataccaagcaaattagaggctgaaaccttataatttctagttatgactctcttcaatattacaataatgagaatgtgtgttgctagtgaaaagtataaggctatgagagaatgcaagaactctgaacacttaaaatcttagggttaatgcgtg

SEQ ID NO: 182623 - DNA, 843 bp, Cannabis indica
actctttcactgcgtacctaatttagtactgtaaaactaacactacagaccaacacgagtgtttctaacgtgctttgtcctcacacgcaccattttctgagaaaacttcctaaaatgtcacccatcttgaaattactccacgtcaagcacgcttaactgtggagttctttcgtgttgggctaccaaaaaacaagatccaccttgttgatataggtgtgaactccaaaaattggtagggttgattatcaagataaatcaacaattattctcggtaagcaagagacatcgaatttaagagtcattcgtggaatgaccgagttgacacatatgaccctaggcccgttaatcccgaaaactagcactgctaacttctgagagtagttaaccgaaaattgagaagattaacgagaacaagctaagatagtcactccgcggggtagcgatgcatgatcccccacatggtttccatgtaagccacttggcatgcatgctcaaatgtcactcgaaatgcatacttaagagtcactcagcatgctgctcattatcactcgacatgcatgctcaagagtcactcgacatgcatgctcaatgtcacttggcatgcatgctaaagagtcactcggtaggcatgctcaatgtcacttagcatgcatgctcaagagtcactcatcatgcatgctcaagagtcactgaaacatgcatgttatatgtcactcgaccatgcacgcttaaaagtcactcgacatgcatactcaaagagccactcggcactgcatcgctcaatgtcactcacatgcatgctaagagtcactcgacacacactgctcaatgtcactcagcatg

SEQ ID NO: 182624 - DNA, 1117 bp, Cannabis indica
agctcttacaaagatcactaagggtgcgtttggaaagccacaatgtaattggatttgtgtgtaattggaggtaattacacaatttggcatgtttgtctgaccatgtaattacactgtaactgtgtaattggaagtaattgaggggttccaattacactctccaattctcatgccccccatgagaattgaatgtaattacactgtgtaattactaaaaactttccatattaaacattagctactaaaaaatattattttcccatgtaattactaactattttgccaaacaagatattaggaattcatatgtaattaccacctcatatccaaacacaccttgcattttaaaatatagtgtaattactaaactgtgtaattaccaccctagtaattaccctacctagtaattacacagttacttccaaacacaccttaagtaattaactcttcgaccgagttttatctctatctttcgtgtccatgaatagtgaaatgagtccactatttatagggataaattaaattaaattcgtttccctaaatcaatattaaataaaatgagaaactagtttattttcataatgacaatgaagaaaatggaaaacttaatgttgattgtaacgtgacttgcaagtattaaatgtaccagatacacctcagaaattactaaattagatcgatgagaacacaacatacactaaatacaacattcaccattaaccaggacgaatagagagagttcaatcccttagttggtgttttctatagaattctcatcaattctaaatccgtgttatcaaaagatttcctgcgattatttccaatcgtgaattttatgccagtaatccctcttctattttttctattagcttactgttttaaatttaaaacgtatcagtcgacctggtctacgaatctaaaaatggtaatttactataatgacactcatatatactcatatacttaactttaagggtaaaatgataattttcaaaatttctcacttaagcctgtatttctaattgtccataaaaattcctagcgcctactaaatactaaattatactactttgacaattatcaatccatcgatcactattgtcaattataaacataa

SEQ ID NO: 182625 - DNA, 620 bp, Cannabis indica
tagcactttaggtttttctattttagtagaattacaaaattttatataatgagaatgtagtttatttaatgaaattgatatttattatttttttataaaagatataattattatttattatttcaaaagttttaaatacgttttcatattttataatttataatagaaagtaaaaatgaatattttggatttgggtaactaaatcttcgcaagatatttacttgatttttttaaatcatgattattccctaacaaacttgatttgacagtttctaacccttcgttgggcaataaacatgtgaggttgtgaggcaatttggtcatttcaaatgtataaagaaaccctagagttgatcatctttcactataaattgtcttttcatgccctagagtagagaagcctgcctcccgtttttcaaagtagggaatccatcattccaaatccaattctggtgggatctgaagaacttgaaattcaggcaagattaatatgatttctttatttttttttttctaagtgaggatgaggagtcaatcttctcaattgtgtgagagtttagtaaacttttctaagatttttagtcacaataaaatttaaaaatttgttgaaaataattttg

SEQ ID NO: 182626 - DNA, 949 bp, Cannabis indica
tggattaaaccgactgtaggcatcaagttgaatgtcgatgcaacaatttttgaacaagatctcaagcatggattcgggtgtgtgattagaaatactgaaggtgaattgatttctgtttttctggtgctaagcaaggcaaagttgcaccagaaattgcagaagttgtgggcattagagaagccttaagttggttgaaaaatcacaactactcccacgctgctgttgaatccgatagtctggtttgtgtggatgctattcgaagcaatgagaggctccattctggtttcggttttattgtggaagagtgcaagttaattcttcaaagtttgttaaatgttactttatgttttgtcaaacgttctgcgaatcgtgccgcacattttattgcccgacactctttgtctctagctgaacgtatgttccctattaatagtgttcttttggagttgttgtctattcttttgggtgatagctcttcttaataaagaacacttttcttcaaaaaaaaaaaatactaaactataatacaacattttagcaatccattagagatgttcttagaggtctctaatgaagataatatgaaggatgattgatgacatgaagacatttttattattttttaattgatgtttatcattagaactgaaaaagaatatcacaaaagaatgtcatacatatcttctctttcttattttttttattataaagtatgttaaataataatataaaattattttaataatttttaaaaaatgtcatacaaaaatcattttagaataaaagtagcaaaatcatgtaaaaataaaataaaataatatatttttaactaatgtagagatttgtgaccctcttacgaaaatataaaaaatacaattggagatactcttgtaatccttcttcgagatcaagaggaatcccttcagtctacgagtggtcaaagcctatg

SEQ ID NO: 182627 - DNA, 765 bp, Cannabis indica
tttaataatttgtcttaaaatgaattgtattctctaaatgtatacgcattgactgtaatatctgacatccactcaggtgttggctgttgaggaaattttcaagcatagggtcacaaatgtagtgttcatgggaatgggtgagccaatgatgaatctgaagtctgtacttgaagcacaccgttgcctgaataaggttcctatcaaattttccagccatttcgcagcatagccttttttgcttttttttttctcctttcactcctcttttttggatttccttaccattactttagatgtcgtaacagcctaacaagatagtattctcccttctctgttgtagatagactcattctgttatctcattttctgtaacaacactatgttcagtgattttagtatacatccatgcacttagataaaattagttgactgtacccttataacatcccactccaaatgttaaacgcaactattaggtcatagggaaaaaagaatggcctaatggatatttgtcatttaacatcaaccaaaaacaatagagtttcatattaagacagcggtttagtttaatcctattttctgctcaggttgccttttttaaatgttttatttaacatcataaaaggatcataagtagtaagtttttttaatgggactttgtttctttaggatatacaaattggtcaaagaatgattacaatttcgactgtgggtgtaccgaacactattaaaaaggctggcttctcacaaacttcagtccacact

SEQ ID NO: 182628 - DNA, 972 bp, Cannabis indica
atataatagttaacgtgttgccgtaattgtataattttaaatttgtacggtattattgtaattgatttaattattatgtatagatataaaaatttcccaaaaaaaaagtagttgtcaatttatcaattaaaaaacgacacaataacattaataacggtacaaaaaatattgcgaccttattattaataataaaatacaatttacctttgtaaatgtaaatttccctaaattttactgtggtataattgaaaagcaatcatgtaatacatatatgaaataatgggtaatactcatattaatacttattaaataaatttaattataactattaattttaaaattattaaaccattaaattttaatttaatgatgaataataaaatagaaatttaactatcttttttgtttgtcgaaaaacttttttttttaatttttttttctagccgtgggaataatctcagcccatgtattgtaaaaataagaaatttttttaattagatagaaaaattaaacataaaaacttaaatttttctaattctacttattgatgggtaatacccattaaaaatgcatccatacatatatatttagaaaataatttgtattaatattattttaaaattagtgatttttctttgtcaaacataagtataaaatattattttaatctattttttaaatgttttaattatttttttttttttttgttaaacgatttaaatgtttaataattgataagcaacatttactataacaactgttattattaattataacttaacttcaagattcaagaaatcttcattatttattcatttctttttcttaacttaattttttattctaatattttctactatttttatttaaatttaatataatctatattattatatatttttaagtataatatacatagaattactgcatatactatttttaatttttttttttaaattttttacggtttta

SEQ ID NO: 182629 - DNA, 825 bp, Cannabis indica
atttaagtggctatattaatcgtttacttttttagttaataaaaataattttataagaaggttgttgggcaaaaatagttttgaataaagattatttagcttaatatcccattcactcactacttcctctttctcttcttctctcttcatttacagagctctctaatcctctctccaatggcaatgcaatccaaattatcacaccaaaattcatcacgtatttcctctttctctctcttttactatcaaattcttcgtcttcatttttccgctttttcttagttccttactttgttttagcgatcatctcgacaagtacttgatcttaacactcgaatcaaaaaacgtttttttttttcttttgatgaataggaagttatgtcgtattatattaatccatttttagctagatgacaatgattaatgtcaacattgcttgtgttaatgattaatgctccatattttattttccaggcaccttgacctgtaatgtaaaacggattgaaatggcttcaaggaagttctttgcatcaattactgcagaagaagacaaaccctttgattttctccgtgctctatacggtatgaaatcactatgaagtaaaatgttgagtcttccataataggttgataatcttgattttcagcaatgcaatatttgacatagtttcttatctgtgtaaaaatacatgatctagtttagaattccacatatttaatctaattttctcctggaaatttgactaaaacttgtctacttgtctcgtctctgtaccatgtttggtattgacttgtatatgatacactaatattttggtataaatc

SEQ ID NO: 182630 - DNA, 560 bp, Cannabis indica
gatcttatttttctcaaaaaatatagatttgtttaaataaacataacatttttagtttaatttctaacttttttcaaaataattttatatttttattgaatttttaattacttttctttatttattaagatatgagtttataaatgtaaataagtttgatttttttcttcaaaaaatcttaatttgtttaaattatttattggattctcaataattttggtttgatttttttaagatatgtatttatcaataaaataaagtaatgcttgaaaatattttttagttataatttaatttttaaataaaattactattttttaattaatataatattttatcgtggtttttaataatttttattaattttttcagaattaatagaataaaattattttttaaattatttatttatttattttttttgataaaaagagacaaaattttgtatttgacaaaattttgtatttgacaaaatttaagagataaaaatactaatttttaaccgttgagagaaatgaaaacttaataaaagacataattatgtaacttttatatatttt

SEQ ID NO: 182631 - DNA, 713 bp, Cannabis indica
tattttcttataaaaagaaaaatagagaaggctcatggatgggatgggtccatgacgtaaacctactagcccagaatctagtgtgttcactaattattgttacaaagtactactatatcgaaatatgggttagatttttcgacacgataccaaatcggaatgagttcggaaagtacaagaacgattagacactaaaaagtacgagcttgggtacaatacaacacaatactacaaattggtacaaaatggcatgaaaaatatggccctaagcatgacacaacacgaaatgacatgagaaacgtttaaaatccgtacaactgtattttcgttaattttttgttacttttatgtatttattaaataatttttttaaaaaaataatcacgtgtaacacaaaatattatgaacttattttcaacattgtaaacaatttaaaattttctaaaattttacaagtaatcttaactaattatagtgtacacatcattaaaaaaaattagacttaaaaagctctcatgaaaaaaatagagagcctatccaaacactcttttaagacaatagacttaccattaccatgagagtgatttttttagtacattcattaaatatactttcaaaacaaaattttggtaccgatagttttatttgcatcttaaaaatttatagaaatgtcttatttaatttttttttttattttatataaaaattatagc

SEQ ID NO: 182632 - DNA, 623 bp, Cannabis indica
ggttcatttgttacctacaaatcattatggtgtgtttggagattttaaaaaataattaaaaaaataaaaaaagtactatgtcaaacattatttacgagtgattttttttttctaatgattttatgacaatattatgaaagaaaatatattttaattttgtggtttacttttggatatattttttgtgctctactctttcttttttaggataatttcatatggtgttaggccatctccaatgaaacggcaaaaaacctatatactgttatttttcctctaaatgctccaaccacactgcaaaagccaacatattttcatggagctctacagtgttccactaataatggtggacactgtagaccgcagtatatatatttttttaatattaaataatatattttaatatttactaatataatttattagatttgataaatatttaatattaaaatattcttattatataataaaataatataataataaagaatatattttttagtgtagatttaacactaaatatgaattttactattggagatgatcttagaactttttattttaatattttgtgctactaataatttacaaaacatactctgtaaagatgagagtgagaaata

SEQ ID NO: 182633 - DNA, 638 bp, Cannabis indica
  modified_base (635)..(635): a, c, t, g, unknown or other
gagagttccctcagcttatttttcacattcagaaaactacccacaaagtcaaagcttctctctctagattttctccttctagaatttgaagtttctgaaacttagtctatcattgtaattaccatctcgtgagaaataaaaatttgaagtagacgtagctctattactatcgtgatatagggagtgaactactataaatttgttgtgtctcccttacatacttaactacttaattcattctcgctaatctagcgagcgggtataacttaaaagtctagtctaaatttttgagtcaataacatatatatacacaaaattaaacctatattttttttttaaaaaaacaaataaacaatttaaaaaataaaaaatacctactgagagggggttgctcgaacgctggtggtgtcatggtggaaaggggttgctcagatagtggtcgtgtggtggtgtcgatgggaaaaaaaaaagtgacagagagagagaaattaagaagaagaagatagcaaggaaggtagtggtgcggtggtggcggatgggttggcctggtgcgggtggtggcctggtgagtggcggacaacgagagagagagagagagagagagagagagagagagagagagagagagagagagngag

SEQ ID NO: 182634 - DNA, 720 bp, Cannabis indica
atttggtatatgggcgcctagttagaatatggatatatatttatgtttatgattaaacttttcttattgagtctgtctactcacaattataacgtgtatgtgcaggtaagaactagaactgaactgggatgagtctaaagctaagggtaaagattatacatatcaagacagttagacttggagtgttcagagtctacgagacaatttagggtcacttttaatagtcgctagacgacaacttttgtagtacaaatatcatgcaaacttttgtaactttcaaaacgggatcccgaattatgtaatttatttatatttaagattcaaatttaattatgaaatttttaattaatcacgtttttaataaattttttgattaacaaaggagtgcacagtaaattaaaatcatgataacgtacttaatttaatagggccttacaataggtgtcgtggatctgcatatacgacccctatgcttcgattattattgttttggttattagcaaataaccaaagcggtaaaaatccttttgcctttagttttttgtttaccccttttgtttttcctggagtgcctttaacactactacaaaagtggtttttcctgatatttttaaacagtcgtttaaagtattcacgtcagtttctataatcgtcgcctatacgatcgtcgtaaaacgggcaaaataagcgacggttaaaaaatcgtcgctaatgtggact

SEQ ID NO: 182635 - DNA, 1000 bp, Cannabis indica
ggatttataagttgtaacgtgtgtttttcttttgatttgtaagttgccaaatgtcaacttcatcgtctttatagatgataataatttagaattctacaaaaatcagtattatatattattacaggcataagcttcattgaaactaaatgtacaattttcaaaaaattcaaattgctatgcaaaaagttttttaatagatttcaatcataaacataacgttaatccaattaccaaaactctattatggggttaaggcttgatagtaattgcatgcaaaaagttgatttgtgcacttcgtagaaatgaagtttttgttagagccatgtagagctcttcaaatttttctcttgatacatggaaccttccattgtgtctcaggggtagtggagtttttacaaaggtataagaacatgtgaaccatttcaattaaattttgcttcttctttttttcccttataacttttgcttctataaatgcaattattattattattgttatttatttatttagttttaatgttatgttggtaattagtcaacgatttgaatctgacacttttttttgtaaaaaactctatgacttccttgtttctaaagtggcgaatggctactgatgaactgtgctgtgtacatttcaggttttgtcacaaagaaccagcccatcttttaggaggacttctgccagcttgtttcatctcaaaggaagctcttcaaccaaagtatttaccctttttaatacaacaaactattctacttattcctctgaagattttccttcatcaaagcggagggctaggggacctgttatggctgcaaagaaagcggctgaaggtgtctctttgttgtgcacttatttgcttttactaaatattcatgctttggaggcattgtttagaagatggttcttaaaattttaaatgtgtcccacaggaaacttttactgaaaaatttattgtgaagaatgagcatgcactaattttcatgtctgggttaatttgat

SEQ ID NO: 182636 - DNA, 577 bp, Cannabis indica
atacctattatagaaaaaaaaacccaattaaaaattcttttttattatttgttattggatcaaaatttgatggtttaatatttttaaaattataatttataatttaatttatttaataagcatcaatcaataatactcgaaaagtgaatatttattttctcactaatttaacaataaaatcatttcacacttattactattttttttataatattatttaatcttattctatgtttaaaaatggtcaaccaataagaatagtataaattgttcattttataagtgtttatacaatacatactaaaatatgtccttttttataaaaaaaagggggggagaaaattcaaaataatattaaaaaaatatggaaaaaaaaaaattatttgaggtaacgagttactttttaaggtaacaagtcacttccttagaataattagttaccttatattatattatttattcatacttttaaatttttaaattttcctcataaaataatttttttccttaaaaaaaaattagaatttttgtaaacttttaccacaaaactcataaaaataaaaattacccattaaaa

SEQ ID NO: 182637 - DNA, 914 bp, Cannabis indica
  modified_base (850)..(850): a, c, t, g, unknown or other
gtttgtaatattattttgtaatataatgtttataatattaatgttttaaaaattattaataataaaatatgtttattaaaaatcaaaataataatttcgtaaaattaattaaataataaactagttttataaaaataaataagttaaatatttttttattaaaatataagtatttattatctattttagtatgaattattataatttaataagatttttttatttaagtaaattgtcatgtggcaatccctaattaatcaaagtcattaaatttttattttaaaaaaattggtttaaatatactaataaaaaaaatgacacgtggataatgacttgacatttaacggtcaagtacctactgaagttttagaaatataacttaagtattattactgccaaaaattaaacttacgtatttatttacaactgaaagttaaacttaagtatttatgtcgcaaattaatctatttaataataattattaaactatgtaaaactggatatcccaataaacatataacacctctagtaattagataaatactatgtttagtgtgattttatcacaaaaaaaaaaaaatgaaacttgtgtgtgtgtttatccaatattgctcatgtgtaatgtgtggtcaagtaggtattgaaatttttagaaatataacttaggtattattattgtcaaaaaattaaacttaaatatttatttacaagtgaaaattaaatttaggtatttatgttgcaaattattctattttataataattgttaaactatgtaaaattcgatattccaataaaaatatgacaccttaggtagtaatcagataaatgctatatttagtgtgattttnttaaaaaaaaaatgaatttatgtgttttatcctatattgctcatatgtaatgtgtggtatttta

SEQ ID NO: 182638 - DNA, 1046 bp, Cannabis indica
gggaatcctcattacattagaaaaactatgtaatgagaattacattacaaaaaactaaataaagtaaagctaaaatgactctaataccctttttatataaatagaaaaattaaagtaagggataattttgtcaattgatcatttattccaatgttcattttaataacaaaccaaacatcttaatcagttcccattaatattcttattctattacattactattacattccaccaaaccaaatatcaccttaacagtttacgtgtaatagtttctttctatacaaaaatataaaaatgtcaaaaaaaaaattaaaaatacaataaaaaaaaaaaataaaatgccatctaaaatccttttgttctttccttcatatttatatagattatcaatgttgaacaccaagtaattaattatgaaagttttcttaaacactttaacactaagtggacttcctcccatgaattacaactaaataagaattatctatgaataatatatttgcttaaatattttgggctcgtttattaggtcgtataagagtcgtattgtactaaataataaataatactatgtttagataaagaaatgtattgtactaattattacgactaaaattttaatataatgtaagttgtattatttaatacataacaaatggtctgtattagcttatattataatatttacgaaaaatttgggatcaatcccaacttttgacccggactcggacccgacccaactcagtgtcggtgttggtatcgagtttattgtcaatatattataactttacccaacttattaataccaataccaaacatactaatgtattaaataatattaatacaatacaatataatatataatacgtcataccaaataagctttttgttcttagatttaagtatttttcattttcagaaaaattattttatatatatattgttttttatatatattagtttttaaattaaataattttttatttaaaataaactttttatttatttttaagtaaaagttatattcacattttttatttttaaat

SEQ ID NO: 182639 - DNA, 346 bp, Cannabis indica
agatgaagaaaaaaaggagtaagttgaaaaatgtctcttttatttatcaattaatcaaatttacctctaattttatgtttatttgaaatatacatctttttatatgtattatacccaaaatacccttacataaaagaatcacatggagagtatcttgaagtgataggggcaaaattggtacaatgtttaaaaaaagaggtaaaaatgatagattttaaaaaagaaggtaaaaataaaagaagacaatataaaaaaggtatagaatgtaatttcctcacaaaagaatgagcttccaaagaacccaatactcatgagaagaaaagattcaatctagactatttatacc

SEQ ID NO: 182640 - DNA, 568 bp, Cannabis indica
agattattaccataatataaaagctaattagaatttatgacttttaaattttgatatattttctaagtcattaaaattgttttcgaactattgaaattgttagatttaagaattttcgtctaattttactaacggacgtttgacgtggatgataattcatggaacttgattcggtacataaacaatcgtcacattagtaaaattaaacagaatttgacaaaaatcgctatatctaacaatattaataataattcgagaaaattttttaatagcctaaaaaatttaaaattcatgatttgattcatgtgaaaatttgggggcaaaattaaatatttatttatgaatttgattgaatcattttcatttaacccaacaagtacgtgtgatgtatgtgatttaaaagaaacaaattaccactttcctataaataaagaaaatgaatatgaattaataattaatataaagggtcaaaatcaactccactatattcatattaaaacaaattagcttagataaggaatttggaaacaaattgcaactaacatctcggggagagagagctgtcaat

SEQ ID NO: 182641 - DNA, 676 bp, Cannabis indica
cagcctgaggaggatctttgagaccgctcacaagatcaataccctttggaatcacttgagtttggattggtcggaagctcctcagccctggaatccattgtttccactccaattgagacttgaagtctgtaggaacgaatagaaattggttggtgcatctgggtattatgagtctgggaagataaacttttgaactcagaagagatatcttggcagaaagaaagtaatccattctaaaaatggatttcaagcaagaaggtttgtgaaaaatgacaagcttgagccgcccttttatacacgatgtacagtgacaagaaagccaaagattaagaaatctaatggctgggaatctgcaaaatacaaataggcgattcataatgatcttcgaaaccatacaactgccagaatcaaaggaggtgtcctttccaagaaaggattttgacaaaaatgccctccgtaattattaaaaagctccttttattgaaaaagaactttttaaggggtaattgttatacctgaaatttgactggaggacacgtgtcaagataacgagaatgtgaatcagtgctgtatcttttatggaataactcattaattgagtaagtactagagtatatttgcaacccgctgactgtaaagtcttaggcgaggaatcaatgtacgaactagtacgtag

SEQ ID NO: 182642 - DNA, 592 bp, Cannabis indica
aatacatattatggcaagttggtatccaaataaaccagtgtgatgattgtataaaaaattgaatgatcatttgtaatatattgtattattggaccacactagactctactatatatgtatacgtacaactacaaccacaaacccccagccctacattttcccatttattttgtttttaccgttggaatatattctacctatctcttttgtcctttccatcttccttccttatcttgcagtacaaaattcaatctcatattataagtaatatatcatatagctcaatttttaaaacaccaacaatttagtttatactattatatacatatatttaataaaaataatggtaaatgaataaagatataataataccaatctgagatatgaaaccctctgtttatctttctatgttgattttcttagtattattatcatcattacttcaatattgtcttccaatttcagcttatgttttggatactaaatcaatttacctaatcaaatatcatcatcaaacccaaacatcactgttcttctttcttcattattcaaatctcatcatgatcacaagattgggactcacataaagatt

SEQ ID NO: 182643 - DNA, 743 bp, Cannabis indica
agtttttaaaaatttataaataattaattgtatacgaaaattaaaatttaaataattatttattatagtttaaaaaaaaaaatagtattacatagtaataaatattttgacattattgtcagtagtataaaatacattttataaaatttatattttatcttaaataattacaacatacactatttaaaaaaattaaattaaaaacttttctaaatgccaaatgataaatatggagtcagggacgatcccattaatattgatgtgccccaactaataaaaatactgtactttaaaaaaaataaatataaatttttaatttaataattataaactaaaatagtgaaaagcttctataaaattagataaatttaataagagtaattataatgtagctaaaaatataattttatgataaataaattctcacaaaataaaaattctaaattctaagtacgagtataatatatcgatgcatcttttgagaatgtaaatttaataatcgtatttgtttgtttaacatcagcttgctttttctaagcattgcattgtttttggtttttatttatttgatattttaagtttgttatccaattttttttgaggtaacactactttatgtcatttataaattatttatgcatacaatcaaagtagattaaaaacttactttgatgaatattttttcatgttttttgatgtattaaaatcatattgttagtaatgaagagtttattttcaaaata

SEQ ID NO: 182644 - DNA, 610 bp, Cannabis indica
ttcgacctcaagcattctgagggatcatcacgctgttcattattccgtcgattgtaggacctttcatcgactccaaaaacaacttagaacagtaagtgatttctctactttcatttttcttacattacttttaattttgcatttcagggtttgatcactaatttcttagttagcaccattgttgcctcatttggttttagtaatttttgggttgaattgtatctgggtaaatgttagggtttaggtagaacgtaggtttttaagtttctccaatttaccaacttctggtttaatgaatttcatccaagaaatgggattgctttctccttgtagtaatgttcccaatctggttcagaagtttatcgtccagaatatttagaaatagagtgtcccactgaacttgccatcccatatattctcagaattacagaagccaaatccaaattagagataaatgatgcaaaaattagggaacacatagtcaaaacctaccaagatgacattgctagtcaccacagacgcttcttacaagaaattacagaaggtgaacgtcgtttcttgcgagatgtttcttggcctgaatcccccaatttatcatctattcctctag

SEQ ID NO: 182645 - DNA, 784 bp, Cannabis indica
atttgatgagcaaaggggaaaatgtgtattaattagagagtttattagctgcagattaaatgaaaaaataattctatctttttctatttatagatgcatttttagatttttatttttataatattatttcaaaataaatattataaggatataataaatactttattttaaatttaaatatcatacgaaattttttattatttgttattagattacttttttttttaattttaatttttttaaataacaaatacgaattaacttgggcaattatattgtgttacgtacttcagcttgttttatttttcttttcttcattattattgttttagatacaatattaatttccttatttatttattatatattattgatttttttaattaacgaatttgttgagattaaatgggaatgttttatgtaatttctaatatatttcgtgttctagaagaatatattgataaattaaataattcattaatttattaagaaaataatgagaatagaaagcaaaaaaaaaaactactaactatacataaattacttctttttttaatttatttattatttgttagttgtactttagttattcttaaaaagtttgtagcacaattccatttgaaattaaaaaataaaaaataaaaaaagtttagaaaaattagtatctcgagttctaatatatatgtccatcatggatagcttgagttctgaaaaattcaagttcgattttgtatatatttaatcgcttaagctttaaagtcaaaatatatataaatattttttt

SEQ ID NO: 182646 - DNA, 774 bp, Cannabis indica
acaattttaaatcgagattggataagcaaaaaggtacttcgaataatatcaagagttatgaaagttaggagtaggagaaccttttctaatcatacatttggaggataggattgtgtaatgtaagtgcaaatttttactaagttatgaaggttgggcttgtatattgaaagtattgttagaaatatttgttatatgaacactttatgtaatattactcatgtaattgtcttaatttgaatttatcttattaattttaactttatattattattttttaatagtgaactttcagttaataatatatatatggatatataatatttacttatcttttatatatggacaaaataatattagtttagttgtcatttttttaatatatatgtggtaatttttactgtaaaaaaatattttgtgtacacctaagagtcattttacaattgacgcaaaaaatacttgttgcgtcggttgaagattgacgcatagcatgttgtgtcactttaaaactgacgcaaaatgctttaattttttttatatgttttgcgtcggttataaaatgacgaaaatagttttttgtgtcattttataaccgacgcaaataaattacaatttgcgtctacggcttatacgtcggttttttaaaccgacgcaaaatctttattagtcacttgaaaaccgacgaaaatacccccttttgtagtagtccaatgctctatccaagaaggatccactcaatcccatgccgattacgcactgtttacaaaaggctcccac

SEQ ID NO: 182647 - DNA, 741 bp, Cannabis indica
ggatcttttctgaattttatcaaaattttacttcaatcccaactccccaccttaaattgcataattatcaaatagagtaactgtatctttgggtgtttcttttgttttcttaacttgaatatttggccagatctttagcatctgctgatatttcagaggaaagggacaaactagcttttgtatgctcttgtgcggttgattctgttaaaaatggtggttctgttcttgttcccattgatcgacttggacttattctgcagctattggaagaaatatcaactgcactggattattcaaacatgaaggtatgttatgtgaataaaagaggacacttggattaagaaaaccaaattcaagaaataaggtggtcattttcttttctattacatgctcaatgtttactaagaatcaatgtgagactgatggtttaaactttaatgtccaactgtattgatgccttagtaattggatacatgaggtccacctggtgtgttgtcactattattttttttgaaaaaaaaaattgtgtttgcccattgctgcataatttaagaaatggaacaacactgcaaagccatgtttttttaattataatgtattcatcatgttttaggttcccatatacttcatttcttctgtagcaaaagaattactagctttcacaaatgtcatacctgagtggctgtgcactgagagacaagaaaaggtaaatattctctgtctaactagtcacaatgtgta

SEQ ID NO: 182648 - DNA, 579 bp, Cannabis indica
aaagtttatggctaaaaatattaattagtcataaaaattacaattcgttctcactaaatgtgtttttaactgcaacacttataactaaaacgaaattaataataccttatatttaaatactagtttttcaatgtttgttgtgactaaattaaagtgatacaaaaattctatatgactaaaaaattatcaaaatgtagcatttcttatagtaattattttatacggttaaatagtttaattaattggtgatctccaattaaataaagttgaaaaaaaaatagaaaaaagtaagaatttaaagtagcgtaaaaaaaatttatatgtataaaggagatatatgaggtggtgaagtggcaacttaaaatctctctaattagtattatttattttttctttaattttcttatttttttaattttttattagtttttattcaatatgaattaatataaaatatatatttttatttattttctccataatactcttatatttttttttatttttttttttctaaaaataataactttttcttcttgccttttcttttctatcaggttttatttttattttttattt

SEQ ID NO: 182649 - DNA, 621 bp, Cannabis indica
ataactatcttcgtgtgtgtttctattatgcgagaactatttatcgaaatttataaccttgacacgttattcttttttttttttaggagaacaagtccatctgtcaattaaatacaagattgtagaaaaaattatttgataacaaaatctatgaaatataatattctatattgctcttatacattgagcagaaagtgaatataaaatcttttcatattcaatagtattttctttaatagtttttcactctatcaattctctatatttctttgtaaaaaaaatctcaatatatatgattatgtttatatttaataatgatgtgtatgcagaaacgaagctacattatataattgggtgaacctcgtccccttaattgggtggcctggccctactttcactacataatatatatataatacttcttttcatttaagatgttccatctatattaatattttattatattttgacttttcaaaatctaattttattgataatcatgtatatatatatattttctaatttctaattatttataatttattttgtagtgagattcacattttttaaatgtaaaataaattattatttgaatgtaaattagttattaagaatagttga

SEQ ID NO: 182650 - DNA, 687 bp, Cannabis indica
catatactcgtaagattagttttctttagttcaaatatcttgttaaaatattattaaaatatggtttaaaaaagtaggattaatatcattttgatatctgtgtttagtaatagtaatctctatttcgtaatataataaattagaccatatattttttaaaataggacaaaatagaacactgagcttagttttttgataattttttttttttaatataactagcttgaagatagtttctagtacgaacaaatgtagaaaatgtacatatttttgtcataacaacttcagatgcaggttattattaatttttattttgacaaaaaaaatcaaggatattattatgtaccattttaaaaaatacaaggttcaatttgtcatttaacaaaataggaaatcaaagtggtaacttttgcaaaacaggatctaaaatagtatttaccctaaaaaaagtataaaaaaagtgtatgatcataagaaaaagggaaaatttatttttatggtttttaaggcataagtttgaaaaaaaagaaatatgactttttttttttttcaaaaagtttatttatgggaaaatttgaggaagaaattaaaaaaataatgaaaaacagtataaggtaattaattatccccttattatgataacttgttacccttatttggtttttttcatatttttcaactttcttc

SEQ ID NO: 182651 - DNA, 717 bp, Cannabis indica
aaaaattaagttttgggggttaagtgcaagtaaaataaaagtattggaggttttgcctcaattaacccattattaaaatgttaaaaggttttaaaatactatatcgtttgaataaattgaattggaatttaaaaaaatgttacaaatgataaacttatatatagaaaaaatatcatatatatgatttcaaaatttttgtaatcactaaatctcacttgtagtcacatcaccgtctctcacttatcatcatcgttattcttctaaataagtttactctatacttaaagctaatcaaacaataaattaactactcacttttataaatgagcgaatttgtaaaatataccaaaaaaaaaattcatcaaattaataatgagaaaatagataaagttatatctaattagatttaaattcaaatgatatgttttgtaacttttttaatttcttataatcatttactttaagagattatcttcaaacgttacaataaaaaaaaaataattaaaaaagaaatatatcctcacatatatatatatataaaataaactgataaatctatagaaaacttaatcattttaaattattgtcatcatcgtatctcacttgtaattgtgattatatccaaagtcattgtgttattacatatcacttatagttaattattactatcattctcaataaattgtctctatgtacatagagcatagttataataat

SEQ ID NO: 182652 - DNA, 504 bp, Cannabis indica
aactattccatatactatttgttaactttttcaaaaaaatttatggtttggttgatacgttagtttctcacgtgctttctatgagggttgttatatgaattttagttgtattttaagttgctccgttagttactatagggaattctatgtggaattttgtaaaaatacaaaaacaaaactgttttgaagtgtaaaattataaaaaccttaaaaaaaatataaataaaaaaatgctcagaaaacactttcaaaaaaaattacagaaaattataataattcatttaaatttaaatatatatatatatgtgtgtaaataaattgtacggtatacgtggtgttactaacatgtaaacaaactgtatctctattctatactttacccacccatcaatcattctatacataaattggcaatgatgatgattcttgttatcccaatttttgcactctgacgtggcatcacatgtggtgacacgtggaatcgattccgagtatctgctcgtg

SEQ ID NO: 182653 - DNA, 648 bp, Cannabis indica
ctacttagttttcactgttgtttaatgttactttttagttgttcgactgttgtttttgattgttatgttttgttactttgcagttacaaaaaaaaagaccatttttagtgacaaccttttagccacaacaaaaaaattacttgtgactaatatagtatttggatacaagttatcactaatttagttttagtcacaacaagtatcgtgactaaaaatatatttagtcacaacaaattgtgattttggtggccaatacttttagccacggtctttttagtcacaatgtaggactaataatttataattagttataacttttttactttcagtcacaagttttgttgtgactaaaagtaaaattttttgtagtggttgttttataaaaagtagtggtttttgtaaaaatttctgtatggtagtaaaattataaatttttatccaatctaatattttttataaaaactccacaagaatattacacaaaaaaaaaacaaaaacaatggcataaacatttttatgagaaaaatagtcactatttctaataaaaaaaaaacataatctataaatattttatatttttttaggtttaattaaaaaaaaaagtaaagtcaattaattgatgacgtgaaaagatgtgggcccaaagat

SEQ ID NO: 182654 - DNA, 502 bp, Cannabis indica
gattgagtccaggcctgccatttcaagggtaatgatcttaattttctgcataaaaataatatataatcaattgggtcgaatggctattgtcttaatttatctcctttgcctttattattttgctcgtgaaaagttttagattgtacatgtttgtatgagtttggagaatggctgccatattggtatatttgttagctttatggttgatttgtttcaacattttatatggttttaggttctggatacctgtgagtgaattgaacttctgggtagtacctcttcaagcacgcatagctttcatgtcaatgggttcaatattctggaacttctgcttgtcttctacaatgaacaagtagtttagtcattcggttatatggtatcagctcaaaaatttttgactggaagttaggagaaatatttgggagccaaaggtaatgattcaagttgtacacatttgctttaaagtaatttttttatggaaatttgtagacacaattttggc

SEQ ID NO: 182655 - DNA, 576 bp, Cannabis indica
aaataaaaatcacaagttttgtagagaacacactaacttttaaggcttaaaacagcatacctgaattgctaaactgttcccagcatgtttccctccactaataacagtgaaagcagggacaggaagagtcaaattggtttttccagaaagatcagcaatgtgtttgtagagtggaacctgaaatttgtcatttcttagaatgtcttatgcaaagtatacagcttgtagacaacaaactctgatatgattttgcagggagagagagagagagagtgagagagcaaaaagagaatgtaaagctaaataaaaagggcatgcctccttttctgctgccccggctttgcatgcagcaattgacacagtggtgtttaataagataaacaacaaacaatgtcactttttatacaaatactaaattgaaaaatagtactgaattagattcaaccataaacatttgcacttgcagatcagtaatgaacaccatacaattctaagtgcacttactacattccaaagacagatatataaacatatcaaaatcataagttaaaaattttgattaaaaaaaacacaagt

SEQ ID NO: 182656 - DNA, 983 bp, Cannabis indica
gcatgttatatcaataacaatcaacaacaaatcatgctcatattaaccaagatcaaacatttaattttagagcattaactttacaattagtaaacatgcctcatttaatatttggtattgaatcttcaagaactatgaaccattgttgatttcataaacctctttgatctacacacatggaaaaatgagatcttgggtgtaatgaacactactcttctattctctctacaccatagccacatccattccaccttaatcaccaatcaagagcacaaacattttttaatgagaaattatgggccaattgggccgacatgctcaatatgagagaattaattatcttgcttcaaaagactgaccaaagacgttttagagtgtgttcatagccccgagtgtgagtacattatgtccatcccattatagcctaatgataataccataaattaccgattatataattattattatatacgagtacctgagttagtacacttaattatatagtccacataaatatctagcacccccatccaaagcatagtgcatcaccattgatccacaccatttgcaagaaaatcctcacacagactaggatcacataccagagaagcctcgtgcatgagatagaagaagcccgccatttccgagtaggagatgccatgggagaatagaagcaccacttgcaaacacatagaccctcccggccgaagccgtgtcgaagcctagaggcaagccaacaaagccccaaaatagtaatagaaagtattattctatccaattttttttgattgaaatcatgtgcagcatattcaaaagatgggaattttactgctaatattcctaaaaatcatcaagttgtctcctcttttcttttctaataccaacttgcaaagagaatatggaagaaataataacatattacttccaattttataaaataattaagattctcacccatttcatatccagttcttaaaccaatt

SEQ ID NO: 182657 - DNA, 550 bp, Cannabis indica
attgcagaaggaataacattactctcagacggtcagaccaataataagcaccacgtgccatacagtgcgcgactttgttagcaaaccgtttaacatgataaataaaaacattatctaaaaaagaaagcataagctgacattcttgaacaattaaaccaaatataaatagcattgagacagaactacgaatggcctgaactactaaactgcaatcactttcaatgatcacattcgacttattcttctgcttgatccaacttagcgcctccttgacgctcaaaatttctgcaacagcaggttgatccaattaataatatatttaaatgtggtgatattggcgaacgacaaaagatgggtgtggcctcgagtcgagacagacagtgctaaatgtacatataacctctcaaaatatgttagttaattatatattttatttttatcaattatgttgaaataaaaatagtgtattaatataacaatacaaaaatattaatatagtatataatgttatatttattttgatggaatgaagattaaatggaattaaatt

SEQ ID NO: 182658 - DNA, 247 bp, Cannabis indica
acgtgtttagtgttctaatcagttataaattttctagacacaccaatgcacccttaatttaacatgagtataatctagtacaataatacaaccccttaaaagggatacaccaatacatctctatctgttttagtatctgaaataattttttagtcaaattttttctcatggtcatgtaaattatacttatttaagacatcctgcaaaattttaagaaattcagaaaagtttaacattgcgaaaattg

SEQ ID NO: 182659 - DNA, 740 bp, Cannabis indica
tcatatttatattgttttgttgttgctggctgtgttgtttgaactaagaaataactatattctgttgagatattttttccttgaatagctgaaagttgttagagtcttgagatatttttatttgcttccttttattgtaaagaaataaaagacctaagcctaggaaaacagaaccgacaactctatgagttataatggtctattgaggctttataaagaggtctaatttatttttccttgtaactttatttgtgggacaatagtatgggaatttatccaacaaaaaataaaacttttctttcagactcaaaacaaaaattactgagatagactcaaataaaaaacttttctttcatcacgcttctcaggtggatactcccatattggtgggcgtattccaggatcacgctctaacgaattgatatcaaatccttctttaatgtcaagtcttaaagattttgcagagcgattttcaaaatttacatgatcaatatctacaggtgaaattgatgacacattagatgtagaagcttcactattttttctcttaaaaaatgtgtcgattgtagctggttttctcatctacatataaaaaaatcacataatgatataacttaatcaaattattaactaaacctattatagataaataacatcttaacaacaaaaaaaaaaaatcaaatacaaaattaaaaactcatttaaattgaacttttattcaattaaacaattaaaagtct

SEQ ID NO: 182660 - DNA, 549 bp, Cannabis indica
tttttgttctgtgtttttgtgcggatagagtgtttatggctttcaactagtgtcaatatggggattggaagatcatgcagcagcaatatgtttggatgatgaagagacggggttcagctttgtaggggggaggaagaagactcgttcgattcaaggtggtgccttgtaggaagatttcttaacgcgggattggtggatttccaagctatgcagaatatgatggcattcctttggaaaccagtcaaagggctgtatgtgaaagagcttgagaacaaccggtatctatttcaattctaccatgaggtggatattcagagagcaattaagggaagcccatggacgtttgacaggaaacaattaatttttgaaagattgaaagagggagacaatccgaggacattggtattgaacaaacttgatctgggggtacaagtttttgggctgcaacatggttacaggtctgatctggtgctaaaagggattgggaattacattgggacatacgttgaatctgatgttaataacttctcaggggtatggagagaatac

SEQ ID NO: 182661 - DNA, 699 bp, Cannabis indica
atcacttactcaattcttggaatagatgtaataacatggtaatgtcttggttgataaactctatgtctcctgagattgcacagagcattatgtactttgatctcgccaccgacatgtggcgtgatcttcaagaaagattcaatgaggccaatggccctagaatttttcagctacaaactcaactcacccgtttgcagcaaggtgatcaatccgtcaccacatatttcacaaagctcaagtccatatgggatgagcttaaggaattccaaccgaacaccacatgttcttgtggtggaatgaaattgtttcttgattactacaatcaaaatcaagtcctacaattcctaacgggtcttaatgagtcttactcctctattcgggctcaaattttactcattgaacccattcccaatctctctcgggttttctccatgattgttcaagaagagagacaaagaacccttggttcctcatcctcatatctgtcttctatggctgcctcagctcgtccttcatcctctactaatcccaaccgccccaacgaaaccaagaccctcttgcacaaactgtggcaaaccagggcactatggttacaagtgctatatccttcatggtttccctccgggactatggagataaaagaaaatctgagaaaacaaagtactctgccaatcatgctactgtcaatacagccgaaac

SEQ ID NO: 182662 - DNA, 559 bp, Cannabis indica
gtgtagtgtctattaaaatgtaaaagctagttgaacatttattagctaccattttcatttggataatactattaaaattaaaggtgtgatatccataatccattatttggatatcataacctcatgggtaacaattaaaattgataaaaattgcatgcgtgtgatataatttccagctaaactaaataaataaaaagatttttcgatttcatatgatttgtttcaaatattctaatcaaggtatcacaaaagtcaccttttttgttgtcattagttggagcacaccaccttacggctcctaatttttgtcaagaattatgttaagaaaataaaaataaataaaatgaaaaagtattcgtcataagattgatgattacatcaattatgtactctttcatatttgtccactacatagtgacaaggctatagtaaatgacatccattttgataccccgcaagagaataaatggcaccatttttgtaaaatgtttaagaaaaaaaaaaaaataaagttatttgcaactaaacctcttaaacttcacgttttataataactaac

SEQ ID NO: 182663 - DNA, 603 bp, Cannabis indica
tgattcactattaccttgttcgacccttgttaagttcttgtgttctttgttgctggtttatgtttgctgttatattagtgcattagcttgaaatggtttcattgatcattgttttgtttaatgtgttcttaccgaggtgttcattcacaacaattggcatcagagctcaggtttcttgaagcaagaacagaataaagaaagtgatccatggcttcttcacgctttgaagtagacaagttcaattgagccaatgactttgggctgtggatgattaaaatgaaagcatttcttgttcatcagagtgtataccaagccattgacatgtacaaggaagaattaaaggagttgggagatgacaagaagaagattaaagaaatcgaaacaaaagcacatagtgccatcctgctgagcttgggagatgaagtcgtgtagagaagtgtcaaatgaggaaacaactttgggattatgggagaacttgcctcaattacttgagaaatcccttgctaacaaactctatagctgaagaagaaactatacactctcaagatggaagattcaagagaactcagaaaaatatatctgttcgaactcgtaagtcttgtg

SEQ ID NO: 182664 - DNA, 662 bp, Cannabis indica
tcaatacaagagatagcacaacagattcatcaacaaatgcaagaatcattctgagaaatctacaacaacaatttaagactttctgaaagtcaagaaatatcaagaactgtccaagaatccaaagaggatgttactgaagttgttggcaaaaaggaaaaggaggaaagcaagggtcttgcaacccccatggcacccaacacagcgcggcaatgctagaacagagaccaacgaccatgtgcatcactcctcaggttttcgcctaaatcggagcttggggcggggattttttaacatgaactaccaagacttgcaactcttaacatgaaaattggctcaagaagttgatgtcgagtattgatggagagaatctggacagattgatactacaagaggaaatatttttctcttgtcatggatacgacaacgacgagaagatttgaggctgctttcatttcattttcaagggatgctctactacagtatcaatgtgagattaaaaagcgagccacattaagctggaaagagatgaaaaaattggtgttgaaagatttcaaaaacacttacataaggtccctttatgaccaatttctggcagtcaagccaaagggttttgtggctgaatataatcaaaattttagcagaattgccacatataaaaattg

SEQ ID NO: 182665 - DNA, 538 bp, Cannabis indica
tctcaaacaaccctctcttctaagccaaactaatttcatatactaaatcaacaactactcatcaacatcactacttcactacattaccacaacaaaccattaaccacatatccacctattccaaatctaaaccaatacaaatttattatcaaaccatcagtggtatcagagctccgttcgatcatatatcactgggcgtaatcttttccactcatcaacatgagttcggagtacaatcgctcttcactacctcttccaattttccatggagaaaactatgatttttggtccatcaaaatgaggacctattttcgatcacaaaatctatggaaaattgttgaagaaggaatcactattccggaagatattacatctctttcggaagatcaaaagaaggcactcgaggataatcaacaaaaagattctcatgcattatactgcttgcaacaagctatggcagacaatctttttccacgaataatgggcgcaacaacagcaaaagaagcatgggacacgctgcaggaggagttccaaggaa

SEQ ID NO: 182666 - DNA, 526 bp, Cannabis indica
aaaatttaaaaaagtacctactactaccagtctacggttctccaaattaaagctttttcttttttaatcaacttttctgattttttgtagatataagtgacgtaccttttttactaatcccattaataaaaataataactaaataaataaataaacaaaagactacaaatttattagcataatttggaaatatggaaagctctcacacgcacaagcttaaataccaattgattttttgaggcaacagaaaaaaaaaaaatatatatatatatatatatatataaatttaggcacgatacaatacgatgctacaaatcgacacgacacaatacaaaaaatatatctttaagtatgacacaatacgagaagcaggaaagacgctatacgtaaacacgaataaactagctcgaaaagcactatacgcgataaaatcaaaaacactggacgacatattaaaactttattataataataataataacaacaacaacaacaaacaacatatgaatttatcaattataaataa

SEQ ID NO: 182667 - DNA, 588 bp, Cannabis indica
cttgggaaaagagtagaggaacggctaattggattgaagtgcggctagacagagctttggctacccaagattggctagaccacttcaactcagtcgaagttgtttaacatagatgtttcaagctctgaccacactcccatcttattggttcctaattcttttgatactacaattcctaaaaagagatttcgatttgagaattgttggctccgtgaaccaatgtgtgctcaagttatcaaagagggctggtctagttgtccatctactgctattactgataaaatagctcattgcagtcacttgttacaagcctggggagagagctactcgggcaacttcaaagatataatcaaaggactcaaaaaaagaaatccaatgttggaaaaaaggaagagatgatttgtctgttagaaagcataaagaagctgaacaaaaatctctttgaaacttacactcagcgagaaatattttggagacaaagatctaaacaactttggttgagagaaggagatcaaaatagcaagttttttcatgcttatgcctcaactcgaagacgcactaatctctgtcaaagcttcaaaatgcagc

SEQ ID NO: 182668 - DNA, 579 bp, Cannabis indica
tgttgttaggtattttttttattttacaattacaaatatattttataatttaaaaagaatttaaatagaaaatagaaaattttatttatatagatttattatacaaaattttatttattaaatttggtaaagaatatataataaatgaattatcataaataaactattaaaattttaaaataatattaatcagagaataagtatcatcattctaataaatataacatagtattattatacttacatttcgaacaacaaatatgactacaacacgtatacatgagattaagaatgaatggtggagaactttttttttttctccgaattcttgtttaagtagaatggaaatgaaaaagaagaaggaatgaggtttaaaatttaaaaataagcctcaaaggacactgttagatcttaagaaggaatggcatttaaatgctaatatgacatattcttggtaatataaaactaccaagataaaagtgtgttcaatacacttgagatattatgagtttatcatcctagtcataattaaaaatcttttcaaagttaaaaatcattttttaagagaaattattatac

SEQ ID NO: 182669 - DNA, 789 bp, Cannabis indica
acatataagatataagttatattttaatgtctttagagcctcatccatggttaataagggtcatgacaaactctatcttggtagcctcatccatatttttcaaagcactcacattccatggttgttcagcaaatatctttagagctttgatttgatcagcaacatggaggttcatctttgtgatctcttcccaaacagagtcatacatcttgttattatctctattttttagcgtttcaatgagaaacttcgtttcctcatgtgatttctccatcatattatccaaagactttgctagattttctaacccaacacaaatatctgaacctggtctagctctcttctttcttccagattgggattgattaccacttgattggttgacaaacattggggaaaatgatgattcttcttgcatttcattgccatcataatcatcttcaagatcgactgctttagccatatcagctggagtttcaccggcttttccagttgcacgatctgctccaaagatattagccaatctgtcatagataggaaattgtttacccctccatccgtcagcttctttgtgactctgaaataataagtgatgaattagaatgtagtgtattagtattcatcaatttgaaaccaactaaacaaatttaatataagtacctgcacatatgcattccatacttcatcactatcaacctgaatgcacttttaatatttcgttccaaccaaacccactcacatttagcatgtcaaatactatactatattgtttctttccatactttttta

SEQ ID NO: 182670 - DNA, 794 bp, Cannabis indica
aatatgaaataaataaataagaatgtaaagatttatgtggaattttcatttatatcatatttttttatatttatttataattttatggcttaaaattttaatttacaaaaatacacttataaagttttaaaattataaaaatacacttttttcagcaaaaagtaaaaaaaaaaaaactaaaaaacaacgaaaaatcaacctcacgacaaatataaataaagtataaataaactaaaacaaactcatgacaactatagacaaactataaaacaaccaaaaaaataatttattatttttactgaagagatatttttgtaaataaaaaaatcaaagtgtaaaaataataaaaaaaaaatctgtgtcgaattatttttgtaattttttaaaaaatttgggtcaattatataaatttatcaagaattatactggttcggatcaattgcaatattatcctactcgagttagagcacccccactagaatctttccttgtgcaaagagaatataaacaggttacatatactaccatgacaatttgttcacaataactctgatcccaagcatctacaataatagtggaatcctcgctgcccagataatgttaaaacaatcaaaatgcatatcgactcgcaatcaatagagtttacactagtatgttagaattattattgtgtaataatataatcataagcataactccataactaaattattaactatgtgcctaatattttttaataatcataatgaaattatttacaatagctaattgtattagaggcatatgaaagcatc

SEQ ID NO: 182671 - DNA, 566 bp, Cannabis indica
aaagttatcttattttataattttgttacagccatattttttaattattaagtgtcagtttaaaaatacgtaacaacatatttttttgtacaaatttttgagttaatgcggttaaaatataatacgactataataaaattataaagtaaaatatttttgtcattactttttaattaggatcattttaataataataataggtgtaattaaagtggttgtcatgaagttaaattacgtgtctgctttatgttctgttggtcattttaaaaaaaatatatataaaagtataaaaaaataagtatggtggattaattaatatgtcgtatatcatataataacccaagaaaagaaaaatttattagtacacgctcgtggaaaaacttcactttttcaatacttgtgtacttcttgttcttttctgttcctttttttatttctaaaaataaaataaaattaatataagagatggcgtttacacaattctgtttggttataaatttgttccaacacgtaaacgtaataaaatattatgatcataggttaataatataaaaataacaataata

SEQ ID NO: 182672 - DNA, 578 bp, Cannabis indica
tgagacatgaagctgacagttaaaagtgcagtctaattaggagaaacacttgctttcgttttgggcacttatcgaatctttattatttatcattaaacaagagaagaaagaaatgagagacaacctatctgtttcttttatttttctttatttcatattttaaattttgatgtgcttgaatagttgaatgataacatttgcctcagatatgacctgtttatatgaataaggtatcacctataggaagttaccaagtagtacctgttccacataagtacgaggaaaatgttaatatatcatgtgccaagacttgtctgaccatttatcaaaaaaaaaaaaaagatttaggtctcaacaattttttgtcatcttctcagtattattttattaccaatagatccctataatatataatattacacatcaagctccattatagtaaatatatatttataaagtatatttatattagacggtacatttaattaatataatacttttatagtagtgttgttaatatagtatggatattattttttttttttggaaagggaattcattaaacaacaccactaaac

SEQ ID NO: 182673 - DNA, 603 bp, Cannabis indica
aaccttcataacattcttcttttcaggaatgagaacaataacagtttctttaatgagagtgatctcggcttcaccattgaggacagcaagaatagctttacataaattagagcacaatacttgctaattcttttggtaaaaatgggcgtttaaaccgtcataacctagagctttttctccaaacaaatgaaacaaggcatccttcacttccgcagggtcaaaaggggcctcaatgagggcaatttgattttcagagagcttggttgacaccccagaaatccaatctacaccttgagaagtgaagagattggaatagaattccatgaaatttctcataatggaagtttggtcagtgacagtagaaccatcatcaagaatgagagttctaatgagattattgcattttctagcagtggttttatgatagaagaacttagtattcttgtcacctattttgagccaatttcctctagagcgttgtttccaaaacacttcctgcttgtacaagagagagtccatggtagcttgaagggttttagcctgctagatagtgttggaaattattttaccaggatcttagatctactcacaagtatgttgatt

SEQ ID NO: 182674 - DNA, 584 bp, Cannabis indica
taatggtaatgatcatctcgttcgtttcataacggtaatggtcgtctcattcgtttcataacaggaatgactatctccttagtttcataacggtaattgtaatatcccgaaaaatattataatatttaattgggcatattttattaaatatgtgattatactaatattgggagtaaaattatgatcttacttaagctagttgtgtaattattaatgtaaatttaataaatgactaaataaagcaaaatttattaattacggagattttattggattaagtaagtaatgtaaatacaatttttgaaataaaatatttttgagttcggctgccttagaaacttgacggagtggtcagaaatatcacgacaattaagttaagttgtgttagaattttattggattagtttagaattttaagttatcggtttggcaggattagctagaaatgaccaaaatacccttaggttattccatagcttaagttttaagaggaggggtaaaatggtcattttaccataatttgtcttttatagttttctagtgggtgtgggctgattaataacttagtttttttaattatttag

SEQ ID NO: 182675 - DNA, 1226 bp, Cannabis indica
acagtagaacactagtaaaacaccagtacaacaccagtgaaaacttaacacagtatactacagtatgaaacttataaaaaaatacagtaaaaaagtaaaaaataccgcctgacaatatttttgtaaaaaaatgacaaaagttagtataccatgtaaatttcccatataaaaagggaatgctttctcctttaatattacttaaggaatctaaaaatatcactttttattattattattattattattattattattattattattgttattgtttttatttcattttatggctatgatatatgaaaagaaaataaatgatattattaggaacttttttaatagtttgcaattgcatacgttgctaaatagttataaaatattttaaatttattttcttttataaataatataaataaaaataataatgaaataaaattaagaatatactataaaaattagataaatactatatttggtttgattttttatctatagttggtaatttacacatatgataataaatgtattatatttctatcgtttttatagcggaatcataccatatatatatcaaataaataaataatttatggtgaattgatataattagaaatatgtaaaatatatgcttttattactatttaatatatcattcctaataaagatattgtcatcggaatctcaatataattacataaaattttatttttttttacagttataaatacaaagtacatcttcttcttaaacatcaaaaaacaccacattacaaaatagaataataatatatatgaggatgaataataatagcattagtatttttggtgtaattcttgggttattattgtgcatgaacaactattcatgtgtgaatgcagagtacactgtttacataaccaatttcttagatgtaaacacaacagtgagtgttcattgcaaatcagcagatgatgatcttgggactcatattgtgtcatatggtgataatttcaattggagtttcaacataaatttctttagaactactctattctattgtgatatgagtacaagtaaaggagatctcaaaggtcattttgttgtttttgatgcccaaaatatgattgccatgatacaaatgttattgggatgtttcaaacagtggattgtatctatttattatcgtcttaatagtatgagttacatattcatggccaaagtcaatagtagctagtactactattgat

SEQ ID NO: 182676 - DNA, 779 bp, Cannabis indica
tttttttaataaaattttttaggtagatttttttttaataaagtagagagtgtataactaagaggcggaggcctatatatattctgtttttttaaaataaaatgtggtaatatattaaattaaattaagtggagcacttaaaaattttagacaaatattagtttacacataattcttaacgaactagtaacaaatttaattagtacgtgaactacactattcgcaacaagcaacaagaaatgaacaataagtaccaccaccaagtgcaaagaaataatctcctcaataacaagtttgaactcaaaattagaatctatattattaactcaattacaaacagttgaaacattcgcttccgcccttctcactttgaaatccaaattagaacgcccatagaaaaatccatacgaagagccaacaattctgccatcaactacttagaaactcaccagacacaatttacttatttatactcatgtatacataattcacatgacatgacatgacatgacattgtacaagatgacatttttcaaaaagtatagcattgatatttagtacgagtgtacgaccataattctatcaatatggcggcttttaattaattaattaagtttttttttatttttgaattaaattatgtagaatccgaaattgaatttatcacgtcatgtgatgtgatggttaaggtgtctcttagcatttgttaattttgtgtagctgtttgagttgagtcctttattttttaagacatatcacaacctcgtgctaggtggttg

SEQ ID NO: 182677 - DNA, 593 bp, Cannabis indica
aatattattaaaataaattaatattataactaccagtaattttttttttaaaaaaaaaacactatcccaactccccattcttttcgatcggttaagaaaattacagtccctaatctctcatcctcatcctcaccatcgtctttaatctccatctcactcatgttaacctctcatttttttcatctcaaagaaaccatctcactttctcattaaaaccccaaccaattgcgtctttaacttacactcaattgcggcaataatgtgatgaaatgcaacaaagaacgcatcgggctgccgtggttggtgagaaataacagaaaaaaaaatgaaatcagtgagtctgtagttatgggtctaattatttatttattaattatctttgaatgtgctctattaatgtggttaatttggatcttttataatgattaatgtcaaatcatatgtttgcttcactcttttcttagattctcattatcttgcattgttctacaggtaaaattaaaattgtctgtacaagcatttttggaactacacagattgcaaaaggaaactaaagagaattaaaagacttccttgaagaaattagagaagaa

SEQ ID NO: 182678 - DNA, 626 bp, Cannabis indica
aatattaactttgttagttccaattctccatctctcttcttataactaattatttcctcagtaaatactatattaaaaaaataagctaattaggatttttgtttcaagaactttaacatgtactaaatcatgccccttgaacttttaaggtcgttaaaaataccccctgaactattgagattgttagatttaaggacttttgtctaatttcatttaattttactatttcaatgattgtttatgtattaaaccatgatcctcagactttcatatctaccaaatcatgcccctcgaactttgacatgtactaaattatgtcccctgaattttcattcatgttagacttttttactaaaattggaaaaaagtccttaaatccaacaatctcaatagttcagggggcatttttaacgacattaaaagttcaggggacatgatttgatacatatcaaagttcacagggcaaaaatcctaattagccaaaaaaaaaaatatatgaaaagaaaagtgagagaaattttcttataattttactactgtaaaaattacacactaaaataataaaaataaaatttcaatttatagattctctaaaaaaaaaatgtaaaaatataaaaaaaattaaa

SEQ ID NO: 182679 - DNA, 788 bp, Cannabis indica
tattaaatgaaagttttagttaaaataaacccaaaaagaacatgcattgtctttgtatgatttgtccaatccttttcgtatgactaggaaaataaacatagaggtaagccctattttgacttcatcatacatactttgtcgtctcattgtttgtttgtattctttcaaaaaatggaaggagagaaacttggctatattattattcgaataatttaatattctataatattattaactaatattaataatacaggtgaacacttttttgttcggtttgtttagcaaaagctctatgtttttcgtgtataggttttaagaggaggcgaagaattaagaaagataatagtaatgaaatcgtatgagagatatgataaatatttttaaaagcatacatttaaattttatcacaaggatcaaccgcatatggattttttttcccaagaaaatttggaaacggatctaagatactttattaattttgactactgtctatttgttgtacaatagataaattttatttattattattatttttttttaagagagttgtgtatggatttttaaccttgtacatgtttatacaagttcgtttagaacgcgtatatatagtattaatttttataaaaatttaaataaataatattttattatatattaaaatttaacgtaatattatataaaatataatatataatcaaatttaatttaataaaatataatacaactttactttccaaaccaccggtatacacatgtacaaggttgaaaatcttacatgactgatattg

SEQ ID NO: 182680 - DNA, 849 bp, Cannabis indica
gatactcaaaccattaatactaggaacatgaagttttgttaagtccattgaataggcttattttcaaattttgctttcttgtccatgtaatagaaaacctttggtaactccatatgaatggttttaaccatagttctcttggctttacttcttagttccttattctgactatccattacatgtttaaactaacaatggattttgtcactagtgtcttccaagtcataacagggtgagttccttgaaacccttccactacgacgaggtaccgtgactatctgtctaagaatctaaaaggtattgtcctcttcggttgtgtcaagacaacagaggcagtgggaccatcttatacagaatatgatgatagaacacttttggaatcaagaaaaaaatatctcctctattttgctactttgtttacagacttagtcattttcttagaaaagtagtatttgttaaaacatgcgatggatggtcgtttgtgtcacatgagtaagtttagaatctttttcttagtaggaaaaacttatgagatatgtagaatgttgggtttaagcggggttatgacttttgaatattttacccctaggattattaattacttaatattcaaatcatggacattttggtaatttgcattcggggattaggtggcagcttgtttttgggacaactggcaatcaaatcaaatttctatattcatcttatgtcttattgattattagaattgatcatttaagaaaaatataagaaatagctagaagactccatgttcatcctctccctctctcgaacctagcttgaacttgagggaatcagctcatttcccttcaatcttctaagttgcag

SEQ ID NO: 182681 - DNA, 561 bp, Cannabis indica
tatatagagtaatttccttttatttcattttatgtaccccataattaaacattttttcctcttgaaataaaagtagcattccaactaaaaaaaaaaaaaaaaaaatagaaaagtagcattagatatatactgaaacacaaatttatacatctttctcaaactatagtttatgtatagaaaagaaaaaaatatatgactatactaaatacatgcatgatttatcactttaaaacaaatttatacattatcaatcatatttatagtttattgattttattgcagatgatcattataatcatcgtttgatcattacccgaaaattaagaagacaaccgatcggcgggccgccacctcctggtgctggacacaaataatcaatacagcttgtaactttacatgaatctattataggtttttacttcgtctttaacacttggaaaatcaggtactgaagattaaagcttctaataaataagtttttacttcattttccagtttgacactttaagaaagctgctatctttttgaaaaagaagtttgttttatataataacataaatt

SEQ ID NO: 182682 - DNA, 485 bp, Cannabis indica
attcttttggtttttatttttatttattttatatatatatataaaggtccttgactttgtcattgcaaactgccaaaattgtttacaaaaagaaagaacttaattatgttgctacttgcttagttagcaagtagagattctaaatacattttctctaaactatcacttttggcttgtcatttgtttcaagaaaataatagcaataaataaaataagatacgatccattatataaatatatagttacaaaaatggaatataaagaaagttgtgcagacagcgtgcatggaattaatggaagaactaataagtatatctctgactctttatatgtttcttttctagcttctgtatatcttattattatctaattattaatttaaataataatattaaaaatagatttacttcaattttataatattttttaaatatataaaatttaattcaaattcaaaattaaacttatatacaaaaatatttacc

SEQ ID NO: 182683 - DNA, 557 bp, Cannabis indica
taattaattaagtaataatattattgtagagagaaagagattgttaattgttattgatcttaacttaacttaattaatatgtagagtttggattgatcttaattatcagttattattattatcagactcatggtgtatttttcctgtggtatatatatatgtgtagtaatttttcatataagtgtgtgtaaagagattgaagtaaatttattaatgtgttcattaatctggctctagtactttttattaattgctaaaaattttaattaacagtaaaattagatacaatcgaatattatatatatatatttttttgaacaaaatcatcttcattaatatttatatattttgattatatagtagtatagtggtgtgtttctagaagtcgaaacatatatatacattaattaatggacaatatatactatatcaaatcacttcgagtaatgatttacaaaaaaaaaaaaatcactttgagtaagttaaaaactaaaaagtgtctacaattattacaaattaaaagtactactctaatttctattggcatttttgtctgg

SEQ ID NO: 182684 - DNA, 551 bp, Cannabis indica
tttcatgaggagtagatcatgtaagttatcttccctttgcttttagaaaattttattctaaaggggaaggaaaaaacttatagtcacaataaatggtgcctcaacgttaatatatttttatttgatttattaaccatgtaatcagataaacctgctaatttcttgtaattctaaaacgatagttgtttggattccatagattaagcatcccaggtcatacgtatgagtcagaaatatcttagtttgttatggctgtttagcatcatgagtcaaattgtttcttgtgagggactgctacttggattatgtttctactgatgattcttgttagtgggaatgtgttacaagttacaaccacttgggtagaagtcacttctcaaaagctagtctaatagaggagggtgtccaagtagttatataccttcaactaatcccatactaagtcgacgtgggatcctaactgtacaaattcaaccacttgggtagaactacctcctaaaagctagacaaagagatgatgctgcccaagtagttataccaccaactaagtc

SEQ ID NO: 182685 - DNA, 664 bp, Cannabis indica
aaaatggttaccaataattattttattttatctatatgttgtaaatataaaatatggagattattcacatttcatgaacaattacttagataagatcaaaggagaataattgttattcttagaaccccttcaaataaagagagaacctaaggggttggagattgatcattttggggaggagagaccttgtgagattgagtgaagtttcatagttatttctctatattctaagtatatttttaagaaatactcaaaaataataatgactcgtggagtatgtagattttaactacaaaaccacgtaaaaattcttaagtgttctatatatttattaattataagtattaattttttatttacaaggcttcatttattgttaacaaaaatctgagttaacactaagcgacaccttaaggtgtcaagcaccacaagagttggcatattgctattggtccaattcaatatcggatattatatattttggttaataattaatgtaaaaattactaaccactcacaacacgccacatcaatatttgaattggacagagacggagggagactttgatttaagagggccaaaagaaagaaattaaaactagagctcaaattgttatttttttttttggaggaagggggggggggggggggggggggtgaccta

SEQ ID NO: 182686 - DNA, 642 bp, Cannabis indica
aaaacaataccaagcatgctctaaattgttttaaaaaacaattttctatttttaaaaacaaaaaacagttttttagttatcatgccaaacatacactagtttactttttgttattatctttgttgcatgtttaagtaaaactaaattaatcatttcctttcatgaaattaaatctttaaacataaaaaatacacaatgaatcatgttactttagaaaagataataaaaaggctaaaaaaaaaaaaaaaaaacaatagtcacttttttaatctgtgcatgttactgttgcattaaaacaaaaaaaaaaattatagcacattaaccaactttaatatttcatgtaacaagttactttagaaaacataataaaagacaacaaaaaaacatgttacttttgtattaaaaccagcaaaaatataacacattaaactaaattcaataattcaggtgtcgggttactttaggaaacatcgggttagtttttaatgttgctaataggttacatgtgtaaaaaatgtagcacgtcaactaaaattaatattccaggtaccaagttactttaaaaaataggataaagacaaaaacagaaaaatatgttacttttgcattgaaaccagtcaaaatgtagcacactcaaccaaa

SEQ ID NO: 182687 - DNA, 530 bp, Cannabis indica
gctttacttcgtttctttttttaaagaatatttttttttaaattttaaaaaataaattagactgtaaataaaaaagaagagaatggtaattagaaaaaaaaaaaaagaaaatggaaagaaagaagataacgtttttattattaatcacatgaaaacaaaatactgaaactggaatcgaaactatttcaaagtttttactgtttgaatgaagaaggtctttttgaatgaagaagccagtgtgagataaaatatgaaaataataatacatgtttcggctatgacgaggatcttgaaaaagcctacacaggagtgcaaagccatagatgtgtttggttgatcgtaaacccaagcgagagattggatttgggggtactgcgaatacaaaaacagcagcgtatcggaaagaggcggcgaaagttgaggtcaactgtagattaggtttcctaagggaagaagaggagaaggaggagagctgccccattaagagaaaatgtgaacaagaagagtattttttattttaatataattaa

SEQ ID NO: 182688 - DNA, 690 bp, Cannabis indica
gttaaagtaaacaaatatgaaaatcaatacgattctaatttctttttaagtaaacatgaatgtacatatatatcaggaaaaaaatggcaatggcaaatttgacaaccataaaatattattaatcctatattttttttgggatgaattataatatatactactttttttaaatttatagtttgagttgttccggtaatttttaagtgggttattatatggactttgattgcaatttggactttgattgcaatttagattacttcgtttgttgctatatgagtttgtgagaaaattacgactaacaatgtagaatcaaattttaaacaatcaaacaattaacaatgataagattaacaaatcataaacaatacttagataaaaaataaagacaaacaaagtaggtacaaccagaaaataacaaaggtaaaaaataacaaaaaacaaacaccaagatatatactggttcaaatctgatagatcgatgtgatttatggctctactccagttctggaacaccaccaaatcttctttattgattgagcaagaacatgtacaatacagtcaagaagaattctctgttgagttctcttaaagtgtttcaactctcacactcttacccaagaatcttctttatctacaaaaaattcttcttgcaaaaatccaaattcaatctctcttttatctctctct

SEQ ID NO: 182689 - DNA, 692 bp, Cannabis indica
gtatctcgtctagatgagtcgtttgtctagcattgcatccgaaagacttgacttccctaataatggatccacctggaacaattgaactgaaaccgtcttagaattccacgtgttctctatctgaaaacacaaataacaaacttaaatgaaaatatcaggataataagaaagggtataggcaatttcccaaaaatttgaaatgacatgcccattaaatcaattacgacttattaatgacacgtatgagaattattttggataaccggttcaacaacatctgaactgaacgaaatcactcacaagcccaaaaactgagaatcgagagaacattgtaagtgataaaaatatcttagggataaaaggtaatttcatttattataagttgattgaaaaaaatgataaagtgatatggcatgaataataattaaatgtactgactcacttaaaaaaaaaaaaagtagaacaagagaatgaccattgatgtagaaaggagattgtgtaaactaacaaaattattattcaattagattatatatggtataaagaattgtatatcgtaattttaatttattgtttaagctaattttcagcattaataccagttactatacaatgcagtagtaactatagtatatagtatattttaattttcaaataaataaatacacaactacatgaaatataaaatttct

SEQ ID NO: 182690 - DNA, 562 bp, Cannabis indica
ataagatcgacgccatttagcaccttctcctaggggatcaactctgaggtagtactttcctacaatctgcaagtataagaaaagaaaccaaatttaaatattatgattttcttgaaaactaagaacaaaatttgctatgctcttacagttaggccttgacagttatcagcaatgcaaactgtttcatttagtgcctctgccactcctcgatcatcatcttcgagcaacctcctacacaaagaagtaaatccagagtaattttgagattacaccttatttgaatccacactatagcacattgtttataacacaaaaactaagtcacttttcaatctcttaacaactcaagcacaaaagaggagaaaatttaaacctgtgaagcataagttctaattgcccatccacaatgctggatccacccactgctctatccaccaacaacgagagctcagagctcttatcctttgtataaatgccaagattgatctgaatgaaaacaaaccaaacttcatcatatgcatttccttaaaggtggactgagagagcaatagaccagactttg

SEQ ID NO: 182691 - DNA, 630 bp, Cannabis indica
ggaccgtttactttttttttttttaaaaaaaagaaaaaaaatagaatgaaagaagtgagggaggccacgccatctaacttaatttaaggccgagtctgagagttctttggggctcttataatgggcctacctaatatcgttcataatggcaggccttgggcccaattcttagatttacataatattattaatcaaaaataaaaattaaaaataaagggttaatttcacaaatgcacaaaaacaacaaaaaacaacaaaaatacggtttcacggaattttaaatatttttacgatttttttgattttatttacataaaatacggtcttttatgttgaaattttgttcatttgttgttaattttttgttatatgtatgttattttttgttgtttttttgttgttattttgatgttattttcatgttacttttatgttgttttcttgttgattttatgttgttttcgtgttattttttggaaaaccgtaaaaatgtaaaaaaatattctttgaacgtaaaaatgtaaatattttacaaaaaatagtgccttatgtaattattccaaaaattaaatcatatggttgttgaatcatctcacctcttctataacaaagttaatttttttttttttt

SEQ ID NO: 182692 - DNA, 591 bp, Cannabis indica
aggggatatactatagagtttttcaagaaaatattgttagttttttattaaaaaaaatacatatgatatataaacttaattgcactaaatatgacattttattttttttaaaaaaaaacttaaaaatttgagataaatatcatagatgagaaagaatgctataaaaaactgaaaattcatatataaattttacttctgtataattaaaatcagtttcttgataatatcataaaaaatttaagaacttatacataaattttacttttatacaatcaaaaccggtttttagaatacgatacatttaccttctctagtttatgcttcaaacaaaagaaaaaagagttttaaaactttaaatatgagatttagaaagatatttacaataatatagcaaatctatgcccaataaaaaaagctcaaaaaaatttcataaaaattaggcaatgataaatctgctatatttaagtaaaaagtttttaaaatcttatattaagtgtaatttcttataatttgtaaaagaaaaaaaaattaattatgcttagtaagccctaagtgtaggtctaatgtttttcagtctaagctagctctgct

SEQ ID NO: 182693 - DNA, 643 bp, Cannabis indica
tataaaatggttgcaaatattcaatttcagtttcaattatatttttgtttaaacaatttgctaatatatataatactaatgtgacgatgcctagtttattaagagtactccaaacaaaagataaaatcaaaatagcaatctgatataattatttattatgaaatatgaatgcatgtattttagagctaatatttgtacatttaatattaataaattagattttgggtagttcaacttggtactgcaactatatttgtaacgcataaccacactagcaaattaatcgtttaaaaatgagcataatgtaagtaaaattgaatgtttgtaacaatttgtacagttacagaaacaaaaaaaaaaagttacatgatcaaaactataaaattttagacgaaaaatcctaattatacatactaatatacatatcatttttatttcaatattatttacagatctcacaatatttaattaatcctacacagatatatttatataatagaccaaataaactaaaaggggttaatactttttttaaataaaaaaggggtaagtatttagtatcaacatatattatatttttacttaaaaaatatatgtatatttttaagttgttagaatttaagataagatgcataatgtttta

SEQ ID NO: 182694 - DNA, 649 bp, Cannabis indica
ctaaaatagtactctttttagtttgatttaactactaaaattaaggtttttgtcattagagttaccctacgaaaaaattaagtaggataattttatttgtgatggcatagttgtaataaggtaataatattatgtctagttattaaatacaaataaagtaatctcaaagaatgacatttgtcactaaattaataaagagagtgcaaaagagagtctccttagcactcctctctaaagtatcaatcgtcctacatcaatagtactcattttaacacaattgatcgtgatagatagctagttcggatgataaaacttatattgaatgtgatatgaccttttatggggtaatacaagaaatttggaattatattatactaatttttgaatcccagttttactttgtgattgagtaagtgacaatggagttagatgatgagttcggagtcaaattagtagtcttgaatagagtaggacaaaaaaatgataggtttataatgggcatcacaagatattcaagtgttttacatgagtgatctattagatgcccgctgatctgttgtcctcacaacacaaccaaaagattaatgaaaaaaagagtctagtggagatgatctcatgctcagtgatcaaaacttttaaaaatcaatcc

SEQ ID NO: 182695 - DNA, 539 bp, Cannabis indica
atagtttggggggaatttttaacgacttgaaaaaattcagtaagcatgatttggtacatatcaaaattcaagggtaaatatctaaattagcctaaaatttatctactaaacttaaaaataatgagaatttagtggcaaattaccaaaaagtataatcatatcttgggtaggaagaaaccgcgtaaggtgtccaccacccaccgcctcttatgatttccaaaaatataattcaaaccaatctagaagaccacgttcatctaaaccgtccatatattttatcaacatttaatcttagccgttcatttaaacatttttttgctataaatagaccctggctctctcttattcctcaccccattgaagtctccagaatggggtcatctcgctctacgagcaagagctatggttagcgttttctattcgaagcatttggtatttgattgcttatcgcggctttgttcttccatcgatattcctgcgtttgattaatgtttgcatgcgttttgtacggatcggtttttgatctttgtcgaaattga

SEQ ID NO: 182696 - DNA, 567 bp, Cannabis indica
gaattgatatttgttaatcttaaaaaatgttcaataaactaaaattctttagaaaattatatgtctgaccaaaaaaataggttaaaaaaaaaaggaaaaaggaaaaactaccattggaatttagtaaatgcttttacaatcaccaggctatgatgtggttctagttaacttgtcagtaatcatttaacgtaataataaaactaaaaggtcctagcttcctaactattttaataaaggcactagggagcatgcttatatatttctatcaaccagttttttttttttctcttatagtattgattggaatttattaaagaaataaaaatggaagatcaaaaagtttaatttttaagtactcttaattgtttattttgactattttgcttgaacattttatatggaaaaagtagccaaaaagtggttccaattggagaattttgaaaattggacatcctttttcttgtattctttttagagcaaaaaattgtttgtgggaatggcaattcaaaactttagtcacacacaacacaagcacgagaaattaagagtaactttttgcctcattca

SEQ ID NO: 182697 - DNA, 623 bp, Cannabis indica
agtgatgaggaatgcactaataatctaacttaacaacaacgtgggtctcaccattttttgtgtttatttttctcttaaaataattgtactaaattccatttttttaaaaaaaaaattgtactaaattgtcattttgcaattttgtcttgtagtaatgaggaatgcactaataatcttatgattaattttttttaaaatgattcatttttaacattttttttttttggttctattgtgttagttttattttatttttttaaaaaaaaataataatcttgttttcataatgtattaaaaaacccttttctggtctaaataataaaatataaaaatgtgtatttttattttagatatgaaaaaataaatatgtaagtataggttagaaaatatattttttataaaataaatttcatttataaaattgtggagggttaataatataccctagtttaaagccaatttagacaatttcctgatttttctctaaagagacaactttggttaaaaaaaaaaaaagaaaaaagacaaatttgttaacttatttgtatttttatattgttttctttagtgaatttttaatatagttttatttagtatttctttatttgtattttttaatatag

SEQ ID NO: 182698 - DNA, 883 bp, Cannabis indica
ccttacattcattttgttcgtttacaatcttattagataaaggacgaaaaacaacatcaacactaatcacttgatatgtttatttaaaatcacactaaacgtaaactttaggtttacattctaataacccaaatcccgtaatgacttcccttgaacctaaaaagactcagtagagatttgtactcttacactttggaacatttcaaatccgtaaaaaatcataatcttttttcttaacaatattgattgtatagcatctatatagatcactaatcacttgttatgttatttccgactttcaaagacaagttttgcaagaacaaaaaaaataataaaaaaaaaaaaacaaactaaaaccatatattaaaagagtaagaacaattatcatcgtaaacataatttagtagttccacacttttcttcaaataaataagtggtcctaagttcgattctcccctccccaatatatatatatatagagagagagagagtaagggcaattcgatgtgtaattgtgggcatgaaaattgcaccatgcagtaaaggttaattttttttttttttactaataatacatgcagttaagttagttacatatattctagccaaataaagaagttaagttagttacatatattctcataccaaaaagaatataccgtatcaaaatagcttcttcaatagattacatgaaggttgtgtctcctcttggtcatcacactgctagtgagtaacacataaattttgttaccttttcctactacagaaagcatcacttgcaatatgagctgatagattttctctgttattttttttctatcggatataactagatttcccattgtaaatcaagcatgtcatcaggagttacgagtgttgttcc

SEQ ID NO: 182699 - DNA, 1013 bp, Cannabis indica
ctatttgtaaatgtctgaatcgtaaattcatgagtgattctaatcattatatataaaaaaaatatatcatttaaataaaataaagattatgtaaattattctaattttaaaaataacttcacaatttttttttttagtagaaattatcaatcctaccttcttataaaaagatttttcatttattcaaacattacttctaagaataatattactaaagatataataaaaagattgagaaaccaatgttttcattatagataattttgaggtattatataaatataaaataaaatatttatttatttatttatttatttttatctcttaaattttgattgtttctgaacaaatatctttataaatttgagttctcttagtatttttgttttttgttgctgtaatatacaaattgattaataaaaatattgtggaattatttattaaatttatcatctactttaaaaatacgttaaaaataaacatacaaaattatttttaagaaaacatcaaatttttgacaaatatacaaatacattgtattaacatgaattaaagatgaattacataaagggaatttatgaaaacgaaaataattaattataaataggaaaaaaaaaactaatactcatgtgcccaacgttttatatacctaatgaaatatagcactaagttctaactttctgacaaaattatggtgacacccacccaagtccaacgaaccacttcactaattatattttatgggttaggtacacaattaggaggcacattttataaccaaattttcataaaatctaatagagaaaacacaaatgggtgtctagtaaggaagagtgaagtaaacaataaatttcaaactaaaaataagaccattaattgtgaaatcatatttaattaatggcaaaagtcctcaaaaaattcagtttgatacacataagttttcaacctcgaaaaataacgataataattctcaaggtatcatgctttttatttgttcgttacgtttacttttt

SEQ ID NO: 182700 - DNA, 642 bp, Cannabis indica
agctcagcctgctccttagccttgcaaagttcttcaagctctttatcctttctagccgcctcttgcttcagcctcttcatgttctcctgaagctgggcattatgcctcttcagcgagtcagcttccttcgaactagcggcggcagcttttaggaacagggtcatcgactgcgaagccaactccacagagcgcggaacaagctcctcagaagggatcttctccgccttggacatgaactcctcgcccacgaacttctcctgcatggccaggaagtcgcgagctcggacagttggctcgatcagaactttcttccccttgtcctgcgtggtcttggccagcttcttggaagaatttgcggcaagagtagccaccacatcgctcttcctcttctgggcgacaatgggcgaggtcgtcgttgctcaacccttcggcttgatcttaaggacgggcgcggacttcaaaaaagtcatctctgcgaagataaaatgaaaagataaagtgtaaaataaaaactcaagacatcagtttataacaaaagataaattacctgagattggtcgagaagttttgcttggagaggcatttgtctatccgctcttgttgcctctcagacggttctttgtatactggctctctttgaag

SEQ ID NO: 182701 - DNA, 553 bp, Cannabis indica
cggatgagagtgactctgaatattgacaacctttacggaggaggatgagacttcagaggatgatggcaactggtttggtgaattttagtatgaaagggcaccactttctgtttcatttgtggtgttattggtcattcagaacgcttttgctataagctattggagatgcctgctgatcaaattgggaagccatatggagagttcatgcgtgctaagttccaaaagcataatcacaacatcggggcgaaatggttacgtacgaaaggttgggttccaccacggagagatggcagcggtagtagttcccggcgtatggaggaggaagagaaaaatggaaatccggtgaacagtaattatggagatactaatcagaatatgggagattggcaatcacgtaatcaaagggtcaatatgcatcaattgcatggtgggaatgtgggtgatacgaatgcaataatgacaaataatgaattgaagataatggggaaaaagtcattagttgggcaagaaaggaaagagttgattggagacaataaaaaaaggaaaactgata

SEQ ID NO: 182702 - DNA, 618 bp, Cannabis indica
tttaggtcttgtatttaatgatgtgaccaaacaataatggagcaccctactccttctcttttggtagcatcagttcaacttctcctctcccttgcttggccgtttatgtgataagcccctagtcagatttgtttaccatagaaaaagagggcctaaaggccacacttaagtcttttagttgagttttattcaaattattttaaggaaggcctgagttgtcttttcatattggtcaattgggtttaattaaaactgctgatgtggcaagctgattatatatacaagagactagaacttattaaagaagatagagaattaagtattgagagaagtattttgggagagagcagccctcttcaaaggttctgtacttaaagagactagcctctcaaaagttaggtgtaaattgatcattattcacgaataaagaaaattctttgagggatttcatttagggtattctaatacttgatagcagatttctaatataagaaattgtataaatttggtgcggtgagctgcgaacaatgaccaaaaaaatcaaccaaaaaagagtcaatcagaatccaccattgaagaggatgctttgaagtcaacgatgcaatcggtccaagaatc

SEQ ID NO: 182703 - DNA, 771 bp, Cannabis indica
aaagattaatagtttttggtgtaggtgtattttttggaaggtttttttttttattaaatttatactctgaaagttgttgaatttgcattgcaagaaaactgtttgatataatgtctcaaagttatttggtagaagcatgattttgatggattctctttcaattctttttttttttttttggctacgagtgataaatttatcttttttttttctgctggttattttgattttgatcatcttataagaagattagggattctaatctatgttttaatggttctcaaagactaatgtgtcattttcacaaagctggagtggaaaatggataaggaagttgaatttaaggggtaccaagataggaaatggtgtaagaatatacagacattcaattctatcattcttttactttaggctaaagacattggagacaggttgccagcatgggatacacctagtggaattccttacaacattatcaacttagaacaggaaaggccacacaacccaagttgtccctaacttcttctacggtgaaccttttatatatgatgataggcctttacaagattggttaaaaagattatgaaacattttttctgtactgaatttgctaacttacgcagtacatctttgtttttattgacaaaagatattgtttgcaacttttatgaatatttgcttaaacattcttaaaatttttatatatgtctctcgttcgtttctttgtcagtctgaagacttaagcaactctaccacgcaaattttttcgtt

SEQ ID NO: 182704 - DNA, 1457 bp, Cannabis indica
tcaatactcttgacaatgaagtcatcatgcagggactttaaaacatgaaaagtcatcgaggtagattgtaatttttattttatttttcatgacaatgttttattttattttgttgaacatgaaaatttgaaaggatacatttatcagttatttttattagttttgacttaatatttattcaagccctcactgagccaaatttctggcttcatcactggcaagcaggcttgagattatgattggaggcccacgcctagctgggaattcaagaaaggccttagaaagatatgcaaggtctttgcaacatgagccaagagccaaagtactagaagttatagaacgtcctctaaagtctcaacgctatgagtgtgacccattacatttggagactctaactcgcatcatgtcagctaccctcataatgatcccttagttgttgaggtgcaaatagccaacctgatggtggatagggtgatgatcaatgatggagcttctttgaacatcctattcaaataaaccctaattcggatgggtttgtcacttgaagacctagagccatgcaagcaactaatgtatggattcagcagagcgagcatatctccatgtggaaagatcaaaactaccactcacagttagcactgctccaaggtagaccagtatcatggccacgttcatagtggtggatgtgaagtctccgtacaacgtgatgctcgaaaaagccaaccctatactgaccttagagctatctcgttaatataccacttgtccgttaaattcccaacgacggttggtatcagctgtctccttggcaatcaaggaattgcctatgagtgtataaccctttattatctctcactaagaagacctcctctattactttggcactaggggaacgaacaaggcctctcctagaaaagtcagagagacaatgaaggcctttagagttcaaactgtagagaagacacagacgacacctaaaaccacttgatggtgcgcccaagacaaggacaacattgacccctgttttggggaaatcaacttgggagttggtctgattgaggtgttgtgttttatgccctaaataaaactacaattcaatgtaatccgtattattcaatatcaataaagaaacagaagtatttttcattcatttgtgtattttttggttcacattgtcaattacttatctatttgatttataaattcatcaaaacccttttcacatttatgttcttgtttactgtgtcgtcagcacagtgcaaagcaatcaagactatgtgaataaagattcctagatttatcagaacattgagtttcactgatatgacaatctacaacatactttacttacatcttggataaatgctatgttctttccaaagcataggtcaaagtaaagcttgggttggatgcatggagtatgcattggaagggaccgatattgaactttgatatag

SEQ ID NO: 182705 - DNA, 639 bp, Cannabis indica
atctcaactgtgggatcgattgaagatcaagctgctctgtgctgttgtatcgggttttcgctcatcgcagtggctaggcccgtgccgccgggcccttcttcggggatggacccggctcccagtatctctatgcctccgatctctgattcacggttagtatggtcatttccactcttaatattttcgaatttaagcagttaattaatttaattaatcagtatttaagtccaaatccgagttcttagtattcgaatggtaaatctttcgcttggatttttttcttttctttttttcttttaaaaaagaaactttagattaaattctgttttttgcctactttggaatgttttctagcacaaggaagtggcgtaaaatgatgatatttccagtttagaaattttcttttattttatcagaagattaacttgaattttctgttaagaaatggggttcacatcagtttgtttttgacatttgggtaaaattgttttgtaatggccaagttgacaaatgaaatttggaaattgtctttttttttttaaaaaaaaaaaaaaaaaaaaagaaattttggaaattgctgctgcttgcctttctagaaattttgaaactgatagtattgaaatagcactatatcattag

SEQ ID NO: 182706 - DNA, 728 bp, Cannabis indica
cccaagtcagagttagttaataaacaatacataatatatcgatataccattctataatagtaactctaattatttttttcaattttaccttttttatcgattattttatcaattattatatcgatagcttgtcgatattacgtgagaaacattttgtgttttctttgtagcttttagatttttatcgatatttttctcgattggtttgataattactcagtgaaatttattaaaaaaacatcgacgatctgtcgctatcttgttaatatatactaaaaactcatttttttagttttatagcactatttgtattatcgataatagatcaatgcaatattaatattttttcgatttttcatttaaattttttgagatttcaacaatggtcttcatatttaattttatcaggaatattaacttatacaacttgttaaaattgatatttcgctctatgttgccaaaactaatttaattacaattacatcaagtattgtcaaaatattaccaatcaaataccctagctctttcaaaatatatatgggagaataataaatacacatatctatcaatgtatcaactaagaatctggtaaaaaagatccacacaccactttcctgaaacgtcctcttgttcctattgcggacatcaactaggggatgttgcatcatcaaatattgcacatactcaatggtgtaaataccacaatcactactacattaaaaaaaaaa

SEQ ID NO: 182707 - DNA, 745 bp, Cannabis indica
tactaacttttttaatgtactataagtttaatttttaaaaacaaaaaaaaaaaaaaaacttttaataaagaaaaatacgtagtacaagaactacaccagccacgcctactatactaaaatctttttgacaagatcgttagaggaataggaatagtcgttattaatctttaacaaaaaaattataatgtaaattaattaatttaaaaaaatgttacatattaaagatgtcgaataaatattagtaataataagatgagaatgagatacattttcaataacttctttatttatcctttaaaataacttattaaaatttcactttttttattttacctttacactttttttgaaaataagacgtttcatagataaagaaaattagacctcgcggtcattataaatgatagaaacaggtatagaggattactccataacacctgtaaaattttgggtgaaagcccacctagccacattatgcgcagcaaaattacaaatacaggacataaaagaaaagttacaagaaagaaaataattagagagttgattacatagagatacataattatcaatattccaaaaatagtgcattcccttcagcgctttgataaccacttctgaatcactctcctctaagatatagtcatgcttcctgagcctcgccgtgtgcaacgcaagatgacacgtcgccgcctcaccaatcagagggtcactgaagttaagacaggacgtagcatcccacacaacc

SEQ ID NO: 182708 - DNA, 1133 bp, Cannabis indica
tggatttgactaactttctctctgccacatcagctaactacctatcctagctggcaagctgacagttatttttcgattggagcttaaatcaatcatgacaagcttctacaacatataaaatggtagctactcctacatgattagaataaggttttctagttcagattgtacatacattcatataatagagagtttcctttttgagagattggagtgatgtcaaagtcaccctcatgtatttgattgagaggactcaagtgaggttgaattacaaatgatcattaaggaataaagtgactgtgagtttcttaccttttctttctaagtgttcatttatgtttttatgttcattgtttctcttgttttatctccattttctggtttatgtttcttgtctttggtgtcactggtttggattcaatcttgccactgttagttgatcaatagtgagaaagaagggtgagtttgattcaccacaatctcctcattgagattagactataattataccaatgttaacaaaattgtcatcaattttattcacaactttaatcatttaaaattcaaaattacttccaatcttttttttttttaatctttttcattaatttttgaatccacattgattcactttatttgagtctaaaattactcttccaatttatgactcatttcacaagtttggatccacttataatctaattgttcttgcttatgacaatgcaagtccaataaaagtgtaactctcatagtccacttttccttatctcaaatatgagatgattatctcttataatccaataaaagatgtaacttttcaaaattcatcttttattatctcataaaatgagatgttcaccaccaaattaaaaaagaattcaaaactattctttattcacaaaatacatgataataattttcacatcaatagtaataaataatattattatattactatcaatattattatcatactatataactcatatattaatataatatgtatgttactaattaatcaacatttcatatgtaacatacacataatatcaatattaaattcacaaatacatatattacatatcttatatatataacatatatactataatatacatatatatcatatacac

SEQ ID NO: 182709 - DNA, 535 bp, Cannabis indica
cagtaacctcttcccattgagccatttaatgcattgtaataagttgtacatcctaaagagttaaagtttgctactcatttggtaagttctaacaaaagaggcaaatattattaatgatgaaatgtaaaatatggtaacaataattacgcattcattcatgcttataatacatctacttagcccccacttgtgggctttaatgacccatttcatatcatatattattatagaagaattattgttgagcactagcagtacctaatactttctataagtgactttatacaattagttagtaatattttttaaaaattatgtttttgagttctagaggattcactatttaattacggtatgacacaaagaagtgtgataggcaccaataatacttttcagcaattccctattataaatttataataatatatataatgaatttcatatcttcacatatattctcttaaaagtaaagcaattctctctaagcatgaacaataaaaatttatttcatttgttctaggtcatgagcaatatg

SEQ ID NO: 182710 - DNA, 619 bp, Cannabis indica
tatatatttttataaaaaagtaattataaaaaaattagttagtatattattagtatcattggtaactaaaaagtttactgtgaaaataccaaaaaaaaaaataaaaattcagaaattgagactttttcaaattttttatattcggatatatttaagtttggattaagtatatatatgctgatgtgtcttgctattttttaatattttaatttttttttgagatatttttgtaattattttgaatttgatgtacatttatgcaaattttccaatttatcgtatttattttgtgaaaaattttatttacaccttaaaaatacctggaaacacctaattttaagaatttttatttcatataaaatttagggaaattctataatgcactcccttaaaagaggtatatcgatacatctctatctgttttagtatccgaaataattttttagtcaaaatttttttcatggtcatgtaaattatagttatttaagacatcctgcaaaattttagaaattcgaaagtttaacacgttgaaattaacgttcaagcagtgtgttgcatccgtgactatttattttataacgcgtgtaaaatagactgttggaacattttttctatactg

SEQ ID NO: 182711 - DNA, 509 bp, Cannabis indica
attgatcgatcatatatatagttttaatgttatataaaatgattttgaaatctgaaaatgtaggtagggaaaattgcatgaaaatatacaattttttccttatctacacctatgctttcatttttataaccgacggttataagttttttgtgacagttttgaaatggcacaaaatttttgacgtcacttccaaaccgaagcaaaatgttataaagaacattttatattttgcgtcagttttcaaataacgaaaattatattttgcgtctttttaaaaacgacgcaaataaaatactatttacgtctacggattatacgtcggttttgtagaccgacgcaaaatctttatatgtcacttataaaacgacaaaaatacccctttttgtaattgttctaaaaacaaaaaagaatataacaagtactagacaaatgatcaatcacaattatcattttagctcattagaaaatctttatgtcatcaattgtttatgtaaggtaaattcgtaaca

SEQ ID NO: 182712 - DNA, 643 bp, Cannabis indica
ttgaattgactattttataaacatccatacatattacaattattaattaaaggtttgattcgaattcctacttttttttttttttatttaagcgtttatatattacaacatgtttattgggactcgaaccagaactttcaacactcacacacccacctatggccacttgagctagccccaagtggtttaattccttcatcactactaaattagttttagtgacttaagggctgtataagtttgaatatataaattttctctcaataataggttggatatttcaacggctcgaaatagaaaatcgtgaaatacaattcataagctatacatttttctcctaccatattcatttattcaaatttaaacatggccggcgtggctcaactttgatttttcagctaaagaacaataccaatctttttaaacacaaaaaacaataaaatatattggaaattgatttgttctttactgatcatctaactaaaataattttcttgacatgattttgtcctgtgattgtactttcatataatgtattccgtgatgtacgacagccgttagatgagagagttatttgatctgagaactgagattgatctaggggtatagggttaaaaaatgtaaacgtccctgacactcattc

SEQ ID NO: 182713 - DNA, 577 bp, Cannabis indica
atgggtttgaggtggtatttgggcttcaagttcatcaagtttagtttcaacttgtgttgtggttcatgacattcatctttggccaatatctccacttctttatcactgtccaaataaccaattcaggagcatcatctacctctggaacattctctccaaaattcacaccaccacaccaatcatcatctaaaaaactttctggatttactacaacatcgacattcacttcaatatcatctggtaactcttcaattgaacattttggcaaggcaacaattttatcataactagcattgggagccacataattcttgtcaagcaataccaagaagatatcaaccatcctatacctccttgtttccatataaaaaatcattacccttatatcttcatctgaaattaccatggcacctttgctaacaaaatttccatatggcctccaccaaaatccaataggcagctcataaccaatatcaaatgacattttctccaaatcatacctactgaagcgttcccaatcacagtaatcaaaatactcaatctcacccccttcatattttttctcattaaaatgagt

SEQ ID NO: 182714 - DNA, 994 bp, Cannabis indica
ctgacaccatattcatttggttcggtctcaaatggtttggttcggattggttgaggtttggaattatggatagcggattgttgttaggctatataagtaatttattgataagcattatggtttcactgattagttcagctagcttttattgaattttagcttagttttattctttatgatgcttatagtgtagaaatgtaattatttcgggtttattgttctgttgattagtgaattttcatatttatttcaggtccaatggttgataaaactttcacaaattccaggagtggaagaagtgcctagctttagtgatgatgctaaatcttttttagcaaggtgttattgatgaattcacagtagatgatgctttggagataaaaaaaattgagagagttacaaatcacgatgtcaaggcagtggaattattttttgaaaacagaaatgcgagtctcatcccgagattgcaaaggtttggaattttccttagtagattgaaaaaaagagtatttgaatgtttgagattatctaattattgatttttgtcttgaaggtgcttgaattttttcatttttcatgcacatctgaagatatcaacaatctgctcatgcattgatgtgaagaagctttggacaatactatattacctgtcgtcgatgatttgattggggcaatcggtaaaatggctgaggacaatgctcgtatttcgatgctttctcgcacccatggacaggtaaaagctctttctttgaaaaatcatcattgttagattcgatcgaattaacaaaaacaacaggcaagaagcaacaaaacacatcattctatgagtttaaagaagtcattttatcaaattaggagagaaaagtaataaaagcaagcaacttcataaatttccaaaataaatttaataaaagaaaatctccaccatatcacctaatcaatctagtgtcttaaaaaaaatgaaaattgggtttactaaggaaaaagaaaaaag

SEQ ID NO: 182715 - DNA, 805 bp, Cannabis indica
  modified_base (106)..(106): a, c, t, g, unknown or other
aattctatgcgcactccacaaaatgatatatacaccccaatatttaaaaaattaagcttaaaataatttttaaaaataagttttaatattttttaattttgttctncacattttgtgttaatttcaataattttttatttttattttttaatttttttaataatgtaaaacttatttttttttaataaatttcacatatttttaagggaaattaatccatatactattttttttttaatttttttttcaaatttacggtttggatttctaaagtgatttctccggtggtttctaactttctatgtgggttattatacgatttttggttgcgatttaagttgctccgttagttgcaataaggattctatgtagaattcggtaaaaaatacaaaaaaaaaaaaaattgatttgaagtgtaaaaataaaaaaaccctattttttattttaattttttgttataatatttaaaatataatttatttttatttgataggtatatttataagatatgaaatagaagaaaaatatatataaaaaaaattaatgtaactaaaaatatatattctatgtaaaaataaaagaaattatacctatatactattttttttttaatttttactagtagttgctgcgtaagttgcgatgtggattgttattccgttattttcctataaatgcaaaaaaaaattgctttaaaaatttaaaaatgaaaaaaacttctaaaaataaaaataattaatttaaggtgcatttataattttttgaaatgcaaataaaatttccattctacatttttacaaagttt

SEQ ID NO: 182716 - DNA, 542 bp, Cannabis indica
gtggggatcaattccaaaaaatactaaggcataagtatgaacataactgattccataacaaaattaaaaaaaaaacaagtaataacacataataactcaaatatatataaagaaaccggttatgtttctcaactagtgaaaaatttgagacaaaaaaaataaagtaaccaagataacaacttacacacacaaatcagttaaataaaataaataaatcaaaaattggttccttgaattaactaaatcaaaaatctgttctcgaaataactaaattaaaaacaaattccttgaattaattaaatcaaaaacaagtttctgggataaataattcaagaaccattttttaaaatgactaaattaaaaaccagttgagatataaattaaaatagaaccggatccacaataaaataactaaaaacaaaaaacacacaataactcaaaaactgattgtaattaaaaataaaaataaaaaaaataaaaaaaaaaagggaatccattccaacaacattgagtcataaattaaagagggaattcatatttcc

SEQ ID NO: 182717 - DNA, 898 bp, Cannabis indica
ttgtacatgatgttgtagtggatgtttagaaattatgaacaaatatatgaatttgtttaagttaaaaagtttgtttattattgatctaaaaaattaagacatttaaatgttgttctttagcaggttaaattagaaaatggtccctattgtactggcatggaacagtaaaatcttgattctttaactagtttttgagcaataatgatattcgtatagcaaagtagttcaaataaaatgttaaacgagtagttaattattgaataaattactagttttcaatagtatttttactagtttttgagcttgaattaaaaaaaaatagtgtttcttcaaattatttccttaagcttggattaaaaaaatagtatttcttcaaattagaagccctaataaaataatattaagttattctaatagtctctttgtcgttcaagttttagtttaaattatgagttatatctagcattttttttattattatatcaccatttatttatttaaaatttatgtcataattataaaataaaataaaaataaatttattcattttagagtaatttgcggcataaatacttaagtttaactcctagttgtaaaaaattaattaaaatataccaataaaaaaatagacacgtggataatataatattttaacggttaggtacccatagagttccaaaaatataacttaggtattattattgccaaaaattaaacttacatatttatttgtaaacttaagtatttacgacgtaaattactctttattttaatacgcacctaacataaatctagttcaaaaataaatatatgaacaggcttcaactagtggagaaatggatgcaaaacctacaaaggatatgttgaagctcatggagtctaaaggtaggtgggagat

SEQ ID NO: 182718 - DNA, 687 bp, Cannabis indica
agaaatgttaaaaaagtagtatccttctcaatattatgtaattaagtatccagtcactaagtagacgtaactaatgcgcttcgtcatccccacaaataatataaatattatatatatcaaatataatataaagttgcgttttctctatctctatctctttcatcttgaaagtttttgttttttgtttttaataaattatacatttacatataaaaaaaaacactttctcacaaaattaaaatatgagactagaaaaaagcagggactcctgaagagagagatcaagtcgaagaggctcgccacaatttctacaaaaatcgttacaaagtcactccctccagtgatctcatctcccgatttcagtcctaacaaaaaagcgattccaagctactgcattgacgtctttctcaagcaaactggtcaatatatgaggaaacccaacaaatgcatttctttcgtaagtacaatcaaattatattttaactaatatattttatgtatttaaatattttaaagtcataaaaagatcagatctgaatgatatctcagatcctcatttggattggacttaaaactcgattatgagatgagtttctttttgttttttgaattaaatcttcttttccttttagatattcatatgagttatgaattttagaaatatcttttcgaaactcaaaatttttt

SEQ ID NO: 182719 - DNA, 695 bp, Cannabis indica
cattatgtgaatgttcaacttaagcctactaattattgtatcgttgacacttaattttttttttcatatttattttcaagccttaaagtattttaacaagttttgctcaaagtttgttgtatttgtgatagtttaattatttagtgataatccaaaccgcataaaccacaatgcggtgcggtttttaatttcacggtgcgggtgcagtttgggaaattggaaaaaccgcatatacgggttagtttgaaaaaatagtcaaaaaccgcaccacccgcaccacgaacatccctagctcattgtttattgtttattttgtgatgtttcaagttcaacctttgcagcttgaggcaataacttggccgtccaagttgtagtgtgtaattattgtggaagtggaagaaacctcttcaacaatttcatttgatttttctatgtgttgggacacataacataatcaaatcattagcattgtgatattttttttctttttgaaagtattgggattatgattttaattaatatttttcagaaagaaatatacatatacatctattattattaaactgatggtatgtcagtcttaatgtatatgaaacttataataaaattaattttcgaaatccctacataaatagtttaattattattaaaaagaattatttttaattactttagtgtagtaataacactttttc

SEQ ID NO: 182720 - DNA, 708 bp, Cannabis indica
gttcacattctctctctctctctgacataaatggcattctcacataaatgttaggcaatgtgtatgctctagttttataaatacttaaatcttgtagaaaccctattcagatcaagattattcagagggcataaccagaagcagaacaacaaattagtagttttcttttgcaactattatcaaacatttcatatgcaataattatgtaatagctatttgatgacaagaattaaaaaggtagttcacatgatagaatttatagaccaatatctctttgtgagccacactttatcaatacgaacgcttttcggaaagaaaaaaaaaaaaccaacaacaacaacaaccacaacaatcaaagagggaaagaataagcatgtagtttgtatgaaacccaaccaaaagctgtaataatttgaagaaagatggtaggaaattgtagtagccgaaatgataaacaagtagggaaataacatacctgagaatgagagattagaggggcgacgacctacgcgtggatgtgagtgtggactaggacggagagtctcggaggtggtgagatgatgaacgaaattttcgtgcaaagccttcagtgggctgcttccaaagagaaagcggagacagagatgagaagagtggagaaggaaaaaggtaacaagggttttcatagaacattcaatttcaaattaagagaaaaagataggatcattg

SEQ ID NO: 182721 - DNA, 712 bp, Cannabis indica
aatgcataatacaatttaggtaaattttgatttttttggagtgatttttgagtgttttgtaccaaaaacttgattaagtattataaaaagatcatttgcttgatacttttcttttggcttgatacttaaatttgttaaacataacccaataataatacagagactgatttgttttgagatttttggtttgatacacacccatgatttgtattgtattggtttaagtattagtaaaaacatcatttgcttgatacttatatatttgttaaaaagacccaattataaagagtgtagtataattaggtagtttttttttctttctatgattggtataacgaacatgaaaaatattgtcatttaaggaatgagaacttattaaagtaaacagtaaagagtaaagaatgaagctaataataaaaaagaggagtgtttagttaacctccttattacaattttttctagttagtttttccattctaaaaatataaattaaaatattttcttaattttttttataatggtgtttgctatagttacaatattacccttataaaattttgaaaaatttgtaataatttaccgtgtcaaaaataaatttgaagttttttaaacacatgtggtaaactagaatattaaaaactctgtttttcagtactgtaaactattcagaatttttcaaaaatttacaaaataataacgaatataattaacg

SEQ ID NO: 182722 - DNA, 698 bp, Cannabis indica
aatttagcacttagcatactttattgttactttttttattaaggttatatgtatctttatatattaaaagtgcctatttaacggcatttcttggtttaacagaatatacttaaaaaataaaagaatattctgttaaatttaacgattacttttgatctcccgttaacaaataaacccaataattaaaccaaaaaattaaacaatcttttaaatattaataatatctttttaaattaaaaaaatcatcttagccacatatctgaggttatctaatattttctctggataagcataggaagcagaaataccacttctgtgattgcagatagaccacttctgtcattgacccatatgttaaaaaaaagaactaaataaaataatctactactccaataataaatttatttacaattttataattacactaatattatttttaatacattattaaataatatttcaaatatagatatttaattttttcaaaaaaaaaaatttgtaatctttaaaaataaaatacattcaaaatcttaaaaagacctaaatcttaaatgaaactaacaatacgtgtggctcggcacgtacattcacctagtaataattataaatgtgaaaagaattttactgtaaatatctcattaaattattaagtgattttaaaaaatatataactattaagtgtaaaattaaaaataaaa

SEQ ID NO: 182723 - DNA, 507 bp, Cannabis indica
aatatttagtttattaaagttcaagtttagcctcgagtatatcctgtaaattttactttcctcatattgaccttgactttaaaaaaattaatatattttaaaaaagaaatatgtttcacttggtatatgggtaattaattaattttttttttttttcagaactagattgaatttgtaattaattaatttttatccttgaagatgaaactatattaatagaataatgtatattatttttgaaatattcatatagaatatatctgcatgacgtgttattgggtaattattaaagaattttttttttttacactttgaaatagttttttttttttacatttttttaaaattctacatagaaatccctattgcaactaatagaacaagctaaaatcgcaaccaacattcgtataacaactacggagaaaccactttaaaaactcaaaccataaattaaaaaataatatataaagtactagatgattagaaataattacatgttatatatat

SEQ ID NO: 182724 - DNA, 797 bp, Cannabis indica
atgtctttaaacatatcatataagagatatttattaaactctttgttgttgttgttaataagagttttaaatttttttttttttaaaaaaaaaaacaatatcgtatagaaactatggagtgatcaaatttattttaaattttttttaataaatcggatccacactttaatgtgtcttactacaaatatttttctggtctattacttttaaaatatatatatatatgggtatgctcttaatgggtattaccatgtataggtattttattcttgactattggatcaaatatctaatggttgatatttataatcattaattaaatattaaaaaaaaaaatatttcctattttgttattctctatattcctaaaaatagataaaactattaatagaaataaaaaatttataaatggaattgttatttaaaaaataaaacacactaaaaaactaaaaaaactattttttttaataaaaatcattttaaagattaaaaagaaaaaaatgtatatttatctttttataaaatttcttcaaactagaattctaaattgcattactgaaaacaaaaaataataattttaagctttaaactgtaatacatataaaatgtataagattttttctaaacctaaaatctttaattttataataattaacaattatttatatgtttttattttttttaaaatacttgagcttaccaaatctataagaacaaaaccaatgaagaaaattttaacaaaaaaaaaaatgaaggaagaaaaaagtgtcataaacattattgaataatggcaattg

SEQ ID NO: 182725 - DNA, 735 bp, Cannabis indica
atatatatttatgtattttatgtttcattaaatatgtattgtctgtatatagagtttgtagatgtattaaaaaatattataattgtattgtatatattctaagtattgtatatgtatatattaagtattttataagacaacgtagctccttttttattttttttattttcttattaaatttaattttttccattcctatttatgtctttttatatttttactaactactaactagttaccttttttcattcatattcatatattttttattactaactagttactaattttactaactagttattcattagtaactagttactcacttttgtagaagacactccctctaaagattgtgtcgattaaattgctataaatcctgatttggaggtgatttattgcactgatgcatcgtggggaaatagtgtagtaggtttggctgcagtaaggttcaataagagttctggttcttggttttatagaattcaactttcgaataccacttcaacattggaagctgaacttcaagcaattcacatggctctgttttgggcattggaggaagatcaaaaggttattggtgttttgtctaattctcttggtgacgattcatgctctgcgtaggaatcattgtcccttggattgtagatgctttagtgtttcttatgtagtacttgattcagttaatgttttaatttatcattttttctaatgttgtagtcggatagcctggct

SEQ ID NO: 182726 - DNA, 716 bp, Cannabis indica
atttcatatatttaagtatgaagagaatattctttgaaggggctagaaaagactgggaaatttccataagtagtgttggaccaaaacaattttttttttttgagttatgaattatgatatccaaaaggatattagaagaaattaataaagtaggtgctatttttaaccttttatatatatattctttggaaaaaaatatacatatatatttttgccaagattgcaatactttcattattcaaaaaagattgtaaatactttcaatttcgtagatatattttatatttatatattcttttctaataaaatggactttgacatatatatggtacatttattaatgttctgatgagataactatattactagatatttaaactagttaataaaaaaaatatctatttgcagttgaataggcacagtttaaagaaatataaagtaaaattaggcacctactttcacatgacttgactttaaattataaaaatataaataatactaatgctactaataccataatcgagatgtcagctttgcaaaactcacgggtgacaaatagatacatttagagaaggaaaaaaaaaaaagacaaatagagagttctagttttcattaacctttattattattattatttattttatttttttattttagtaaatttagtattgtataattcatttttttattttttctaatttttatttattgttttt

SEQ ID NO: 182727 - DNA, 588 bp, Cannabis indica
tccaatatgctttttgggtatatctaatactcaagcttggttttgttcttagccttagcttgccttttataggcaatagtaaccctctaagcttgtagccatatagtgtgataaacttatttctatgtattaaaatacagatatagataatgatggaattggaagtcatcaacctttgctttctcaattaagcaacccttatatctctaattattttatttattagtcgtctctatctcttatatgtatgcagttaaataattaattacgttttgttttctagagcttctaattaaagtaaaaaaaaaaaattataacatcgatgtttgagttgcacatttatccagcaacatcattaattatagcctatgagaatctctaataaaatgctaaatagattgtatactactctattttagtattttttaataaaaatatatgtgaaatttgaaacatgataaaaattgggataaattgaacacaataaatcgaatctttttttttaatatatatatatattaatgatagactttaatatatattttaaaaataattataatatatagtgtgaataataatattttaaaa

SEQ ID NO: 182728 - DNA, 734 bp, Cannabis indica
aaaaagtttgaaatttttcttatattttgattttgtttaggttcacaaagagcttcaagaaacaatgtctcaacttgaggcgattcgccatgaaattcgaagcatatcttttatgaatcctagtcctttgactcggaatttgatggacaatgcacttgatcccaataatcatgttaatgctggtaattttttaagtctccaaagaagaatatgaatcattttttgttttttgcactatactcttatgaataagcaatgtttatctacttcatacttataggtgagaatttggttgagaagattgtgaaagagcagaagccaatagtgaaggtgtttaaagttttaacccttttcttaatactgcatagagagtattcagggttctaatatttcattttatcaggataatagtttcaaaacctcaacttcagttgatttgcattctcaagctacttcctttgcgaaattggccgaatctgaagctgttaagaacatttctttaaaagggaatttagagaaagtgaagtttgatgatgaggttggtctttttgcaattttgcctgtttcagctgagtctgctggtttgcttccgaatcgaaaggtaagtttcttttgcagactaatgagcttaaacttcattgttatcctctttgtccttgttgtttcaattttagtagagcccttttgcctctttaaggaattaaaagtctttatacctttatcagttaacagaa

SEQ ID NO: 182729 - DNA, 1035 bp, Cannabis indica
gagaatgagagtataaaggcaatacttgtggtactggtatctaataccaccaattctgatattataatttaattattataaaaactattaactattattaaatgccacaccttatactgtacttaatggcaataataataataatatatataaataatttatgacactgtgtactgagctagcatacctccaattaacgaggttttgatttttgtcttattcctgcaataactacttcttcctttcgaacaccttatatctgcaataaaagaagacaaaattgattaattaataatgaaagttaaacagtgacgaagatcctcatgcaggtgtacgccaagatcttttctttataaattcctaacttattattctatcatgagtatttgtttgttaatattaaagtgtctgaaaattttgagagtcaaaattagtccaaccccatataattgcgggcctggttgaccgttagttggaaatttataattattgtttaacagagatctcggcacaaccttggctgcgcaactagctattatatacatattcttttacttgtgaaagtaattaatcataattgcaataaacatatacagtcataaattatgaggtcaacttcattaataaatttaatttttttatatgatcacttgtgaaaattaataaattagtagatcctcttttggtatttatttggtaattaatctctaaagtataacatgttattttaagtaacgtgttatacattcaatgtttattaaattactatatagattcgatatattttctatgtttaagcacataaaatgaaaaataatacaacaaatatcgaatgattgagatgcaccgaaataacacatattttctatataaaaaaaataatgtaactaaactgtacaattacaaattataagttatataatccctacctcaaaatataaataactaatatttaatgtatattattgtaggtaaatgtgtacaatttaattgtaaagcaaaaaaaaaaggtataattttatgttaaaagaatat

SEQ ID NO: 182730 - DNA, 591 bp, Cannabis indica
tttagagagaaagtctggagtgtttagtgagctttgtattaaaatgataaacctcccgatatacatcggtttactaaaaaccccccgttttatattgaatgtatttataggaggctctaatggcattttgttacaagctttgataccctaagtggtcccttctacaagaataattggtatcattaacagcactattactaacgcaataaagtcctcactaaaagtaacattattaccaacgacatttaagtgtcttcagtaataaaaatatattttttttggtaaattagtcatcaatggtgacaaaagatatcaatgacgactttgtcatcattgatataaatacactagaaactctatccaagaatacacttgggaccaagtaaattatattctaattgagaagttataacaaaatagaattacataagaaaaaaaattaaaaaactaaaaataatcaaatgtaataataataacaataaataatcattaatactatatcataatagaaatattttagagtaaatataatatttatacatgtattataatttaaaataaaattattaattttactataaattaatttac

SEQ ID NO: 182731 - DNA, 595 bp, Cannabis indica
taatcataatatcctaaaatctcaagctgccgttagtggtggctagcagttcaattacaatataacaaatatgcacaaaataagttctccataatttttaacatcatgagaatttttaacatagttttttttttttttttgacagaagaatattcaaattgtggtgaatcacaattcacctcattcaagaacatacacaacaaagaacaattaatatataaaaccagaactgaaaaatgtgagttcaaaaaccagcaatgaatctttcaaccaagcatgaactatgagcaatcaatggtaataaactggaaacaaaaaattggcacattttctttaacgaggttcgaacatagatcaatgcaatctatgcctacatccgcgagaaacaatcagcatactttctttattgatgaatcaaagttgaatacaaagtgtttgatcttacaccaggaagatcgattacaaaggagtcaagctcctgaccctcccaaacactcagtctctcttttctctctaatctggtgtcttacttagaattctacacacttgagaaacaaacagggttgatatatatatatatatgagttctggacag

SEQ ID NO: 182732 - DNA, 712 bp, Cannabis indica
agcaagctagacaagaaattgtatggtgatcacactagcaaaaattacaaaaagacacatttcaaaattacttggaggggctttgatgtagatacggtattattatttttgacgaaatttatattatattattttattttatttttatttgttttaaattttttacttttattttttatattctttaacttttatagatgatgtcactattatactctttaggttaatgtaaattatgtgctaaatttaagtggagggtgaaatatattaaggaacccacatcataaaagttggtatattttaataaaatttaatatgagggtattttaattattaaatacaaaaaaagagtatttctcaatttatccctattattttagtatttttagagtctttatttagaaaaaaatgtggtatttttcaaaatcaataaaaaaatgtgtattttaaaagggaaacaaatttttttggactcctggactaggtggactttaggcacaagcctaacccgcttatgcccagagttggtggggatacctagggtcgatcttgaaatttcgtaggtcataggaaaaaaatatttttggcccttatttagaaaaaaaaatgtggtatttttaaaaataagtaaaaaagatatatatttttaaaagggaaacaaatatttttggacccctggactaaatggactctaggcacaggcttagcccat

SEQ ID NO: 182733 - DNA, 730 bp, Cannabis indica
aatgagtgtttttataggacaatggtaattctagaagagaagaagagaagaagaagagaaaaatcataaatgtacaacaacaaaaacccaatcgtattttttttagatttaatgagatttattttattatatataaataaaaagtgacccatgaatttctcataaactattttatttttaataataaattattttatttttaatataaataaaaagtgacccatgaatttctcataaactattttatttttaataataaatcattttatttttaatataaataaaaagtctcccacgaatttctcataaaccaagaattcgattatataggcacactttatatagaatagatatatatatatatcacaattatttacataaaaaattaaattatatagtacatctacaaatgaaaaaggacattaataatttaagtattaaagtgcactcatatataagtatatataataacttgtttaaattatattttagtataataaattatttaaaatttatcaaatgattgcataacattataaatatgtatcttaagttgcactacctctattcattttcttcaaaataatatgttgatatacattacgataaagaatatagttgtgttacaaatgtttatttcttaattagctaaatttagtcaaaattatatccattgtttgtttttttttttttttttttatttttttctttttagtaaaactcttcaaat

SEQ ID NO: 182734 - DNA, 598 bp, Cannabis indica
atatctcctctaccatatatatcgtaatcatgatctgtaccactatatcacgtgatatataataataataagttctctctctattcagacagaaaaactagactggttcttttttttttttttttgagggtaaagaactcgttatcataaattaaaacatagagtcatttacaacaacagagtaaattggcggaggaatacactccaaccatgaacaagcttcatccacccctaatgcaaatttagccaaaccatcagcagccatattggctgtacgcttggcatgtgaaattttaacattagggaaaaaggaaagaagacaagaaacatcaacaattaaatcatgaaaagatgaaatagctgctcaaggagaacataaagcagtgactaccatcaaggcatcagtttctatgtgatgaagtatcaatatgcagtgactagactggcttattagccattttttccacaatctaaaacaactcttttttttttgaaaaaaagaaaaatataatttataaaaaaaaacgttaaggaggaaagtggcttgatggcaaaacggtaatattggcgaaatctaagggtaaaggttgattggtcc

SEQ ID NO: 182735 - DNA, 1032 bp, Cannabis indica
gtcaggattcgagtccgagtttgggattcgggtttgggttgtcgtccagggccgggatccaaggtttagggcccaggtccaggtttgggtcggggtcgagtctggctctgaggttggggttggggttagggtccgagtctggggcctggttcgggtccaagtttgggtatgggttgtggccgaattcgggttgtggccaagtctaggtccgggatcagattccaaaatattaattatagaaagtacaaataaattataattaagaaaaaaaaactatttaaataaattttgaaagttatttttttataagttttaatttttgattctcagtttcgaaattaaaaaatgaaaacacttttatagaacaagttttttgaaaatatttttattttttaatttttttttaaaaaaaagtgttacaaaacataccctttacttcataaaatttagatttgaagtaaaacttagattaaaatactacaaaaaaaaacatctaaaccattaaaaaaaatatttatgacattttcaagctgataaacaaatgtagacatttttcaatattgagtacaaaattactaattacaatatattctttttttttcaattaaaaataacatttttgtatattcattttttatgattattttatcttgttgatgtaaaatattttttgatataactgttttaagagactagtttaggccagcttttgttgagttgatgttggactagaaactttctcctacagaaattaatgatactctaatttggcgtaattctttgaatggctctttctcaaaaacgttggcttaaatatctctcttgacacctcatatggggcagcggaggagttgtggaagagcatttgggagggcccaagtttaggaaaggctcaaacttttctatagagatctgtgcaaatatatcctcccttttggctaaaggcttcattccatcttgggaatgattttgttgttgccacatacataaaaaagatcagaatgattcgagcaacatcagatttattttcag

SEQ ID NO: 182736 - DNA, 524 bp, Cannabis indica
ataaaaaaaaaaaaattgtaagtctcaatatatatacatgattttaaattattgcatattctagaattaatagaagtattttttaaaaaaaataaataaattataaaatataattgataattttttaaattaataaaatactaaatttaatttttttgtcccaaagctcttaaacttcttggcatgttgttagtacttgatatttaaccgatcgactcatgtatattagagataataaaaagatatttaatattttgtaatatattttttttgttgattataaaaatatctctaataaatattttcaaacgctccataatatcaaaaactcaattttagtacgaatcaagattctatgttaaaaagttgtgttatacattgataaattaatttaagtttgacacataaattaattttttatttattaaaaaattaaccatctatatataccgttttttttttaaaatgctgaaattaattgatgtgtcacaatgagattgatttaatacactgtaaaacacaat

SEQ ID NO: 182737 - DNA, 1044 bp, Cannabis indica
tgttaatttatataacaaattcatcaattgacacttgacattaacaatgtatacgtgtgaagtatatctatctatatatatatttatagagggtgattctaccatgtatttttatcctgatcatttactctttatttgttttggtatttaaaaatttttatagacatctaacaaaattttaaaaatttgaaatgattaacaatataaaaacaatattcaaataatttattttacacgtgtataaaataaaactctcaagcatactatttgaaccctattttcggcgtgtcaaatttctccaaagggcgtgtcaaatttctctaaaagtcttaaaattttacaagatatcttaaataactacaatgtacacaactataaataaattcttctaaatatcaaaataaataaagatgaatccgtacattctttttaaaatagtgtattaattattaaaattttctatatatatttaagttgattgaatgaaaaattaaatatctaggtaggtcatgatatacatcatcctatagtagttttgctaaattattaaattaactgaaaaagttgaaattaaattacaaatatagtacaacaactactactcttgaaaaggatgtaaacccctttaacaaagagaaatattaggacaaaagaacttaggaaccaacgtacgtaagaaatttcttgtcacgaagggtggttcgaatttcttgtgcttagaaatttctcccaaagttactcactaatatatactaaaatatatttattatatgtagttcttataaaatatcaatatttaaaagcaagtgtattttaatataatactactattagctaaacatagttttatttcatctacaacacatctcgtctttctaataatcaccacttatcattatcaggaccaccacacataatcctttcaaaagtacatctatattcaaatcaagtatattgttcgatagtacatcaatgttcgaatcaagtatgttcgatagtacatcaatgtttgaatcaagtatagttcgataatactgttaataa

SEQ ID NO: 182738 - DNA, 799 bp, Cannabis indica
tcactgagatccattgacatggcttcaccactttcatgcaataaaaaacaaagaatatggggctcaactcaactaaaatacaaaggaccggccttgtgttctgagagtttgtgctgttgttataccatgaaatgaaattaagtagctttaaatattatttatatatatataggtgtggaacaaggattataacaatggtaagcccccaacgccgaaagaaaaccctatccgaggtctttacttgcttcctgctcttcgaagttggaatttctttttttcttctcaataattaatttgaatttatttatttatttttattttatattcttttccttaaaccctaattctccaccctggtgcacgttagatgttgcaagtagttttatgctaaagtgggcgtttaaaggtcataataaatggggggcatgcttgcggatactgattttcaattcgcgaatctaaaataggatttttcctttatttctctctattaacatggaattgaaaatagatttgataattaagtgggtggttggtgcatcgtgttgttaggttttttttttttttcttgtcaaaataagatattaagaaatacacttacaaatttaaaaaaaatttgatgtttagctgggtaaactgtaagttcataaatcgacaaataataatcgtgatcaaaagaccgacaaaaattaaaagtaattaaagtaattaattatagcaaataataaatttaattttatctaagcaattaatttgaaatgattttagaaatttaaataaactaacaaagaagacaaat

SEQ ID NO: 182739 - DNA, 740 bp, Cannabis indica
gcagcaggtgcttcagtggttgttgattttgaatctgctaaagatggtgagctcattgtaaagccaaatgggggttgtgaaaaagaccttcaagtatgattctgtattctgcccccaaacagaccaaggtacagaaattatgatatgggagaaattatttacttgcattttaaatattttgaattttgtaatatgtttgcctactctatgttgtcctttccaaaattaatctaggtctttgtgttgcgcagctgatgtcttcaaggatacagctccatttgcaacctcagttctggatggatacaatgtctgcatatttgcttatggacagactgggactggtaaaacgtttaccatggagggtacagaaaagaccggggagtaaattttaggattctcgaggaactgtttcacataattagagagcgtcaaaagctgtatcgatatggtgtatctgtaagtgtcttagaagtctacaatgagcaaatacgagatttacttggttcaggaaatcaggcaggagcaactgcaaaaaggtaggcccatgtctttactcatttcgcttctcttacattcctccatagcactttttactttttggatcaataatcttttatgcatttaaatgaaaagttatcaatcaagaaatatcatactaataataatatcgaggcaagtctctctgttatttgttactactgtatacataatctccagctttgtaaattttatcaagggac

SEQ ID NO: 182740 - DNA, 559 bp, Cannabis indica
tttgtattaatttatcaattattttttacacttgttccatgacaaaattaaatagaacgtaataaagtgatcacgttatgagaaatattattaacgaatcgtatattataagagcacaatttaatataaaaaatttagaggacaaaaataataattattttaaataaaatagtgaataaataacttcttgtttctaaaaattatatgttacattttaaaaaaagttgtacaatggcacaaattattggaatctctctcttctcttctctatgtattatatataattacataaatatgaagactaaaaaataaataaatataattttataaacataaaagctcttattattatttaccttacaaaaaaaatattaatttttaaagtggggtttgtgattgggtgtaggaatgaagcatgtcccaatcatctcatcaaaaccgctattggaaaagaaaatcaatccatgggcaaaattaaagatctcacataatcccccatataaaaattattaaaaattaccaataaaagaggaacacgtttaccttccttcatccattg

SEQ ID NO: 182741 - DNA, 736 bp, Cannabis indica
agatgctatttttaatgtttggcattgggttgtaattggatcggttgattattgttggatttgatcgattgatgcacattcgtactctcgaactcatgccgtgtcaaaaaaattgactcatatttaaaagctctagttgcagctatagtgcatgcatatatatatgtatgcaataacactataacaactgcatctttttttttttttattctttattgtatttatgatattaatattttatagcttctttgtatatatgtaatatttaatattaaaatatattttattttattaaaagaatatatcataacaataaatatatttttttacgtaaagtaaattttaggtattgtggttaaaatggaaaaaatcatatttagtataaattagtgcaacaccaaatataagtgatatatatacatataattcaacaacatccttcttttcttccataacaaatcaatttgttagtggtaattttggtgaaagatttgtcattgtcgtaagtaaatgattggttgttaagttacattacacaactaataaataataacatttttgttatattacaaaaaactaaatacacttttttatattttcctctgcttgcaaaattgggcagcaaataactttcattatccctatatgctatatatatatatatatatattgtttcatcatatagatagcatcctatgctagttccaatcatatgcatatatatatatataatata

SEQ ID NO: 182742 - DNA, 638 bp, Cannabis indica
taccatagattttacacacggctagttctttaaggatttaagcaaactgagagccagttaacaccaagtacttatgccaatcgaaacagaaagatcataatgaaaaaaatggttaatacaaagagtaaaagagatataatgataattagagaaaaaaataaatttatatatatgtatatgagaaattgtagtaaagattaattataaccatatgtgatataattaactttattttattaaatcaataattaataataaataatgaatgtatagtaaataattaggttatctatgtagaaagcttaaaaagctatacacaatataattaattactaggtgaagttattttattgtttattgaaaaagagtagaataataagagattcaaatcaaaataaccttgaaatagataaattgaaaagtaaaaatgatagcataccacattaccttttcaagatttagatatagatagatatggagtgtaatattattactataaataggtaacaattttttatatataatattatttgagtataagaatggaattttaatattcaattgcgcggataacaataggacgctatgtacgataagcccatttctcatgcatgtatataaagagacttagagagaga

SEQ ID NO: 182743 - DNA, 536 bp, Cannabis indica
gaagccaatacaacaataattcagttgatatttgactggcgccttaaatttgtcaaaaaaaaaaaaacttaaagaggattttgaaaaaaaaaaaaaataataatggagttaagtgtataaaatcaaaacgtaaaatagtcgttgccaataacttttttaaaccacaccttaaaatgtctaccaccattataaattataaaaaatgttatatcaatattattgtaatttaatatggaagctcacacattttagctttataagtaaaatagtaaatcactaatcatttatagagtaatatatcagtatagtatttgaaaactaaagtactttaatagtaatgctttaaacgatattgtaaaaaatatttcacaacttaaggtacatatatttattttttgaattcattagatgttttactctcaaaataaacttacacaattaattttattacaataaagttgggatatctctaaaccctttagctctttgctcatttaaacattatctatgaaatattgtaaacaaatttttgtttg

SEQ ID NO: 182744 - DNA, 765 bp, Cannabis indica
atactttaggaagatagtgcattcttggaagatcataacctttactgcaatctccaacaatgactttaggttagtattttcgctcatctattatcatcttcttctttaatttagtaatattctaatgatttatgatttggggttttctatattaaagtacttttaggaatatgtttagatctgtgatatatatatatatatatttggagtattttataaattctaacgagtagtatcagtaccacattttgctaaattaattgatgatctaatgattttgttaattataaaatttggggatttcgcaattagattttgatttatattgtatattattttttgtcggcatatatatatatgataatattgattgatgtatatttaaattttaatattttgtttttggattgatttatattgcttcagtcttgttttaatacttaatttgttatgtatatctttttctagttttatttgtatatatatctatatgttttgatcacatcgacatggcttcagtaggtatgtgttttatggcttcagagtgtatatattcacatatttttcatttgtcttatttgttgatgtgagctggcttcagagtatctatattcatatatttttctatttgtcttatttgttgatgtgagcgtggatgaaggatttatatatatatatatacagtatatcattggatgaatggtttataaatcatctgcttatgatgtcattctactttctcttatgaaattaaatgacacagat

SEQ ID NO: 182745 - DNA, 757 bp, Cannabis indica
taaaaaaaaatatagaaaaattagattaataattaccccttaggtaattcaattatgttgtcaaacattaatttaaaaattacacataaattctacttttataatctattatttcaataccttcaccattcagaaccacaacagaagactaagagtgaacttttcttgtcaaaagatagcggtactcctttacttttgttcggcttgttttgaactttcgtgttgctttctttgcgttcgggggtgaccattgaagttgtttttctttatgtttttgcttagtttgtttattttagcttggttggatctttcaacactttttgtcatttgtggtgttggccttatgcctttttaggagaatttatccttctaaatgtttatggttgagccatgatttaataattactacttaggtaactcagttatgttgtcaaacatcatttaaaaattacacacataatttctaattttataattcattgtctcaacactttcaccattcagaaccacaactggtaggggtgttcattggatcacatccagtggatttggacccatccgatcccatccaattgaatcgagtcatcagatccgatccgaaccaatggatgtattggattggatcggttccatccattagatgttttaacttggttttttttattggattggattggatccatccaatgaatctaatggatgaatccaactcattttagccactatttaggctgatttcattaaaaagaaaaaatat

SEQ ID NO: 182746 - DNA, 503 bp, Cannabis indica
atgtttgttatttatgttaattattattaagatttaggtatatttaaatttgtatgataaataagtaattatttcttatatcatatatgcatatataatttttctttgaggtttttatacttacatattgaatttttttttaaaaaatgttatgttttttatactgtctattgtattaaattttcactgttgtttcacaattatttttaattgttttattttgttgttttagtattttatagaaaaaaaaattgtgtgatagtaaaattgtaaattttacctaaaatctagtattttataaaatctctttttcctttttatttttattttacaaataaaaaaattcaatttaattttattaatgtgttatctaatagtaaattgtcaattgaataattttattaattttttttagttaaaattaacggttaaaactaacattgttaaatcaataaattaactttttttttgtaaaaaataatttaaatattatattaaaatat

SEQ ID NO: 182747 - DNA, 604 bp, Cannabis indica
atatatagggatatgatttttcgcgttattgtactttcacggattgtaatccgtgatgtacggcagccgtcagatgagggagttatttgatctgacggctgagattgatctaggggtaattagggttaaaaagtataaacgtaccattacgctcatttaatgtaccctgagacccatctaatgtactacggaatacattccgtgaaagtacatcacgagacaaaatcatatccctatatatataatatagaactaatttttaattatattatatataaaaaaaaattgaagttcctagtcgtccaactatatacaccaacttccttacaaataaaaaaaacaaaacaaaactatatatacaccaaccctattaattgtaagcttaattagtatgccctaatcctaccaaactttattattattattattattattattagaagaagaagaatacatttttactctacttaatttgtttgttaatttgtattttggggattaagtactagtgtagtagtactactcacttgtactagtgtttttacttttttttaattcttgaatatacactagtcattactttgttttagttattgctaatgat

SEQ ID NO: 182748 - DNA, 669 bp, Cannabis indica
cattttaccaagaaaaaatgttgtgagagaaaacacattaattaatacaaaaaaaaaagtataaattttcttacaattctatgagttacttctttaaatatacttataatcatttaaattgctattgaaaaaataatgtatagttaatatttttaattatttctaattttttatacaattaaaaaagattaattatttgggaaattgtagatatagaagtgagaatccttgaaacaaatatgcctttaataatttgttgattcaaattaataatgttaagaagaagaagctagtcacctagacctaatctaaatatcaatatcattttcaataagtatatattaattctagggttaatacaattttaaattttatattttgtaaaaattatcgattagactttttttttttataaaatgataaatttatatcctatttttttttaaaaaaaaattgttaccctaaatttaattttcaatatttttttaatataaccaactcgaaaagtttttaacatgaatatacaaaaaaattactcaattttctcataacaaacttagatcgaattattattaatttttattttgacaaaagaatcagtttaaaatactattttgtacaattttaaaaaataaaaactcaaatttataatttttttttagatgaaat

SEQ ID NO: 182749 - DNA, 1336 bp, Cannabis indica
tacaacgcagatgcagtgcacgtttggaaagacgcaccttattctgcacaacgacatattaaggacttcaaacgaccactctaactatgaacgtatttggttgggctggctcatttaattgggaaacttacaaaaatattggaatttgggataattttacaaaaaaactgtcacacggaaatctttcaaaaataactgtgttttataaaacaccagtaaaacacaaaacagaacaactcaaaacaacagtagaacactagtaaaacaccagtagaacaccagtgaaaacttgacaccgtatactgcagtatgaaacttataaaaaaacacagtaaacaagtaaaaaatactgtcagacagtatttttgtaaaaaaatgacaaaagctagtatactatgtaaatttcccttttaatttgaattccaaatttacatacttattggcgaaggggataagttgagaaatacttattttgtgtattcattaattaaaaatatccttatattatatttcattaaaatatactcacttttgtgggtggattgcccaatgtactcttactctcaacttaattctaacatataatttacattagtctaagggttatattgggggtatcatctataaaagtgggcaatatcttaaataatataaaaataatggtaaaaattaaaatatgtaaaataaagtgggtatacaatataatttcctcttggcaaagtcatgctacgattctggacgtgggtccagctcactaacctaacaaggtcagacagcctcaatctaggagatgtcattcggcttagaagacgaagagtccatctacaccattcggattcatggggctatccaaatacaagtatttgaagaggcactcagaaggcttctagacgtcaccctacacaaaaccctccaaacacaaagccccacagtgccagagtttgtcccttacttcggacccgcgaaatgcacacgctaccaaaaaaagatcacatttttgtccaacgccatattctctgacattctcggcacagatgtggttgcgtacgacacctagcatcctcaatggcccccgcttatactgacaatcttcacctcgtgaattgggccaaactcaattggcccaaaattcaatatattgtattttaccacatcagagagactagttgacacctttaaatcctaccaggatcgagtatgcccatagctggttctaccctattaatagagcagtgccccttccatgaaaaaaggtgggaaatggcattcttaggagaataactaaaaataaacggttattcaaactaggacaaaaatatttgtaagaaatactttg

SEQ ID NO: 182750 - DNA, 576 bp, Cannabis indica
actgagtggttttggtaccttgctgcctacttgagagctagttatttttagcaggtggattaggtcccttccagtgttcgtggaaggaagagaattgtcagttgatttgattaaattgaatctagaagattttgatgttatactggggatggattgacttgcaaagtataatgcaaccatcgattgtaagagtaagatggtaacttttgaaccagagggtgaggacccattcgtgtttgtgggcgaggttcaaggatcccgaatagcattaatctcggcacttaaggcaagagatttgttatgggattgatgtatcgctttcctagccaatgtagtggatactaagggaaataccaactggaacagaatatgttccagtgatttgagaatttttagatgtctttccagaagagttaccagggtactaccgaacgacggaacggtaagtagtttagtttaagtaagtagtacttcgtagtaacttacggggtcggggacgaaggaccgaccgtaagttacttaaacgtaaacgttccgtttacgttacgtaacgtaaggtcggaccctaacctaacg

SEQ ID NO: 182751 - DNA, 738 bp, Cannabis indica
gaaaaagaaaagaagtggttgcatttgaatttgttggtccgagtatgagtagtatgagtatgatatagatagataaagggataagggagggttaccttacctcattcgacaacccaaaaagtcttactcttcttcctactcttatgttaattaaattaaagttgtgtccttccaaaggcaccgttggctttaatcattcaaatggaaagataatatattccacatttttgaggccacaccataccaactagattgcatttatattaataacccttctcttctcacctacaccaccgttgccattgccacaacttcaaaaaatttattttatttatttacttcttgctctccatgtgtacattatagacataaataataaactcagtcgataaaataaaatccaacaaatgagatttaaattccttttttttttattaaaatatatgtaaaatcttggttttgtaattttagttagacaaaatattgttcaatagtatttctagaatgcgttgctggatttgaatattttaataaattatattcatttaattaatgatttacgttattataatatttatttatggtattggtttaaaataaaattagtaattatggtaattaaagtctgattttttaaaatttgtttattgatatatttatcaaatattctctacttgatttgtggctttcactatgattttctagctagagatttaatacttaaatggtcaaaccaaa

SEQ ID NO: 182752 - DNA, 503 bp, Cannabis indica
gcagccaagatttcaggcgattcatcagtaaagaagttatgaagaggaaagtcataaaaatcgacaactttggtggtgacatcaagaatttgtttattgagtgtaaagaatgcatcgaccacttcatgctccaaacttaaatggggaaaatattgattgagaagagcaactgcattggccactggattggtcttgtaatggcacagcacaagcggaaactgactaatggatgttgcgaaagccagtgagactaacaccacctttgcatcccacttgtattgcttcgttatttgcaatatctctttcgttatcatctgtatttgatctactccaccatcccaacacttgttcagtatctgcagtaatactaattattataatacaagccatcgttttggtttataccatatatatattgggttaaagaagttttataatattatgttaattaattacctcacagattgctctaatcatccttcttggaagttctttgtgcatgc

SEQ ID NO: 182753 - DNA, 732 bp, Cannabis indica
ttttaaataatttagaatctaaacaaaacctaataatcaatttatagcattcctcatcacatttcttggttatgtaatgtttaaaagatctcatattactaacatgtaaaaattaaatatccatctactactttttttagggaaatttacatggtatactaacttttgctatttttttacaaaaatactgtcaggcggaattttttactttttactgtattttttataagtttcatactgcagtatactgtgttaagttttcactggtgttctactggtgttttactagtgttctactgttgttttgagttattatgctctgtgttttactggtgttttataaaacacaatatttttgaaaaaatttccatgtgacagtattttgtaaaagttaacccaaattccaatatttttgtaagttttcatttttttattaccaattagtaatttatataaacaacataattcaaattatgatttctctattccaatttccattaccatttactaaacaaactatataacacaacatatttttcatttatctatatctatatatgtaaatcaatcccctagatttttttattattattttgtttgtagaaggaaaataaccctagatttctctaactttaatatccatctaaatcttcatcacaattaacacaaatccacaaaatatcacactataaagttccaaatcaccaactatatatttttctacattaaatc

SEQ ID NO: 182754 - DNA, 759 bp, Cannabis indica
aatctattaacttctctcaagcgatgatataattaacttaattaactaatatgatatatttattcaatattaattaatcaagcaataataaagcaatgtgattctctttaaataaaattcatagaattagtggaatctctcaatcacaattttcctatgtcatacaattttaagtataattttagattacatctctcaaacgtaaaacctaaaatctctatgctaattaatggtgatcaagcattaataagatgataattaacacaaaattacataaacaaatagcaaaaaataaaaatatgggaataatataaaaacttttattcataatctaaaaaagttctattaacactctagaaagaatttgtagttcataatgacaaacataataaccatgttaatcatgctcataattaaataactaaacaaaagaataaagaaaaagaataagaaaaggactctaatgatagttgatgatgattgctcggaatctcttctctcttgttctttagtgtgttttctaatctcaaagttgatttatgtttctctctaattgtctcgagatgaaatatatgaatctatttatagtcaaaaaaagatagaaaatatgatgcttttaaaattaggtttaaaataaaattatacaaacaactcaatggtgccatgcaatatttcccgaggttttgttttgtgcaaaaatataatttttcccaaaattagcgcctatagcgcctcacttatggagttatagcaccacaa

SEQ ID NO: 182755 - DNA, 657 bp, Cannabis indica
accagtcagctaatgcacttgaaaattgctgcaacagatcggagatttgattttttcttactattgtatatgtggtaaatgaaagtgaaggaaggaaagtcttatgggatgacttgtgcaatctagtgactaatggaaaatggcttctcatgggagattttaatgttattttagcaaaagaagaaagagtgggtcatagagtgaagtaccatgttgacacagattttacacactgtgttcaacattgtcatctggaagatgtaagggcaactggatgttactacacttggtccaataagcagcagtaggtatgtagtgcatgtggtacaacacttagcgatactcggtgtaaagaccactaaattttaatataatggattattagataattagagtttaattatgaaattaagttattaaccatgattaacgtatttatggaaatttatttaaactcggaatgagctaattatgttatgtatgaaatttcttattttctgtgtttgtgctcggtagcagtggaacacgacgttgggccattagagagtcacattttcatatggtttagaattttattagtagcggggcaacgatggttaagcattagaagtgtcagaaatagtcgaggttttgaaaatgaccaaattacccctatgt

SEQ ID NO: 182756 - DNA, 724 bp, Cannabis indica
agtttcatttacgctaaaaaaggatttaatatggagaaaattaattagatacagaatcgtttggttttttctttctttttttttttttttttaaattttcttcactctttggctagaaagtatttgaagatattacaacccaataactttaacaaattgcttacagccatacatcagtatttaataattatataattaattagtcaaatcaatgaatgttttttacttttttcctttttttgtaaagtctattcatagctataaatagatgcaattttttttttttttgaaatggtaaatacatgtaaattaataaatgtatttaatcgctaaattgtttatcagatgaactaatattccatttcatttttatataaatataaatttaacggaaaaataaaaaaaaaaatcattatgaagattttattagatgataggttgaaattgatcaagatcaaacacctagattttttattaagtagagagagagagagagagagaagcagttaattatagaagtaaaaaattaggcagtaaaaaaaaaaattaatatcacattactctattaagtacgatatgataatataaacaacaactacaatatgcgtctctacttttattcctataccaaaaaaacaaatttatattttcgtatatttggagatataaatatatgtatgttttactacaatgtatatgttgtctaattttttaaaaaaattac

SEQ ID NO: 182757 - DNA, 616 bp, Cannabis indica
cccttttggacttatctttcttcatggggatggcttcttgaaaggtatgtggttctcattaatcaagaaaatgtgttctcttgagctattcaactctgtaaagcatgtgtattcgacagggttattattccatctctttcttgacttttttgcactgtatcgtctccccaatgatcgaactctcttttccttagtgtctcatcagtgggggctatcttgggctggctatttcttcccacatctaggttctcatgtccatcccttcacttggatgtacctattgactctttcgcagaagtcctccaaattgcctaattctctcttgagcatgttgttccataacttgcttcttggcttgactccagcagctatggccatcttgtgttcatctttggacagtctcctaaccttggccgctttagcggtgaagcgttgaatgtagcttttcaggctttatgtctctcccctatttgatgttggccaagcttgcccttaggacaatatagtctcacgaggcatggtgttaggccaagattcatcagtgatgttccacaggcaattgatccagtagccaaccgtcttatatcacttatatgctacacttctgagcatcacg

SEQ ID NO: 182758 - DNA, 582 bp, Cannabis indica
tccagaccgagactcgtgactggaccagagacccaaactcagacttggacctagactcagatctggacccaattcgaaccgggaccttgacaggacccgaactttgacaagacccagatccagacccgaacccaaacgagaatcccagacccgactaggaccccgaacccgacccgaagttgggattgagtttattgaaaatatattaaaactttattgcataatttatttatacaaattaataccaaacataatattatattaaataaaactaatataatactatacaatacaatctaatataatcatatatgttgattgattattagaatgaaatctatattattattattatttttttaaaaaaggaaaatctatgtcatgtattttaacatatatgcatgaatcgtggagtggataacttttactaaaggccatcttttagacaagccatgaccaccaccttgtcgctacttatctttttccatttctcactttctttcttttttccatgtttgcacttttcatttcttcatagaacaataaagattaaattaaagattattggatttcttaagcatt

SEQ ID NO: 182759 - DNA, 653 bp, Cannabis indica
cctctaataaaatgtaattctacaccaatcttattatcaatactttaagtgccaaagaagtgtatcagtccatgattaattcgagtatttatttttttttcaaaaaaattaaaatctaatagcaattataaaatttaaaataatttttttgccgcacttgacacatctatactgcattccacttctatcatgtaattctattttctcagagagacaaagtcgctttattattccttctttgcagttctaaatatactatatatgtatcaaatgatgagagtgaaattatgaaaaagaaaaattgcaaaagtttaaaaattattgatcattattggttattgatcttgaatatataaattattgaaatgtttgaaagttactaattgttatcggttattgatcttaaatatgtgttattgaaaaaatttaaagttaataattgtattggttattgatcttgaatatgtattattgaaaatatgaaagctattaattattattggttatggatcttgaacatgtgttcctcataaatttagcaatcgatgttattgattattagtaatcattgattttgactatgtatcgttaacaaagttactacaatttactggttattgatttcgaatatattgataaaatatacatatatg

SEQ ID NO: 182760 - DNA, 729 bp, Cannabis indica
gtgtatgcttctatatggtctttgtgatgcctgtttgttgcctttgttgggccattgcgtgccatttgtctatatgttttcttgtgggttgtgtgagattggtccttggggatgctatgtgtttacttgctcatgcttcttgtttgcactcaacatgtgcgagacatgtatcgtgcctaacctttgaacttatattcctgcaggcgcgtttaggctgacttgctagctcggtgtgccagcaagtgctacacgttccacctatttgggggtgtccaaataggcggcccatgacactgagcaaggggggtcttgcccttgtttccctactttagggacatagccaagttcttcaggcggtgtccgactcagattgctttgaaaggcatcaagtaccttttggcactctttgttatgtatgtagagtcaggtttgtcgcagccctcaccttacgaggtgagttactatttttagctaaaatctacccctaagcaaggtaggtatggatacatttaccttagccagctagggtatcattggcttggaggtaccaacgcaaggccatgtcaaggattgggaagtactataagagttacttcattgcttgggatgtcaaggcgtacaccatacttttgaaaggtcataactaccttcgcccaattcctacctcaagccgagggcagagctaaccatattctgtctctccctcaaaaaaggtgcaacatctgcaag

SEQ ID NO: 182761 - DNA, 1205 bp, Cannabis indica
tcagagatgagcgttgaccagaccaataaaagctaaaaaagatataaaatgatatatagagagacaaaagaaaaaagtcaaagagagcaattaatcgactagtataaagaaattttcatttaaattgaatgatttaaatattataagtcttatacattgcaatacaatatgtgattgttttatatacaaatgaatttttaatttataaatagatcatcatttaatttcgcaacatgtgtcaaatccattgagaaattaaaaaattgtaaagatggtttttgatttttaattttattgtttaataaaaaaaatggctgctattcacacaaatgcaaactatagggaataaatgctttcttctttgacaatcaagggaagattcttctcccaaagatctacaacactctgattttaataagttatttacagtttcatataataattttcctttttttttttggttactataaatattaatatatatatatatatttgttgaatataaacactatttgttttgttgatttttctattggtgaggtgttttcacacagaatgagtaacatgaaaaaaaattgaattgaattttcttttaaaatactatgtatatgtttttttaaaacagattgtgtatttttcatttttttgttaagaaataatttttttaaagagtaatttgtggcataaataaagtttaatttttaattaacaaataaatacctaaatttaattttttacggtaataatacctaagttatatatatttttaaaaatttgtaggtacctaaccgttaaatattaagtcattacatttacgtgtcatttttttttattggtatatatttgaactattttttttaaataataaaaatttaatgaatagactaatcaagattgtcactatggtaatttatttaaccaagttacctacagaaattttaaaatttttaacttaaatattattactgctaaaaaattaaaattaagtattaaatttataattaaaagttatatttaagtatttatgctgtaaattactattttttaatattttaaatcattgtttagaattaagcaattacttattaaaaaaaaaatagaaaatattttctaaattttatgtttgttgggtacagataatataatttacatatagattaattgtacatacttttaacaagatattagttgtatctaataccttt

SEQ ID NO: 182762 - DNA, 635 bp, Cannabis indica
gtatttattatcatgttgagcataaataaactagtgtaaatatatttatttgatatatttaaacggttatgaataaacgattattttatatattgttatatgtataatatttttagtaaatatgtatagtgtactatcaattattgtttcaagaaatatgtattatatatatttatgtatatactatttctatatcacgattatattgttataaataaagaaaaagaaaaggatgaatagaatctcattaataattattatcatatacataataacacactatatttggaggtacaaaaaagtatttttcaagtctaaaaatggcattattaattaattataatgcaatatagctagctagataatgattcaatcaaaagattttgattatatatatcttgttattgttaatgatcaattaaatatattcatatgcatatgcctatataaatctaaaattatatgaaagaaatcagacatatgggttccaccaaaagatctaattaataataataaaaaaataatacagaatataaagaaaataatgaaggatggtcgcaacttcactcacaacttcacagacacgtactaaggccaaacgaaaaagaaaaaaaaaacgttaaacaacaacgaaa

SEQ ID NO: 182763 - DNA, 997 bp, Cannabis indica
acgaagcacccatgagttacaaagactcaacaagaaaagtaagtagatacaaacacatacattatgcaatacgagaaaatcatagaaattcatagccaacaacttcatcatcataataaatagatatttaccttatacataaccacacattacacaatcaattaattgtcttataagacaacccgactttgatgcatcataaatcatccttgccactttgtaatacccaagattaaagaatcagttagcaaactccaactagttaaatgcgtattaatatggaattatattattatgtaatttaatatatgtgaattatacttgtacatgatatgttaagaccttgttggtgagtcaggagtatttttgtaattttgacccgagaaaggtaaaactataattttaatattatagcgtgcttatagactatattactatataatatatttgttttgtccttctgcaggtattttctgacaagtcggcgcggtatagtcacaatcgggtatttcgggactttattttggcattttattattagttgaataataaaaaatttaattggagtgtggaatgtgattaaatggcaattttacccttgaatgcatgcttatgtgatatattggccctaggggcaattttagtcttttgaccagttaattaattatcaacaaaaggaatttttacaaaatttagaaccaatttttggttatttcaacctaccgaacacacctctctctccttctcaattttcctcactttgcttttctcttcacgttgaatttggtgtttgtgcttggagctttggattgtggtgcttgcttttgtgaggagcttgaggtagtttttcttaccacatttatctttgagtttagttgctaaaattttactaagttgtaaaaagcatgttttttggtcgtgttagtgttcgttgtagatgcatgtgtgtgtgaattggtttaaattttgtatgttgtgtgcttgattgtgttgataa

SEQ ID NO: 182764 - DNA, 537 bp, Cannabis indica
caggttgttacaaataattttgttcataacagagggccgatgtaccttatttagactaatgggcgagcccattacacttgttgaattagactgaaatattgaaccatttccctgagcatggagtacacccattgggactttataaataagttgattcaaagtttgggttttgatgactgaggaagtaggcatcaagcaattcatttcatataattattgtagttgtgttttttttgtactttttattttttaacaaattttaaaagggctgtggcaaataggggagagcatattgaaaaaatggctctgaaaaacctgtaggttttctacagggtgccctgccttttagccctaaacatcaacacttatggcttcatagtacgggttatgtgctttttgggctgctatggatttggaatcattgcctgtgttaaggttttaaaccttttatactccaattgttccttttcactttcccgaaatggtttccttcacgaacccgccgtccaatcgtcattacattttcttaatttttgg

SEQ ID NO: 182765 - DNA, 820 bp, Cannabis indica
aaatagtatttacccaaaatcaaaataagaaatcatacaaattaaaaaaatatgcctaaataatttatagaccacgccataactcacgaatgcaagttgtagacgcattagtgtcaaaagcttcaaaaaataaatagaacaaatgaacaataaaatttccataatttcttttgctctcccttttaattgtattccacaagcaaattaaagtaaaacatacaaaagataatgaacaataaaattttgaaaatagttagaaagacctttctatggaataagatgtacaaatttccaagagggtaaaaaacaaactacaaaaagcaatcatacaacttaaatcataggcttaatttcagggccggccagagggtggggcagccggggcctcggccccagaccccacaatttcggaggccccgaaaaattaaaattaatatatatacatatatataaaaagtataatatataaatatttaactaaataaattgcatgaaaaatgtgcagcccaaatggttataagagtttttattagccttgtggttcaaagttcgactccctcagtcaccttttatacttttttttaaaaaaaaaaaactaaaaaaccaatccatcagcaaaatgactaaagtgtctaacttttttttgccaatccatcagcaacaaacttatagttaatttgtatttagactatataaaaaaaaataatattaaagtactttttaatttaaaatattaacgtatatttttaacaatactataataataataaaatttatatttattatctatttttttaaaaaattatatataatttaaact

SEQ ID NO: 182766 - DNA, 781 bp, Cannabis indica
ctatgtggcctttttcctagggatagggaatgacttttgataatggaagcttcggtaggattcgaagtaggaatttggtgagataagacctgacgagtttgcggctgatgggacaatgcaaaagaaagttgtcaatagttgtttatggggacacgcaatattagaaaagtataggttagatccctaaaacacctttctgatagcatttctattttgttgtttgcaacgagagtgccatctacaatatttttgtcttagaaaatgtaccaagattaggactagcttgtgaatctttgaagcttcgggaggtcattatcctctcaaaggattagtctatggcttagctttgggatctccttaagggcgaatgttcgctcttggatactagggtgcctcctagacgctttcatgatcttagaggttgatattaatattttacctcttttatcgtgggtccaccgtacacgtggctcactcttgaatgaccacctattttgataaaaaaagtacatacaatatttacattaacctagtccttctttccatcacatttaatttaattttattatgaaacgagtgatatgatgaatgatagttgataaatagatgcaaattaaatttatttcaccctttttatattaataaataatagaataaaagaacttctttttgtataaattaatatttttagttttaaatttttaactattaaagtaaaaaagaaaaaggtgaaaatgtattaattttctatctattatcaagtaccatctatcgcatcact

SEQ ID NO: 182767 - DNA, 574 bp, Cannabis indica
aatgtactcgtgccactacagttcattaatactggaatcacgtaaaaaatttattctctatttttcgtaatcagtctttacttatacttatttaatggttactgaaaaattttggtcaaccgtcctaattttataagatgagattatgctctaactaagctccaagtagcttgactcatgcataatataaagaatatatacaactaaactttggaagagttcaaaagaaccatattatattaacttagaatgccaaagccaaaatccctaacatcctatccaaagatgataggcacaattgctacttctattactaattcttatggctcaacagccttccacaccttttttattttcttaaggacaataatacctaatcctaaataagtttggcatacgttacggacttgttaaagctaatgtttatagacttattaagtttacagttatatttaataaaaaattaattttaaattttacgtccattacccactaaaatttaaggttaagcggtttacgtttggtaggagtagtggaagtgaaatgaaatagaaagaagacgaattctatttca

SEQ ID NO: 182768 - DNA, 605 bp, Cannabis indica
caggttgttacaaataattttgttcataacagagggccgatgtaccttatttagactaatgggcgagcccattacacttgttgaattagactgaaatattgaaccatttccctgagcatggagtacacccattgggactttataaataagttgattcaaagtttgggttttgatgactgaggaagtaggcatcaagcaattcatttcatataattattgtagttgtgttttttttgtactttttattttttaacaaattttaaaagggctgtggcaaataggggagagcatattgaaaaaatggctctgaaaaacctgtaggttttctacagggtgccctgccttttagccctaaacatcaacacttatggcttcatagtacgggttatgtgctttttgggctgctatggatttggaatcattgcctgtgttaaggtttttaaaccttttatactccaattgttccttttcactttcccgaaatgtttccgttcacgaacccgcgtccaatcgtcattcattttcttaatttttggtattatcttttctgttctaacaattttaatttgttttttattatagtataatgggtctacaaaataaac

SEQ ID NO: 182769 - DNA, 597 bp, Cannabis indica
ggcggcagcagcagcagcattcttgcccaactcgaccttgtaacaccagcaactttcgacaaccagtattatgtgaacctcatctcaggagagggattgcttccatcagaccaggtgttggtgacaggagatgatcaaactcgtcaacttgtcgaaacatatgctcaagacacctttgccttcttcgatgactttcagaattctatgctgaaaatgggttccttaggtgtgttaacagggtcaaatggtgagattcgtaggaattgtcgtacaattaactaaatatttggtagcattacgatgaattgatgagtagtgtaaactttatattttaatatgattagctaaataaaattctaattttatgaccaaattattctatgttacaaagtgaatggaaaatatggcattatggtttattaaaggggaaatttcaattttttgaccctaataatacaacctatatcaaaatttataccctttataatttgtacaattagtccattaattacatgaacttccaatttccttttttaaaaaaaaaaaaaaaaactaaaaaagtaactaaatcaagtagtagtacttctctctctctct

SEQ ID NO: 182770 - DNA, 990 bp, Cannabis indica
ccaaaaaatcaaactatgattcaagctcacatctacaaagaattgaaagataaaaatatggattcaaaatgctatctcaaaatggagagaaaatgataaattttctattgttctcaaggtcaagttataagaataattttttaatccccctcacatctgaaaggggtatttataagctctaattgcttgaagtacaaggtggtcccaaggggacaatgtgtcgcttttaggcttcacgtcgcaggtgcaggaggtgaccttgcgcctcgtacctttgtctggtgtcaagtggtccccggatgtaagagtgtggctgcagtgtaccctatgtcgggtcctacggaccttgtaggtgtgttgcctccactactcatacctccttgctcttagagtttgcaggaggcatagttgtacgcttctcctttgcacgccttgtccatgattctcctataatggtattcttttttatgcgtattccaatttcacctccactcttcttcacacaaactcacatttggcatgacacaacacttccacgcttatgggcttgcatgcacatacatataagcacgcttccatttgagccccttgtagcctcacagcctcgcgtgcaagccccttgcgaccttaattgtgagcgcctcacacccttacatgtgagcccctcgtagcctcccgtgcgagccccttgcaacctcgtgtgcaagtgcctcgcatcctcaggtgcaagcccctcgtggcctcctgtgtgagcgtctcacaccctcaaggcctctcgtgctagccccttgtagccttgtgtgtgagtgcctcctagattctcgtacgaggccctcgcactcttgcacgcgagtccctcacacccttgcgtgtgagcacctcacatccttatgtgtgagcacctcgtggcctttcgtgtgaaccttcattgtacactttgcacacaattagtactacgtgacaagcctaggattcgcttggatcgcccca

SEQ ID NO: 182771 - DNA, 604 bp, Cannabis indica
tttttggttttgttttgtattttttttttcttttgtattttgactacaaaatatcttgatattaatttggtcaaactactatacacataatgatcaagtaatttgtacatttataggtttaaataatagtttatatatgatgcattaaattaattatcaaaaaaggtatttattaatatttaaattattattaatccaatttttctcatagtttcatttaatcaaatttaattaatgaatcggcaagttgtattacaatcgttttctccacaaaaggaaaaatctactaagaacaaaagctccaatcaaatactgctcaaagctttattaaggaatcgacaattcatacagcgtttgctgttgaagaatcgtcgaacttcgctatattttcatgtgagtttttcttgaatttcagctaagatgtttgttataaatgtattctttgtgtctcatttaatgcaaaatctattagttttaaagtctaaaatcttaatttgtgttttttagaagctaattttcgtaatacagatcagtcagttgtagaccgacaaaaaaaaaatgacatatgcatctttatgagatggagtagacacaacttaaaagt

SEQ ID NO: 182772 - DNA, 573 bp, Cannabis indica
gatatgatgatgatcattagttgagttgctatttggtctttgatcagatactctttctctcttggcatctggaatgtgttctggcttttttaaggccttctaagcattgaacatctgccatgcatgtaaatgaccttgattttcctgaatagtaccttgacaatcctctcttgctactcatcatcatcataaaaaacacaaacaaaacattattattattattgttataatatatgcatggacatatattacggtatacttacagatagggtacaaattctgatcattcgtcaatagttatgattagaatttgtacctcatgtgtaggtattattagtacgtatactctatcgtactattatattatttagagtatacttaccaatagaatatataaatttcgatcatttatcaaggatcagaatgatcataaatttataattttattgggaagtatactttatcgtaattttaaattttacgatcatcacagtacaaacaaaacattattattagaaattacctatcgatgcatatacagattctaatcattcattagaatctgtattcgat

SEQ ID NO: 182773 - DNA, 582 bp, Cannabis indica
ataataataatttgacaatactgccataaacttgtggctgttgatggtggactctttatcttaattttctattttcaatcaaaagtattttatttaaaactaaattggccgcaatattcaactctattaattaatatgaaacaaaaagtgaaaacagagctatctaaatcccattattctcaaggatttggagatgcacattccagcaggagcagtaagagtcggcgccgaagcctttctcatcctcagcgaatcagaaccattacgaatttgtactaaaggtagaagaccccattcatcagaatcaaaagaataaaacgatggagctaagcaattactattaaatgagttggtaatgtcggccaaaggcttcctctgaagcttcttctttttcttgatcttcttggaaagttgagatcttgggagaagaaatggagtggtgggtttttgtgaggaagcattgttattctctttgatgttgttgctgttgtaattggtggtacggacggaaaggacattagtgagatccattttaatggttgtactggcaatggtgaaagcaagattgatggaaatgtgaga

SEQ ID NO: 182774 - DNA, 690 bp, Cannabis indica
aaaagtggtgaatacatcatatgcctgagatctaagagtgaggggaaaaatccatgtaaatctactatagtcgtctatgaaatgtatgtaatacctaaacccatctatagaaggtgtgtgtgagggtccccacacatcagtgtgaaggagttctaatggctgtgttgccctgctatttgacaagggaaaaggtaatttatgacttttgccattttgacaagcatcacggaattttaattcttttaatgagttaggtaatgatagatgagatagaatttgttttaaggtatttggtccatggtgaccaagttttctatgccacagattgatatcataaccagcagtagatatcaatacttgacattgaaaatttgaagctgttgaatctttattaatagagtgatttgtacaattgataggtgaactaatgttcacagaatttgaagtacaatcattgttacatgaatgaaagacactgcgggaagaattgtctattgaactatttaattttgaaactgtggatggcattgtagggtggcttgagaaaacttggaggagttctcatcaagaacatataggccacttttaagtttccctcgaactagaccttccccgtgtcctgtcctctcaaagcacaatctgtgaattcagaaaatatattgtcatgagtgagtttagtacacactaatc

SEQ ID NO: 182775 - DNA, 684 bp, Cannabis indica
atacaaaaaaaatttatatataataaaatagaaactaaatatcatctgaaataaataatatactatagacaacaaaaatcatataccatacaacaaaacatatatacctacaataaaaaataaaacaaaataatataatactattaaaataaattgtatatatcatattaacaaaattatatacaaccataaaataattataccatacttacaaaattatatatcatctttatatataataaaataaaaactaaacatacatgatctaaaataaaatgacatacgtactatacaatacaatttatacattatataataaaaaacatataccttacaatagaaatatatatatataataacaactgttgtacccgaaattcggctaccatttcattggaagacacgtgtcaaattaaagagaatatatgaatcaatgcgtgtaacgataattacatttaacggaataactcattaaatttggaggtgacagagtatattttcaacttgcagactataaagtcttatacgagataaagatatacaatctgttgccttgtgtatcaacgagaaaccatacgacattggatgcacgaggtgagacctcaacctcgttaccgtatgagtagacgtaagtgagatataataactatgacaagacttaacgtataatatataatatacaaa

SEQ ID NO: 182776 - DNA, 517 bp, Cannabis indica
aactgcctggacctttgcaacctcagtgaaatggaggctaaagctctctattatggtctccaatgggctcaactctttgcatgttaatctagatttttgtggtagtcggattgccttactgttagttactagtttgaaaagtttagcatctagaaatttaggtttctctgatcttatttcggatgttaaaaatcaattgtcctaatttccctaatgtttgtgtgtctcatgttcgctagagatgcaaatcaagccgctcatggcttggctaagcaagcattagtgttggataatgattgttcgtggtatgaggtattgccctcctactattttttctagttgttgtaaatgacgcttccaattaatgataacagaactttctacaaaaaaaaaaaaaaaaaaaaaaaaatttgatggttattattgaaatttgaagattgaaatgggcagacctaatttcgttgcatttcattgtttaacaatagttgctccttctctttgcctctattttgtagaa

SEQ ID NO: 182777 - DNA, 795 bp, Cannabis indica
tcatatatgtatagcatgtgtcatataagaattatttaattgttaattaaatactaattaaggaaatgaaacggattaatgattccataatcactaataattaaacactaataattattattttgttagtatgaaatgatctaaaagatgtggtacatgcaaatatataacaacctaacacacaaattatgtcactaatattaattaattaatgttacaatatatatacccaaactcatgcatggttaccattaatcttctttttcccgcaacagtcgttgaatccctcattttattatttcgtttaaacacaaattatattaattaattaatctacaatattatattatatttttttttttttttgggttctttctcttcttcaatcgatcagcctctcaatttttttaatctatttcgattgctatatagttaacattaattttaatggggtgtggtgtctcacattttgagcacaaagagccagaaatattaataatggattctgaacaaaaccctaataataataatctccatgatcaagaaactaaggctatattaccccttctttccaattcttactatcattttaataataatgatgatgaggttgatgaagatggtcatgatgaatacagatcacaaagtagcctagaagaggaagactactatgatctcaatagggaattacataatacaaatagcttgaagtttcctggctcacccagttttcgagagtactgcggtttcaatcatcatcatcaatattctcaaggtaaacactagtctctctct

SEQ ID NO: 182778 - DNA, 909 bp, Cannabis indica
gacgtatagcagcaggctgtctaggagaaccaccatgaaccactttatttctatcagtccatatgccccacattatacatagcagtaactcaaagtcttgctggtttaaaatggtagataaagaaagtaaataatcaccattaaacatgttttgagccttagaaagatcaagctgaaacttagaagctttccatatgactctagcatgtttacaaccgaagagagcatgtccgattgattcccaattcgaggcacaaagagaacattcagcagaggttaaaacttttttcttgaataatgcagcagctgttggaagtatgttatgaagcactttccaagcaaaaattctgatcttaggaggcaacactagtttccagaaaaatttccaccagtcactatgattattagaagcagacgagcaaagttgtttctccaaattgcgtacttaaaattatatttttatcttggtgaaatataaattagtgtaataagatagtctaaacttatattaaaaaaaaatagtagaaatgaaattacacattttaatttataaagtaactgattaaatagcacaataaagatttatatagtggaaattatccaaaggaagttaatgtatggttatccaaaaaaaaaagtttaaggtataattttagaaaaatttatgtgaaagcattagttttagtttttttttttttactactttaaaattagtttttttttttgtcatttttacagaattctacctgaaaatctctattacaactagagctacaatctaaattgcaacaaaaaaatcgtacagaaatccctattgcaactagcattgcaaccatttagaaactcaaaccgtaaattatataataaaaaaaaaacgttaaaaaaatagtatacgggtaattctctctc

SEQ ID NO: 182779 - DNA, 1156 bp, Cannabis indica
ctcgatcaagcagttgatatcttgaccaaatctttaaccactgatcgatttgtgtacctaaagtccaaactaaaaatggtggctacaccatttagtttgaggggatgtaaagaatatgttaagtagtaaaagtgattaagacagttaggctataaaattgtctactaactaattgtttgttagttagtttttttttgttttagctcatttcttgatctatgtacctgtataaatatcacttacaccatttagtttgaggggatgtaaataatatgttaagtagtaaaagtggttaagacagttaggctataaaattgtctactaactaattgtttgttagttagttttttttgttttagctcatttcttgatctatgtacctttataaatatcacttatatcgttaataaagttgagcttgtgatgaatcaagattgtatcttaaattatctttttcttttttcttgtttatttctctctgtttcaattacatgctacactatacttgtaactcatggtcacataagtaaattatttttaaaaaatgagcataatgcaattaaatgaagatatttaaaacaatttgtatagttttaggagaattttcatcaaaattttaaaagattcatagtttagtaaaaaaaaaaatagtatttattctaaagattaaaaatctcgtattattgaaaatataaatctataactatataaaagtgagaatgttgttttgggctttttataataaattacaaaattatccttatttactttattaattaccattaacttccaaactaatattgtagtgagttattagtgaaaaaatttattagtaatctatataaataaatatataaaagagggaatgttgtttttggcttcttaaattacaaaaatgacctttttttcttgttaattaccattaaattcaaactaatatgatagtaagttattagtaaaaaaaatattagtaaaaatatatatttttttaatattcttttgaaaaattattctcttgaagtaattttttttaataaaatatctagaacttaagaaatatgtatgacaaagtattttattttttttataataaattattagaaataatatgaaaaataattttcataaatacattaatactttaggtagacataat

SEQ ID NO: 182780 - DNA, 802 bp, Cannabis indica
gtgtcaggcggatactcaaacgtttgcaccgccttaatggtagattgatctagcccgttgatcttttgggaattcgaatcgtgcgtttcccctgccgtacgattggtaggtgaagacgcctgttcctcatgcatttttgcctataaaagccaccacctttccttcatttcggttactttccattccttaccatttttgctcgaatttctcagagagaaaaaattcctcaaagtagcacaaaccgtcttaacacttaaacacttcctgtaattttccagtgttcggttttgccagtgcttctcaactctcgctcaatcatacccagtacccccagttcaacaatcaactgtaagtttttttgcatctttagataataacatgcttacatttattttgtttgttttctgggttcgtacttagagatttctggagtgtgagtgtttgagttcttcgagttctgcttttacgttttactgtattagttgtaggcgtacagttttgtttgaagaaggccatgtatccttcgtttagcaatcgcttagggcataggaaaacttttctcttttcttttcctttttgcaaaaccacttttactgcgattttactgcacccgacacttgttcagggattctcttttgagtttcccaggtgacacgtgtccggagggggcctctttccagcggttaggggacccccactcccttttttctggtttagggtttgatatggggcctaactgctgggttttttcttttcgtttttctcagagcataacatgtctgcttctggctcgaagtctcgt

SEQ ID NO: 182781 - DNA, 557 bp, Cannabis indica
gttcacttcttttatcaattaatagagaaaattcctatcaaaacctgatgtaaacaattgtatatctgaggtggcagtcttattagtgagctgtcccgttagtgctgatgtgttagttaataatgctgatatgttagttaaagacattaagtgttagttaatataaataggaaggctgatttgattgttctaattgagtaaaacttactcagagagacctccaagcttcaccaagtgcttgggaacttttgtaattcttgtgatagcaataaagattcaggtctctaattctttcaagaaaccagtttgtactgttgtgtatcgagtggtttttttttcttcttcagtaaggttatgtttggattttagtggggaaagaaagaagtaaggaaaatattgggtaaaaaaagtgaaaaaaaataaatcacttgctcatgttgatgtgaaaaaaagttagattcaaccaaaattttcatatcaaacatgaaaaattagatttttcttttaattttttagtacacttttttctttcctacagaattccaacttccaaacat

SEQ ID NO: 182782 - DNA, 709 bp, Cannabis indica
ctcatatagatgaacttggtattaaccaaaaaaaaaactttctaaatgctgaaatataaataggaagtgtattgatagaccccttctaggaggtgcattgtagaagcaccttttcttttagtatgtaacttttgttttaaaatggggtacctatttaagctagctatttaattttgaataaaagggagcattatggtatttttcaacatttgagtttttagttattattattaaaaatggtaaatagcgatataagtacacaaaattttaagtttgtaagcagcatatattcaatgttcatctttagcggtataagtactcaatgtttgtgaaactgtgattttcctctaatttcgtcagttcaaattctcttttgaatttgttaaaagaacattattagaaataactgatactacatgtttctgtctatacccaataattaaaaatttagatcttatatgtgtcatatctaaaataataacagagtctttacccattatttatagctctatttaccttaataataatattattgtccactcacaagacaaattaataagtgaatgtacaataaattaaaaagaagcaagagtttttttatattattatttattttagaaaagtttggtggtagagttacaaataaaatataaaatggagatttgctctaattatacaatcgatggcacttcattataacatcactgga

SEQ ID NO: 182783 - DNA, 718 bp, Cannabis indica
atattaattaaaaattaagtatataaaaattatactaaaaatttatccgcaaattatactaaaaaaaaatcatatgaaattatatataagaccgtgcctaaaagtaaatgagagggagagaataacaattaacagcacctgaaaaaatccataatcttggcaagcttttgcaagggaattgatcactagggatctattggaggattgaagctgagcaaaatcgatgacaggtaagttgatgaggttagtattattaatttccaaattgtaatttggtctctctgcctcactcagtatgtacttgtttggaactttttttatattttctttctccattaagcttctcactcccatttggtaatactcatcatatgcacccaccaacgacgtcgtttcatcaccttcattcgccaaatccattattcccttgcctcgtcacctgattatatcttgctttcttattctgatcaagttttccaaaaagatataatatttagtctaaactcaactaattataatataccaattaaaactaaagatgattcgctataaaaatatataataaagagagaaaaagggaagctataggaaactatatagaaacgagaagaagtgaagaaatggtgcaaccttgaaccttataaaatataaggataccatctacacttatacatatatatatatataaaataatcgaaattagaaatgaaaaataata

SEQ ID NO: 182784 - DNA, 742 bp, Cannabis indica
atttaaaataacctgccttgggagctactggaatgaaactggactgaggacaagccgaagattctgcagaggagttgtgagcatgaaaattctgagcctcatcataatcttggagaatacatgcaacctgaaattcaacagaggaaaaagaaagtcctctcttgttaaacatgttaatatatcagcggttccaaatttcccaaataattccaaggaatactctcaaatcagttttagacaaatcttgaaaatctcttaaaatatactccctaatatcacaattcctagccactcgatacaaatctttaaaccttgaatctttccactctctcaaagctctggaacactctaatagagcatgggtaacagattcatgacacttagagcaaatggaacaaagaggggttgacaagatttttttatggaaaaattgagagctgtaggaagactgtgatgaaaggccctccaaataaaatgctttatcttaggaggcatttttaagttccaaagggtcttccaccagctgacaagagaagtactgtttgaagaagagggtaaaggattaatagacttggccaaatggtaagctgaattgacagtgaacaaacccgagaatgatgctcccaaatgagagtatcatccaaagatacatctgcaagaggaacagtcaaaattacctggactacttcctcatcaaaaatcatggccaatcttctctatcccaacaaccatcaacattaat

SEQ ID NO: 182785 - DNA, 783 bp, Cannabis indica
atgaatcgatatataccactatttatttatgtgagcacatatgtgatgtattaatcgtgtaaggacggacccgtacttacccacgctcactatgtcttaatttttttttttaggttgagttacacaccaattcataaatatttttttcgctgacttatataaatatatttataagacaagtttatggtcgagctagcaaaagttccctaccggtaggaaactttttttgaccattgattttagatcatgtggttattattatgtaaggtatatactcttacgataggactgcttgtatacgatgaaaactttatacatattataataatatttatttttttaagaaaaaataatattaataatcaaaaaatttattaatttttattttgaattattattaattttttatgaagttaatttgaattatttttatattggtatttattttcaaaaaataattgcttctcctaaacttatttttgctagcttctcatttttgagctttccaaaatatactgctatttttttttatgtttacatctagtcttttctttattttgcttttaggttgggcgtagttctagttgactgtttgttaagtattctggtttttatcttgctgttgtttgactgcacttttgagacgccacttataaaaaaaaattaattatgtcagttagatattatttttcttgcaaaaaaaatgagtttaggagaagtaaattggtacggtaccaattaaagagcatctaaaattatttaagtgatcctacataagaagaa

SEQ ID NO: 182786 - DNA, 618 bp, Cannabis indica
tctggaactattggatgagtatattcatcttaccacagagtgttattaaacaagttgaaaggctttgtcgagggtttccttggggagttgaaggtaatagatgcaaaatccatatcccttcctggaaaaaagtttgcctccctaaaaaatatgaaggccttggttttcttgatggtcctacttggaatagagttactatagcaaagtatatttaggcaattcaaaaaagcatgatgtgctttgggttcgctggattcattcaacttatctgagaaaatgtgacttttggaaaactcatataaagttggattcgagttggtattggaggaagctttgtgctttaagcaaagcttttccaaagctcaaattcttactgtaggccgtaagggtaagtttaaagcttccttactttataacactaccattgttcaacaaccagtgttatattcagatgcggtttggaatagagttagtttgcctaaacatagatttatgttatggcaagctttaaactctcatttgctcactagggatcaactaactcggtttagtgttcccttggagactcttctgttagttgtttgtgggctctttgatgagagtcatacccacttattt

SEQ ID NO: 182787 - DNA, 706 bp, Cannabis indica
aaggaaaacttatcataaattgtaatggtgaaggagctgtttttgttgaggctgaagcagattgtgtgatgaaggagattggagatgttacaaagcctgatcctgacacttttgggaagctggtttatgatattcctggtgcaaaaaaaatacttgaaattcctcctatgatggctcaggtttgtaaaaaaataatatatatatttatatataaaaaaattattatagttaattgattttcctgtgttgttgttgctattttttttttttttttgtagttaattttttaaaaataaataaaaagaaaaactctcgaaatatattatatatatatatatttagggttaacagttttatgggttattttataggagctatttcagttttacactttaaaataatttttatgcatttttacgaaattctacgtggaaacttctattgcaactagtgcaatctaaattgcaacaaaaaatcgtatagaaacccctattgcaactagcgctgcaaccactttagaaactcaaactgtaaaatttgaaaaaaaaaaaaaaataaaaaaaataaatatatgtggtaattctcctattttatatggtgtgtttgaattatttgatgatatgatgataagatattgagtttataaggcattaatattcatccttaaattttaagttctttaaatataatgtaatatattatatat

SEQ ID NO: 182788 - DNA, 513 bp, Cannabis indica
ggataggaattcccagtctaaatgggaaatggagcgaggatataaataattagtatattagtatatttttaaagttgtattttgaataataattagtatactaaaaaataaataatgtgtaatatttaatttttatttagtttaatattttttatacatttaaatattaataaattttttatttttatttaggagattcccggttttactaagagattttccacccatcataggaattaaaatccttaatagggatggagatacaggagcactctctactaatttttcaccctgtgtacatccctacctatgagattatgtatttggtggtctccataaatattaacatttgaaaataaaaatacaataaacggagcctaaaatacattcaataatgcataaaacaaaacttataatatgaatattccttttttctaataaaaataaaaaaggtcaaaatccattccctacttaattatactaataacacatggaatcccagttaccaatatt

SEQ ID NO: 182789 - DNA, 824 bp, Cannabis indica
tagttgtgggaacttgaattgtgacaactatttataggtcactaatggtcatatttgattcctcctccaaattctccgatataaaaggtcaactttaatccaaactaaataattgctattatttggtaattattcttttattacggacttccaacccaattattcatattttaaatgtaaactatactgaagaaaacttaataataaaatataaataaataaataattatattataattaaccaaaatgaagttgtgttttattttattgattttcaaattttatttcatacaacagctaattcttcttcaacctaaactcaaaacttcaacctttatcttctcctttccaacgaaaaaacaagcttctccgcttgcatttacatggtataactatagcagcagcacaacacacattttttttacgagttttacatctcagcagcagcaaatataagggaacgctactaaacagcaacagagataacagagataatgagaaagttaaacaaataacagctacactgtttagaatggcacacataataagctctaccacctgtacctctcaagattattcctaataacacttaaatctgcaaaattcattaatgtcaagggctataaaatacattttataaataagataaatttcttaatttataacaaaaaaaaataaaaataaacaaatatgaattcatgattcggtgcatatagttacagataaaaaataaccaaattaagtacttaatacatatttcacttttttagctaaaaataaaatgacacatacctcgcctgcaatggtatgcatattaagctctg

SEQ ID NO: 182790 - DNA, 543 bp, Cannabis indica
cttgattgggcaacccaataagcacccttgacagagaattgactcgtactcgagctcttccgaacaagaaaatcttctactcgatttctccaatcttggcacccagatcattaccaaaaagatatctcagaaaaccatgattccagcttcttgtgttgctatacattaagtccgccacacaaagtaagtaaggctcaatgcctctgatattttccatgaccgatctgaactcatcataggccaaccacggaatccatggtggccaccaaacatctatgttttcaccaattacaatgatagaacaagcaccttcagctacacaagatcgagctttcaaaatgcccttccaaacaaagttatccgagttcttttccaacacactccaaaagctatccctaggaaagtacttggcttccatggcttggcaccatgcatggttttcattaatagcaagctgccaggcaagtttagataggagggagtcattgatatcctcgaaacgacgaactcccaaccccccccccccttcccgtttcgttcggt

SEQ ID NO: 182791 - DNA, 666 bp, Cannabis indica
aaaagattatttggttgttattaaaaataattacaaaattactaacaatcatgatttatatgctaaaaatatagggattatttcataaatatacaaaaatgacaaaatttttacatttttgtggatttttttacaaaattacagtattgtttttctgttatttttgaaacaaaattgttttaacattgcagctacgaaaaagcaatataaatttttttaggttaaatactattttggaccctggttttgtaaaaattaccaattggaccttctgttctgttaaataacaaaatggacattgtattttctaaaatggtaaaaatataaccctaagcttaatttttgacaattttttttaatttaaccaacttgaagacaattcctaacacgaataaatacagaaaatgtaaacagttttgtcataacacctataaatcggattattattaaatttttattttgacaaaaaatcagttcagggtcctatttgtaccattttagaaaatacagggtctaattcgtaacttttgcaaaacatagggtccaaaatggtatttacccttttatttacaacaatacatagtgaatttttttacgttgttttcagaacaacacttatttcacgttgtcactacgtgtaagcaacatttttttttttctaaaaaa

SEQ ID NO: 182792 - DNA, 668 bp, Cannabis indica
tgtgttctaaatcagaagtgccacgtggaagtagctgagccgttggatgtgaaagatcagtataaatatagtaatcctgaagatgatcaagaagttactcctggtgatgactatgacaagtatagacaatatggtgatgttccaagccctggtgttggtcactgattaagactctctgtctttactattgtcatctttctttgttttatcttttagttttatttcaagtcttatatacatatatatatatattatatatatatataccatctatttgttggtacatatctcgatatctatatatatatatatattcacagctatgtgattcccttattgtagtttttttattcatataccttctttgtgataatgtttttcttttcttttcttttcatttttgtatataccgcacattattctcaatatgttctctgaacattaattcttttatagttcaatcacatcatatattatgttggttaattaaatttaaagtaatataaatctctataaatatggaagaaggatatgacttactgtattttcctttaagctaattaatataataaggttacaaaaagtaaatatttttactaataaacaattaagctgttatgtgcaataattgaataattttaactctaccatatatatgcaataattat

SEQ ID NO: 182793 - DNA, 759 bp, Cannabis indica
ttctttatgcaaggatcattgtcaaaagactcaaaaggagatggaggacatgagaaattatccttatgcatcagcagttgggagcttaatttatattattgatctcactttcgggcaatgacattaagtcttaaaagcgacaagaaatcaatgagatttaaacaaaatataattattagttagcaaaactaagaatatgatatgttatagaggttcaaccccattattatggaatggcttactcccctttttgttgaattaaacttgtgacaagagaagcaaaaaggatttgatctgtctcaaaatatttatagaaaaaatgagcagtgtaacggttctctcaattaaatgaatttagatccttttacaatggaatcactccattatttataggagaggttaacagaagatattggttccccaaaagctatcgatccattaaaataaggaataaatgacattactaaattatgagaaatatatgtagaaatacctttaaatcgagatttgatgatatattaaataggaaactatattaaatgcctgctgtcgaaacattaatttaatttgatgtttgttgataattttcttgggcagggtgaaactgttgtattgccacacgtacatatgttttcttgagaaatttcattgaaccgaggcttttatagtatttttagctttttctagggtttaagcttgttcttgataatctttgatttaggttttgcattcattctgaaaaaaaatcttttctttttg

SEQ ID NO: 182794 - DNA, 1013 bp, Cannabis indica
catcatatatagctgcagattttgttttagtcattttcaagagagagtgaagtagtttacgtcttttttgatagatttgagtgaagtagtagtttacatagaacaatattaattgttgaaaatgattcccaaatgcattaatactagtctcatgatttttttcccaccatcgtcgactccatgcaacaatacacttacaattataagaagcacggtgacggtgatgataatgatgatccagactatgactatgccccagctgcttgcctcacccccttcgacggcgacggcgacgatgatgccccagactacgactatgctccagctgcaaccatcaacatccgcctccgtggttgatctatttatactactgctgaattcacagttttggaaactagatcgatcttatagtgaattatgatttttgcaacatatagtctcataacagctttcttaattttgaattatcatagttttttttttataaattgcctttatttttatacgcttcatgactatatagtttcaatttactccttattataatagttttattattatcaattgtaataataattttctctgttaaagtattcttaattaaaaagttgatattaattattttaatatgcaaaagaaattaaatatttttgtttggtaagcatatatattttttacgagtaaagattgagaatctcttagctagttaggaaatatacattaataataacaagtcaaaagttattattaaatttattcccacaaacatatatatacataatataatgacttagtcaccatttacaactaattaattatccatataaatatatatatatatatatatatactagtaaaaagttacgtgcgaggcacgtatactaaattttatgctaggtattttttattatattaaaaggtaatacacttaaaaatgtttatctcatcttggttcaacccaattttatgttgttcccataggattgtgtgttagatatgagcttagaagaata

SEQ ID NO: 182795 - DNA, 583 bp, Cannabis indica
tgcgtatagactgcaacaagaaactcatggtaataatcttgatagtgctgctactggtttttggaagatgttatgggcgattaaagtaccgccgaaggtgcttaatttcctttaggagagcaagtgcgaattgccttccgactaagtttcttttggcctctaaacacgtccaagtcggtatgctctgtcccttttgtaacgctgcccctgaaactatcttacacgtactggtgcgttgtagtttctctcgctcgtgttggcagcagacccgagttcgggccgtagcacctggtgcaatggtgtttcggacctggtttgttgaaggtttggcttcttggagtgaagccgagcgtctcgaagctgctatgaccctttgggacggtgtggaaagttcgtaatgaggttgttttggaatgctatttctccttcaagtgaagaggtatttcacgtggctaatgtgaatttttcggactggtgcaacgcacaacagttcgaaaaagaaactctttcctgtgcaatcaagggtgttgtgtgaaaaaatggtatcctccaaattttccttgcatcaaagtaaatgttgatg

SEQ ID NO: 182796 - DNA, 771 bp, Cannabis indica
aacctttaactttaatgattattgagaatccattaataatacacaagtcattgataaaattctaataagtcatgttatttaataattgcttacaatttctaaacaacatgcatgttgaacaatttgctctttaaagaatttttggttcatccttaagatgatttattagaataataagatagatgttttctagtgattacattatatacaataagagttcaactacaatattgatttgagacacaaattaaaactatgaaatgcaaagaatcgaaattgtagtacaatataccatgaataaagaaatgaatatcctaaagagtctatcattagtaaagttgcctaatggagtggagaacattaattaagcattggtttttcaccaataaatactcattaggaaacatggagaaacataaaaatataaaacaagattcattgctaagaagttcattttgaactaagaatcaataacaaaggagatttacattctcacttgtctttataaaaggttctataatagtaaccttagcatttgttgctcgtttcaattcattaataaattccaaatagtgaactagaggagaaggaacacaaactactataaaaattttcctctgatagtcgtgaacatatgcaagcttaaagagtctggaaatagattaaaataaatttctcacaattggtattttatcttgtcatctttaattttaggtttgaaaagagttatgaattatttatataacagtaagtcagtgggagtaatattta

SEQ ID NO: 182797 - DNA, 761 bp, Cannabis indica
aaggacatgtgttacagtgaaatttttttccatagacactcgagatcagtctcctatgaaattgacacgtggatccaatccttgggtgagttgttaattaacgactctctgagtgttgacctcgcttgactgaaactcgcgagatgatgcgacctttgacagagtctagtcgcatattgttccccaagtaatataaaataagcaggagcaagatggggtttataaaaagtcgtgcatataccgtgagacatatgtgatgactaagtagccttctccttcgactaagtaaagatcgcttctttacataatgaactagtccaaacgacaaagcgtactaaataactcgatagagactcgctgtctcatgttgtcgatgcatatgagacatccatatatgtgactcagacagaacgcagacaccttagcacgaggctcataaaccctccttaaaaagatagaatgcacccaaagcttgcgagcttgtcaagaatatgaacaatcaactcgcaccctataggtcacatacgttgccatacttattaaaaatagatttaaactattcttcatttatttttttttcgtttattcttatttaattttgataataattgtaaaatagttctataactgatcagttatgtgtaactaaaaagaaatttactttgtatataaagaagtgatccaacatgaataaattgcatcgaattcctttgcaacagtggactagtagacagtgatctgactgaaccattatattccct

SEQ ID NO: 182798 - DNA, 577 bp, Cannabis indica
ttcttctgttcaagtcttgtattgctaatttgaaccctgtatttttcattattttttttttgtttcactactgttatgcaactattaaaaaactaacattcaagtaattagcaacgagttcaataattttatacaaactaaccagttggtcgaagtgttttcttctttttcgctatcaaatgaaattcctgcaatgttgattaacaccataataaaacgataatgcaactacaaatcaacttgaaaaaacttggaacataattacacgtatgtggctgtagattcattcgaatttttcttttctttttttgtttataaattaatatattcagtattaaaaattagaaaacaacgacaatacaactgaatataccttagctataatatttatgctttttttctttatattttgtcattataccctgttatctcaatttttacactctgacgtggcatcacatgatggtgacacatggaatcgactccgaatatctgctcgcagaatatattccgaacaggatgcctcgtatgcatgctcgaagcaaagcgatcaacaatccgcgcagaacgaccaata

SEQ ID NO: 182799 - DNA, 518 bp, Cannabis indica
ttttttcctgatggaagctttgtggtgaaagaatttagtgttcttatcaccagccttaagccaatccacacgagccttttggttctaataaatttcttccttgtgaagaacgacttccagtttggattggagggtgttggcttgggctaaaatgtgtgaattaggcttagtgatgttaagaaaaaggtcaagctcatgttgagtgttggaaatttgcctcctaataagattttgagattcactccagtctttaattgcctgatgcaagtggattgtttggaaagaaaactgtgaagaggagaggaggaagagattgaagtggaaagaccccaggaagattagatagtggaagaaaaagaaacatcagtgaaccagtggttttcaaaaagaaatcgagaatgtttttgggggaaggtttgaatttgtcttccagttgaacttgaagggctctgtggtcagactcgtaaaattccaaatggaaaagacatgtcgagagaaacaggttattccaagattga

SEQ ID NO: 182800 - DNA, 668 bp, Cannabis indica
caactaaatttctggcttcgtcactgcatactattacactcatccgactgcagtactttactatggatgaatatttaagatattcaaactcaactaagcatgcattaatataatgaaatacaataaaattagaattttaattatttaattacttactagttatgaaaaaaaagtaacaagttactagttactaaatttttatacatttattaattttttgaaaaaaaatttacataaatacatgtataaataataattcatatctcacactaacatcattttaaaaactttatttcttaactaattaaatttctcctacctcattctcattcacaataaatatatatacatacatatatatatattacttaaaatatatacaatacaattacaaaacttgcataaataatatacacaatatatatatatatacataatacatataaacacatatttaataaaatacaaaatatatacatatatattatatatatatcaagttaataaatatttaccttataagcgcaatccgacgaccaattgcaacaaaaatttggccaccatgcacacaaaacaacataatgttaacaaaatgaaaaaattcccaaaaaaattacaaaatcgaaaataaagcaatgtacattaataaaatgaataaaaataatatt

SEQ ID NO: 182801 - DNA, 733 bp, Cannabis indica
aagcacagaccacacatacaagtctctaccgtatagccatactggtataaacttgagggcaaatatttacctaaattttgataatggcgatgtggcaaggatgatgacacgtgatctgaggatatcaaaattgagttaatgaagaacatgtagtcacaaccgtgagtcacaactatgagtcacaaccgttaggagggaagtttaacggtcacctctcccctagcataagcaaggtggctactcccgggggagggtggatgagtactctcacaatgggctaaacaatcaccacaccctaatggagtcaaattagtctagggggtatacactactactcctacccagaaggtaacttatctacccaaggtgatggaaaaatctaggggtatacctcttacccccctacactcctatgggccaagtatcacactctacctacatatgacatggttgatataatacttcacattatcaaggctacatactgctaagtattatgttaactcaaacttttagatctccttgttttgatgattaacaaatatttgattattatttgttactaatgatttgttgattttgtagcaaaattaaaagaaaaaataaatctttcatgataaattggtatttttaccaaacttttgtaaagcaacccaaaactggattagcatatcaagagtaaaagattcatcaggggatcaacaactcaagaccctattcaaaagaggtcttc

SEQ ID NO: 182802 - DNA, 669 bp, Cannabis indica
agtgaagatttatgccatacacaatataatcgctagacgactattgctcaattaaagttaatatctttttgagaaaattatactctatactttttttatattgctctcttttatttttaccctctttttttaaagctatcatttttacctctttttttaaacattgtaccaattttacccctgtcacttcaagatactctccatgtaactctcttatgtcagggtattttgggtacaatacatataaaaagaggtatgtttcaaataaatataaaattagaggtaaatttgattaattgattaataaaaggggtatttttcaacttaccccatttttttttgttttttacatcaagtgcttttttgagaattttttgttttttgttgaggcctgactccaatcaatggtggtgaacgaaagttcgatttaatttttaattatttatttcaacagacgtgctctcaagtctcaactttcattatttttattaaaataaataaataaatataaattggggataagtatagtagtagtctagtagatagggaaggtttatcatgttggaagttggaactgcgatccatctgccacctctactcaaaaacggtcaaaccataaacagttccacaaaaaaaacttcacaacaaaatttctactgcctctatccg

SEQ ID NO: 182803 - DNA, 536 bp, Cannabis indica
tttcaaaacactaatattcccaatcctgcgataatctgtttgcaaatcctgaagttttcatactagttttttatcattttaaaagatcaagctactttcctttcagccaaagagtgaaataacaactttaaactgtctacaagttcagttgatgtcaaaatcaatcatattacaccaagtagtaactaatacatatcaaactataaaattgttggtacttattttatcattctcaaggggaaaaaatgtactttcttccccaatataataatcataataacaattctactttaataaataaaaatgaaaacttcaaaccatttcttagtaatccgtgatagaatagctgacgaatatgccacaagcactacaatttcgctatgaaattttcaaacaataagcgagtgattttctcactctgaaagcaagtaataatcaaatgaaacagatctaaagactacaactttatgtagagaattacacatttccaaagagacagatcaaaataagaacaagaagatcccaaccctaactct

SEQ ID NO: 182804 - DNA, 790 bp, Cannabis indica
catctttaaaaaagatttactttaattcaaatcaaataatacagaaactgaatgctaaatgcactctatattagactgtactttacaccatctctatattatgtatgatatttttacataatatttacatgtcatgcattaataaaggagagtgtaaaagaatagagtttacttagcactactaaaatatataaatatatacaagagaaactttttgaacacaaagaccataaaatgctgcaatgtccccactatttatcattcatttatgacatgaggaatatcaatggaatgaattaagacagctgaacttgtacaataatttcctttttaatatcagaagaactaacctgtcaataaatgtatactccagctgctcccctctccgctcagagcaaagggtgataattggccccacataccttcaagttggcaaacgaaaaagtcagacaagtaaatgccttgtatagccaattaaaactaatgccaagggtgtatgagagcttactcactaggaataatgattgtagctaaaactgttggttcccatgaagcaaccactctttgctttggatttgagggcaatgcggcaggattttgaaccgaaattttgctacaacagagccaaaagaaagtttggtacatatgtgagtaagaaaatattctaagatgagatgtgaaagtggaaaatgcacaagaaagaatatattatagttacatacctcccatcagcatactcaaaaaatgtaaggaacagttggaattgtagaaataacatgagctccgtatt

SEQ ID NO: 182805 - DNA, 691 bp, Cannabis indica
tgcttttctattgctcgccttcctatggaaaaactttgtgttcttgtccccatcttttaaccaaagcgctctacttcgttgcttccaaaacttctcctctttgtcaagccaaacattttgtttccgttccaattcctgcatttgttgccaatcctgtatagttgtgcttcaggtaagtaaggaaattttatcttcatattcctttaaatgccttgacatctctttctttttggttttgttccattgttggagagcatgcccacattttcccagccgagtttgaagctctctagtgttcgaaactgtcttatcatgttgccaagccgactgcacaatattagaacactcgttgtcttcagcccaagcactctcgaaatggaatctagtgcgccatctagccttattatgattttgtacatgagtatcatattccataaggagtaaaggacaatggtccgagtttatacgatccaaatgacgaactttcattgaagggaacatatcaaaccattctacattaccgcaaacccgatcgagtctttcaaagatgagatcatttttcctcccattgcaccaagtataatcactttcctcatatacaacatctcgcaaatgacagctatccaaggccttccgaaaattgttgatgaggtaccttggcttgggaaggcctcccattttttcgctttgg

SEQ ID NO: 182806 - DNA, 842 bp, Cannabis indica
aagtattttttggggcagggtgtcccattttaacatgccactgattgatattatatttattagcaactaaagccattacaggagtaagagaatgagtgagaaaagtagtatttttattaatgaaagaatcattacaagagatttgagactgaatgaatcagctacactattacgaagggatttctttagctgatgtagaatcagtaaaagagatggcagtagagctaggactggtaggggcgagttgacattgaaggtgaacatctggtgtgacaaaggaacgatgagagagagtgtatagcccattttttaaccctccccttgagtaagacagtccctgtggccttgtccttgacaaaacaacatgttgagtgaaattctaagaatacatggttatcttgggtaagctgtaaaacactaacaagattctttgtgatattaggaactttaatgacagaattcaatcttaaagggagatgagaagaggttaaagaagcattaccaacatgagaaatgggaagttgctttccattacctacagtaagcgcatcagtgcccagatatggtgattcagattcaagtggttccatcccttgagccacatgattggtagcacctgtatccgcataccagtcgtaatcttcaatgaattcaggcatggtatgagatgagtaagcttgagaggaatcgtgatcctctatttcagtaagaaatgctttcgaatcgccagttcttggagtcacaaagttcttatcgaacctataatgacatatggcagcggtgtggcctggtttatgacatacttgacataacaatcgaggaattgaaggagggccagatct

SEQ ID NO: 182807 - DNA, 679 bp, Cannabis indica
cccattgttctttaagagaaccggtatagatatcataacctgtaatattttcccaatatttaataattcaacattttaattcacatacaacaacagtaaaacaacattgaaaaaattgacgtttgttattttgttttcgtggtcctgttatgatttgggggcccatttattatccatatccttaatttataatataatgcaggttattaaccaagaacgactctacaacaacgtataatatttcaatgtgaattaatcatcgattttttttttctcaaaggtgatgtatattaatttatattttccttaatcttgcatgtatattaatacatttttagatgctactgcccgtttttatttatgaattccaaatctaagtttgggcatcatttttaatttagtatttaaaagaattttgggtggacttaagtgtctaacctctttgtttcgtttatttcaggctttgaagaagatattgggtgttcatttgttatcgatttctctttttttgcttcaatctcgtcaggattaatggttttttttgggattttttgtgttgttctggtagttatgtgcgtcgctattgaagatggagcattgttcttgctatctgtgtctacacataaagaaaaaaagggctaagggcagtataaatgaatttttttccatgtggcagtaa

SEQ ID NO: 182808 - DNA, 495 bp, Cannabis indica
aaagtgtacaagaatactaaacgaaaactcaaaatctaattctttttacataaaaaaataaatacattattcacactaaagctatcatatgggttataatgtaaaaaaaaaactatactataaagtgagaatcaaggatttctaaaagcttgtactcgtcaatggtagtaacaagaaaacaataagaaaatgagatttcaagacttacccactaatgaagtatgttgtggatgcttgtgggaagattggattgttaaaaagaagcaaaaacatcatgaaatggagaacttggggcgttgggttgctagaggaagtgaagagtttttttttcctctttttcttgaagggaatttcaaacaagagagagaaagagataatgaaatggaaatgaagagttaagccaaatgaaccttatataggttctcatacactttcctccaaaaacttagtgggtagttacttctcctcaaaaatagcgccatgtagaagattaag

SEQ ID NO: 182809 - DNA, 778 bp, Cannabis indica
ggtaaaaatgttaatatccttttacaaaagagtaatattggagtgaatgaagattagatagatgagttttctattcgtttgctaaaaaaaatcccatttttcaatcacccattttcccaaattttcattttcataagtaaaaatctttttttttttcacaaaacaatttcacaaaaaaaaaaaatagacttttgctcttaagcaattatgaaatgaatgaatgttacatgagttttctctttgtttacctttttgctgctaatcgatatatgattatttatttatgtatatattatatttttcattttttgtgggtgtagaaaatagatatgtcggataaaggtgaacatgataaagctattgaacctgagatgaggcagaaggaggttgagtctgaaagtgacgataacagtgatgatatatactctgatgaggatgattgtcatgaatttaatgccatgaaagccatttctaatgttgccaaatttgtatgctctacagaagttgatcctcgtattgtctcgagtgattcttttacagggttcatgaagttacttaatcctcactttgagcttgattatactgctgttcagactgagtgtgtggcaatttttctgaaaagagaaatcgaaaaatcatggaaatgttggggaatttcgatggggagattagtgtttctgttcgcgaaatgggaatgacgaaaaagctttgtgctcgtttcattacatttcattgatgaaaattggagtttgaagaaattgggtaaatcaaagttttg

SEQ ID NO: 182810 - DNA, 834 bp, Cannabis indica
ctcaagatcaagtgaatggatcttagattcagggtgctcatttcacatgacaccaaataatgaactgtttgattcaaaattggaggatcacaagggtacagttctgttggggaacaacaaggcttgtgagatacaagtgattggcacaattcagttgaagaatcatgatggaatcatgaaaagtctgcagcatatgaggtatgtgccaaatcttaaaagaaaccttctttctattggaatgtttgatagattaggttttgttgtcaaaattgagaatggagtaataaaaattgaccaagggtcagaaattgtgttcaagggaacacttaagaatggtttatattttctggatatcaacactataacagggagtgctgcacctgctgtaaattcagaaaagctgagtcatgtcaagctttggcatctcaggttaggacatgttagccaaagaggacttgaggagttgaataagcaaggtttttttaagaagaaattgatagaaggacttgagttttgtgatgaatgtgtgttaggaaaagcatgcaggctgaaatttcctaaggctgagcacaacaccactgaaaagcttggctatgtgcattcagacctttggggaccctctagaattcaaaccaaaggaggtgctcactatttcataagcatggttgatgatttcagtggaaaagtgtggattcatctattgaaaaagcaaggatgaagcactgctacatttgacaattggaaaaaggctgctggaaaatcaaacagggagcaaaattaaggtattgaggactaaccatggccttgagttctgttcaaatgagtttaatgaat

SEQ ID NO: 182811 - DNA, 501 bp, Cannabis indica
taaaatattgaaggtttaattgggtttcataagtcatacaatcaaattttctttctaatatgattttgtacttttttttttacatagaagaaagcaaagccactacaactaacaaattaattatctagctaaaagatatacaaaattaaaatataagtcacaaaaaaaaaaaaattaaaatataagtggttaaaacaaaacaactaacataagattaagttattgctatgtatgcttaactttcctatttaattaaaataaattttttaattttacactatatagtaggggtgtgcaaaaagtcatctaatccaattacaaccgaccgatcaaatctcaaccgatctaatagaatcggatatccaattataattggatcggatcagatgtaaattttgaaaatccaatcggatcggatctgttattggatgtgacatccgtccattggataccaaccaaccgatccaattatcatccaatggtcatctaattatatttata

SEQ ID NO: 182812 - DNA, 647 bp, Cannabis indica
acactaacctttgatataggatccgtgggtcgcggtggtcgtggagaaatgggtcttcagtctgtcagacatggtggtcgtcagtcacagtcgttgtgggtggtggagaagggtgttgttgttggaaattattttaccaggatctagatttactaacaagtatgttggattaacaacctaatatgaattctaaaacaatgaaaataaacacatataaagttagaaaaccttacagtgggtgcagcggaataatatgactccttccgttcagatctctagcccttgattcctttctgtagcagagcatcaccaagatctgaacctggatcttcttttctccttctttgatgcagaaattccatagtcttccatactatgattgagataccacttgatgtgtgtgggcactactcatctcacaaggatttcgaaatttctctctcttttctctcttaatttcgtggcttatcatccatacaagagaagagagcaaggttgctttatatagggaaaagggagagcacaactttccaaataaacagtttccttaattactgtgtaatcaattaactgccttatttagtgtgatccaccactttcctattatagctaggctttgattagcaattacatggcaattaaaaaaa

SEQ ID NO: 182813 - DNA, 532 bp, Cannabis indica
aatactacttctcatcatcatgagcctgtcgtggaattcccattcagcactggatttgttggtgaaaagcctcatggactggaaaaagaaataaaaatattagatgatgacaatattagtttgacatgggaggagttgggtgttagagtttcagatggcaaaaatggaccaaaaagcattcttcaacatatcactggctctgcccagccaggtgaggttttggccattatgggtccttctggctctggaaaatccactctcttggacgctttagcaggtatgtatacactatatacaacttaatttcaatatcagtacacattctcgactttatcaagtaaattgtttagattgattttctttatggtgtgatataattatgtaaaattttagaagattgtaagtaattatttcatttatttttatttgtttttatcgaaattaactataaaattaacgaaaaaaaataatgcaaaataaagggagatgaaaaaaatcagcagattttagggaagatgaagctttttcctct

SEQ ID NO: 182814 - DNA, 647 bp, Cannabis indica
ctatttgaaaaagagaagaaaaaacatgggaatgcctttttgactaaagtacccaaaagaattacatgaagctaaagcttactgtatagaaagcataagaaaggaaataacaataaattaaataacttacatttagacttctcttggtccagtgtggagtctttatatatgtaacacacttatgtagatctgtagtgtcttggtcttcagatttatttaatatcttggtcccctgaattcagaaatcaaacacagatattctaagtaaggtttaacacagcactcagcaaatgccaaaagaaggccatggaccatattcaaaagatacaaaatttaaatcaaacagtgctaagttaatggccttccaaagcataattgcaatgtcccaaaaattaaataaacacttacttaccatgttcttataaaaatctaggacatcacctcggactgaatccatatcccctttaattacatcaggcttgtacctggttcaactctaggaattagtgcacagttcattctttatcaaaagatatcatatgagagcaaattaggagaaatatctaacaccaacaatcgaaaatgtaatcacataatggaacactaatctgatcaaaacactatccccacatactatgaaaaagtat

SEQ ID NO: 182815 - DNA, 797 bp, Cannabis indica
  modified_base (647)..(647): a, c, t, g, unknown or other
  modified_base (756)..(756): a, c, t, g, unknown or other
gttgattaagttaattctatcaccactcgagagaggttaatagattatattaggattcttgaaattacaaattatagaataaattgagataattggtaaactgagattcatggtttgaaataagaaaattaatgctgtaggtatttactttccgattaaaattgttgtttttctatttacttttcaattattttattattttattcttaatcattatttactttgaatttctaattgaagcttaaaaccaaaaactatagtaattagtgacatttaataatcaatcattgtgggttcgacaacttttttagaattaaaattttgctataacaacattgtacgtttgcagtaaaaattgtgtatcaattcttcctatggatgcaactgtggacatgttgactaaggaagatggggccgaagaatttggtttaggcataacacctttgttaatgaaaagaatctagttttaagtttgttctagagtggagcttggaataccttaatcgttaccagtgtgctaatcgtaaaccatctgcaatcctcttttcgagacgtcatctggggttcaacccgttggtttttatggtccatatcagagttgaaaagtggaagcggattcgataaataattttattaaatatgaaccntaaagcccaaggatctcaacataatatatatagattaaatctaagctaaatgaatagagagataatacctcttgtagcctatcggggtgatccttgctatcttttagtnttatatcgatattcaattcaaaaaaatttcagtaagagttc

SEQ ID NO: 182816 - DNA, 643 bp, Cannabis indica
attggtgtatttcaatattgagtttcatatattttaatttaataaataatataggagaccctatttatatatattaaaatactaataacaattaggaaaatttacacctaattacataaattgcaattatattttttactattataaataaaaaatatgacgttgtaccttaccctttttaaaagggttgagatgcaaaatggccctaaatttggtaactaagttagtaaatgtccactttttaaaaaaattaagaaaatggccaaatctaataaattagctaataaaaattataaaaatagatttatcacatattttttttaaaaaaaatatatataataacaaaattaagttacataatttttttagtattgcatattattatattgtaacaaaaataaataaatatattagatcatttaaatatatacagcagtattagatatatcgtagtacagaaaattaatataccgtagtaataaaattatataccacaaagaaattataacaatactaaattaatactcaaaaatatatatatcatgctaacaaaattatatatatcaccattaaaatatgaatacataccaaaaaatttatatataataaaatagaaactaaatatcatattaaataaataata

SEQ ID NO: 182817 - DNA, 544 bp, Cannabis indica
tctacctctgaggacttactttgcgaaaaacttcgcaaagattggaactttcaacttatttcaccctcctacaagctattgtcaaggtggtatttttatgcaaaatgcagatattcgaatgccaagttcggaagagattctatactgctacgccgttaagcctcaaccaatgtgcgccaacaagcgtaaagttggattctataagctggaaaggtatccagacgttcgctgcccttacaacattactcggcattcctctgatctccgagaatactagttcttctcatctggctttcccgtgaagagggttccaaacctttcgctagacttcaaaatcccaagtaaaagcattttcttttaatccttcttttctgacttttctttactggtttaaacttgtgactgatggagtttttcttatttgctacagcctctatggctcggacttccataagcaaggaattgatgaagaggtcagggctgctgcagggggccaactgcctttagaggttgcctaatgcaagggcaaaggcaaaggcaaagg

SEQ ID NO: 182818 - DNA, 322 bp, Cannabis indica
taaaaatttttcttttttttttattttatttcaaacttttatattgcatcatacattaattatacatttattttttttcttacattcatttaaatatattcttttagtatatataaaatatacaatgagtatgaatgtagcattttttaaaatttaaacataaatgtgatggagcttaatttttttatcatgtttctacttttctcttctctattttgaaaaaaagtttaactcattgtattaagagttagtcccacattgctaatgtgtagaaataaattgtgatatataagatgaatgggctactcatcccattgccaat

SEQ ID NO: 182819 - DNA, 986 bp, Cannabis indica
aaaaaagtgttatttatgtaattatctctttacaaaatatcacactgtttgttcagagaaaaaaaaaatctcatcctgtttggttctctatcacatggagacttaaaaaaagctatattggtgtgcattcattttatacctacaaatatgagaacgtgattcagtctaaaagtgctcttttcataaccttttattaagttcttcatccaaaaacattataaaatctatttgtttaaggatttttatttttttatgttattttggatttaaaacttctttttttttaaccaatcattattttgtttttgcatactaaatatatatcttacacagatgatgttgtctatttctagacaaataagttttatgtcaatcctaaaagcatacccaacttaaatttaaactttaagttataaaatccatgaccgatttttaatggctataaacactggaaaatgcctaacttgaaatttgtttaatattttatcaaaaaaaaaaaaaagtttgatattggtttacgttatcgaagtcaaaactcaatttcctgtcttttggaaaagaacactttaaaaaaaataattgaacacaattcataataataatatgcaaaagaataataacttttcttagtgtttagtttcatagatgcaaaagaataataactttttttaacataaatatatgtaattttttgctatttttagcgatatttttaaaaattaataaataaaaaataaaacattataaattaaattaaagttaatggctggatgcaaaaacaaatagatgtcttcagtatatttgtgtaaattttgtatgtaaataaatatatcattataatttatatataaattaaaataaataggaggaattgaagcattaactaatgaaaactgaaaaaatatgagtttattgaatcacaaatttatcatatatttcgcacattaattatgatgatgatgatgatcatcatcatcatctgtaac

SEQ ID NO: 182820 - DNA, 506 bp, Cannabis indica
gaacaaatttattattaattgcaacactttaggtagattaattatatttaggtttaactaactacatggatgactctttacgtggcaacatctaataatttgttttttttttttatttaaaaagaaagtcacccaataatttttcacgtggcaaaatgtaataatttgttatttttttatttaaaaaaagagtcatccaataatttctcataaaccaagaatccagttatataaccacattttatatagaatagatatatagtatataattttttaaaagatacttacataaatataaattacatatatatagttataaaaaataattaaatacaatttttacaaaaatactttaatatattataaattaatcaagttttgaaaaaatttcaataaaattagatgaataatattaaaaattcgaaaaaaaaatagtgaaaaaatagataaataattctaaatcaaatagtctttgactagtataaatagaaatagagatagacaga

SEQ ID NO: 182821 - DNA, 693 bp, Cannabis indica
gttgttttaattatttgaaacttttagttgcatcacattgtaataatggtatgtttatggagtattaaacttaaatacaagatgatatttaatttttacgtatttttcttcatatttttatgttaatattaaaatttaagtgtgtaattggatatccaatgaaaaaaccgatctaatctaattagtaattggattggattagattttgaggtctaattggattagatcggatgatgattttccaaatccaattactaattggattggattggatgagaaaaaaaagagttggattggatcggatgcccaccctattattaaggatactttacatggaaatcctatcagactcatcccctcttcttccaacgttctttctttttttttttttttttgtcaagttttgtttcaccattctttctagaaaaagccatgtatccacataggtaattgtatgtttataaggttcctagtgagatgcacttcactgatttctattttttctttttttggaaatttagtggcttatttgaagagggttatggattaaggttttacaatctgcttcaatctgaatattgagttatcatttgcagggtaagttttctttaaaggagtgttttaaaaaggagtttgaagtatactgattggttaatcttgaagaaccaaaagcgatattggtccttctattta

SEQ ID NO: 182822 - DNA, 1085 bp, Cannabis indica
aaagctacttgtgactaaagcataatatttagatacaagttgtcacttatttagttttaatcacaacaagtattatgactaaaaacacatttagtcacaacaaattgtaatttttgtgactaatacttttagtcacgaactttttaatcacaatataataactagggctgtacataaatttttgtaaaccgcccaacccgaacaacccgtccaaaccaaaccgagataacccgaagaaaaatgcaaactgaaaaacctgacgaaaatataacccgtccaatcattatattgtgcgggttgaaaataatatcaatcatccaatcaacccgaactaactcgaccaactcaagtaaaagagtttttatatattatatttttattatatacaatctatatattatataatttatatacatatttataaaaatagagtttaactagaataatatacataatatttttatgtaacataaatattttattactactattatctaaatattttgaaaagaacttttgaagataatattttattaatattatctaaatatttaattaatttaaaacttgtacctattttatataagaaaaataaaagcctagacatataatttcttttgagaaacttacaaaaatactgaaatttgggttaattttacaaaatattgtcacacgtaaaaattttcaaaaatactgtatttttataaaataccagtaaaatacaaaacagaacaactcaaaacaatagtagaacagctaaaaaataccagtagaactccagtgaaaacttaatacagtatactacggtatgaaacttataaatagacacagtaaaaaagtaaaaaaataccacttgacagtatatttgtaaaaaaatagcaaaagttattataccatgtaaattttcatttctttttccttgatgaagtagatatataaggcattgtatcatatatttttgtatatatataatgacctaaactaaatgcgggccattattcttgcaacgaaaggtttgtcatgcgctaaatatacaagccataatatgtagtatgacaaaagtagggcagctatagtatatttat

SEQ ID NO: 182823 - DNA, 941 bp, Cannabis indica
aatcttcatacaaaattgatatctaaaaaaattacaaatgatttcaaaacagttgtcttcaccgtatttcatttgtagttaccattacatttaaaatcgatgtcacaccaccgtatttcacttgaccttcccaataaatttgctctgtaaaataaatcaagattaatttttttataataatattaccatgcagatataattcattattgataagaatatttctatgtttttaaatcattgttagtttgagatatattagggttatttataattttttgttcttgaaatggtttaaattatagtttatagcatgtataatatatagtttaaaatattaggatttttttttcatatatttatatgtttttaaagttttaatacattcaaatagtttattttgaagagtttcttttttttttaaaaaaaaaaaaataaagtttgtttactaataatgttaaaagagaaatagagagataagtatgatttttaagcttttagatttttttaaaaataatacaatttaaatatatattttttttttaaaaaataaactaatttcatcactttctacactttctacctaaatttgataaggtagaaaaatacaacaataataatacatcttctaattattattctaatatatatatttaaagaaatatatagtaaacaaaatttcacagtaatactgcttaatttttcttcgttaaaaaaataggagtgttatcattaacatgagttaaatttggatttatgaattgagatctattgatcggaatgttaattatttttccttctagtctctccactgaaattgtaactaaaaataaaattttataatcatttaaaagtgatctatactcatttgtggttgccacaattttcaaattttacagacagtacaaagagctttcactcaatagctttttgaacttaattag

SEQ ID NO: 182824 - DNA, 622 bp, Cannabis indica
tataaatttcaccttgacttgttattttgagagataagtttaagaactcaaagagatgacattgagattttgagagaggaaatattgagaagtagagagagaggcgtagagaaaagggagagattggattcgggttttgtaagaagaatcttctgtagatgaagaagattcttgggtgtaagtgtgagagttgaaacacttagggaggactcaaaagagaatcttgcctcgattgtattgtacatattcttgctcaatcaataaagaaggattacggtggtgttccagaactaaagtagagccatagatcacatcgatctatcaaacttgaaccaatatatatcttggtgttgatttctttattttctacacatttattcatttttttttattttacgtactctgtgtgccctgctttactttcgaatattgttcttaatttgttaatcttgtcattgctaattatttaattatttagagttttcatttgatttaaattttctacatttagtcgtaattttttcacacaatcctttctttaatttattgctgatactcttattactgtatagtattttagtcacttccatctagtttttcccttacacaaactcactcaatc

SEQ ID NO: 182825 - DNA, 917 bp, Cannabis indica
atagtatttcatgagcagcaacgaggtgggagcttttggattggagtaaaaattaacttagtttattttacggaacaaagatatatcaggccatgtaatatttaagtaaatgagttttaccaatgaggctacgttttgattttttggatttttttaatggtttttccaacatcaattgagactcgaattttttggttccattggagtgggagcagtggaagctcctaaataacatgtgtcaatcaaaagttgcaaggtgaatggtcgtggagagacagatatcccagaggaagaacgaccaatctttaatcttaagaaaaaacgtaagggacccatgtccttaagctgaaacactgagttaagttgttgtttgaaagaagtaacaacgtcatcattattgaaggtaatcacaatgtcatcaacatatattaagagggcgagaaaaatgcctttatcatttttgatgaacaaggtgtggtccgagagaaattgggtgaaaccagttgacagaagataattgctaaattttgtgtaccattgtctagaggcttgtttcaagccacatagacttttggttaatctacaaatagaatttggggaaatttttcccttgggtttgtatccttttgggagtgtcacatagatagtttcatttaaatcgccatgaagaaatgcattgttgatatcaagttggtacagagaccaattgttaatggtcccaatggcaagcataagttttagggtattaaactgttgggttttgtgccctaaataaaacccatttcaatataatcagatttacttattaataaagatcagaaataacattttatgttgcatggttcacatgatttatttcatgattatatacatataatgtataaattctatttaagtccagaacatatgaatttgtt

SEQ ID NO: 182826 - DNA, 546 bp, Cannabis indica
aaataataaaaaaaaaatactcaaactaagtcaagtaaagtctgatgtttcttttctttttcacaaaaaaaaaaaaaaaaatgtaaaaaaaaatgaaagaaaaatatccaaccctaaaaagtccacgaggctctaaaagctagctttgatgtacgcctttcggtcaaatctactactgaataagaagaacctcttcaagattgatcttgggttatagttagctagactctgggaaaaatagactttccttctctatacgtacagcctctctatcctagacgacggggcctcgaagaagttttcaccttactatacgttaagctaaaaacagaggagtttccttactacaaaaggtgattgacaaggggcacgctttgttctcacgcgaaaaaagtttttgtcacaacttgcattctgattcaacatattggggagtttcgcttttcttacaaagtataataacaaatattatataataagttctcaattttatagaatcttatagattcaaccttggatggatagtgatttttttttacttaattt

SEQ ID NO: 182827 - DNA, 707 bp, Cannabis indica
gtttcggaggtatgcatggagaaattatttggaatgaaatttgggggtttttatctgttgttggtgttgggtgacaaagcttttcgatttctgattggttggtggcaactgttgttatttcttataggtgcttgtggcttattcagatatgtttgcacatcctttagctgaaccttgggctaaactaatacatttggctcagcagaaaggaagctactcacatgtcattgcctcttcaggttcatttgggaaaaacatttttccgagggcggctgcacttttagatgtttctccaattacagatgttgttgaaatttctgattctcatttatttgtgaggtataatttttggtcttatttcattgttttgatagtttcttctcttgtgtagactgcttttggcacttgaagtgatctggctgtcattggtgttggatcttgttaatttcaacatacacttgtgaggtttaatgaaatagattttcctttaagtggcctgaatacgtttaaattatgttctaaatggaagtgtatatttagtcatttcatgttagtctgtcaaattgaaaatcatgaagatgtaatatattgaaacctgaatgaaaagaattattacaatgattgggtcgctcatatctcaggtaatgtcatgtttagctttcttcagttaccagagcggggacaatttctagctctttgggctttta

SEQ ID NO: 182828 - DNA, 1049 bp, Cannabis indica
gttcgagacaagtaattgctcgtcaacttgaagtacgttatgtcgacaccttaaatcagctggctgatgtcttcacaaagcctctaccgatgtcttcctttgtatatctgagggacaagattacacatggtattatcagtgtatcttgaggggagtattaggatacaagggatagttagttaggagatatttttccagttgttattcagttagacagttattactgttttctgttgtttttgtcattgatttctttcttcttcttttgtattcctactcaattgtacatatataaatagcagagcctcaacgccaatcactttgattgagcttttccactttctcacttgtccatcttctctttactgttctttctttaactctatttttcacagagtctttcaccttgatatcataaaagaagcgaacacggagagaagcagtggcctagaactggtcctcaaaaaaagcctctgcggtagagacggtggagtggtcgatcatgaagggaggaattgtctggtaatcggtacagacgacgacgattgagccgatacaatggcggtagcggcaacgagcgatggaagccaatgagaaggtgagggaagaaaggattgttgtacaattttttacactgatttcaaagtctaaatatttgtaaggggcatgtttggctgacaatattaatgttgggttttatgccctaaataaaactcatttcaatataatcagatttgtttattaatatagatcagaaataacatttaatgttgcatggttcacatgatttatttcatgattatatgtacataatgtataaattcatctgaaacccttttcacatacttgatcctgtttattgtgtcgtcaacacattggaaagtaaacatgactatgtgaataaagtttcctagatttatcagacatagggttttactgatatgataatctacaacaagagtttacttgtatttggagaaatactatgttctttccagaacattggttaaagtaaagctcaggttggatgcatggagtatgcatcggaa

SEQ ID NO: 182829 - DNA, 662 bp, Cannabis indica
tctctctactacttcaattcttgatcatgagtattctttttaatcaagtttgtagaattagtaagtctagatatgattttattgatgagaaagttgtgataattttatacttacgtgtcatataattttttttcaattattattttttctattttttttatttgtcaatcatgccattctaatgtatcgtataatttatatattttcagaacctattgagtaaagattttgtgtacaaaattttaagattattgcaatcacaggatttagattgtatagattatttttaaattactataaagttttatttttgactacaacttcaataaagagactaaaataaaaaaaataaataaaaaaatagtaaatattccaatcaatagattttataggtgtgctttttattcaggttattgattatggtgaagatgaaaaattaaaaggtagaaaaaaaattaaggttacacgttaatattctatattaaacacctatatatttttttctctgtgttttatttggtttacacgtacgttaatattctatattaaacatctatatattttttttctccgtgtttttatttggtttatacgtttttgtttttatttaggtatcatttgtttaatttagttggttattataaatttttattctattatta

SEQ ID NO: 182830 - DNA, 900 bp, Cannabis indica
ttagtcaattcatgtcaaaatccataaataagtgcatcccatttttcaatgtgttgcgcgggaacaaaaagtttgaatggactgatgaatgcgaagaagcctttcaaaacttgaaagagcatttggccaaagctctaatactatcgaagccagtggaagaagaagagttatatttgtatttagtagtgtttaatcatgttgtaagtgtcgtaacagtgcatccgtgtttgatctccctgatatgtgatcttaggtgggaagctttatgacagggatttgtctataccatatctgaggttcatagctagaaccgagataagtgcggccatccatgaggtttatagaggttttttatggagatcacacttctaaactaagcctttccaagagattcttcatcaaggctacttttggcaaccaatgaagaaagattgtttggaatatgtatggaaatgtgaacaatctcaaacatacgccaaatttctgtgagcaccgcaaactgatatcacactcatgagcagttcttggccttatgtagtttagggaattgacctggtgggatcactaaccacgtagaaaggagggtaaaatatgcaatagttgttgactacttcacgaaaatgggtagaagctgaacctatgaacacagtaacctacaagaaagccttaaactttgtccttaagaagattgtgcgttgtttcagacttccacacaagatttcctctgataatggaaaaaaatttgatagtgtacacttcactgacttatgtgttcaacacgaaatcgtgaaaaaagcttcttagctgtggctagaccacaagcaaacaaataggtggaagccataaaaagaccttaaaaataacattgtagaataagcttgatttggtgattatttggag

SEQ ID NO: 182831 - DNA, 604 bp, Cannabis indica
  modified_base (535)..(535): a, c, t, g, unknown or other
ctgttgaattttcaacctgtaatttataactctatgaaaatagagttatttagttctttttgtgcattaatttagttttgttctcaagtatttttagtttattaaaataatttttacttagttttatttagttttgcataaatattagttttagtatttgtagattagtttttagttaatttttgtaatattttatcaattttatttagtttcccattttatatgtgttaatctcaatgttgtgtatttttatagaaagtttaaatgtacattttagatttattatattggtcaaaatagagagcattaatgtctatggattcactaagaaccaaatcttttgtaaaatggcatggactcacaaaagcccaaattaattggtcatttctaaatatttgaaatatcatatgcagatttgtgcatacactgagaaagaagccacgtggcgcatgttatgaagacctaatagtattagcatatatacatatgcttttctataatttaaaaagagaaggaggtgtgacttttttttttngtttagtaactaaagagctgatgaaagaagaacgaaccaacatcgcacgcagacgaaaggagggacgac

SEQ ID NO: 182832 - DNA, 767 bp, Cannabis indica
aatattaggttgttaaatcaacatacttgtgagtagatctaagatcctggataaatataattccaacactctataccatggatcactttctttggcagtataatgatttggctctagtatgagtgaatggtcaagagcacagaattaattagtatttctcttcctgcaaatgacaaatttcttgaactgcataccttaatcctggctgtcattttatcaacaagaatggtacactcctttcttgaaattcttttagagcatatgggaatccccgagtaggtgaaaggcaggtattgaactgaaaaaccagatgcttttacagtttgattcaactctgttctgggcatgttactactgtaaatagcaggtttggtaggattcggttgcaaacttgaggttatcgagaagagcttgaggccttgtagcatgtataggacacttttaaaatccccattgcagaagagaagcacatcatctgtaaaagcaagatgatttaatttgatttcagcacacctatgatggaacttgaagtcttgtttctctcccatttttcccataattcttgagagatattccttgcctaagacaaagagtaagagacatgggatctccttgtcttagccctccttgcttcaaaaaaaaccccatgtaaggtcccattaaacatgagagagatttaggagtgcgtacacattcatcacaagagtaatgaaaagactgaggaaattgaaaactcttgaagcatttcttactctaaaaatcccact

SEQ ID NO: 182833 - DNA, 837 bp, Cannabis indica
cttatgatcatgaacaaaggtattttgcctatgtcaaatgcgccagctaagggtaatgaactcctcaagttcctgtctactcaaaatatccacacatcccgacaacaattcataatagaaggaggcatccttcaaagattcaagacctcgcagaatccaatccaaacggatagacttaagagaaggacaaaaccaaagagcatgaatagtagtcctattattctaaaaacaaactagacaaatcgtagctgctttcataccatggcgagttaaattggcatatgacaaaatgaaattcagacttgccttccaaacaaaatttttgatctttagcggaagattaagttgccaaagcagcttcaaccaacgagaagtcctttaggatcctaaaacttgtccccaccccaaactcgacactgtgctccaataaccactcttcaccaaataagattcgtatttgaaaagtccaaataagcctatcctaacgatcaaacaggaacgcgggatagacaaaatggcactaccttaaacctcatcaaacaactcctcaactaaagaggagttccatcttccaagatcaagcttgagatcactaattatttgaagattcaacccacccgagaaggaataagaccgacccacatgatccttggggatccatgcatcttctcaaattttagtgaaatctcgtgagcccacgagctaacaacatcctttcttctaaagatcctaattccataaaatactttgctaaagaaacgacacgcacttagtcacttcaacactcagcaaagaaccattgctatagtaaaatcatttcataatcttagcagccaa

SEQ ID NO: 182834 - DNA, 565 bp, Cannabis indica
ggaggtatttttttttttatgtattttcttgttattttattataatttcctttctgggtttgtgttagaagatcgaaataattcaaaatacataagaaagatattaattttattataagtattagtaaaaaagttataatataaatagatcagtttcaaaacagaaaaacgagtgaagaatagaatgaatttcgtggattggactactctcttcatttcacactagctacaagctttttaactaattataattattttggactatatcaaatttgattgaaagagtagatatatgaactaggcttgagtccatatttatttgtaaaatgacgctaatatatcgatcatattagtcaaacttggtcaaataatattggcaaacaaatcttcaaaaagttatataagaatttatatttttttttttgggttttttttttttttgttcgtagcatattcttgtagtatggagctgtgtttaaactcagatggtgagaagaaattgagatacattgattactttattgcatagaatcaatttaactttcgacatcataagataactcca

SEQ ID NO: 182835 - DNA, 667 bp, Cannabis indica
tctctctctccttagtctcacacgccacacacagtcaagtgtggtgtgagtttgtaatcaactctatctcatcacagtatctcataagttgagaatatattgtgatatagaattatactcattctataaaatctaatagctcactctattcttgagtgtttaggcttacttagaagattgtggtgtgaactcttcagcaaagttcttagattggatattcgattataatactaaaagatagcacggattctgtgataggctttatgagatattgtctctctattcattagtctagatttaatctatattatgttgagatccttgagcttatggttcatattagataaaattattttgttatcaaaccaactttcacatttccaactctgatatggaccataaaaaccaacacatcccatttcaatcatgacacgtagaattatagaactcacatggtcatccagtaaagaatcatcaaaagattctattaacaagtttttttttatcaatttattagtaatatttagttttgctccaatatatagaaaatagaaatgaactaagcacatctttaactatctttaaagtactattgataaatattattctattgtaataatatgggttacaactagttggttatgcaaatgcagaatattatttgatc

SEQ ID NO: 182836 - DNA, 634 bp, Cannabis indica
tcaatgatcaaaaaagcttccctaccggtagggaacttttgttaggtcctaccatagtcttgccccatatatatatatctgagattgatatgcttatatagtatctcctaatattaaatttagaaaaaaaaataaacaaataatgctagctttacatatctttgatatttgttattgtactccatcaaatcaaaccttggattttttttggattgggctaagtgaagtgtattcctactccaattacagcaagaaataatgcttttataatactcaaaaagtattataaatatctttccataatactttttatgtattaagaaagactatgttatcaaaagtcatgccacctttcacaatattttctataatttatactaaagtattattaaaaactcttttataatactttttaagtatgattttagtatattaatatgtttaaatgggcattatctttattagttttcataatatattttttcacttatattaataaataatttacaataatacttattgtgtattatttattttttttcactaagtttaaataataattattatagaatactcaacaaataatactttttttttaaatacttttattattttattaagctaaaaaaataat

SEQ ID NO: 182837 - DNA, 779 bp, Cannabis indica
actttataggttcctcccctctctctctctgtgcattttagaattacgagcacgagagatattttgaactcgttatgccatttctaattttcttttgaacattaacctgtctattatacttcaatctcttattgacatctttcttcagaaaggttatccagtgtgtagatgtgggttgggtgtataaatcatgtactctagtcatctttctgttaagtgtttatatgaactttgttagtatgtccactttttgccatgtatttatggtagtcagactttctgtttgtgagtaatttaacttgattccacatgctgtcactacgaatttttattttagagtttgacaagcctttgcatttatggtttgcatctgctttagtgtattcatttttctaattttggatttcattttgtgatataatttatatatgccaagaaacaatttgtatttcatggtagggatgtcatattctaatatgtgcttaggaaaatcatgtcactgttaatctttatgctattgtcttgtagtgggttaaatagtcaatgtgatgtcctaacttggtcaactaattttgtagcataactgatgaagtgaagatagttgaaggtgaactatcgaaatccagtttggaaaacaaaaaatgctatctgttggactgcggtgctgagatattcgtctgggtttggacgaggttactcagctagagggagagaaaaggctgctatccaaaacagctgaggtaagtaatataaaaatctgtttctccccttgaacaaaa

SEQ ID NO: 182838 - DNA, 670 bp, Cannabis indica
agctcagcccatacttttgtagagttttcaaatgagtcatgttgtgtcataccataaaaaaatatgaattgtttgtattttaccatcctaatatttttgaaaggtagacccaccacaatctatatatccagtatttttgtatcatgccttactcaacaagatccatttttcttaaataggttaattatttttttatatgagctcaaatttgtactctactttttcacatatgggctcagattttatatattgaaatagaaaaggtttcaatggttacattaaatatgtaatcatgataattgcatttacttttagttgttggatcattattaagcaattatgattaatttagattaaataaaaataattaataaattacttgtaacctgatagtaatatacttttattttatttccttataaataaaaaataaaaatatttataatattaattatcaaaaagatcttattagatatatcaattaaaagttaatttattttaattatatagttaattataattaatttaaatttaaaaataaaatttttaatctattggtaacttaatataataggttataagaaatgtaatcatcatggttacattttttaatgttaacaattgaatatcatctatatatttttaaagagtaaatgaatgagctaataaa

SEQ ID NO: 182839 - DNA, 683 bp, Cannabis indica
catgctcaaacacacccaaactaagccaaaaacatactcacacaccagattaaattccacaataatacccaacataacagagggcaaaacacacatactaaagctcaaaatccacagctcaaatgcatctaaattaatatttaaacaatatacaacttaggctccaaactagagcaagattcaccaaaattccaacttcaagagcttaaatacttaaccaacattctcagctcacatacaacaacaaaattagagctacataaaaatattaaagcaccaacctaacctcaaaattatctcaaaacacaacacaaagcattctactccaatcttctaacacaaacaagcacagagtattaagattaaactaattccaacacacatgcatcacaaggatctttacaacaaaatcatgcttaaatcaacttcaatttcagcaacaattgaaaacaaaaagagatagaaactacctcaagatctcaaaatcacacaagctccaaagatggccacaaatcaagcttgaacccaagctatttctcaacaaactcacaaattgaaaagatgaataaagagagagagggggtcggtttgggggctgagaaacaaatgagtttcatttacttgaaattccatttaatgaaaataacaaatggtcaaaaagaccaaaaatgtccctagggcca

SEQ ID NO: 182840 - DNA, 560 bp, Cannabis indica
atatatatagatatacgtatagatatagatgtggattgagagcaataattcatgtcctttgcaaactactataatggagcataaaagattaggagaatctgaactagttggggaaagggggggcaagacaaaattcaatgagagacagaaaattgatatgagtaattaaaggtagtaatgcctaataaaaccaaagaacaaaaagccatattcactcactcaaaaccttgttaaatacatgcaaattggccattttcatgcaaatgggtcttcaaaaatggtgggcaattcctctttttttggtcccacttttccttttgtgtttcacaacatgggtacggttgaaaacaattttaaattattttattaatttgtactaattttcactttataacattttttatctgagtattgttataaggtatcagtagtgtttagtactatctagggtgacactttgtaattagttaataatattccataaaaattgttacattaaattattttattactttgtactaattttcactttataatattatttattcgagcattgttat

SEQ ID NO: 182841 - DNA, 783 bp, Cannabis indica
aaattgataatgtctactagaaatttaaaatgtcataattctttttttaaagtgttaatggttttattctcttattaattaacatatatctatgtcaaattcattttaagaatactgattcaagcacaatttcttcatgttatacaaggtaaataaaatattcttatactatttaaaaatcacacttttctaaggtgatattcatgcatcattcaagtaattcaattaaccctattttatttttttttccaaaatcaatattagctagtacatactaatggtgatcaagcaaaagtaagcaattacataaaattctcttaaatgaacaaaaccaattcactaaacgtaacaaaaaaatacaaaatcataattttagtcaataaataactctaacaaaaagaaaattaactcataacaaattgtgcaaaattacaaagtacaaagtagagaatagaaaaaaccatatggagttgtcacaatactctaagttttcttttgccaaaatcctctacttcttccttcaaatatatgccaatctctcaaataaaaatgcaaaattaaaaccctaaataacaataaaatgaactctctatttttttccttttttctcatcatttttttctttttgtttttcagcgtcaagagatccactaccagcgcctccttttctgttttcatgcctgcttttcttctttatacatacatcatatatatatgataggaaaattatagtaaaagacctcaaatcatagaattatgttagtaaatatctctattttaaaa

SEQ ID NO: 182842 - DNA, 703 bp, Cannabis indica
gtatgcagcacgaagcggtctaggaagtttcagcctgaagatagactcttctcattgtcttctgtcacatcaccagcggtaatgatttaattgagatcacttggcttatgttctgatctagagcaacattttatgaaaagttgtcatgttaagtacatatttcagatgttgaactatctttgtagataccccttatgattcctttgatacacttattcctgccttttctttttccccttttttccatagggtcttgatgctttgttcatcttttttttttctctctctttgagagttcctatgatcttctctatgagttttacatattttttccccttttgttaggccgaagaaatagcagctgcacgagacggtgagcctactaatatgaataccacaaaaggttttccaaagctatatatttatgtttcctccctgtatgtttatcttagatgggagatcagactttggtccaggccggtctaagggtggaggaatatacgccaatggacagtaagtactatcagtgtttggaaagctctatatttgtgctcaaaacctcctcaataagtgttttctgataattgcatttggtgtcatggggaaaaccaaaaagggtgacctacgcctagagatgcaaagaggatcaggccaagtgaacagattatgactcgaagatgatcccgatctgacaatgtaaagc

SEQ ID NO: 182843 - DNA, 710 bp, Cannabis indica
tttttaacagaagatctttattcctctcacgcacatcattcattcttaaccgtcccataaaaaaaaagatagttaaaaacatactagttataattatataatataaattgcttttacaatacattcgattgaaatgtgtatagttagttcctaaaataattaattaaaaaagttaaccgttaaaattattgaccataacgtacgtagaattctttttatgcaacaaaaaaaaaacggaaattatattgaccataatgtagagttttttgaaagaccataatgtagagtttacttctcaaaaaaagtttcatcttggattattagtgtgtaatttagactcttagcaacattattattattattattttgacataataagttttacttcatgtttggtatagtggaaaaatggaacgagatatattgacgagattttttgtcaattaatctaaaaatatcgtaaaaagtaagatgaatgtaatgaattcatttgactaaataaaactgacaaaaaaataagaaataaaaacaccaggaattttaatagtccactcccatgccatgatggtaatgggactacaactattttaatttttatttaattggatttcgacacactaaagttatgttattaagaatgtgtgaataataatacaaaaagaaatttctaagtaaaatactgtattgagacttatgaacacaaggttcat

SEQ ID NO: 182844 - DNA, 1173 bp, Cannabis indica
ccattaaaattgttttgcttttttacatcttgtttagtcctctttgttagcaccatatacatcatatactattgagacaacttagctcgagtaatccatctcaacagtctttggattgacaatattactcaaatgacattcaaataacaagtgttctcttgttactaatttattcattccataaaacaaacatttgtcattttgagctatattcaatttcaacaacctttttcttcacctgtaagatctgtcaagtaccgaaagccataagataaatatgtgattctattccacacctctctatgctaagggattttctgcttagatgagtaaattaaggagacttaggagagtataccccttactaattaattttatacttccttgtcaagaatgaatgcatcaaatttaattatattcttctttcgctttgacaacctgcctccaataccaattgttggtactcgagaatcaagattctctgttaaaaattagtgtcccatactgtgttatacttaatattaaaatttgacacatcaactaatctaatttatattaaacatattaactacttttgttgactttagtagaggtttaatttttttaattaaataaaaaaattaaattgaacgttgtaaaattttaattagtttaaacgtcatttatgggacaccattttttaataggagatttttgatgatcggtactcaatgtcatgtaagttcaccaatcttctgttccaagatagactggatgaacccattgaacccaaacttttgttgccactacctatacatatttctatctcatttcatttaacaaatatttcggcacgaactcattcgatatgaggttgtagccctagtaaaagaagaattgcccacaattaaaaaattaatttttttaattattcgataattatacaccaaaatagataatataagttaccccataattatttttttataattattatgctcctataatttttttttcttggagtgattataaattttttttttaaagcaaatttttttacttataggtacaaaattttattacaattaaattcccacaaataaaaaaaccatgattctttatattgatgataataacacaattaattagacttctaaactaatgactaataatccgatcaattaatcaaattat

SEQ ID NO: 182845 - DNA, 813 bp, Cannabis indica
cttcatcatttaatttccctactgctactttctcttttccagttggtaattcttctactaatacatcttctgggtttgttgctgcatcacactcaccttcaccttctgagctacctaccactgaacctgccctaccagaaaatgcccgacctgctacttcacccattttaccacatatcccacaaccgacacctattatccactcattcccagatattatccaatccccaaacacccgaattaccccaccagtaaccacaatatcaccatctgcaccagcaaacctaaatccaaagtcagtacctgaaattcccaatgcctcacctacacctaacacagaaactatatcagctgctcctacacaagctgctgctattcctactgaggtgacaaacatattaagcacaacaaaaagtacagctgctagaacacactctatgcaaaccagatctcagagtgcatccattaacccaaggcatatctctctactaagcatcctcttaaagaatctttattaccaagtgaaccaaagaatgtcaagcaagctctcaaggatcctaagttgttgcagtcaatgcaaagggaaaatactgctcttatcaaggcaaaaacatggactttagtgccttatgaaccatacatgagcataattgacaataagtgggtctgtagaatcaaagcttaatgctgatggatctctcaaacacctataaagtctacacttgttgccaaaggttacttacaaaacaccaccaattgattaccaaaaagaattttagatccagtgtgaaaccaacaacagtaaggtgttct

SEQ ID NO: 182846 - DNA, 817 bp, Cannabis indica
tatgagtggctcccgatcaaatgtggtaactgttgtggttatggtcacaatatggcgcaatgtaggaaaaatggaattaagggatgagtggaaaaagctcagactagcaaggccaatcctaattgatttgcaaaaaactgtaagaacaaatgaaggggctaaagtgactaatttgaagaaggatgagaaaattgatgttgcagtgacctctgctggcgaagctatgcatcaattgttggaaatattttactgggatctagatttactaccatgtatattggattataattctataatctaacaccctaaatatgaatttcttaaaaataatgaatgaaacacataaaggtatagaaaactttaaattgatggcagcgaaataatatgattctttctgtccagatctctaacccttgatcctttctgttgcagagtatgattaacatctaacctgaattatccttcaagtaataaaaagactacacaatctttccactatcttgagtattgctttgaaatatgtgagcaatcactcaatcactcaaagttcaaaaattactaaaagaagaggagaattcgaattataaagagctctgattgattttttttttcttttttctaatagagtcaatcatgttatgaaaataagaattatcatattttatttatatagtaactttaaggttaggtttagaatttaaatagaataaaccttatggccgaaatactatgtgggctcattaggttttaattttgccatttaataaaattttatctttcttttcaaaattacaatttttcattctaactttataaa

SEQ ID NO: 182847 - DNA, 700 bp, Cannabis indica
ataatgtatcatatattgttattggtataattacactataaaaaaattacttttagtgacaattttttagttataatataatttttttttattaaatgtggctcacttgtaactaaatatactgtttaaacacaatttgttactaatttagttttaattgtaataaatattgtaattaataaaaatacatttagtcacaataagttgtaatttttgtgactaatatatttaattagctacggatcttttaatcacaacataagaatgatgatttaaaattagtcacaaattttgttctgaactaaaagtaaaaaaaaattaagtattaagcatcaagtcgtcccatttattttaatttaaaaaaaattatataaaaaatagttatgcatgatcataaggtgtcatctcataattcactacaaagaattttattttcagtcgcaataatatttgtgactgaaagtaaaaaagttatgattaattataaaattatcatttttaatgttgtgattaaaaagtttgtgactaaatgtattagtgacaaacattgtaactaaaatattattactaaagataattatttttataatgatgattaaagcctaatagtaatacccatattttaaattatataggtatatgctgttgttacaaaggtacattgaataatgtaatatttaatttgcacgtttttattttc

SEQ ID NO: 182848 - DNA, 692 bp, Cannabis indica
atatataggatcttttagcagcctattggatgatttaagaaattgatatctgaattatagaatgtaatgattaaatttcttatctaataaaactataaaaattcaatctgattttcttttttgttactatatcaatggaatagattgaggggaagaacaaaaatataaaatggattgtcttaaacaattaacatctcaatcttcattaccgaaaaaaaaaaaaaatctacgttattttttttttcctctattcggttctaagttgaaatgagtcttaaaaatttaaaaattacacttattataaaaataaatggtatttttaaaaattgagatcctaaaatgggtagatcttaggcgcaagcctagcccatcataacctaggatcgattctgtctctattataaggggaaaatagtaatttctcaaacaaaaaaaaaaaaaaaaacagatatgaacatagttgtttgttactagtactatgatctcatgaacaaaatgaagaacccaagatctatatcattactttgtcaatgtcatacagtcttttccttgattatttgaatattgcccctttgatctcttggtatagatgcttttgctcccatttaatttgggttaatgtttgaaatttcacgagtatcgcattatgtttaaccttaaattatttttttatgtattaattgtggtagata

SEQ ID NO: 182849 - DNA, 629 bp, Cannabis indica
tatataatacataagtgtatatataaattttttaaatataacacatatatatatagtcatatttttgcagaaaaaatattattttatgagatatatacacaaatattgtaagaactaacctccaaatatttagaccaccgaccgaccaggcattttactcagatttctcctccccactgactatttatctcaaactttaaagatggagaaaaaattagatattaagaaaaaaaaataacaacatgtgaaaaagataaaaaagaaaaacgaaaagcattaccggtgcactggcggttgacgggcggtgcactggcggtggacgggcgatgcactggcggtgccggggaaagaatggccggagaagtggggaaggggcggactgtgtttgaaaacggggaggggaaggtggaatggggaaatgaaatggcaaaaataattttctgaaatgggggttggggattccgccggtattaatccccaacggtcagaatcctcaattaatcccggcaggtcccgccgatattaatgggtttaaatttttgggcggtaaaaatcccgccctcttttttcgaggcgggattccgctggtattaatgcctatccgccagtaatttccctattattagagg

SEQ ID NO: 182850 - DNA, 615 bp, Cannabis indica
atttgagaattagggttttgcagaagaagaagaagaaatgtttggttttgtgaaaaagggtttaaggagttgggttcgtctacagccgttctgttattagtttcggtgtaatcgataatgggaaaacgacaataatattaaaacgacgatttgttttcagaaacgacattcatctccttagtgggatgggatctataaaagctattaaattcgtttaacttttttttttaaaaaaaaaataataataaaaattggaagtttatcaagtttaaaatttagggatataaatgggtcgggttggccaacttaactttttaacccgacccaacttattaaacattttgagtcggagcgagttaggtctgatttaaatattattattattaaagttaatatttttttttagataaataacttttttatatatatatttaattgttatctaaaaaaaaatatatatatatatttaattgtaatatgcaaattgtgttaatgaaattttttgtcaacgacccaaaaattaagaaccagatgttgaaaatcacaatgaaagtttatgtggttaacatttgagtaatttgtgggattaattttttattatagataaatatttaa

SEQ ID NO: 182851 - DNA, 711 bp, Cannabis indica
aaaatttatagtcaaatattgtaagttaaaaaaatgcatgttattagttttttaaaaagaaaaaatatcgtgtctacataaataaaaaaaaatatatatgaataattaagtgtaatattgtaagattaaataataaattattttaaaataaaaaattactaggatagttttttttttttagataaaatgcaattactaggatagttaatgcttcttctgaatacattaacaacccctctcaaaccaaaaaaaaaaacgttaacacccacttactttaaatttagattaactcagaacaaataaataaaatcaataatcgcttaaaaatattgacactaccaccaacaagtattacttcgttcactagctcgatattgcataggtattgaaacactcataaataataataataataataataataacaacaataatttggagtggagattattcaagtaccatgtattcaatgagtttgttttaaatttacgaagacaactaaaaattgctcagtttgtaccaaaaaaaaaattgcttaagttatcttttaaaacaaaatggtgaagttgacaaccagtttatcgttgagaaattaatggattaaattgaactagtcagtctgcaaccaaccgccatttgaaaatatatataaaataattaaatgtatttattatattgaaaaaaaaaatcaataagattttttctaaatgg

SEQ ID NO: 182852 - DNA, 552 bp, Cannabis indica
  modified_base (32)..(32): a, c, t, g, unknown or other
tcgaaatgggggaagcgatgcacatcctaaanggtttgaggagagaataatcaggcttagtgtgaaatagtacctcaagaggagatgaccagtctagaactcttgttggcaacctattattgtgaaaacagcacaactaaatgcatgccaccaatatgtcattcccaatccagcttttggccaaaagagtaaggcctatttcattgatatgtctatgtttcctctctgccctcccattttgttcatgagtatggggacatggatgttgaaaatgtatcccttgatcttcaagaaaccttttgaaaggtctatattcccctccccaatcggcttgaacagatttgataggcaaattgaattgtttttccactaatgccctccatttgaggaaaacctcaaaggcttgtgatcttaaggtgaggggaaagatccaagtgtacctgctatagtcatcaaggaaatgaacatagtacatgtacccatcaatagagagatcatgggaaggaccccaaagatctgtgtgaattagtgcaaggggctgagttgctctac

SEQ ID NO: 182853 - DNA, 510 bp, Cannabis indica
ttcttgtctgaacttcgttgctcatctctttgacttccgacgaaatcaatatgagttgagctgtggacgctttcagtttctctggtcacacaatgcttccatagattcgatcgtagtttacaattatagcttccatacctagttatttgagttgagatcgtcttccggataagaacaaaacaagagtaaaagaaaagacatggtattctataatcaaaatcaaatcccaaaactaaagacaaaaaataccaaaacaatattctatcagactgcttgtcacacaactttctcaaaacgctcaaataatgtatgttagcataatataattagtatatgctaatagagattttaaacaactaaataaatagaagaggacaagggaatttggaataaactataagataacacatacaatatgtggttgaggtatacaaaaattgaaggtgtgaggaactctgattttgcagatttagattgaaatgaaaaattttgaatgagagagagagagag

SEQ ID NO: 182854 - DNA, 1081 bp, Cannabis indica
tcaagcactcttcaaggtgatcgaagggagttcgagctcttggagttttatcaagattcggttagtaggtggaatacatcaagcttgcggcatacaataagagggagtctatttatgcataagtcaattactttgtatttttgataccgatctaatgaatcttatctctgggcgtggccccgtggactagtaacaatctgaaaggattgttgaaaccacgtacaaaaatcttgtgtgtttttacttttatgcactgtttgtttttctgggtttctctggagttacagagttgtattctgtaactacggaaaaactgttttcagtaccagtttcattattccgcatttaattaatcacttaattaaataattaaactgggaatataaaatacggaatttcaattattattatgtaacatatataatacgtttcatgcattaactaataaccattggtaattgatctaggcttgcatctctccagtagtactactattattaaaacacttaaattatttttttagtttaatgaaaaacactgatttattaaggaccgatgggaatagtagtttctgtaatagtattttcattatggcttcttcttggactagtagtttctgtggtagcatttttcattatggcttcttcttggactaacgggaatcgtaattctgcaatagtgttttcgttatggcttcttcctggactgtagtttctgtaatggtgttttcattatggcttcttcctggaatgaccggagtagtaatttctgtagtagtatggcctcttcttggtctagtgtttctataacagtgttttcattagggcttcttcttggactagtcgtttctaaaagtgtgtttttcattagggcttctcttgcttctctattctctatctcatgataccaccgaaaactctctttgtataggcttgaacttggattcagagaagaatattatgttagtcaaatcaatgaagattggaaacacaagaaaaggaacaaatataggcaaaaactccaaaagggcaggcacaaagtcgtattgctaaagattctgtagccatgaaagttgtgaggc

SEQ ID NO: 182855 - DNA, 840 bp, Cannabis indica
atcttgggttgcataagagcaagaagagtaaatactcaccaagaacattctctgtatttataagagtgaaacactcaccaaatacattctctgtattaaatacatccataaataagatagactcgtggactaaggctcattaacgccccaaccacgtaaaaatccttctctaattttcttacagctctataatcttataatattttattggttgccgaaaacctcggtcaacaataatatatattcagttggcgagatagatttttttcttttaaactgagttatttttatgttattaacaataatatatatacacgttatacataaattttatgtagatgatgtgcataaataacataacgaacaaagataaataacataataaatatatacagatatttattttaattaataaaaaatgcaataaaattatagatttactaattaataaatatattttttttactaaataattaatttatttttataaatacttaacattaaatagatataataaaaatatttttttattataattttataaataatatataagattcttgtggtcaatcaaacaatataattcaattaatgagaatatgaaaatttcttatcttacataagtaaacacaatttacatatttttctataattatattcttcttctataatattcattataattaaattattttgtaacacttaaaataaaaaagtaacaaccgaattcaatattatatatatcactattttgtatcgtatgtgttgtgctcacaaactcgtaatgtgtttagaaaattcttatatatatatttttaaaaaagttgtcttttatcttat

SEQ ID NO: 182856 - DNA, 816 bp, Cannabis indica
  modified_base (787)..(787): a, c, t, g, unknown or other
ctgctggatgatgccaccatcctgcaagagaagcagtaaaacaatcacttggatccctaagacaaaactgcagcatccagacaagtaagtattaatgagaatcataccgactgctctagttttgaaataatatgcagtagcttgtctcgggtttcagagtcgatatgcggacgctcccacaatatgttctcatcgtgtagttcccaaggacaatgctctgtctcttccccagaatcctccttgtaacgaacttcatatcttaaccaagggctatcaggaaactcctctgacttggcctgagatgaagtaatttttccatcccaccacctaccaccttctccattcgcatctttccaccaaacatcgcatctatctccaatgctccagtttcttttaatcgcagcatcatacaatgatttctcaacacaaaatcgggcaaatctctcagctcaggaagtgtcaactggagtgagttgtcacatacatttgaagaaggacctataaatttaagtctgattttgcagcagctttccccagacctaaatcccgtgcatattcaaggatatcaaaccttcaaatttcaactgctctcagcttactcttaagaacactaggaggaccttcacgcatagctgctcagcatattgttcatgacccctatataatataaaaaatcaaaaatcataaaaaaactataaatgaaaaacataaatcaagaagaaaaagataaaatggaagacaaaccaaaaatttaattcaattcgatgtggaatcacctgtctcaagntaatcaaacttcatcgccaagctgaggaa

SEQ ID NO: 182857 - DNA, 628 bp, Cannabis indica
caagaagagaaaatactcaccaagaacattctctgtatttatgagaaaaacattctctcaagtgtggaatctgtattaaatacatccattaataacaaagactcgtggactaaggctcattaacgccccaaccacgtaaaaatcttcatctcactttcttacagctctttaatataatcatattctagtagttgccgaaaatctcggtcaacaatggttattttcaaaatttgattattaattattttatttttattttaattataaggtcaaatatttacatattgtatttatttaattaatgtatatttgaagtgatcttatttgacattaaaataataagaaaatttaaaaaaaaaaaaaatactagatttttttttaaaaaaaattttaaaaacctaatatgagctttcaaaatttaggttattttaattatatttatttaatttaaattataaattaagtactaatgttaattaatttgtctattttattttatttagtatatttattttatttaatatatattttttaaattagtagtaggttggaactacaatttgtaattcattacaatgtataagtgtaatagttattacattaattattgattatagactcaatacaa

SEQ ID NO: 182858 - DNA, 572 bp, Cannabis indica
caatctgatttgttatcaatagaagattagaagtcatttatgtttacatgtagttttcatgtttatggtttaatgtatacaatttctgttaagtccagaacatatagttattcacaattacagtgatgtcaacacagtggaaggtaattgtgattatatgcttcaaaagataatgtcccttgattcatcagtgcactggatttacactgatgtgatagtcagcgataaagcttacttacaccttggataagtgttatgttctttccagaacattggcaaagtatgctagtatcggatgtatggagtatacattggactgggaccgatattgatcttggtaaagatattataatcttaccgttgtatctttctaagtcaatatcactggttgatcttagatcaaaagatcttaatcctgacatggttaggttcgatctcaagagtgttatttgtgttctttgagtttgttagttaaagcctaccatttggttcgggtcaaacgtacattttgggaacatgatagtacaattgagtgggagcgctaaacatagatatggaatctatagcttcta

SEQ ID NO: 182859 - DNA, 774 bp, Cannabis indica
cacaatcaattatgccataacaatcccaattcaaaatgcacatcgaatatgaagaaagtcacaagctttagtaaaaggggttgaagtaatatacctttccagtaccgggcggaccgtagaggattaaacctcgatgccactgaaaaagcaaaaccagaaaagattaaaagtcaaaccaaagaaaagtgtaataaattatatatatatatagatataaatatactttgagaccgagttttcgagcttggcgtgaatagagagtagggaaggtgatgagttctctgagagcttgaagagcttgggcgttgcctgctatggcttcttcggcattccagtggttgtttccattgtggtcgtcgatggtgttgctactgctgctagatgaggtatggtcctccatgttaggagcactggagagagatttgagaacagggcagactaccaaagttgggattgtgtcaatcaatatgttccattttaatgaaataatatttatatatattcaaatgctaacttagtgtaacactaggtcacatcgatatagagggttcacacatttatttacttacttattttaaaaaaaaaactgctaattaaaatttttcaaaatgtattaaattgttaaaaaattctcctaaattaatgtaaattatttttgtttaatttttattaaattttactaatgaacgcttaacataacgattattcacatattgaattatatgccttaaagtaacaaattgtgtaccttaaactttgacataaacggacata

SEQ ID NO: 182860 - DNA, 744 bp, Cannabis indica
aaattctttcataagctattttttaactaccgaccaaatatttttttatcacaactttttttgaaaaaacaacttttatttttctaaaaaattgtgccaaataacttaccttatatatactactaaatataatttgaatcaatttaacttttccttcacaagaaaaaggctcatttttcatgtgtacgttgagaataatgtaggacataattgataaatatagaggaaataaacaaaaaaaataaataataatcaattacatatactaataatgcaatctagatattttgcttcaaagtatattttttgcctttattaattacacgactgccaaagtcttcgtttaatagaagagtagctgaggtttttataggctttgactcattaattagcctttgcaatatctccagctatttcattctaaaaaccccggccccaaacaaaagaggaaatatttaatccaactaatttaataatgtgttacaattttggtacgtacaaaaaaaagtcaactcccatgcgttcatattattaatattttttatatatgtcttactaccttgattgattaatatcaattaattcatcgtcatcatcatcattatgattattgttattaataatattttctcttattccaaaattcatcaagtcaatttcctaagctcgaggaaatttttctcttaggctcacgagaagtaaatgtactcatgaagcttgaaaaatcagtgtacttagtaacgc

SEQ ID NO: 182861 - DNA, 1019 bp, Cannabis indica
atatatatataataagctcctggcaaggtctaggggtggagatcatttttattgttctcaaaatataataatctgtatatataacaaattgctacaccgcactatgcactgtgtgctccatttgataattatgtacatataaaggctaaatgcttttgctgaaagacgtaggaattttttgttgatgataaatatgtgaaatcaaatccaaacgaaagtattgaatataaaatatatacaataagaaccaatagtcttatcaagaattaattcgaattaaattatgtcatatatatgcgtaaaaataaaagaaagaggtagagaagtgtgtggaggaaaataattaaaagatcgatcgatgatgtattattcttactaatatatagttcattcaaatcatatatagtggtttcggaataaataaaatacaggaagttgatttagtttatccgatcgatcgatctgtaagaataaagttataagtaaagtcacaaaaaaatgtcattaaataagaataataatcttaatatatacatattataaacagattagaaagcttgcacacaaaaagatctaatgaaatactatttagagcatctaatattatttgatatcaacttcatatagttgatacgtaatcaggttaaagcttctgaaacaaaccaaagacttatccgtatatagagtttataataaacttcacagcaatttataaaaattaattaaataatggatcattataatttctcacaacagtgccaacttataattaacaacccaaagacaaagaactactgatgatgtgtaattactgataatttggactctgatcaaatgcagccataaaacttgacatttttgcttaattatatctctcccaaatattctcttaagctaatattgtccaaaataacttaaaaagcatagaatagggaggttgtatttaggaaatatatataaatttacacggaaatgtttaaattatcgaaaaatgctaaattttattggtaccctttttt

SEQ ID NO: 182862 - DNA, 549 bp, Cannabis indica
tgattatgggggataaatattatatgggagtagaataagagcgaatccacgagactttaacaacataggcaagagcaagcatatcagaataagctgatgacaaaagcagaacaagagactgtgttttctctctcttcttcttcttccgcacaatagaaacacaacaagatccctttactagtagaacgttgaaatcccttcaacgaaactctagatctgaacacctttagttttgcttgcaaagatgtagccgaactacattcatcacattgtatatatatagttgaattaggtaatacccagatgataaacagatgtaacaaactaacttaaaataaggtgacgtggacagtgactaaacaataaactccagacataaataacagcttaagattctgtcataacaaaatactgcttcttattacagttaatttgtttggaattaatcaatccattgatttggttggtcaaaatgataaagaaaaatgagtaattttttttctgatgaagtggggggtgttcaaaaacacccattcattaaaaggcaaa

SEQ ID NO: 182863 - DNA, 1165 bp, Cannabis indica
aagtatatatatattgatatatatatattggtttaatttgtatataaatagagatggaaatagattattattggagattaagaaacaatagtcttttttttaattttttctatgaaatattaaataatttattattaaaaaaataaccgatccaaaataaccgatccaatccgcactattgcggattggattggattggatttaaactcttatgcggatcggattggatccaaaatatgaaatccgcacttagtgcggattggatgttgtttgaccaaaaaagtgcggattggatcggatgaacacccctaatagtgagtagtatagttttagcatgtatgtattgatgggtcaatcagagcccttcatattcacttctccactccttccgtttttaccactgatgattgcatgagggaaataaaaggtgatcaccttcgcatcacatttcaaatttaattgttggaatattatattttttaaaaattattaattaaggtagcctttagtaacatttttattttttaatttaatagaaaacaaaagtgtgttttgtaaagtttatttttatttttattttttgattttatttaagtcgggtctaggtccgggtcggattcgagttcaagtcagaagccgagttcagcgcccgggccgtgggaaggggatttggatctgggtttggtcttaatccaaaagattgaataagaaaaaaaaaactgtttaaaaaaatattgaaagtgattttttttgtttttaaaattttgatttctaattataaaatacagaatccaaaaatagtatttacccaattttatttgaagtaaaaagtatcaacttaatgaaaagtatcaacttaatattaatgatataaatattaaaaaataatttaaaatatttttaaattaaaaaaatcaaaaaaaaaattaattattttttacttttgcttcttttttctttttctttcttcttcttcttcggttcctcccttgtgttcttcatcttctttttctcttttttttctatggttaaaatttgaatggtgatttatggttaaaatttgggttgtaagttataagttgtaacattccatttgaggaaattacactctataccctttttttgttgttcctctttatttttaccttctttttaaatttctatc

SEQ ID NO: 182864 - DNA, 672 bp, Cannabis indica
gcactatcaaaaagtagtgcgtctctgcttagtccagctcaatgcttctttaagcctgatggctttcagtaacttttgggctaacaacctcatgcctacatcttgtccaagttacttcaaagaatctttggtaacgaagtaaaactctacttctctaatttggtataatttaatgttgttgaaaacttaaaaatgtagaatttgactataaaatatttgatcggtataatattttcaaaaattatagaattttaggttaaaaattgaaaaaaaaatagttttatgttttctatgttttaaaatctttacatcaaactccaaaaaaaaaaaatacattatatcaactctttatatatttcctcactttcttattaaaattactaagaacttaacttacattaacataataatattttttttttgagtgatgaaatatccaccaaattattatatacaagacgttacatatatttataattaatcacatttatttcagatggaactcattatcttttaaaatagtatcactgtctaattttttctgtaatttcaaacaagcaagcaactgtaaattatgcaatgttgatataatcacaaaagataagatgaattgtgaatcaattttttcatttttttttccttcatgatttgagctggaattgaaaatcagat

SEQ ID NO: 182865 - DNA, 460 bp, Cannabis indica
gtggtcaaaattgggtctagcccaatactttttagcccagccttgttagaatcaatttcgaagctaaggcccaatctgtttatcaaccagcatgatgggttgggtatgaatatgatagacatggttcaagatccggcctacaacgttgtcacaatagcttggggttaattgaaaaatacttttttatttataaattaactaaatctaccttcaatttatgtttaattaaaacatacttctttttatgtgtactatacccaaaatactctaacataagggaatcacatggaaaatatcttgaagtaacagaagtaaaattagtacaatctttaaaaagggagataaactttaaaaaaaggtaaaataaaagaggataaactgtcacactaattttttttaaaaaaatactgtgtttttataaaacaacagtagaatacaaaacaaaacaactaaaaacaac

SEQ ID NO: 182866 - DNA, 832 bp, Cannabis indica
gcaaatggcttgaactgcctccgaacttgaagtagtagtgaaaaaagaagttgaaaaatgatcgacaattatggacggtgggggtcaatagtgacggcataggctaagtcatctccaatcacagatcaatgataaatgttctagggattttgatcaacaatggggaagacaaaatattcaatttatgattacacctaaacaaaatattccctttacaagttcatcaattacatattagtaaaagtagtctatgaagaatgttcaggctgaataagtctatgaaggataaaaaaaaggtagcccaagaaagtttggagggacaaatgtataccatgtgagtgggaaaagttgtaggcatacctccaaaggcaaagcccaaatgtgattaaaaaagacttctggttactattattgagcggtcgtgagtgaagctttcgtgaacactggccactcgaaaacgttaaaagttttagggtttgaaaagaaacaggggaatgttgcgtatatatgtatcgtgaaatatctgttaaccctacgttaaagttaactgaataaaaaaaagaatatactgttaaaccaaaaattgccgttagataggaacttttaatatataaagatatatatatatatatataaataaagatacatatttgtaagaattatagtatgcaaaaataaatatttagagtttttttagcaaacttagccttaactttattacctatataattactagaattacatatataattcacattaaaaataatttaatattttaattttctactttagtagtatacattcttctattttttattttttttaaactttt

SEQ ID NO: 182867 - DNA, 673 bp, Cannabis indica
tttactcaagagcacttgcatctcacatggagtcaacaattagtatatgagtattttaatataatattaataaaactttcagccaaaacaatattaataattaggatatgagtatttctagcaacaatatataataatagaaaaaaaaaaactcaaagtttgataaagtaatagaaaaatgagttgtgtatatatgattggtgcgtgtccaacaccacttagaaagtgatgccttacaaatattgattagaggttttttttaagtaatatttattaatttgatactttatcataaacaatttgatggaagacaagaaaaacatttcatgaggtttaagtaaatcaatactttcatgaataattacatataatttcattaaaaaaacataattaattacttgagagatttcattttaagggtactgaagctgttacattacaagccattcatttcattttattattccaagcaaatttagcaatttgatgagttacaactctagaaaagttctgatatatatgctatattgaaaaagaaaccttcaaagcctgtaattcttgaatcatatccttcatgtgagctggaaaactgcatttagcattttgattgcagtatcacagtcagaaaaatgcttaacccattttaattaatttcaatgacacaattaatata

SEQ ID NO: 182868 - DNA, 565 bp, Cannabis indica
caaacttacatcactaaccacaactgaaaattgtatcctaatagtattttttcaggtggtaggactagggtacaaaatctaaaatctttgtctcaatcctttaaatatttagtctttttgctaaagtttttcttttaaatgctagaaggcctttttcttttctttaataatgttggtcttccaacattaaccacaatttatatgatatatatttttatatttttgtggtaaataaaataccaaaattttttttcttgaaaaattgttctagaaatatatgatattatttttggaaagaaggctttctaaatttacaataaatccaacaaatgagaaaaagtagatatctcatcaaaaccgtccatccaatgatgaattgacaagtgtccatgatgctaaatgggtaggcccaatttagtctctataatagggaaccacaatatagccacccaatttttcatgtcataatacacacaaatgaggtgtgtttagataaatgtccaatttttagtatttgccctatcaccaaaccattagtgaaaaatatatgtatatataaggaaaa

SEQ ID NO: 182869 - DNA, 697 bp, Cannabis indica
gacatgtaatttaatgcgattaaataacataatacatacttatgtataagattttacacgaacaactcaatttagttaccattatcttttactcctacaatattttagtacagcttcttgttatatctttatgtaagagtttgatagacatgtccatttataatgtgggatcataagacttcaataacttcaatcaattagatgcatagaatcatttacacatgtaagctaaagaggccatttaattttattttaagccgaatatcttactgctatttaattttattttatgtaaaatatcttaaataactatatctatattatcatatataaaaattgagattataattataataaaaaagacaaaataggacaactttgcgagtctaagtcagaaccccaccctatcatgttgttggctctgtcccgttgaattaagcaaatttcagaaaaattacgaactactctttcatataatgttctcattgctgcaacatatcattgcttcaattctccttgtaaatattcttgctattaatttgtacagttttacacttattttagttcttctgttctttagaagcccttttttgcagtaaatttacataagaacgcggaatatttcgctaaatatcgtgtaatgtacaaaaacaaatttgttgttgctttaactttgaatcaacatggattctgaagc

SEQ ID NO: 182870 - DNA, 859 bp, Cannabis indica
ttctatgtggccgggtcgaagaggggttcctttatttttagccaacctttttaataacccgctgtagaacttcttggccaaatcgactgtggcatctttgtcaccgtcggttggccaaccaacttccccaactatgattttcatgttggggaagcctgctttctttaaggaccaaactaaggtgtcatggttggcatcaaaaacattgtcataattaaggttgttcttgtcgtttatggacttggaaccaccatcgaagaaggcaaagtctcgtgggaagtttgggttgtcgtagaggctgaggaaagggtagatgttgaccatgaaaggtgatttgttgtcatttaagaaactgactatatcgtgcatgagatcttttatgtcgttgcgaaagtttccatctgagggagtgttggatgaagactcataaacgtcggcgttttgaggtattgtggctttaattttgtctcctaagccggcttcgtttagtgccttttgtatgttttttagtgctggtaatactagttttatgaatgttccattgtaacttgttaagaagggttcgtttcctacaccaacgtacctgtataacataacacactcatattataaatctgtaaataaattattaatgactggattaaaaattagagagaaaaaaaaaataaatagtttctacattttaacaagaccaaatgcaaactatttcctttttctttttctaaaaagaaaatagattgcgaaagtgttgaagatgtgtgaatgaataatttacatcttcatattttttcttataaataaaaattaccattttgatgtcttttaaactttttcttttttaaacttaaaaaaaaataaa

SEQ ID NO: 182871 - DNA, 651 bp, Cannabis indica
atgtatctgacaggccctgttgtctccaagaaaaactgttcctccctttctttcttcaagatcattgaacagttccttgattggacacatatgaaatgagcatccggaatcaagaacccattcatgaccagaatctgcattagaggccaccaatacatctgcagattcatagccatctgctacaacatcagcttctcctttctctttgttctttctgccttctttcttgagtttggccttcaaagccaagcattcatctcgaaaatggccttccttcttgcagtaaaaacacttcttgtctgttgttcccctcgagtcatcctttgactttgttttctggtttcccttgtagcctcctttctggttcttgaaatctttcttttgtgtctttcctctagcaaacaaaccctctccattttcaccttgactgtcctctgttttcttctgaatttcttttgaattcaaagcagccttgacttcggacattgttagagtttctttaccataaagcatcgtatcaacaaaatgttcataggatcttggcaaagaactcaaaagtataattgccagatcctcctcttcctgtttcactccaatattgcagagatcaagagtgatcttgttgaactcatctaggtgattcctcaaatc

SEQ ID NO: 182872 - DNA, 561 bp, Cannabis indica
tgaagcaatagaaacagtcaaaagggaaacaaaaaagtgacaagaagctgctacaatgtttctaaccaagagcgttctcatggttcgagaaggaaacatagtagaagccagaacatcttcttagccagcactggtggtggtccgcaaaagaggatgagctagattccatgggtaggaatggaataaatattgaaccaatggaagaggtagaagaagtattcatcaatgaggaagatccctactaaagtcatcaaggtgggaaagaatttgcctccaattgttatagaaaggaagtctccacagccaagaagaacactgatgtatttaggtcttggagtgattttaacatgactagaattcgatcctcatgtaatctgtcatgcactaaacacagatcccaaggcagatccagtccgaaaaaagtgaaggcctttcgatctagtgagagcaacaacagtaaaaacaggagtagacaagctaagtaacatcacttcctctgggaagctctatatcccatatggctagtgaatctaattttggtccctttgactgttctattgc

SEQ ID NO: 182873 - DNA, 591 bp, Cannabis indica
aattatatcattattaataatttttattttattatatttaaaaaaatcatgtcaaacatgttaaattcatgttaagcgggttgtgtcatgtttgacccgtttttatttcatgtcaagttgtgtcaactcgttcttcgattcgcgtctaattttctcgaccctaacccataaaattcgtgtcgtgtcgtgtcgtgttcgtgtgttgtgtcgaaactcattttgccacccatacatttagcggaacggggaccaagctgtacaaattaggaaaaaaattaagaccgcacaaatctcacaatgaaataataaaacaatagcaccccacattgacaaacgtctaacacaacaaagcagacacacaggggagacctcacaaaatggtaacaaaatcagcatcacaaaggataggatgataaacactattatacacaaaaaaactgaaagaaacaacaactcctatcttgaccaacactaaaagaccagaaccttctaaacaataagaccgagaacatatcacttaactaagagagaactatctagaaaggagacgatacaacattggggtgtaatgccccccaactaaagaagggc

SEQ ID NO: 182874 - DNA, 582 bp, Cannabis indica
cacttaggtcggcgtgtaaaaatagtttgtaatatttcgtgaaaatttttatgggatcccgaaacatgtctaatcttttagaatggtttgtatattaaatagttacaagttatattttcactctgtacttgatttagagtttaaatttctgctcttatttctaggactgttcaaaaaaattaacaaactacccaacccgaataaaccactcaaaccaaaccaaataacccaacaaaaaatataacctgaataactttaaaaaaaattcaaaccgcccaatgaatatattgggcgggttaaatattattctaacccgcccaaataacccgaataaactgatttacatatgttttactaaaattatttataatataatatataaattatgtttaatagttaaactattttacatttaaagtttgtattttatagtgtttaatttgaaagttagaattgatagttgatatttttgattgtattttaatattgaagttgaaatttaaaatttacatatgagtatatattttttttatattattttttgaaaaatattgtttaatactttaatgtttattcaattca

SEQ ID NO: 182875 - DNA, 520 bp, Cannabis indica
gtcaagatgaagagtgttatattccattttcgtcggaatctcatttatattgggaacaataaataattctgttgccgatcattctttatttagattggaaattccaaactcactacaaaaaactgcttactttagtgactaatttttaattagtcacaatataattttttgtgactaaatatgatttttagtcacaacaaaatgttacttgtgactaaaatagttacaagttgtcactaatttagttttagtcacaatacttattgtgactaaaaatacttttattcacaataaattgtaatttttgtgactaatacttttagccgcaaactttttagttacaacataaaaatgataatttataattagttacaatttttttaattttggtcacaagttttattgtaactaaaattaagtaagattagtgattccttataagagtgataagtgacatcacattatatatacatttagcattaccctactcataaatatgcatgtgtaaactgcaatatag

SEQ ID NO: 182876 - DNA, 1124 bp, Cannabis indica
gtagatgcaaaaaccagacatccgaatgagcgaaggtgttgatactcaggcaatttatcaaatggcaattcgtatggagtcttattatctaataaaggagtaggaattctgtttattagataagcagccgttaatacacattcattccagaattttatgggaactcttgactgaaaataaaaagatcgagcgacatttagcaagtgctgatgctttctttctgcaacagcattttgctcgggtgtctcgatgcaagagaattcatgaactatcccgtgtttagaaaacagttctttaaacaccaattctggtgtgttatcagaacgaaagactttaaaatgttgcttgaattgtgtctgtaagtatgccagaaattgaggcataatgaaacttacatcagatttatgctgcattaaaaaaatccatgtgaatctagaaaagtcatcaaccaaggtcaggaaatatctgtgatttgtgtgtgacacaatgtggtatggtccgcaaacatcacaatgaacaatatcaagaattttattagaaatagtattgctattgggaaaagggagctttctttgtttggcaatgggacaaacataacaaggtgtgcttttgtgtaaatctgaaactttacagttcaaagtattcttaagcaagtttaaacgtttgttcgataaatgtccgagacgtgagtgccaaatctcagctgagacagagaagacatgattttgatttggtgtagtatcaagtatgtaaagatctttaacagtactacctcttccaatcatcttcttgctgacattgtcctgcattgtaaactcatcagcagtgaagtgaaaggaaacattagaattcttagtaagataacttactgatactatattgtattttaagaaaggagcatatgaacatttgttaaagtaatgttgtttcctaatttgattgttccactttgattcacagtaagataatcattattggggaggattagtttagttggtgatatcttacatatgcatttgaaaacatcttgatattagagcaaaatgtgtctagtggctcctgtgtcatatccaagaaccatgtaatgggggaaaagtatgtgagataggatgatacctgtgttt

SEQ ID NO: 182877 - DNA, 663 bp, Cannabis indica
gattgaaaagagcttctgccggaacatgagagagaagagatgcaacacagctaaaagaaaatacaacatactcaaaaaaacatacaactaaacaataaaataaggttacataaatacccctaattatatacattatttcaaaataaattaaaaaactaaatttgagtatttttttcacttagaaaacggtgtagtttcaaataaaaaaccgtttgtagcaagtttctaacttgaatgatcagtatttctctttttttgtcttacttgaggtattaaaaacctcaaaccctaactgaggttttacataaaaaccctttttaactaggtgtttacttttttatatttttaatacttattaatttttaaatatttttacaaaattatttttacttttttaagtttgaaaaagtaatataattacaaaaatattacgtttagtttcttctttttttgtttatccatggaaagaaagctcggccagccaaagatcttgctgtctttgctacagtttttttgtcagaattatagtgcagcgcagaaatggaaacaacctgctgctggtgcttctgcaatcgtgaatcttggccggtcctctcacgcgacacctgctcctattccatggaccaaactgccggttggagctttcaaactcaacattgatgc

SEQ ID NO: 182878 - DNA, 753 bp, Cannabis indica
gtttcagcactaaagaatcagagaaagagatccaggttcagatcttgataatactctgcgacagaaaggatacaagggttagagatctgaacggaaggagtcatattattccgctgcacccaatgtaaggtttactaaactttatatgtgtttatttcatcgttttagaaagttcatatttagggtgttaatcaacatacttgtgagtagatctaagatcctggtaaaataatttccaacacttgtccaccttagtcggccagctaaaggtccggccaggatcttgccaatacttgtacatttctttctttgtaagtctccatgctgtctaccgtgcaactttgggatttccaagattggaaggttgcacagtactaacctgaccggttggtgctgacctgtctccaatgtgtcttctgctttttgtcatgtggaggcgccacgtcaagtgggcaaaaattaaaataacaaataatattaagatttaattgactttatgggaaggcccaaacttttcccaataatatccccattccccaccatcccccatctaggactctaatgattcatttcttgggtagaaggtctttcatataatataagttggttttggacaacaatacctctcccttggcacaacaatattgttagttaacacacttatgaagaaacaacggtacaaagaaatcaaaatcttctctaacagtaaggaaattgtgtctagttcaattcttctcttgatctaagctcaac

SEQ ID NO: 182879 - DNA, 576 bp, Cannabis indica
gataccttttttcattctccatttacaggaataaaaggtccaacattcataggattaaccttttttgtggtattattttcttctagagtaggctcgtcaggagaattttctcgggaacttccttttcaggcttgatcacggtatgtattcgtgctaaggtttctcacatttggcgtgagaattcttcctgctccaccaatttctttttggtctcagcgagttcttaagccatccgaatcacttctagatcttgttcataataatactcctcatcgttcttgttataaccatcgtaaggatcatcctcttgaaccacccgatcctcctcgtcaatgggatcctcatcaatgtatttctaacgttgttgattcttctttgcggggtagctactcacttctgatgtctctccctccccaacaacacttgtctctacatgtgtcgtgggaggaggattaacatcatccatggtggtatccccatcatgagcagtaggtttggtgactgtggttctagtggctatcattgttgcagtatacaatgttagtatcaaatttctttagctctcaacgaaagtat

SEQ ID NO: 182880 - DNA, 581 bp, Cannabis indica
atgaaatacacctatatttatacagctttggtcaagtctctagaccacaatggtagacatgtacacagtaattgagtatatttagaaaaaaattaaattctaattaaaaatattacaaaatagacttttggatctcttttcaaaatagttattattcacatgaatttatgtgatttgtgcattatttataaatggaaaaaaaaaaaaaagttctttagaaaaataaaatgggtttataaaatcttaggatattaagtcaaaattctacaatttttttttttttgaaagaatcttttttattttttagtggtgtattatattctattttgatgacacaatactactattataaaaattatataaatggaatgagagggccaaataaaagtgaaaacctaaaaaggaaggaaaagtagaatatagtaatattatttctttttaagtggaataaaagaaaataaattaggaagtaagagcatgtttggtattattttctgttttttgttttaaaaattatttttagtaaatgagaacaaaataatttttgaagtttttaaaactacaagtcacatttggttagt

SEQ ID NO: 182881 - DNA, 992 bp, Cannabis indica
ctcgacattccatgtaatcagatcaccatgtttgagaagatctcaacaacttttgtggaaaaataattgtttttcaaagctccaaaatgagcgtatttgaatcgatccactacgaccagaatatttgtgactacaaaagaattgggcagccccacaatgaaatccttagctagatcctcccaaacattttctggaagttaaagtggttgcaaaaactcgtaaggggcagcaggagagtatttcactatttgaaaaatcacacaagcttacacaaactttcacaatttttggattcataccaagactagaataaattagcgctcaaccataaaaaaagttttcttcagcatgaccgcctgttggagtgttatggaattccctcataacttattgcttgagggttagaattggtacttacatgtacgcgctacttgtactataataaaccatcacgaccgcctgttggagttttatggaattccctacattaagttgttgcttgaggttagaattggtacttacacagaggcgctacttgtagtataatatgtttggaattattttaccaggatcttagatttactaacaagtatgttatttaacatcctaaatatgaacttctaaaacgatatgaaataaacacatataaagtataagaaaccttacagtggttgcagcggaatataatgtctccttccactcagatctctaacccttgtatcctttctgtagcagagtatcaccaagatctgagcccgaatgtccttctcttgaatctggattcttcacagccttacacactatgattgagataccacttgatgtgtgtgggcactcactcattcactataggctcggtttagaagagaggaagagagagagaaggtggcggctagggtataggaagaaggctttgaatttttatctgaaggaatgagatgcatcatctttttcctgaagccatcactacctatttataggaaaccacctag

SEQ ID NO: 182882 - DNA, 662 bp, Cannabis indica
tgcatgtgtatttgttgtcaagcctagttagtcactgtttgagttgtctcatatctaatcagtttgttaaaaagtccgtacagtagaaaaaaatagagatcaatttaataggaatcgcatgtaatcaattcaataggaattagaatcatttaagtttctaactttaattagtttgttatctggcactatatatatgtttggtagaatggaaaaatagagaaagaaaagaagagagaaatgaaactgtggatgtttggtagaagagaaacgttttactatacacttaacaattacacccctctataactattcataaatcttatagaacacagtgattagattatagtacttataagaccgttttgttctattaaattatttttatcaaacacattttatttacttctcacctaccaaatgaaaaccatttctctttctatcacacttgtcccctcttccttttcatttttatattcttaccaaacatcacataatagaattggaaggttgtgtatcgaaagtaagagaagaccctctcgaatcttaaatcgtatatgacacaattatattattagtactgacaagaactttttgatgtgataaaatcagattgtagatacgacaactactgtttgtaaataattatttacagaactttctaa

SEQ ID NO: 182883 - DNA, 753 bp, Cannabis indica
atatagcatatacattatacatacgtgacccacaataggattttaatccaacagtaaatgttaaagagcttagatgcatgtagctaatattttatacttttgatagtacataagagagtttacagatcgatcaaaattagttacatgaaaatataactttaagacaaaaagtatccattatacaatattatcaagccattataaagccaatatagctactacatttaaagcttttattattatcgtattttacttgtagtcattattaatttaaagttagttgcatcaccctatctcacttatataattcactattttttacacaataagtttattttatacataaaattaaatgagaaaatgatgatgaatttattttatacataaagtcaattaatatactataaatttattacttacatatattcaaagtgctttggcatgattaattactaaatataaaactaaaataaataaatgaacatcaaaataaaataaaataaaataaaatatttttttaattaaaattaaataccaaatcaaagtaaatatactaaattatgagagaatcaaattttagataaaaaaataaaaaatgattaaagaataaaggtatgagaaggggaagaagagagcaccactgtcttgatgcttgcttcaagccatacaaaacctttttaagtttgtaaactatatttggtggtaatccctcttaggtctatacctttgggatagacatatacacatcttctt

SEQ ID NO: 182884 - DNA, 410 bp, Cannabis indica
aaaaatgtgcattcctatgtgtgagagtgatgttgggtattattatagggctcgtttggtatgtcgtattacaccgtattgtattgtattgtattatatgaattgtatttcatgcaatatattttatgtaaaactatatgtagtattgacttggccacataaatatataatattttagtataaattaaagtttactatagtattatatgaaaatataatatataatttaatttaatataatataatacaatatgatctaatacaacgtactaaatgagtagatagtggatttaattatactagtacttcaacattaatttatacaagtattgtatacatcatcgttttggaaacttattatttttttttggacaaatagaatttttcttaatgagtaaactgaaggaact

SEQ ID NO: 182885 - DNA, 577 bp, Cannabis indica
cttgaattctctatcactagtaacaaaataccctttcaaagcttttcttaaatgctcattagtagggaaaaacataccctcttcgaacttgatctcctcaagcttagtccttggatcaaactccatgttagacttttttgaccgatgcacatcttcatcatcactaggcaagcttcttaattcatcttcctcttcatagcccccctcagagtcttcttggttaatttggctgcaaaaattattgacagaaccccaccatttacttggatctgcaatgccctcttcctctaagtctttagccacaggagcatattctgcttccttaaatacatcatctagctgggcttcggtttggccttgagcaacatgctcacttgtttgagttttagatccaattgaaccttcaaaaatagtcttttcttgggcctcacaatctgaaaaagaaaaaaaaaaacaaaaaaatattaattaaaacaattaaaaacaatgtcaataaatgtataaataatatagagcatatagagtgaagggtagcaagcaagactctgataataagatagtggtttttagacgtcaa

SEQ ID NO: 182886 - DNA, 810 bp, Cannabis indica
acagattagtatttcaaataaaattaacatatgtgacttgacacgtaacatctatctagtattccaataaaattaacaacgtgtaaagagtgttttttcttctaagaaaccacaaacaacttattcaaaagacgaaaaaatattaatgagcacatggaaactcacctcccaaaattaaaaaactttatacatgagtgatctattccacatttaacaaagagtgttgtcacttatttgtacttaattgaaaattagtcgtagaataggaagtgggcataaggttgtcattattttcgttgaaaatcttcatatatgcaaatgtgaaggagaggaaaataacatgtgaatggttgttaagcaattcttccttataattacctcagcaaaaaaaaaaaaataaataaaaattctaccatcttaaatagttataccaattttatttttggtgcaataattataataattcaaattaaatattacactaaataaatatatttaattttaaatttttctatattttatattatttatattaataatccaaaataattaatttataatataattatactatagtgataagatttaatataattataaaataaaatatttattaaatcaattaacactatctattatatataaacataacttattgaaattctgtattgatcctataatataggtgactattttttaaaaattgagcaaataataattatgctaaaagaggtcatcatcaacaatatcaactatcaagcatctcaaaatacttaaatacatataaatcaatattttaaatattttttt

SEQ ID NO: 182887 - DNA, 626 bp, Cannabis indica
cttcattataaatgatccaattctaactttaccttcaatatacataatgtactaattggcttcaacaataattttactattctttcaaaaaaaaaaaaaaaaacaataattttactatacatctaaagaaaaagcataattccaaagagcactattgagaaatatggcacaatatccatattattccctcttaaaatagtaattattttttgttcactaatcttgaatcgaattatgcacgtaaaaaatataactctaataccatgttgagaatcataagattacattttaaaaacaattaataatgagtagagtaagactcaatactctattatttatttcatgtggaactaaagacgttgctacttttggctccaaagaaggccatgcccctcctaaaattttggagaaaaaatattttataatgcaatttcatattaaaaatttattttttaaaaaattatatatttggcctcccttaattatttgttattttttggctccccttattcgtaacttctgcttttgtccctgtgtgggacaatgtccacaataagtattgttattaaatagtttaatggtgtcgagtcttttttataggtcacgcttgattacatgacccgatc

SEQ ID NO: 182888 - DNA, 932 bp, Cannabis indica
atgaagattggttagatcaattccccaacaccgaagcctgcttcaagtgggattgtatctcggatcatagttattgcatcgtcaagagcaacaaaatcggtaacgtgggcatcaaacctttcaggtattgtaaccattggtccttccatagttgctttcgtgagagggttttatgctgctggaataaattttctgatgctaatacagttggtgaattagtgaagaagctgttgagagtgaaacatgttttaaagaagtttaacaggaaagaggttggtgatgtagagaagctctataatcaatgcaaagctgatttcattacagctcaagagagtttggccaaggatcctaataacagcctcttgcttcaggaagagaataggctaggccatgaatatgctgctgctttgaaacatactcttgttccttcgacaacaagtaaagttcttggctgcagaatgggaagataacaccaaatatttccattctttaatgaagaaaggaaattggaaaatcggattacaacgtttgagtcacatggtcaaattgttgatgactattctgaagtagtggaacattttcttaaccatttcaggaactttatgggcaagaaaagttcagctactaggaggttgaatcaggattgcatccagcaagggcgaactctgactttagagcaacaagccaaactcatcagacccttcaccgaaaaagatgtcaagaaggctatgtttggaatccattccaccaagagccctggcttagaaggatttggttcggggtttttcaagagcctctggaaagagattggggcggatgtttctaaggccatactcaacttctttgaagagggttcaatgtcgatatctttgaaggacgctgtcattactctaatcccgaagactcaagatcctaaggatgccagtgattat

SEQ ID NO: 182889 - DNA, 679 bp, Cannabis indica
tgcaattaaaaaattaagggttttacacataaaaaagttatatgttttgggattttacataacactgttggtgagaaagagtcaaaaggtttaaagtttatggttgggtgttgttgtgttattattgtagtgactttatgcatgtgcacatacaaatagtggggtccattgatttccatgcttgataagaagaatgacagattttttaatgaagctttgtttgattttgtgatctattccattcaagccaatattcatgtcgatctaacttaaaactagtttgcaaggagaaaaaaaattgttgaatttgaggagcaaatccatgcttctacatgtaattatattattgacttcaacttcttaaaagaatataattcaagatgaatttttcaccttagcttttaggtttgtggcagtagaatagtaatgagaaagacccctactactcttattaatttttactccagcactactctcatttttatgttttttaatttatgttcaaacccatggttgataaaaacagccactgtcaaccaccaccaaccaataatcatcataaaacttgaagccaataataataataaaagaagcataatcaaacataaaattttcttgtgtatattcatgccttctctctctgtctcttgttgtgtaggctccaccttatttttttttg

SEQ ID NO: 182890 - DNA, 653 bp, Cannabis indica
aaaacaaataatggtgcatcaatatatctattttaaggagtgtattgtagaattttccaataatatttaccctctaaacaaaatataggactaaaccacgttttttgaactccaattggagatgctttaagttacttcggacttgggagacaaaaatctaaatagcgttaacaaaaaactgatcagttggagcctccacacacccacggcagtagcaactagcaagcaaccatgtaaatacggttcagttccaagcaagagacacagagtatggaggctttgatagcctcttatggagacgaatcctccgaatccgactccgagcccgcaaccccatgtcagcctccaccatcttctactcccccgacaccggaatttactcctcttcctccacctccggtttctctccttattcctcctaattcaatcggtaacttaatacttcttccttcataataatttatttctctccttttgggcatcacccaccaaatgtttgatgttttgactgtgaagggggtctggatttttctcctggagaacaatccggcagagttagaacattccctcatatcgaaggaaattacgctttacatgtatatatcccaggtggggctaatctcattgaaattcaagtcattgatatcaaatca

SEQ ID NO: 182891 - DNA, 499 bp, Cannabis indica
aagaaaagaagacgacaagagaaaagaaagaagctaactgaccatcattggtctttagtaaacttttttctaagcaaaatttctagttgtctatcttcatttacttgacaatttccactagcacaaagccaccttttatataggcccaaatttcataacctaggctggaaaataagaggaaaatctgtaccatgcctgaaatggggacaactaaaacccatctataaagaactgaataagttttctctgattaaacaaaaatctgagtttattgtaatagttagttgcatggattgccatgcttgaaatgatcacaacagtttgatggtgctctgctatgtgttagtgtgtatggtagctgtataatgaagttgaatactaacaagtctattgtagcttttcacggcccagctgtgtctattttttttctgcatatgtctgaggattgtagagtagatgcttatttaactggcttatggacaaagtggatgctaatcac

SEQ ID NO: 182892 - DNA, 504 bp, Cannabis indica
gttataagatgaggaatttgtgaatggttttgagatgtgggcctcagattattatgagtcagctacactggaaaagtaatggggatgtagttttcattcttgcaagtcatgtcaactcgattgtgacttttttttggtaaatactcgattgtgacttaattgtaacaatcccttatttctctactgggccagcccacaataaaaaaggtgacccactaaagattccatacgctatcttcacccaaacatataagaaaaaaaagaaaaagattccatatgcagaaaaagctaattctttttgtggaacaattgggggattgtggaagggacctgatttttcttcttctttttaatttttattttttaataacatggtcagattcaaggactgtaaatggagtaccacaccttacaggatatcatataaagatattatatgatatctcctcagttaatcaccttaatacacaacgagctgcccatcactacgtacggaacaaattg

SEQ ID NO: 182893 - DNA, 1389 bp, Cannabis indica
aaatatcagtttaaatttttattttattattttattatatataaataatattttattattttattaaatataaataaaaagtcacacccatgaatttctcataaaccaagaatttagttatataggcacactttatatagaatagatatatttaattgtttaaagtatttttttatttcccatttaaaaattttgccctaagctcccttaaagattaagacaaccctaattatgcttatttcttagtcaacaatcaaaaaatatataattataaaaatttatatattaaaaaaaaagataaaaattaacaataaccagtcaaattatatgagaaaagctatacaatccaaataacaaacaaacaaacccattacaagttaataatatttttgtatattagaaatattaatctataggtatataaaattaaagctatatttattattattgctcaaattacaattgttgattgtcattggcaatatagtcaatcagtgtaggatgtgccttcctcctattcatagggttaaatttgtacgtgtggcaaataattatcagcacacacagtatgactgtaactataaccattaccactaacaaaacacataaaacatgatataaatataaaacgtattggcatacaagttaaggatatgaagctcaatttcataaaggcaattcatactgaaaacttcttaaagagaaaattttatttatactctcaaaaaatatcataatgaattgtctgcaataatatgaaatagggaataaaattcacatactaataattgaaactaaattgttcggtaactaaaacaattaatttaaaaattaaagacgataatgagcttaaactttaacttggacaatctctaccctactgtccaacaatctgtcttaactcactaggatagtaatccaagtttaagcagctggagctgaaataagaagaacataaaacacggatagtagatctagaattaataatgtaaagagataataattctctaaaacacatgaattcataacaaagttagaaataccttatttctttgccaaaaacttaggacactggggttttcagtgacccttttcgttgcaatagaagcattttccttttttctttgcttttggattaacatcctctttacccttattagttgtgttaacagctttaagaggcttcttgctcttcttccatttcttcttctttgcgggttttgaagtagaggcaatgtttgcctcaggctttgtcgtaccagtagtagcattactagaactaggagctttgttttctcctttatgcggtcctccaatcaaattttcaaatgtttgaaggttgttgataaactcgtgaaagtcaaaagtcaacttgttcatgacataatt

SEQ ID NO: 182894 - DNA, 638 bp, Cannabis indica
atagtatttacccttaattttttcaccatttttaggggaaaaagaagttactttaatctccatctttttcgttcacaataattctagacatgatcaagaataagtagcaaaaaaaaaaaaaaaaataaaatatatatgactttcctttaaaatatagatgtgtatgactttagatatattatgtttgtaggggtttattggatcacatctaataaatttggatccaattgatctaatctaattatttattaaatattaaattttatcattcgatctaatccaatcgagtcatctaatccgatccaatagatgtattggattggatcgattctaaccattaaatgtattgagtggttttctattagatctgattggatccatgcaatctattttagctactatttaagttgatttcattaaaataaaaaaatatatgtataaaaaaaacataatttaaaacttaataatctaacctacataataaacattagtttagtccaacttaattctcataatctcataataaaatcactaaaaagttaaatttattccatacgcattgacgattttattatcgtttagaaagataaaaattaatattttagatctaaagttttttaatatcatgtgttaaatgt

SEQ ID NO: 182895 - DNA, 552 bp, Cannabis indica
cattttgtttgttcctccattcgtttagatatagttaaatttttgctgtgaataaacacgtgattatactttaatttggagataagatgaataaggttccatcttaaaattaattggcaatgggaaaagtagtcattcttcttatatcataagcaaaactcttttttggctcactattactatccctgatcacaagtaacacttttaggtgaatgagttttatctcaaaaccaattgacaatagaaagagtagcccattcatcttatatattctattattttttcacacattaacactgtgatactctctaataatgtaactttatatccactacaaaataataattttttttataattacataaaacactaatttttataaaaaaatatattttttttacatttatatataatttttatatttttacagtattttataaaaatataagaaaataacaaaaaaaaatcacataaaattaaacaacaaaacaataatcaaaaacaacattaaaaataaaaatacaaaataacaaaaaataaaataacaaaaat

SEQ ID NO: 182896 - DNA, 671 bp, Cannabis indica
atcaaccattttcatttttgcaccgaatcatgtgagccattttcactttcttatgtatacattttattttatttccaatactaattttatgttttgatttttaattgttgagatttgaacagaaccctcaactcctaaaccccattttgccatttgcgttgaatattaagttttttcatgcgatgttagtttctactcataataaagttataaatgtaaattttttttttaaaaaaaaaaaattaaattgatctaattacaaattctgagattttttgtaaatattaactatcataaatagacatttgttattgtaactattcaatgtggtttgtggcagcatcaacaaattatttagaagtataaataaaatgcatatgaacaagagaataaaatgaattatttacaattattttgtagtttagaattattttttttaaaagaaaaaaagaaacagatagcaaaactctacaaaatcatagttcatatgttaaaaatacaatgtattctaataacaatttattcatctggttcgtttatgaacaagagaatttgtacaaacattgtgggcttaggcccgaaataaaaagccattacaaagtctttggtagttctatttaggggtgtgcataaatcgatgcaatctaatgacatccaatcaattcaataac

SEQ ID NO: 182897 - DNA, 739 bp, Cannabis indica
ctggcaagacgctttgtgaacttggtcaattcggctatttaatcttccaaatgctttgtattgtcatccttgaactcacacccataaactctatcaatagtatgatttctgaggttgcttccataaggtcccaacttttcacctctagctcgttctttctttgcatctaaatgtgcccagaggtccactattgacaaaagtgccctctcaaactgggtgaacctcctctactctctcactctaattaatagaatcactagggtggtttttccttccctaagcagtaggcctttgtacttgagtactcggcttatctccccgcgcaactccaccttgaggattagtcgggcagcatttctttggagcattagtttccttctttttcaataaaggttggttggtagtattaatcttattttgtggagtagttggagcagtattttttgtaggctctcccatgacacattttccgttctcccttgcaggatcagaggttccagagtcttttgggtttttatcttcatagcatgttttcctgaggaggaggctcatcaagaatatttcatcatgagccactcctccttattcaattttggcatccaatcttgctagagtttctcccatttgttgggagaattctcttgattcgctatcttctttttggtttcaacgagttctttagccattcgaatgacttcaggatctggcccatagtaatactcattttcttttcttttcc

SEQ ID NO: 182898 - DNA, 546 bp, Cannabis indica
ttttttaatattgggcttgcaaatataaatgctattgcatttggtacattgaggttgtgcagtaacattttttaagtttttttaattcattttttcctttcttttgtttgatttattttagtgttattttatagttgttttgtcatgattatttatttgatatcgattttactattttttctcaatctcaccgaaattaatggttgttttccaattattcaggtgttcctctggtggttctgtccgtgagtgtggaagatggatgcctcagttttttttttttgtgtttacaatataaaagaaaaaaaaaatggccaagataatataaaagttatttctgccgtgtggcagtatttttgtaaagattgggtcaaaagtcagtatttttgtaagttttcttaatattatggtagaactaaactcataaaaatgtttaaaactaacaaaataccataaaaatggggtaaattgaaaaatacatttttatttatcaattaatcaaatctacctctaatttatatttaattgaaacatacatctttttat

SEQ ID NO: 182899 - DNA, 562 bp, Cannabis indica
gggctatacgaccctaagtaaaaaaagttagtgtagtaaaaaaaattaaatatcttttatttagttaaataattatacaacaaaatagtaaaaagcccccacaaaatagttataattttaatgtaaaggaaataataaatatttttataacaattaagcccccacaggtcaaaaattctgggtccgtcactgctaattattataccaattatgtctctcctctttcgtacaattaatgtgatacctctctaacatgaatacctgctcgctgctagctattaattaaggtaacatatgtaaaggtaaattgaatagtaaacttataaaagtgggtaaatttgaataaatttgagtatgcattcatttttagttaattgataaaagagtcaatttatcccattaaatttcaacgttattctaaattggaaaaacaattatattgttatgtaagttttggaagcccaaaaacaaaggcctaatggattaactaagctttaaagataattatgtaactacgatcacacatgggtccatagctcagtggtagagcatttgactgcag

SEQ ID NO: 182900 - DNA, 1000 bp, Cannabis indica
ctctgcccttgaataggcatttgacacctaaaaagcttattagctaaccagcattctctctcttattcttttcttcctcattttttccttttatatctatatatatattattttatataaatttaattaatatgagcggcacaccatgcactcctcaatttaaaggagatcataaagagataccctacaatatattggaagacaaaaataaataaagtgataaatattataattaagggttcgttggggacttctatttgagtccaatactaattaatagattaacatcataacgagccacagtttgactacccattattgacttttcatttccccgcttatacataattttatgtttatttaggtaagtgattgaactgaaataaattatattgaggtaagatttgataattaaataaagttacattagaaaaataaaaaatactaacaacaatgacaataaacatttgtctttttttttttaattgaaaaatgtaattttcattaataaataaattcagccaaaaaaaaagtaacaaatcaataggaacagactccatactaaaaatacgatcagggtacaaaatagagactctagcaaagctacaagccactaaattagcagatcgtttaacaaaataacctcaacggtacacaattcagcaagcaaatttttacagcttttaatgacttgaccaaacaacgaaatcatacaaatagaactacataatgcttgcacaaccccaaccatactcgaagaaaagatggttcggccctcaaccaaccaacctttatcatcttttgccaccatactcgaccaaatgatcgaccatcatcaaacaaaagttgtatctacattaaccttaattctattaacaagtggagggggaccaatgctctgcaacatcatgcacctgatagtcaaaacatgatgagccaaggacagaattttgagcattattccattgattaaggtagtttttaacaacccaacaatgtc

SEQ ID NO: 182901 - DNA, 720 bp, Cannabis indica
gttaactcactcaatatttaaatatggttagtattattaatttaccaattttcccaaattacatatccaaattgcatattctaattgattattaatattctgaaaattaattctagttagaaaagtttcatctatattaatatagggtattcgtccctagctaagctcactgttcatattaattcttccataaacgaccatcagtgaaagttagtgagagagcttggaaattcaattactcacaataactcattttttttccttcgtagattcaaaacttatgtgagattaaagctcaaaaaattaatgactagagatatttcgattttttttttttcgttgctcacgtattgtcctattgtaaacttctcatattctcatttattgtaaacttcccgaaggcatgaggttggaatctccatttggattgtgtttatatttgaggaaattaagtggggtacccgactttaagttagccattttaatttttattcatctttttaatatttcatattttctacttacttttaattatagttaatgtccttaaaatgccctttcttcaatccaaatagtagaactaattttcaatctttaatgctaatgaggagagatattggacaatcttcctataaaagtaggtataatttaaattaaatatagtttgtctagtagttttggtttaactaacacaaaaaataaggtatttttctaagttat

SEQ ID NO: 182902 - DNA, 715 bp, Cannabis indica
tgcatcaatacatactcttttaaaccgcattgtagaaacacccatttacttttttttccttttaaaagaaaaatcttattgttttccttaaacaaattattaatattattttaaataaataaataaagagttaagcgacaaattctttcatgttcggttaaggcttgaaaagggaaaaaacaattctcattcctagaatctagtctttcatttattttcttttttagaataaaattccaacaactatccaataaactaatagttaattacggtataatccctaaaagaatcatttcgctagtaattaaccccaagttcttattttctaacgacgaaaccccctataccataaatctattagcaaaatcacatttccatttaggggtgttcattaaactgcccacaccacataaactacctgcgcgtcaccacacagcacaaaaaatgcaacttcaaaccctttgcggtgcagttgtggtttgtattttttcaaactgcgcagtgcagtgcagtttgcagtttgcaatttttaatttaatagttgcagatcgcaactcactatatattacaaagttatcaattttttataatatgattttttttttcaaaatatatgtaatattttacataaaattttttaaacgacagtttcaacataatgacttgacgattagtaataaatgtaatgatgtcaaaaaaaattttctatatattc

SEQ ID NO: 182903 - DNA, 774 bp, Cannabis indica
atatgttttcaaatatgtgcatttttaaaattgtatttttttgcatattttttgtaattatttaaaaaaatgtatacatttatataaaatgcccttaaatttatgtatgatattataccatgaggttgatttttggaaaatgatctcattgtgtggtaatcttgcttattataagcaccgttaactcttcttctccaaaatcccattaaaaagctttgactgaagaaattgaaaaatgggtaagattgatggtatcgtggcagttgggactattatggaagctccgaggtctattaatgtttgttggtcttatgatttttgtgtttttgtgttttgggtatttatagagattattagtttccttttttgattaggattagataacaaatatataatataatatattaaatgttaaattgttttgaaaatggaatttaaatttatttaatattataaaaatgataattattattatattagaaaataacggcataactacggatttaaactacggataaatgttttgaaaatgataattattattattattattattattatcttttttttaaatgttttttctacttttacgctttctatttttatagtttgtcttttttatttttacttttaaaattaattttttgtaatttatttttacttgaattcacactctttgttgtccattttcttcaccaaacttctccttgttcatcttagtcttccatcttcttataatggttgttctcttcgtcaatcatcccagcactataa

SEQ ID NO: 182904 - DNA, 600 bp, Cannabis indica
aaataaaatttaaattgtctgttacacgcgtctcttaaagaagtgtattgtgatgattttagttaattaatatgatattaattttattaaaaaaaataatataataataaagaatattttattagtctaatttttagtattgtggttgaagtgataatactttaatttaatgcgctttccttaccatttctcttttccattatatggttaaatctggatttagaattaaaatagaaccaatgtctacatgtgaatttaataattataaaaagaggttaaaacagatagagtagtagtaacgttcaatgcgtgcgtgcgtgcgtgcgtgcgtgcgttacagtagtaacgggcaattacggcgatgaggtggcacaatactattggccaatggaaatggatttacgtgattgggaactcaggagattattattatatagtataatgccatgtttaatcttcacctactcccacaagatgttgaaactctaacggcgttaagtccagcgtgacggctctccctcaccaccaactcccccgcgtcaaacacacgaccacacgaattcacctaacgctgagccgtcaatccacaccttctttctc

SEQ ID NO: 182905 - DNA, 760 bp, Cannabis indica
agtgtaatttcctctatttctaaccttatctatggataacaaattacattattaagatgttataattaaatagatgtattagttgaaaaaaaaaatatcaaacatcaaacaagatcaaatctaacagtaataattattgtcacagttttcttcgggtacacgtgttatgtaataattattgtcacaatttgtatagtattgacggtttaatgaacacccctataactcactaaaattagcctcgccattggcccattgctcgacacctcctaattttttagactccaattatttttattcttttataataaaaattaatattaaagtatgcattcccaacttcctcatattttggcgaaatcttaacattttagttttcatcccaaaatgcctctaaaatgctcttattccaatgtcattttgaccataactagctagacaaatagtagtagagtacaactgtacatgtgggcaagcacaaacatatcattccatatataaacaaactcataaatctccaccattttccattctttctataaaaaaccctcaacataactttattactatttaatatacattataacccaataataattgctaatgattcaaattccaatttcatgaataagttatggtgcaggtgaaaaagaacattcatacacatgaatttggctttttttcttttcttttttttatatggcactagactcaaaaaagctgagatgagatgagagttgttcagtatatttgttcatac

SEQ ID NO: 182906 - DNA, 747 bp, Cannabis indica
atattactaaccaatctaatatatttaggagatattaaatattattattgtttaataacatacttaaaaaagaaatgctaaagataatagtgatactaagtaccacctgaagagtgctcataataactaatatagaatagctggtaataaaaagatttatttttttttttttttttttttattttttttttatgaaggtaataaaaactagttaagagcactcctagcactgtcatgagcattttttactttattcttcacaatatatcactaaatttttttattttttttttttctatttttgtctcgcacacttatatattataacactatatatcaatttcttttttatattacacactatatatataaaaaaaaatcaaaaagatgaaaaaaattattaaaatattatttgaaaaataaataatatttctctatatatagagaagtactatttataatataaatttttaaactattttagtttactaaattgaatcctattttaataataattctttatactttatcttttaaactatttttaagtacattgttacgatagctcataatattttatttttatttttttttaaaagtaaaaataaaaaaattaaattaaaaggtaagtaattattttagtaacatttttttaaaaaattaacgtttacattttcaatgcttatatataaataggtgcgagaaaaatttggtatccacctgtgactatgatgaagatgtggtccc

SEQ ID NO: 182907 - DNA, 516 bp, Cannabis indica
ctctaaaccctcttctttatcctctcttgtttttttattgatttctttctttatacaaattacagtattacacagagtgatatagtttcgacacgtgtccaagactctcacgtaggtgtctcatgctcacaacaacagttgcaacttcgtggcactcgttgggggctgcatcaccacgtggctttcactctacttcacaactccattaggagccacactatgagctcaattttacaaatgaaattagagttgagaaacgttaattgtatacttaacaaatgattgagtattgcatattaaacacatttaaacctaaggcttacacaatctcaactaaagaaataccattcattccaacacattgattaaaaaaaaaaaaagagataccaacactaaacacccacaagataagatttgcaagttgcaacattaagttcaataattaattaatttacaataatctatataaatgaagttccagttcaactacattggagaaaaattggcctctaccct

SEQ ID NO: 182908 - DNA, 679 bp, Cannabis indica
ccatatgggatataagttagagccaaactatgtattttttttataagggtgttttcactttatagttcagtagaaaaaccctagtatctattcgggcattagagtagtgttctatagtaaacacttatccattttacattgtgacatagggcctccattcagcacgtgaatttttgttcaggttgaccgacacacttgaatcaggaaactaggtaagattagtataattatttgcatatgtgattacatgtttagtatgcatgtttatgattgcctattaggttacattgaaatagcggtaccggtatatatagagttatattggataccaatgaatgtatgattggcataagtactcattaacactatcacatcggtacgactagagtagcgagtataggctgatattatggtcaatagtactgtcgtacgaatgttttagactcagtatgcgtgggacacgagatagggttacgattgggtgtatgggtgcctaattataatttagtttatgtttatgatatatttatactcttcttactgagtctgttgactcacagttactgtttccatgtgtaggtaagggcaaagctaaggttgaataatgtgagtgcgagcagataaagattgtacatgtggggaaagttgaaacctgaagcgtacgatctttgggacagtc

SEQ ID NO: 182909 - DNA, 1032 bp, Cannabis indica
agtattatgctactttcttcaaataaactgtaaactaggcaaatatttatgtaaagactaaaagatgactgatgacaatagtattattaccaaatattacaaaaccataaaattgcattattatcttgataaagaaaaaatagttatatcgaaacaacataggttatgaggctaagtaagaagtacgatatgatgagtactatgatgataatgttagtcaacgcaagacctttgactattttggagttgaaaaagggatatggctctaataccatgttgggaatcatggagttccatctcaaaaccaattggcaatgagtagagtagctcatgttcttatatatagctcaatattcttacatttgatccatgtgggacaatattgtccaataaactgtagttactcatttagttttccatcgttgaagtcattgtcattgagttttgtttagttgcagataagaatctttgtttagcttgttatcggtataggcaaaagtcatcagtttatatctcaaatcctcctcactttgagaatttaacttggtcttgagcaatttcgaggacacagggctagtgtcaaagcttgaaaagtttcaatttaataactcttttgacaatgaagtgtccgttataattgaattagctctaaacttaggatcactttgttatatagttaatactaaaattaaagtatcaacagcgtcatctaatttgataaatttttttttgaatcttaattgctcatggaatagggtaacgcttgcatgttgacttagttgagctatgctacgtaattgtcttattaagtataagggtgtttattaaagtttattttattggtctattttatgtttaactcgtttgtttaattttatatatgtaggctcttattatgcctagaaaaatctcaagaagatatagttcatatatgcatcttagagtgtatactgaacgtcaatcagagaggcattcagacttgagactgagagaccctatgcagtagatttctccttctttaaaaaacatatc

SEQ ID NO: 182910 - DNA, 796 bp, Cannabis indica
  modified_base (769)..(769): a, c, t, g, unknown or other
aatgtttatatatgttataatatcaacatttagtcacaataacatttatgattcaaaaaattatattcagtgttttcaaataaaaaaaaacattatgattaaaattaaacatattataattaagtttatattactactaaaacattcttagcaaaaagtattaataaaaactataatttgttgtgactagggtttattataatcaaaatcaaattagccatcactctataactaaataccattttctagcggaaaaaaatattacattttaatagaaagtatttttctttttcttgctgcatttaacaagtaatttttttatttgttttttttttttgtagacgaatttttttatttgttataactagcattgctgcatttatttttcagtgatacctgtgataaatagtacattttgtttcttctcatgatagatttttcgtgaaaaggaaagtccaagatgcaaatacatgtacattacaccagattgaactatcgagtcatgatcacttaacaaatagggtccatctctcattttaaattaatattccttcatttcatatatgacgtcattaatcctttttctttctcaaattaatgcatgtcttctgcatactgtttctataataatattttgctgctggcctcgccacagtttattctactctattctttaattaatagttgggcagccttaaatccatttatttgtgcttctttcttctcagtcaattcatatattcagtatcctgcgcattgtggccaaccntacttctcctttttgatgttattattg

SEQ ID NO: 182911 - DNA, 506 bp, Cannabis indica
cagggatgaccaaaagagtgccacaagtagttataatgtctctattcgggctgtgattatggtctgggaagaggcacctattgctcgcagaatggacattcaagcaaaagctgaagccgtccgggagaactttaaagatgaattagatccctgagttagggtagagagaatgatcaaaccaatggcagatgtaaaggaggttagcatttatgacatagaccccaccaaaaccataagagtgggaagaaaatcgcctccgatggtgaaagaaagcatcgcggatactgtcaaaaagaatcaggatgtgttggcatggagccattctaatatgacagggatcgaccgcaacaccatttgccatgccttgaacatggaagatgtgatgcttgtccgccaaaaaagaagacccttagatctcgtaagggcagaagtaatgaaggtagaggtcaataagtttaccacgaatgacttcctccaagaagtgttgtatccggttttgttggtcc

SEQ ID NO: 182912 - DNA, 662 bp, Cannabis indica
attctgtacacccatttgttgtcgataacatgcatatcaggatcatatggaacaagagtctaggtcttagactcggtgttttccctttgcatagactgaaaccattttggatccttgagagcttgctgaacagatcttggttcagttggaaaaagagattcctttaaaggatgtcttgtagattagtaagcctttggtttgtaaatgccactttgagacctagttttcatgtgatgaattcgagatataatgctaaaagtaggaactttagtaggctgcactacaaaactggaagcaatatttctagcagagggtgaagagttgttggttgcatcaggtccagactgatcagtgggaatagactgctgcaatgcggtggtgggactaggatcaggtaaagcaactggtggtgtgtgcagaaatatgtgtggtacagttgtctcatgaggagaagagttgagtgttggaagggatgattttaagattggtaggtaaattttggagtaggttggtttatttttgggttttgttggtttatttctgggctttgttggttaattttagggctttgttggtttatttctagtgtgggaaactgtattggtgagtgctgcagggtaggagcaatgatgggcattgacctgcttagatgttgcaggggg

SEQ ID NO: 182913 - DNA, 754 bp, Cannabis indica
attgaaaaataacaaaatgggaaagttgcaaagtgaggcccaatttccttatatggccgcccactatgcaaagcgtttaccatttattttttcattattttaatgccatacaattctaacctaaacctagatggcattctataaatagaaagtgttggcttcaggaaactatgacttgcatattgtttctttcaaaagaaaagccattgccgcccctctcttctcttttcttctcttgaatttcgaaatccttgagtgatagagtagtgcccacacacatcaagtggtatctcaatcatagtgtgtaagacttgttgggttttatgccctaaataaaactccatttcaatgtaatctattttacttacttacaactactaactaaaagtaaaaacgaaacgaaaggtaaagttttttacttttacttacttactttagtttcggttagccaggttttggggtttttcggttacccttaacctttactaacttaagttcgttcgtttcgttactttttagtttagtttaattttaaaatttaaacttactacttcgtaaacccgttttaaaccccttttaccaactaactttacgttagtaccttccgttttagtttttagtttggtttggtttcgtaaccaaacctttacggtttaaagggtaaaaaacgtaaaactagtacgtaacttagttggtaagtaaaaagttttaaaccgttttaccgtaagtttaattttactacgaacgaaccaac

SEQ ID NO: 182914 - DNA, 705 bp, Cannabis indica
ctcataagaaataatcctttttttttttacattaccttcttgagtggcttcttcacatcttctatggtaatccaaggacaattgggaatccaaagtcttcaataatatgttgtacttttcttcagcttcggctatgtattttgcctaaagaagaaaatgcataatcaggaactagattaaactaaaaatttattgtctaaatcactcggaatatttcgaaatgagccacataccaaagttcacaaaataccatgcatgtcttcggataggctatgctgtttaatttttctaatacaaccccccgaaaaaaaaaaaaagaaaaaagagacagataataattatctagttggcacacttaccaacatagcaggagcagaagttccataaattctgacaaacatacgcagaatattgaaattattctctaaaacatcatcctgcatgttgaaacgatccatgtttcaaaatcgaaaagcaaaaaactataaatggatagatatgtagtctagtagtcgaaccacctcatagtcaaacctgcaatacaatagtatctaagttagcagtaaatatacctggatccagaccttctaatgattttgtcaaaaaacaaattagaaagtataaacaataaaatggccaaaagcaataacaaataaaaagaaaagaaaaaggactcaacagaatcatctagctacttccactagg

SEQ ID NO: 182915 - DNA, 930 bp, Cannabis indica
aagaacccacaagaagttgaagtgtgtggcattgagacccaatgccagctcctccatttgggtggcacttaagcttgccatgcttccaaaggccacgtatacaactgactttggtggcttagtgttgagccattgtatgatgggagcagaggagtctggctcaaacagatcgtatccatattcattgtcgtcttggaagctcttgtctaggtagaacagtggaactgttggccctattgttagcactggacaaacctttgacatacaatccaccacctgttcattcattacacacatgacacatatcattatttattaaacctacgtacgtgtaagagaattacagttacagttactatactaataacattacatgtgtaataaaagtacagaggtgacacactttatgaattgtgagacctaaaccaataacacatatggtatacattgagcactactaaccttatgattacttgtttagtttggtatgttaaatttagaggaaaaaaaaaagtgaatttcatttccacccaatatttaaaaccacacccaattttaattttattatttcatataaaatatatatatatatatgtatctttaatctacactaattttttttttaaaaaaaaatcttccttctacatattcctaaaaaaatatatttataaaataaaaataatttttttaaaaaaaatattaaaacaaaaattaaaataaaatattatattatatgaaattttattagaaaaaaattaaaaaagatataaatattttttaaaaaatgtaaaagtaaattaaaataactattgatatttaaaaaaatataatagtgaaaaagaaattttgaaaaaatataaaaagagatttttaaaaaatagaagtgtatataaataaagttttacctgaaaaacacaaaatatatataaa

SEQ ID NO: 182916 - DNA, 633 bp, Cannabis indica
gatgatgataattaagctaccttaattataaatataataaaacgccatatgcttcaaattcaatatttacttaactttagtatcaataaaaaatgattcttttaagatttttaaatttttattatccataaaagatgagcatgtcttacattttttttttttacttttaataacaataaaatttacgattaaaaataaaaaaaattgagactaattataatttattatttttattttaatgaaaaataaatattattaataattattatgtttttaaaagaaaaaattgaaaaatgaatattagtcaaaatctttggagctaaaaacattttttttttttaattgaaaaatgactagtcaaagtctttggagcaaaacaaaaagtttgattaaaatcatgatgagatttcaattcaacactattattaatttcttggggccatgggagtttcctccaaaatcattaatatataactatgaaaattacattaaatattaattttttttcaaaatttttatattttatacttttagataaaaaaaataaacttctctacttaatatttatattctttctacttaatttttttttactaattttttagttcaaagtctttggtaacaaacaaaagt

SEQ ID NO: 182917 - DNA, 639 bp, Cannabis indica
aatcatatattagcttaatagttcaaaagttttggattcgaacccacgatctttcccttttccaatctctcccttaccactaagctagccttagtggctttacttttattagtactttgttagtattatttttgcactatttttgatggttaggatgccttttataatttttgtgtcattttggcttggctttaattatttaaagtagatttgtagtatgatcaatggataagtgaaaggtttcatttagtatttatcacttctacaaactttttgagatttaacaaataagtgtttcaagtcttaatattattatatgaattgttttacaatctttattcacattatatattttttcattaaattgtgcaataatacagttttgttattattttgtaggtcgttttttgtggagggcctactgttacagagactttgccgataaattttttagatataatttatttgagagttgtcatctttttactattgagatttttttttattagtttttaatataatcgttaggggttaatcaacttttctttacttattttagttttgttagatattttttgtaagcatttgatatattaatgagttggtgtgtagtttgcgatgttacaagttgaagctcta

SEQ ID NO: 182918 - DNA, 681 bp, Cannabis indica
attttcttaatttttatagtactctctttacttctcaaggttctgatgatgcaggcgttcagctgctcttaagctttattctgaattgccttagtgacgtagacgttcaaatgctaaatgagcctttcacttctgatgaagtgaaggctgccctttttcaaatggctggtgacaaagcaccgggtttggatggtgttaatgccatgttctatcaaaaaaactggtctactcttggttcggacctgtgtgttgcggttctttctattctcaataataatgctgatatttctactattaatgatacggttattgttgttattcctaagaaaaagaatgctactaaaataagagattttaggccaataagtctttgttctactgtttataagattgtctctaaagtcttagctaataggctaaaagatgttctgaatggcattatctctcaaaaccaaagtgctttcattcagaatagggttattttttataatgttttaattgctaatgagattgttaatgctattaatcataggaaatcaggtaagtctggctgggttgctcttaagttagatatggagaaggcttttgatcgcgttgaatggggtttcgtgaaggctatatgcagcacctccatttttcctgatagattcattaatcttattcttaactgcatttcttctg

SEQ ID NO: 182919 - DNA, 743 bp, Cannabis indica
ctcaagcaacatgatcttgttcttcctccttgggagggacttttatagatgaccaagtggaatatttttgtgctttaatatccatggttgattgatcatctacaagtaattcacaagcccataaatgcagctcgtggagattacaactcgatgccctcatcccaaatggaaaattgaccaatatttgatagtgttttgacagaacctcatttggagtaggttttagcaccattgttgttcacggaagcaatgaagttagctcaagtacataaaaaaaaaataacatgaaaaatagaagtaacaagacttacgaggtttttgaaaagttgtatgtgtacaaggatatagccatggtgtctaaaagaattggtctttaaactctttcttgttaagaatgacgactatgaccctattatcaccagagtatatccgatgatagaaaaagcctttagagcagttcttcctcgtgagagtcactttaagagtgtacatgcatgtgatttcataaggttcgagtccactcaatctcatcatctggtataaatatttaaaggaagcaaaaatcaagtatccgttcgaaagagtagactattaccacacttggtgccaaacctcttaaattctagtgttctttattagtattataagaattttagtttaattcttattttttacgattctgcgtcgttggcttaaattcaatcaacacatacatacagcatacatacgtacatacatacata

SEQ ID NO: 182920 - DNA, 485 bp, Cannabis indica
gtagctccaaaaaattcttcaaaaaagctatttttttgatttgctttaccaaacatattgttatcacagcttttttcaaaaagtaacttttagcttttttcaaaagctgtaccaaacgagcccctaatatggtaagtttgttcatattttaatggtgactgagttaaggttgatttttagtattttttacaattgattcttcacaaaataaccttaactacaagttgttgttcatcagttcaataatagttggttaaatttttcttattaatattcaaatatatggttcattcatagttgtgaatacgttgtttatgcgttgtccaatattcgtcttagaaatatcttataataaaaaaattcagggattaaaattggtgatgcaagactcatataaagaagaatttattattgtaagtttgtttatattaataaaaagatttttttgttgtttttaagttatttaatagtcgcctaacaaaaca

SEQ ID NO: 182921 - DNA, 1176 bp, Cannabis indica
gaaccaaggtaagcagatggagctgctgagattggggtaggtagggtttgaacggaagagaagaaatgaaattttcaatatttttgaaataggagctttgaaaactaggtttataaaaggagaaaatcacaacaaatactgtattttttaattttctttcttttttattgttatacgacaataattacgtttatactgtattatattttctactactgtatactatatttttttaaaaccaattttttggttctttcatatcttttatttaattttttatgtgatataaaaagttgatgtgacgtgtgttgtcacaagttgatgtgacgtgtgttgtcactttagtgactaattttttatttttttttaatttttattgttaattaaatttgatgttggtaaattattttttctttaacatgtaatgcccgttcttcagtttaatctcacttttctattttccatctttttgttcatcatcttctttttttattttcattttattattcatacagttattgtgttaggggcggtttagtttgttttattttaaatttatttagtttttttttgttttaaatcacaagtttccctcttattgtttgccttttttgttgtagttcttcttctataaataccattattcttcattatatatggttgttaccaatcaaactcttcttctccaattataaaaaattccccaaaaaaacctgagaaaaataaaattttgatcatctatgggtaagaagaatctcaaggatcatcctcctagtcctacgtctctcgttccttccaaaagacaattagttggtggaactttgaagaaaaggatatccaaatgttctcgccccattttgaaaaatttggactctaattttgagtttgagccagagttgttacagtcgcccaaagctgataaggtatttttattattttgtgttgtttagggtttttgttacaattttgttttattacaaatatatctgtctgtgatttctttattttccatgttattttttttttctattctttgttgtggtttttgtatttctttaacagttatcttgttgtgttttctattattttgttaactcgtaggtgaaggtaatcctcatcaagaatgtgatactgatgatctgtacgtaggagtatcacccgtagaaaaaagggggg

SEQ ID NO: 182922 - DNA, 588 bp, Cannabis indica
gctagtctttgctctgtcaatccatcgaattagattaggcaaagaaatagaagctgctctctaatgcaatcaattcttatcacctacaaacattggactagtatattgacattcaaaaaatgcaatgttgtttctttctgctgattacacattatacatgtctcataccgaatttgagaagtcgatcttttgtttttaagtctaactaagttgcacaaccattcatagcacaaaactatatttaggagtattgagctttaggaatggcaaatggggcggggtctgcagcaaaatattttatagcctttagtcactgtgtttgtgttctgcagcaaatgctggccatccaacaaggatatatatgactattaaaagcttgaaaatattgtaaaaacataataataataactaaattaggtgtataaaatatattacttgtctcttaatgctttctttttattttatatatgaaaagataaaaattattaattcaaataataataataaaaaaatcaattcaattctatcataatttcttttaaaatataaatttaatttaaatttctacttatataaatatatatatat

SEQ ID NO: 182923 - DNA, 914 bp, Cannabis indica
cggttttcgtttttttttaatacattttaagtttttctttaatatttttacagatataatgtgagagcaatatatataaatcataacttaattgaaaccgcaattcacatcacaatccaaatcataattaacggaacaacactcaaattgtgaaagtttttttttaaaaaaaaaacccaaaaataggtttaaaaccaacatagtttaagtttttttattatataattacatatgttgcgttatttaggattacttggaagttttttttaaaaaaatctaaataaatttaaacaattacttactaagtataataaaaaatagtacgcgcgtacacaataaaatatgtaaattttgttttcggcattgtatattacacgaaatttttaaaaaaaatttcagatgatcttaaataactatatcatacaagataataaaaaaaaaatgaactaaagtttttttaagtgtcgaaacagataaagaatctacctaaccatcattttaagtggtgtattatatatatatactatgtataatgtgtcttcatcatattttgggtttcatgtaataacttttcagctgctaaataatcttttattactgtacaataatacacaacttaataaataaataaatattattttatttatgtgaagagaaaatattgagaacatatggaaaaataatagagaaaaataactctttgggatcacttatttaaccctagctacatttactactcacaactgtcccataacgctcattttaggctataaaagcgttcaaaagccaaccaagcccttcaggtcaacaactagtaagacagttaagacagagaaaaaaaaacaagtatagtgaagagagacatggcctcaaagtggtgcattgcgttgttattgccctagctgtggctcatc

SEQ ID NO: 182924 - DNA, 770 bp, Cannabis indica
attaccagaaatatttataactcaattcaaattaataaagaatatttattactcaaattttttagtattcattaccagcaagtatttcgtttgagaaaagctctctcaaagatgcctttctctaaccataaataaaattattaaaatattatttaaaaccttatattgtgtgtactagactccattttgttatcatgtatccaacattcttaccacccttagatcattaatcaggggataataaattgtccttattataggtacaaaacaagtactattgtagaaattttctgtatttttaatcacaatattattatagtaagtgactgacatctagccatttagtagtgcatcctaatagtaatatttcacaaaacaaaatgtctcaaactggtagaatcagtatggcaaacactcttgacactatattctccattgttgaaataaagagagaagaatttataagggatttgcaaaaccaagtatgcatcttcactattgaagtttctccaaacaagagaataaaaaattctaaaactcattggccttagcagcaaagggtcatggacatcattcccaactcctatactccaacaatatcctttaagaatggatactttgccccacatcaagcctctccactctatatgaatgaggctttagggccataactagcttagcttgtaagagtgaatgatcagtgaactaaagccctttcaaaaattctactacataaaagagttcggtttcgacaaatatgaactcagtaa

SEQ ID NO: 182925 - DNA, 516 bp, Cannabis indica
cattctctgcctacttcggattgcttgaacagtgagaatgctatcaatctcaagctctacattatgccagttggtactcttaatccaactaagaacttccttgattcccagagcttctacgacttcagctgagtagtgagtaggaacttaattgctttgtagcatgtcttagcttcaataagtttgcccatattatctcttgcaacaatttcgaaaccataagaattctcatgatgaaaaagtgcagcgtccacattaatcttgatgtgatttgcaactggtttatttcaaatctcggccccatcatcactattataaagagataatgataaaacaagagcattctgaacttttcgccaataatcaagagtggtagaagctgaagctaaaacatcataaacttactattaattaattaactctattagtattactttcttccctttacatttttcctctaattttgagatattaatttcttattacatatttgtgatcaaaatattaaaattattt

SEQ ID NO: 182926 - DNA, 781 bp, Cannabis indica
actcttgtgaaaaccagaataatttttctcactaaacacaaatgatgatgatttgaaggttaaagagggtatttatagctctcacacaaacgatatgactcatttgtttttctatttttggcataggtcccaaaaagaaaaacaaataaataaaaggtatagaagagaataaaaattggtttgtaaatataaatgcagcttggtaaaaattataaggtcttgtgtgtgtgaatgataacagtacaggacttgtataattgtatccgtatatatgtgttagtgcataatggccaagattattctttatatataaatgataatagaccccatatgtcaattcttaattataaagttgtatctaattcgtatcttaactagattatattatgtttcaagaaaaaacaaagtagaaaaatatttgatatatgtgataaattaggtgccttgaatttggcggattcttgagttgtaatgagccaaactcagttcacttacttattacatatataaatgtatatttgtgtatacattgtatgttgagtcatgtttttatatcttatatatgaaaataaattaatcaaacaaaattataaataggctgagataggtacttgtaaattgatgtgggccaccatgtattaaatgtttcacaaatttaaaaactcttttaattggactttatataaaatcttttaatatatacatggtttgtttaaataagtttatggtttttcgacttcatcacactctcgaaataaaagcatcatcaagacacagtaat

SEQ ID NO: 182927 - DNA, 694 bp, Cannabis indica
ggctgattttgcattatgttcattatggaatggtaggtttgggttatggttttgacaatttgttttgactagtaggtttattagaagtaaacttgatattcaagcaaataaaaagtaactttattcttgattttatcatatttgggatgattaaggtgatcttttgtagtatcagttaaaaaatataattatcgtagaaaaaaatagagatcacatggttattaccaatgatgcagaatttgctccagtcaatgtgaaaaagagatgtaatcttagttgttaatatgcgttttcaaaggaaaaattccataataaatttaatttttatttgtgaaataattttaatagtaatgattcacatcttaactctatgattaattatatatcatagtatgtaatttttatatgtaattgtaaactggaagtgtgacagtcgatattcataaaatgtataactaaacaaagttgaagaacttttcatagtcaaaagccatcttaaacaagctcagtaaacttataactcacccccaaattatatacaaaatcttaatgtattctattaaaatttactctctctctaggaaattataattttttttcgtaaggtatgaattttgtttttgactaacaagaaattgttataagtagaagtataccaaaaaaaaaagttggtataaaaaagaaaagaaaaagt

SEQ ID NO: 182928 - DNA, 596 bp, Cannabis indica
ataggatgtggttctctaaattgtttcctttgcttatgtttaagattgtaattaatcaattccataacccgaaaattcgatttgattgcctttatttaatgattcctattttttaaattcttcattctcatcttttaacttttcattactaaaagtttaacataaaaccttaaatcttacaagattttgtaacattaaacaaattgaatgtgatttacaattttatctgtcaagaaacttggatttacatattgatattgattgctcctctaccatttgtgagtttggtacaattatgagagaaaacgagggaatgagaagagaggggtagggaaaaaaaaaataaataagcttatctcataaacaattttctttacatgtagtgagattggaagattaattttgttctttcttagtcgaatttcaaagtttgagggtatttttaatctaagaaagctctaattgatgtagcatttagaaatgattaaatcttactaaagatgttctaacattaaacaaattgaatgtgatttccaaatttatctgtcaagtatcagtttgtccagaaaaaaaaaattgtaatttttaacatttta

SEQ ID NO: 182929 - DNA, 961 bp, Cannabis indica
agaaataacaagaaaattacataaaaataacatttaaaaaatataaaaacaacaacaaaaaataacatacagataacaaaaaatcaacaaaaaattaacaagagtacaacataaaaaaaccgtattttttgtaactaaaattaaaaaaatcataaaaatatttaaaattccgtgaaaccgtatttttgtaattttttttattgtgttttgtgtatttgtgaaataattcttttttcttgagataagttgaaaaatatcttttttttgtatccattaataaaaaataccctcatattatattttattaaaatatacccacttttttttagtaggttgcctaatatgctctctctctacttaagtttagcatataatttacattaacctaaagaatctaatgaggacatcatctataaaaatgagtatatcttaaagaatataaatagaggtaaaaattaaaacaagtaaagtgagtatacaatgtaatttcatcgtctttccttttacaaaatttgcaaccaaaaccgtttcaaacaaagcaaaaagggttaaaaaaaaccaaaagtaaaaggccttatatggattcgattatttagctgataatcgaagccataaggggccatatatgcagaaccatgacacctatgcctttcgttattcctaaaaaactaaagccataggtaattttatttatttattttctagtagagaatggttgatacatgtagagaaagagagtttgatacaaaacaatctaaaatggattttttgaatgatattaatagtccataatgatattaacataatatatttatttattaaacaaaataaaagaatcacttgcaaataaaaaaaatggtaatgaagcatcgtcggtgctagggccgacgatggttgggctaaaagacactgagaaagagaaaaaaagaaaagaaaaagaaaaaaacaataacttactaga

SEQ ID NO: 182930 - DNA, 598 bp, Cannabis indica
gatgtgcaatggcgggttcttgccaagcacatagcagacaatggacggtttaccaaaacagcatctcatcctctgtttaatatgtattatatatattaaaaatgttaaaatatagaattttagctttctcgctttttctctctaggttttcagctcttgcagctgtagccatggcaaaaactagatcgaaggggattggaaagaaaaaatctggcactaaaaatctgaggaagaaagggatgcagaactttggaatcgctaggaaagttacagatggagatgcggtaagtggaatcgaaccaattgagttttcagaaaaagaggatgaacttagagaagaacaagcttcggatccgttactagttgatgtatttcagcctcctctgtcccctgatgcatcactgagaagtattatgaagcaggaggaggttcgaaaggattttggaatgttcttggaagctaatattcaacgtaatagtaaccttaggcaggggattcactcgacaccacctgtgctgcgatcgggctctgtgattaggagcttggataattattttcatctggctaaaaatgagcattcgaacagagtgaaaatcac

SEQ ID NO: 182931 - DNA, 573 bp, Cannabis indica
ttattatggcatttgctacccttgtgggatcccttgctgccttaggcttgtttttcaggaccagaaatttctataatcatgttatagttagaagattgatgatgcattctctgagggactaatgaggttcctgctactaataataagaaggtaattgctataatctctctttctcaaaaattatttcagcttgatatctcttaatatagtataaacacaattaactcttaactgaaacaaaaattcatttactcaataatcaatagtttttagagagattgcaaatttgccttggctaatagactgcaatcatctatgtctttgaacttgagagagtaatattaactgaaatgattgactaatattagtttgtttaacattagtaaattttatgataaactaacccattatagaataacaatccatatggattcagagtaccaagatccaagctctcttatactaaggtatctcaaattatgcagttgcaaaatgattgacctgggaaagttcttcaaccatgcttgagattgtgacggcaacacctctattgttaatcggtgtaaatatgca

SEQ ID NO: 182932 - DNA, 883 bp, Cannabis indica
atcatcatcttcttcttcaagtagtaccttaatatatataatctgagtttctttgctttagacttaattttgtatgaacctttgttcttgcatatttatagtagaaaataaaatgaagtgaaataatgatacaacaactactttgatgtataatacaaaagacaataataatgattttcaacttcaagctagaagtggggtcgtaattaatttatccacaacaacttttttcatttgattaatttttcacttatattaatatcacccaataaattatttcgcggttgcagtactaaataggaatattaatgtcgtattcataggataggaagacaaattgcaactaaaaattaaaattggtaaaaatagaaaataataaaaacgtgaatatattgaaaataataaaatgataaaagaaaaagaagatgattggataaatttgataaggttgaaatatagttatacaaatcttattctaacactgatattaattaattcacacacagttataattctacaccattattacagttggaagatgaatatattaaaagcataaattaattaatattgaataaattgaagcacatctatatatatcttcatagcatatcatattatatatcctaaaaatgcaaaaaagaaaaagtttagattaaaaaaaactattgcaaaaaaattggtaaaagtgttatatataattgagattaaaaaattgagatttataaaaagaataaaaaaagagtgaaaaatggaaaaaattcagattaaataaaaaaaaaattgcaaaaaaatatgtaaatatgttatatatatatatataataagattaatatatatatatatagagagagagagagagagagagagagagagagataga

SEQ ID NO: 182933 - DNA, 1331 bp, Cannabis indica
aaaaacttttaatcccacttttacatttggagccttaaaaaaaaatttggaacaagggccttgtttggaaaacggataaaaaacggtgttgaaagggctaattttatgcgtttgccaaacgtaactttagtttttaagtgagactttttatcccggtttttatgtaaaaaccgggataaaaagtcccacaatatctgggccttttaatgttgttgggcctttacacatataaaaagaacattaggttttagggttttatttacatctcattcactccagccgtctctctctcttatctctctctaagcggcagtgcattctttctctgctatttttttttcttcttcgtgctcaagcatctcaacctccgaatctgctattttttttttctgcaacctccaaagctcaagccacgactgaactaaaaaatcgacgacaaatgatgaaggctctgctattttttttcttcatttaatatctcgatccaaccactcaaaatgtagattcgagatcccaaccccgaaaaccaaaggttgatatcactttttacttctctgtttctatgtggctcacttgctctttttttttcttgcagtcggacggcgttgaacaacaaacttcagcgtggtgttgatagtttttaggtttattttgtttatatttattttttaactattatgaaatttttctaggtttgtattgagctccaaacccatattagagctatatgtattgaattttattgattaatgggaatattttagttcaaaatgtttggtattttttttaattaatctgtaaatgaatttttgttttgagtgtatatcgattatatatatccatttctgttttaattttatggaacggatataaatttttttgggtttatttttttattatatttttgacatttaatttcggtttttacataaatattgggataaaagatctctttttatcttagtttttatatgattttttatcccactggcatatatcccgatttttattttagcgaaaaccaggataaaatgcccttaaaaactggggaaaaaagctttttttatagtagtgtttatggcactagaaaatatattgttagacattattttcatacaatttttttggggttttagatttaacaaaaaataaaaataaaattataaattttagtttattgaacgcgtgacttttttattttatacgagtgtgaaatagactctttgaacattgatttctatattgtaaattattcaaatttctccaaattttacaggatgtcttaaataactattgttgagcctattttttaccaaatacgtggcgaacat

SEQ ID NO: 182934 - DNA, 709 bp, Cannabis indica
cattcttttcctttcaataacattaaactcataataaaaacagaatagaaaaatagagctccaaatatattgtatatatatatccataatgtatgtaccatcatgaacttgactggctaattgctttaaagtttcagcaagttgatcgcagtgttttcgtaagaaatttagattctaagccattctacagcttctcatcctctttctgtttcactttgagtttagcattttcattaaacgcattctataacttttcttctaatgttctgcatttaaatagttgattaaatcaccatcagtaatatctatatcactacatcttcagcctcccatagaaaaaaggaagaataccaaaccttaacgatcatatattggtaaaaaattcttgtgtgcgagcttgatcgaacaaattaaacgaaagcaccgacagacacaggaagaaacaaagagaggtaccgccatgtctaaatctgtcttcacggaagcttgctctttcaccagtttctctaaaataaaaatatctgacgaaacagtgtaaggaaacatccaaattttctgagaaaataagccaaacaaccaacaattctcagataaaaatagaacctatagtgctcttcaaattcgtaaagcttccaatatatagtaggaacaaataaagatagttcctaaatagaaaatggtcaaataaaaatcatgatgtgagaaatgt

SEQ ID NO: 182935 - DNA, 773 bp, Cannabis indica
actttgattagtctaattaataaatatattaaatgacaatattatttaataattaatttttagttattaaataattataattggcatttaagtggttaaattgaaaaattggcgtttttgagaaaatgagatgtaaaaatgataaaatggcaaaattgcaaagtggggcccattatcctatacatggccggccactatgtagtctatttatcatttattttttcattattttaatgccaaataaatctaacctaaccctaggtggtttcctataaataggtagtgatggcttcaggaaaaagatgatgcatctcattccttcagagaaaaactcaaagccttcttcctatacctagccgccaccttctctctcttcctctcttctgaaaaccgaagcctatagtgagtgagtgagtgcccacacacatcaagtggtatctcaatcatagtgtgtaaggctgtgaagaatccagattcaagagaaggacattcgggctcagatcttggtgatactctgctacagaaaggatacaagggttagagatctgagtggaaggagacattatattccgctgcaaccactgtaaggtttcttatactttatatgtgtttatttcatatcgttttagaagttcatatttaggatgttaaataacatacttgttagtaaatctaagatcctggtaaaataattccaacaggatgtactaagtatcttgcctaccaggattgcgattgcctaaattttggtgcatgacgaccaaattgcgaga

SEQ ID NO: 182936 - DNA, 764 bp, Cannabis indica
atttgattgaaaattgagaaatttatatggtatactaacttttgccatttttttacaaaaatactgccaggcggtattttttacttttttactatattttttttataatttcatactgtagtatactgtgttaagttttcactggtgttctactggtgtttttttagttgttctactggtgttttgagttgttctgttttgtgttctactggtgttttataaaaatacagtatttttgtaaactttaccgtgacagtatttttgtaaaagttaccccaaattccagtatttttgtaagtttcccttgaaaatttgattgctcctgttattttgtggtaagttttatttttttttttttttttttttaaatgtgggctatcccattctaagagaatatatatgtgtttatataatatatagtcctcttgatcaaatcccaaaatactcacattatttatttattattgtattgtagctctttctatctctcctgttcatctttcttctttttttttccaagtctacaacattactcaaataacagctaaccttctcaatttgtagtagataactaaaaaaatgtgaaggagcaagaacaagaagaagatttgggaaagttaagagtgtggggttgtgtgtgagagagagagatggagagcttgatatgtgatgtagatttttgtagtaaatctttcaaaaactcctacgtaagtttatgtattcagttgtctttagtcttaaagcattaacttcatctctaccgc

SEQ ID NO: 182937 - DNA, 622 bp, Cannabis indica
tattactaacacgatcatgatcaggcgcccatacacctaatcataatcatttctcgctatcccttactagatctggatctagaatgttcgtacaacagtacgattgaccataatatcagcctatactcggtactctagtcgtaccaatgtgatagcgtcaatctatactttgccaaatatatattcgttggtattagtacagctctatgtacactaataccactcttaccgatatgctatctactaggcaatcataaaatatgtacgctaaacatgtaaacatgcatattattatactaatcttacctcaattccaaattcgggtgtgccagtcaactgagtggaaactactgctcggtgatttaaggccctaagtcacaatttacataaaattggtaagtgacccgctaaatcattttctcgagacttagactaaaaactaaaagttttcctaccgatagatagcgtacctaaatatcaataaaacgtgaaaactaggctcccaaatttggaaaaatccagtgaaccaaaaccccaatcagtttattattttttgggcttctgctagaaaaccggttcaccgttttttggaaaaacggtatttttctctgcagaaaacact

SEQ ID NO: 182938 - DNA, 794 bp, Cannabis indica
agaccatcgagcaggacaccaatgccctgcaaaagatacatattacggaaataaatgaaacgactgctaaactcttcaaattatgagaaaaataagactaaaggattgagatgagacttgtcgtgttaaaaacaaagaaatatgcatatattttggttttgctagaataaaccactagtgttgtgatagctcacctgccagccaataccccgactcaaaacataagctggaggaggagttgcaatggccagcctagatgctgccttgtatgcacccgttgactgaagcatgaaaaagatggtgatataaaaaactgatacttttaagttttaaccaaaacgtattgcacctaagaaaccagtcacatgcatacctcaaccatggaaacaagaactgctgacatcattgcaaatgaatgacctgctgaaaatgtaggagggccccactgcagaggatatgggaacttaaacctggaatagcatataacattgtaggcttttagagccaggtaaagcatagaatagaacattgacataagtttatgtatccttgaaattaccatggggcggtagatatgagatttgccctgtcagttctacagctgcttgagttctattggctttctctgtaggccccactagcagtcaatataagggcatgatccagacaattgtaatacagatcaataccggaaaatcgttcgaaaactgggacgatctctaaatggtctctcaatgctttaaatactgcactttttaccagtcacattcacattggtctgagatgaaaaatca

SEQ ID NO: 182939 - DNA, 573 bp, Cannabis indica
atagaagttatgacagttgggcttacaacataaaaccagaagcctacacttgacaagttggatacacattttagggcatatgatctaacaattttccaccttgaacggataatgtgtatcagattttagactaggaatctgagattttaagatgctaagatagtgttcaaattttgtcgcaggcagagacttagtaagtatgtctgcatcattctcttcagtgctaactttgataacttaaaccttgccattagataggacatctcagatgaagtgtaacctaacatcaaagtgctttgttctcgcatgaaagacttgattcttactgagatgcaaagcactttgactatcacaatgaatgcaaacagtctgttgatcaatccctagttcctttgttattcctttgagccacaaggcttcttcgactagcttttgtgcaagctatgtattctacttctctagtagaaagagccacaatagcttggagattagatttccaacttgttgtacactagtttagcaaaaatatacatagccaaattgtgatctcctagtgtcaaggtcaccagcata

SEQ ID NO: 182940 - DNA, 741 bp, Cannabis indica
ctttccatgttctgcaaaataaaataaaagtgttataattattaaaaaggtagatgaaaaagggaggaatacaagttaccacctaagggatttaccgaagtcactaggggcgagctatcgctagaagaagtggttgaaggaccataatatcaactaaaatccctacatcctaaaatcttgaatatatcaaacggctcgatgagttctaaaccccagctcgcgtctatgtgattttccctatctgtcatagtgccatattgttcagctatcccataatatgactcatgacaattaacctggacgtggaatctagggtaacagctgtcaaacttatgagtaatttgatctacgagaagggactcccaaatgtaaaaattaaggcaggagtctctaaaggtgactagtgtgttacgtgaagccctaagtactgttggagaccaacaacatttattacctcaggatgatcctgttggaaattattttactaggatctagatttactaacaagtatgttttattaacatcctaatatgaattctaaaacaataaaaataaacacataaagtttagaaaaccttaactacgtagggttggcagcggaagtaaataattgaactccttccctattccaaatactctacgccttcgattcctttccttgtagcagagcatcaccttcgatctgaacctcggatcttcttttcttccttcttttgtatgtcagaatttccattactctta

SEQ ID NO: 182941 - DNA, 872 bp, Cannabis indica
gtagacacgtggttggcggttcatggtggtttgtagttgcccgcagttggtggttcgtggacggagtggcttagtaatatatggaatgggatttgaaaatattatttcttgtttttatttatatatagttatggaatttttcctataatctggggttgtactcacattttttatactgttatgggttttgtaatctaggttaattttatgattgttagttcaaaatgtgtattatttgttgaatattaagtgttagatatgagcattttatacctatttctactatattgatccataaaattaatttaagtttcattgttttaaaagcataaaaaatataatcgtggtaatattttagtttcaggcgaattattcaaaaaaaaaataataattataccatttaaattatataaatagattttttttaaaaaaaaattatataaatagaatattaaattatatctaatatagtggccctttttgtgggtcactatatctccaaaaataataataaagaattaaaaaaagagaaaaaaaaggatatagtgatactttttgtgtgttgctgttacttttttagtctgacaaaacttgactctaaacacctacagtgacacacagagagtgactgtataagggttcagtgacacatgtgaagtgtcattaaaaactgtctttctagtcatcctcattagtgacacgcggtgaagtgtcactaaatagttttagaattactcaatgtgggtcactaaaacctatttttctagtagtgattccttgagcaatagtcaagccttacaccctcttgacctcatacaaactgatgtgtgaggtcctgcacaaatattgtcaaaatacaaaattataggttt

SEQ ID NO: 182942 - DNA, 735 bp, Cannabis indica
agttaaaattttacatgtaatagagtagaagctagctaaatatatcgtgcatgtattagttttgtttgccccttttgtccttgacttttgagctttagataccattatggcagcttaaccacttcactaatctcagctgttgttagtagactgtagataatatattaagcaggtaatgaaacagtggacgtgttacctaactggtattgacattggtcgctctgcttttaatgttcctaattctgatttggggtggacagaatgatcctaactaaaccaatcatttactgaaatttaaatctttcaattgatgtcagaagcaagtggtagtaataacaatttaagagttattgattagggtcggtgaaacttgaaagtaattggttatggtccatccttaaccatttaatattttcttgtagtgtggaaaaaaataagttggaaaaattagacaagacttgtccatttgtttggggatttaatgtcaaatggaaatcatacatttcaaaggctcaaaagagtagcattgagatagctaaaataaaaataaaagtctaaatataccccaaaacattatctggacaaatctgattaaaaaaaattggagagtattatccatatgtctaacactaaatcaatctcactatcatcaaaaggaggcctgcataaatttttacaaattaagggatttaattcaaagaatcttaaataatctctgttttttttaagctatat

SEQ ID NO: 182943 - DNA, 504 bp, Cannabis indica
cgagttcccgatcaatcaaaatctagtataatctaaattttttaattgttgcattaacatttattttttgaaattttaatcttagatttattcaattctaattgcgaaaaaataactaaatttgcattcatctcgcatcttgaatctggagccgtcattttaattttattgtttctatgtagttgcattagagttagctctcccttttattaacaccccaataattgatgcatcaataataacgtagtgataatgttatactgtttttagtcttatttgcagcaattttatatagacatccaacataaggctctcataaaaaataattctaatatggtgagtttgttcacattttaacaattggttgagttcacgttcattggcagtgttcttatagttgcttcttcacaaaaatatcttaaactaaaactcattgatcatcagtcaatatactttgttaaatttttcttacgatgtcaaaaaaatattcttcattcatagttg

SEQ ID NO: 182944 - DNA, 659 bp, Cannabis indica
cagcagacctgaaagcttcatcctagaacttaaagggtagggaagcttgggtcaataaagccagaccattttcaaaaatgtgtctgtgctttcgttcgaccaagtcattttgttgatgtgtagtggggcagggatgtctgtttgttcggccaagtcagtgagataagtagaaaattattcacccccaatcagtttgtagagttttaatagatttaccaagttgtaattcagcttcctttttaaagtttaagaaaaaattttaaaggcatctgatttattctttagtagatataaccaagtaaatctagagaaaacatcaacaaaatgtatatagtatttatagccattgtgagaaactttgtgtgagggtccccaaataagatttgaaactacaagttgtaatggttcaaaaatgacagtggtggaagcttttgggaaaggaaacttatgtattcttccaagacaacatgtagcacaaacaaagaaaggagaaatttcaaattttattgctaacaggcagattaatttgcttccattgctgaatcttcctcaccagtgacaatattggcactcaaatcaatttctttccccgattgtttgattcttgattcagatgctaaaaagtaaagcctcgatttctccaacagtatagttttcaa

SEQ ID NO: 182945 - DNA, 519 bp, Cannabis indica
tgctgttatgcatttactgaatttccatttactaggaaaatgagagattagtatatatatacaaatatacaaaatactttctattctactttgtagtttgtatttgtttattattcattattggaaaaacaatgttgattggttgagaaactgtgtccactattgacaaaaaaagtataaaaaagaagaaaaagaagaagataatattaaataaataataataaaaaaaaaacatttatagacaaaaatgtttttaatggaaaatagtgaaaagtaagtggtgaccactgcctaactgggctttgttggggttcctacatatatatatatataagagacccaaaatataactgagtctctctctctcaaaaagaaaaaagaaaaaaaaagaacctcacaatttcacaaaactcaaatatatatatatttatgatcaatttattggagaagagaataagctctcatcaagtttcaattttcttctaaagaagatccttagagaaggaaattatttctata

SEQ ID NO: 182946 - DNA, 740 bp, Cannabis indica
aaatactctagttatgaactagaacctaagatcatcaaaataaatgaactagaacctaagatcatcaaaatatacactgaaattattttgagctgttgatttatttttgttttcgaccacaatcttagttactatgaaagcatgagtaaaagcttagacaaacaaaatcaaagtataaaagaatttcattatgctacttgtatatattacatgggatacatgtatactaatagtatatatacacagggacagatcccttaagattgatgtggaggctattactatagccaacactaataaaaatattgtcttttaaaaaattaaatgtaaattttttaattttataattataagtcaaaatagtaaaaaaaacccccacaaaattagataaatttagtaagagtgattataatgtagctataaatattttttttatgataaataatttgtattacaaaatgaatttttgcttttttttggtctattactctttattaagttccaaatagatttttatattcttggtggaatattgtatggcataaacatagtaaagtctatatttttatttcttagaatgagaatttttgggtatattttgtatgaataaatagaaattttattgtgatcttgattctcttgtgataatgacatataatattatcagcaaagtacacaatgtttttttaagataaataatgaagaaatctgtgtaaattaaagactttatgacatatccc

SEQ ID NO: 182947 - DNA, 600 bp, Cannabis indica
aatagaaatttttaaaaatacactagaatctctatctatgaatattctattcaagaataattatacattatttaagtactcgtattaacaaagtatacctctatataataataataattacattttaataaaatatgtacatataatttataaagttatttacgtaaaattaataattttatttcaaattataatacatgtataaatattatatttattctaaaataattttattatgatatagtatttattgttattattattatattgatattttttggaatttaattttttttttctaatataactcatataacctctcaattagaatataattttcttaacccccaagtgtattcttagataaaggttctactgtatatattttcttatattttatttattattttatgacttaaagtttttatttataaaaataagcataaaattttaaaattataaaaatatatttttcagtaaaaagtaagaaaataactttgattaaaatactattaaaaaaatttagtaaaaaagtaaagagcttctttttgtggtctttcatgtgcgaagcaattgaatattcctattgattatgtggaa

SEQ ID NO: 182948 - DNA, 555 bp, Cannabis indica
aaagacatgtgttcatgtgtataaatgatttttttgagttatttttttagtaaaaaaaatagaattatttttgaagaatgtctgtataaatgagggtaagttgaaatttacccgttttttttcatctaaaaaccaaaaatagccttattttaaatttcaattgaaatttactcccttttataagtccattaccgattataccctcacttaagggtactgttcagggaggtaagaaaagttttttttcattacataagagtataatcgggatataacagaataaaagaagatataaattaaatatatagaaaagaaagataaaagtgaaatgggttaacaaaaaaaggtatagggtgcaatttccacatataaatatatagagtagaataataaattgggataaagaaaaaaaaacacaagttgggccccttattgatgtggtccctatgcagtttgcatgcacggacttagagctggttgtgcatgcaccacatgtagaaaaagagagagagagagagagagagagagagagagagagagagagagagtatttaa

SEQ ID NO: 182949 - DNA, 729 bp, Cannabis indica
aaataaatattataaggatataataaatactttattttaaatttaaatatcatacgaaattttttattatttgttattagatactttttttttaattttaattttttaaataacaaatacgaattaacttgggcaattatattgtgttacgtacttcagcttgttttatttttcttttcttcattattattgttttagatacaatattaatttccttatttatttattatatattattgatttttttaataacgaatttgttgagattaaatgggaatgttttatgtaatttctaatatatttcgtgttctagaagaatatattgataaattaaataattcattaatttattaagaaaatatgagaatagaaagcaaaaaaaaaaactctaactatacataaattacttcttttttttaattattattatttgttagtgtactttagttatcttacaaagtttgagcacaattccatttgaaattaaaaataaaaaataaaaagtttgaaaaattgatctcgagttctaatatatatgtccatcatggatagcttgagttctgaaaaattcagttcgattttgatatattatcgcttaagcttaaagtcaaaaatatatataaatattttttttgaaaagtaaaaatatatataaatatttttatttatttagcttttaatttatataagtatatattaagaaaaaaatggaaaaatgaaaaataagcc

SEQ ID NO: 182950 - DNA, 639 bp, Cannabis indica
ggggaaatttcaagattagtaagcttggccatcggaaagatgttcaaccaatcattgttcaccaaagccctatccaatctagcttcaatccaattaggagaatccctactcttttcccaagtaaaaggatgaccatgcaactccatgtctctcaaaccacataaccgaagtgcttcttgaaatccttcaataagccacaccggataaggttgtcctcccactttctcggattgattgaggacattgttaaagtctcccataaggcaccaaggcaatgttgagcggctaagaagtgtagttaaaagatcccaagttttccttctaagactccggtttggctcaccatacacccccgtaaatctaaattcccgttgtccttcaaaagaaactttacaatcaatatggttctcagaaaaagtgtccaccgaaacttcatcttcattcttccaaagcaacgccaatcccccacttctaccttgagcttctaccacaaaacacccctcaaagcccaaagttctactcaaattatccaccttcatttttttactcaaagtttcacataaaaacaccatattgggccgttggttagaaaccaactcttttaggaactgaacattccgtggtggcccaagcccacgc

SEQ ID NO: 182951 - DNA, 766 bp, Cannabis indica
atatatatttatataattaaatatgataactatttacgattatttataattttttttttcaaaaaaattgaatagttagtagatttaaatacattttgttgcacttgtgactaatttatttttatatacatactaaataattatttaaattttattttccgaactataatccatttggaatttactgaaaatttattaaaacaaactaaaaaacaacctttttttcaggactgtgcaatgtaaatttttctattatatttattttgtcacttcaagaaataattaattaatccacgtacacaaataatagaattagcaattattaatataggcatttggtggccaattaagttacactagtactggttgtgacaagctacatgtaataattggtttcttatcatcattatatgatttggatgtattgtagaacagtcttcattcacattacttgaaatggtagcaaatgaggtattatatatgccttgcaccctaattctcctttcttattactatgtttttttaattgataatgttaaaattttattagtagacataaattaataaagcaaatcacatatgtaaccccaactttttattattttcttcattttactgaccatgagttcggtcattataaatttttgactactgtagtttttttatattgtaatggaattagtaggtttgaattgacaaaatctcaagtctcaaattttaattgcaaaatatataatattaaaaaataatacaaatttggagtatc

SEQ ID NO: 182952 - DNA, 534 bp, Cannabis indica
atatggaaatatgaggtcgtaaaattgaggagttagaaagtgatctcattattacgaaatcgttagttgttagttatcatagtttttatgcatgggcctaaaaattgttcatgtcttggcgttataccaagtaattactaaggttgatgattttctaactctgtttgaatggttcacaacttggcattattccaagaaattgctaggacctatgaattctctaattcttttgtatctctcttgaatgatatttctaaatgtgtgattgatatgttgtttggtttctactctgtaaggtttatttagtaagtcctttttgcttacttacttgtttcctgttgtaaaggtaagctaaaatttgagcattaagagatggagtctgattgcaaaacatatagagcaacatttggggattgtttaaaatcgttttgcttttggtttaaaagactattataaaaatttataaagtattcagaacattttagaatgtttgtgtgtagtgcttttttatttataactatgaatctttaaaag

SEQ ID NO: 182953 - DNA, 671 bp, Cannabis indica
aattaatcaggtgtttatatagtagttgtctctctacatatcaatcccacaacataacaaaatgtaaaaacactttagtatatgattgattattttatgtcttccaataaattgacttgttgacatctttcttaatctaattatggaattgagcttttgatccatcatcctgataaattcactatgtacggaagtaattgtctaattataaagtaattagactatattaaaaaaaattacttaaatatgtcattgtaactactaattagatatgaatttctattattttatttaccaaaataagttgtaattacaaagtaaaataatgtgtatcaatatttaaaaggtaaaaactatgattctgtcttttgtaaaaattattaattggactatttgttttgttaaatgacaaaattgaccatgtattttttaaaatagtacaaataggatcctgaactgattttttataaaaataaaatttaataaaaatccaatctaaatgtgttaatgttatgacaaaactgtttacattaatagtatcggtttgtgttaggatttgtcttcaagttggttacattaaaaaaatatcaaaaattaagctcagggtcctattttactattttgaaaaataccattttgtcatttaagaaaactgtgggtccaatctataa

SEQ ID NO: 182954 - DNA, 933 bp, Cannabis indica
cctataaatttttaaaatttttcaaatagtttaccgtgccaaaagtttgaaattttttaaacaagtatggtaaactaaaatatcaagaactttattttcggtagtgtaaactatttaaaatttttaaaaaatttacaagaataatattgtaactataacagatactactatgaaaaaaaaaattaaaaatatattttagtatgtaatttcagacataaaaattgattaagaaataataattaacactcttctaataattattcgagtccttactatcattctatccttgtgtatgcctcattagaggtgggatagagaattgtgtaatctacatgttttatatatctaaaacaagtatcagcgtttttgtctctcaaactataatttatgtattagtatattccttgaattttttagattcattaaaaatgattatcaaactattcacaatattgtaaagtgatttttatgtgagttttttgttacacacgataaataatgatgacacaaatatttgtactattaccttataattagtgttgtcgggtgttatttaaaacattacttttttttttttatgttatatatttttagaaaattcattaaactaaaaataaattgatgattaaaaatatgagtaaaattaaattaattttttctaattattttttaaagataaaaaaataaatcatatatgcagaaaaattataacataaaatttatgttagaatacatttttctaatatacaattttcatatatttactaaatatgttttgaacatggtttgtcgtgtttttcttctttattatattttgaataaattgggtatttttatttaatttttaattgattgtcattgattggtgggatttgacacacattcacccgggatgaaagtctagtttccttcttaatatcttgatgctttatt

SEQ ID NO: 182955 - DNA, 616 bp, Cannabis indica
tttataatgtgaagaagagaaatgcgagataagatttggagtgtaatttaatagataaatggactagaggttgagtttgcttggtcaatgtcggccaattattttctgttttgcggcttagtgatgtgccgctaaatcatttttgtggacttttataatgggaaagagataaaatattttgaaacacaaactaactaattataattaacacttgggttaggctgccgaatagattaatattgaatatattgtaagaataatacaaaacaatgtgatttgtccgaatgacacaattactacagcaaaatggcaagagacaatctgcagggtagtggagttaggtagtgatggttgagtgtcaagtgatacagacacatggatcatgctcccactaccttgtacaaaatgtacatccttgtacgttttctaatctgcctcaccttttgcaaatatcatggccattccttttgatttttcattgcattaacatgcctttgatttcatttatgttaggagctttttgtcatgtcaaaggagacttgtgctctagcatgaaagacttgtaacaagggggagttgcaggttttccaatggccataggatcccccgttggggg

SEQ ID NO: 182956 - DNA, 672 bp, Cannabis indica
cacatagtaaaaaaaaaaatacgagcgtaaatacgacatgactcgatgttataattagctcgacacaacataataaatgtgaatttatgcatatgacctgatagaacctaaaaatacaatgcatgtacaatagactaatacaaaatacgattcaatttatttttataatttaataataataaattaaaatgataatgaaactcaaatataatataaaatattatattactataattaaaattattaaaaaaatataaaaaataaaattatctattaattattttgtaaaaacgtaacttaaaataaatattcaaattctaatgatatattttttaaattattgtctataaaatattgttttaaaattatataaatataattaaagttataaaaaatacatatagtttagtaattatttcattaattgtaaaaaaaatgtgaaaatgtaaagcataaactcgagcccatatcagaaaatggactagcatgtttgagaaatacgagctatccccagtaaagtacgatatgaaaatatcgagcctacggaacatgtcaggcatcctctttaaaaatgttagcacgacacacgacatgacacatttcatattttttttatggcaaagtatgacaagtcccaaatattgaaaagtatagaaaaatatagatcggccc

SEQ ID NO: 182957 - DNA, 565 bp, Cannabis indica
aggtacccgcgggtatccgaacccgcggatataattgccatccctaccaaaatgacattctttcagatatttattttgctatagtttttttttttttttgagatattttactataattaaatattgaattcagggtagataaaaaatttgatttggattggattttttttttttttgtattcattttttgaaatctctaattattaataatttcattattaaaaaataaataaaaatactgaattcacatatattaatttattacaatatcgccaataataattagtaatacttatttgttgcaaaatagtaatctagactcatacggtgttgaattttactatattaatggtggtgtggtttactttaaaaaaaattggatggaaaatagtttattgctagagatgtatatggatttgtttgattagattttaatttttttaaattaaattattattacgatttttttaaaaatttaaactaaactagactaattaaatcatcaaaccaagttcaaaaccataatttgtattacatagttgttttattttttatttttactaat

SEQ ID NO: 182958 - DNA, 784 bp, Cannabis indica
tatagaatgccacctagcactctttattctttcttttatataaatatatacatatttcgtaattcataatattttacattttcttataaaattaaaattttgatagaacaataaaataaaaaatataactaatttggcaaaatttaattaattacaagaattcattcaactacatgctaatttataacatgctaattttgtgacaaataaaagtagaaaaagaaatattttacttatacatacaaatatatcacccaaaatggttcataaaccatgtgggattctttttaaaacaaacatcatattatatcaaacttgtccacaatattttattttcaaaatatgaaaagcctaaaaaattagtaaaaatagaagaaaaaacatatagaatggcacctagcactctatatattttcttttatataaatatatagattagtcaaatctaacctaattacaaaaaattagacatgcagtagttagattggattagaagtgagtagttgtattttcattgaattatattaggattattagaagaaactttcaaagtccaattgaaaatcaatctaatattattacatataatacatattaaaaatatattatatttattcatatataataaaaaaatatatttaaattttattttatttgttgtttattaatttcaataaaccttattacaactaattaaaaaaatccataaataaatcttaagaacttgtatatagtttgtttttatgtattttttagttaatattaaaaatcaagtgttgaatag

SEQ ID NO: 182959 - DNA, 649 bp, Cannabis indica
atcctcctaaaaattcacaagaattttttaatatgaagcattcatctgctaggaatgtcattgagagatgttttggtgcaattaagagtcgatgggcaattcttaggagtccgtcattctatccaataaagactcaaaatcgaatcattttggcatgttgtttgcttcacaattttattagaagagaaatgcctactgataatacttatatgcattcagagaatgagattaacagtggagacgaagaagatgttgatggatccataagaagtattgaagcttctgaagagtggacaacgtttagaaacaatttagcacatgagatgtatagtgaatggagggaacgtaggagagcaagctagttttttttcttagattaaatgcacaatgattatctaggtttttatatttgttttcacttggctatgccaagttatttgactggttgtgtaattgacaacattgaaatttatctttgaatttatgttttgttattggtgtgtatatcaattcagttttgtttatttactgttgaatgtctttatttttcacttcaagttcaacatttcaattctagtttttagttttacattattttgattccttatttcagcatggagacttcaaaaggaagaggtccaggacaaat

SEQ ID NO: 182960 - DNA, 865 bp, Cannabis indica
ttatgttaaatttagcctatactaaatttcttatacccctattgaaagttatttttataaaaatatgctaaaaatataacaatacactacttttatagtgtttattaacaacataattattttctacctctccatatttttctattctttattctcattaacccttgctttatatatggaacaattatcttaatctacaagcagagcacaaagtcaattgtttaattaattagatgaatagtcttttattataacttaaattctaaagtaaatacatgaagtttggtggttggaattggaaacttgtgacttgtgaatcatttatttagtttttatgctcttattttaaatattggacttggtagtaattaattttaaaaaatttatatagaccaaaaatttaaaaaaaaatacaaaaatacattaacacggaaaaaaattatttttattctttgaacttttttatttacaaaaaatacattttcagtaaaaataataaatcttcttttttttttttttgtatcttttcaaaaaaaaaaataataaatctttttgtatattttatattattataattgtttttaattgtttatagttgatttgtagttgccgtaaagttgatctctcgtttttttagctgaacaaaatgtattcatataattttaaaactttacaaacatatttttatatattaaaaattttagaacataaaattataaataaaatttaaaaaaaaaataatatttttgaaaattctcctttcatttttatgtaatattattggaaaaaaaatcttgtgaaaagcatttgttttttgtctagtattttaacagcactagataccattgaatagaaatttcattat

SEQ ID NO: 182961 - DNA, 1314 bp, Cannabis indica
tattttgtaattgctgaaagactcgctatagtagctagcttgtttcttttactaagtatggattgcattatatcaagactaacaaatatcaagtaactgcatctcaggtatcaaaagggccttacctattacacaagaagtttccaaagcgacatgaaagcatactgtccaagagatccactaagaaagcctagtttacccaaaaaacaaaacaaagttaatattacaatcagctgtttaattaaatagaagtgtatcacaatgagaaaaaatatacccaccgaggagaactcaaacgcaaaaggatacatccgcatcaactgtgaaacacaatcaatccactgtgacaaacaaaagaggttagatcaataacagatagtccaagggggaacaaacttactcatatcacatacactcaatttctagaagaattctttatcacaacagcaagtctcatcacattaattaaccccagttggctcatgggattaaacactcttatctcaaatgattcaagcatccaaagtttccataacaattttaatagaacaggaagaaacatgtctgatttcttgtactggtttggtgttgtcttgttttttatttttatttttttgaaaaagtgatagaggtcattgtcttagactgtcttgttttttattagtgttaagaagtttaaattttggtggagtttgttttggtaaggattgttgttccttacaaacctctataggtgtaatacgacaatgaatacgacatttttgtttcttaagaataaataaaagtaataaatgaatttgttttttaataacagttataatgatgatgatgataaacgataataacattactcgtcctcatagaaagggaagaaacttaacatttaccatatattgagagagtagtacatatatttggtttgcctaaaaacaatagtggacgcacctgcaaaaatataggggaatagttgtttgaattctgtgcatgagtagaactaggattttgggatgtatgcgatccagttgattgacgcatgggtgatgatggaaaagcactagcagaagactgcctagataattcataaggtatgttgccacccccagatactgttggcatgcccacgcgatctgaaaatggatgaccaaacgctagccaatcttttcaatgagtgcctagcaaaagcatatattgcaaaaatttggtaaaattgtaatgttctcttttttcttgaaatgcagctgcaaacaataaaatttgaaacaaagaccaagatgatagtgtaattctgatacaacatatcaaccaaatgtaaat

SEQ ID NO: 182962 - DNA, 762 bp, Cannabis indica
ggctgagaagaaaactcatttagatgggccaacagaatttagagactaagacgaaagttctcaagattaaaaggttggctcatctgcgagacaactcaaactataagacttatggcaacatagttttttatgagctctggaaggccaatctaaaagttgactttgctatttggaccctgaagagttggctgcgcttcttagcttaggtgaagcccaagaagctcagaataaggccaaggctgccgttgcaggcacctgctaggatttccaagaaagttggacctatctagaatgtcgaggcttctgaattcaccaacaagatgataatcaagaatccactccatattcattgaagattctaagataaagaacaattctccatctgtggaaaagtcactatcttttgtgactacaactgaatccttcctgtggtgacgcaacttatccttcctatctctattgtgagatttgttgaagtcttgttgctccttgtacttcttgcaaaatctttgcaagtgtctagactgtccacagaagtaacactttctgtttccttctctctggacttcgatcttgattgagaatgatggtgtttactcttcgaacttactttcttggcgatctactcttttaaagtcgtggctgcaaaaatcaaattgtagtagttagcaatactagttaacaactctcctctgagcgagagctcacgtcggcatcagtctagtgtcactctggaaaacatatacgagctttcgagatctc

SEQ ID NO: 182963 - DNA, 565 bp, Cannabis indica
aaaataaataaataaaaattggcaactgaatacgacataaataagaatttccttcattatcatgaaaaaaacatggaaaaattaaaaaaaaaaaaaaaaatacaatatagacgaatggtttgacctctcacattcccttttcaggtttccttttttttatttatttactctcataataaaattacacgtaattaaaaaaataaatgaaaatttaaattcaataaacaaataatatgtcggtaaaaaagcacatgttgactgagatagaccattcctacgataagacacgtgtaatcaaactattggctaatgaaaacaaagcgagtgaaggcccaccgttatgtgaacagaaccgcgtacacaaaatcaaagcccatacgtatactcaattaaaactcttctctgtatatatatgtgtaaagatttagctggaaaagagagaaaaagggaaacaaaacgtcgtcgtttggagtttgggtggctctagtggcggtggtggttgtttctccgatcagtaatggctaactcttcttcttcttcaatcttgttctcttgttacccatta

SEQ ID NO: 182964 - DNA, 729 bp, Cannabis indica
gatcaggtcagatcatagctggaccagatccgacctgacccctttacactcctaacccgaagaaaccaccacaattactaggcgaataacctttttattttcttaattaaatgagttaaattaggttagttgaaatatataattaatatagtagtcaagtgtacaagtgtctaaagcatagttattaatctagaatatttctaactaatctagtgacaaagcataataataactaattagagaaatccaatccattgattcattagtaccttactagtacaagtgcagccgctatgagattcatgaggaccaccatcttccagttcgagttcattcagccatgcttcagtgtcaatcttgtaaaccaagtcatcagcatcataaatagcatccttgagatcatcaagccatttccgcactcttgggtctttgatgagcttctcctcagcatcaatgagcagcagatcagctgtagacagcagagttttgaactccttgaggagcttgagaatggcatcttttcctttgaagaagtccttaacctcagtagttaactttttcaccaatggattaagcaaagcagagagaagtgctcctccaaccacttcagcagccatcagatcttcaaaaactcaaaaaggattacaggaaagtgagagagaaagagagaaatcagaaatattatggcttgagttcacattaaaattttgagtacatagtattagttac

SEQ ID NO: 182965 - DNA, 575 bp, Cannabis indica
attattttccttaccatatatattatgaaatatttactttagtggtttaatattagaaaattttatataatggatggaaaaattttaaaaattaaaaaatatatatggatatgtaacaagatttatttttactctttggaattatttatttatcaaactacatctttaataattattttttaattatttaatgatttatttatagttgtaatgagattgtttgtgtagtaacaaaatttaattacataaataaatatattacatattattataagcgtataaacataaatataaaagaatatcattgtcaaaaaaaaaaaaatatatatatatatataaagaatatctttatttagatttaaagagaagaactcaaaacggaaacgtacctgaattcatagatcttatagaaataatctttgtggtaattttagttaataatcttctacaagatttagagttttttaattctctctcttgatgaggaagatgaaaataaaattattcttgttttttagggaccactaccattatataacttaataggttattaattttagtatttctaatttaat

SEQ ID NO: 182966 - DNA, 645 bp, Cannabis indica
gagggaatagagccaagagagagataaatcaagggtccataggtgtttgagagtttttggaaagattggtgtggtattgggccaagtaggtgaaggtgtccaatgacaggaaaagcaaatgggctcggtggaagtcgaaccatggtccgacttgttgtcaacatggctcgaacaagcatggtagagactaaccagacaaggaaaagtatggtgtaaacttggaggctttccatgactgcaactctgctcattttacttaagatgtaaaaatgaaaagtatgaaactagtaaaaaagtattcaaaccaatgcattttaaattgttgtttcaatgtcaaataattttggtgcattgtttttcttttttctttttcttttgtttttattctgacaagataccaaaataaagacaaaaaaaataccacatcttttgtacagacacatattttatatacatttgtgataagtacaaaattatgtgtgcaatttgtagtgctttgtactcaccgaagcatggacaacagtatcatgtttcattaccttacttgacatatatataatttaattttcattactattagatgcaaaatatgtttctcaaacacaataagaatagcacacaacactgaagcaaataatttgtgcc

SEQ ID NO: 182967 - DNA, 597 bp, Cannabis indica
tgatatagagcattatttttcattattttttacttcttagctaaacttttttaactattagctattttacctcttctataagttttcttagattcttgtaaaatatatatctatatatagttatataattatgtaaatgagatcggtccccaattaatatatatagttgaatgaaataatacacatgtttttgtaaaagatagtgactagatacttgattcgaagtgtaaaactgcacaacccacatgcaagaagagaagagaatatataaaatgtacactgtgattcgtagcacatccacgtttcactattacaaagaaacccttaaaataatgaccaacaaatttgggtatggaaacccattcatttctgtcgctgacttctttgatatttcccaagagaaaaaattaaatcaaataaatatatttagagagagagagagagtgggtcacacactgccaataacagaagttttctgaaccagaaagagagactcgagtaatgtggcagtgtaaacgtatcccttagttagatatcaatctcttccacctgtcaaatccttattggattaccccatcatcttttttttgttggtac

SEQ ID NO: 182968 - DNA, 712 bp, Cannabis indica
cagtgtcaaaaaactccttcactaagttgataacatcatcaccaataatattccaatggtgttggaagaaactaggtcccataccgttagagattagttgatagtgagatcaaactattgagagttttaccacaatttgcttttcttttaacctttaaaacctaaaaaaattaagaaaataaaaacactaaatttttaagtcttatattaagaagaataataataaattgtttagataagtgttgttcataattttaatacttcattttattactttttttttttacaaaaaaaaaaaaagtatttagtttagtaatttcttaaaggatatataatttagtatttagtattgcattttcactagtattgtttttgtcattaatttatgagtaatactacaaaatccaataatagtttcttctaaactaatactaaaaaaaaggttctatggcaaacattccaattcaaaaaacagaaaataaaaagatgtcaagaaaacagaaaatataaaatataaaattgtaatgattataaataatttgtgagtttatatttgacttagcatatgcaagagtgtgaagatgagataatcctttattttatttaagtcatggtccgggtcagatggagatatgaatcacatttcactttgtttcacatggccagctggctaaaaatgaatggttctctttttccttttatttttaaattg

SEQ ID NO: 182969 - DNA, 516 bp, Cannabis indica
cacacacacacacacacatatatatatataaatttataatgtaaaaagaaatgaacttttcaggttttggtctgtagaattgcatttagtagtctaataattttttgtattattttttttttggtctaaatcagtttgacactctatatttgatgggcattggtgaatctcttctgggggtttttttttttttttttttggatgtaatgaatgttatgtatgtatgaagtttacttattcttggatgctgagagtattggaaaattcattcttctttttcagccaaactcctgttctacttatgctaatttctatatttatttttcaatgcttttttgtagtctcatttatgagtgaattagttcattcaagaatgttctccaaatgctgcaagaaaagaagaatgtttttccaaatatatattaatttgggaatggaaaggactccaagtagagatacatacacttgtatcttggttataattatcaatgcagatagagagagcaacttgatata

SEQ ID NO: 182970 - DNA, 515 bp, Cannabis indica
aaaaagcatatactttttggtagatttaattaggccaaacatgagtttaaagtgtatatacttgtcttgaggtgagatcaagtcatgactcatgtgtgttatgtaccttgtacatatataataataatagtgagtaagggaaattaaatatattttgtgaaattaaattggtaggtgaattgaacatgacggtggacacccatttactagacaagcagacatggggtagctctgacggcggcgtcaatgtcattatctttagatgtaaaattataacataaaagactttttcaaagaactaataataacaaaagagactttacaaaataaatatctatactttcaactccagcaatcatcctattttattattttgattttgtgtacataatatatacatatatatatatattttaatttatactattttttatacatggttttatgttggaaggtgtctctccactttgtcatgagaatgtacgtccggaattagctgaggcaattggagttcg

SEQ ID NO: 182971 - DNA, 887 bp, Cannabis indica
caaaattttttgattagttcaacattattcaactttcaaacttaaattagttgaccaaaaaggttaataaatctaaaagatagcattataaatgaagtagcatattatttagtatatgaaataatgcaacttatagataaattttatgtctagctatcaagcaatcttgacgtttgttgctaaaaagttttataatttttattgagatcatgatctggatcactattagatatatttttctacagtaatttttctaagaataataacttactagctgctagcttcttaagaataagtctctatatttcgtacaatataagaaagttgtgtacactaatactgttatttcaaactatataattaatcaaaaaattaatttactacttaattagaagattaagacagtcaaatatataataagtgtgtaacttaaattagttaagtataataggggaagcgtttccttttctattaacaagggcagacataaaatcatatacgtggcatgagaaagtgtagaaagtctgagtttagatgtattgggtagaaacttatcatagcaagcaaatcagttgtttagctatactacttacaaacatacgattcatattttttactaattttttcattaaaataatatttgaacaatcaccatgttttgagattatatacgtgacatcatttgatccctacagttttattatatatatatataaatattttatttatcaaaccatctcttctgatgtgatatgttgatccacccccagaaggaaagttagtctaagaagcaatcttattattagttaattattatatacagttttcttttatatcgtatctgagccagtaaaaaatataatcatgatatataaatcttaatataa

SEQ ID NO: 182972 - DNA, 747 bp, Cannabis indica
ttttgtgaaacttggtctctccctctaagaaaaaaatggtactgatgagttgtaattatataatcaagtttgctgtatcatcttaccatgttgataagtatgtaaatatatatatatcagaatgctatgagtgcttcctttaaatgatttttctcagttttctttactttactgagaaggacccttcattatggctctttggtgcatagtaagcttcaccatatcattatggctctttgtagtttcttcttccatttttcgaaaactagcaaataatttacatagtcaaaaagacgatatatattgttttaaagcctgtttttgagatcgaaatacttaaataactacattgtatattgttatataatttgattataatttctattggaatagaaacactcctaaaggatgttagaagtaagctatttaagatttttctccccaaattatgctcttatcatataaatacaaataagctatttagaatttttgtccctaaactgacaaatgcattattgtgctagtccccaaattattcaaagtaacataatgtgacttgcggtgtttacgggcccggtgacacacagtatgtagtcaagttagctttggggtaccggagtcactactctcccaacgaactcaccgaatccagttcgacctagggttgtacggagtgacactcaaccattcgtactactcacaatgtcacttgcggtgtttacgggcccggtgacacacagtatgtag

SEQ ID NO: 182973 - DNA, 564 bp, Cannabis indica
tttacctatgctaaaaatgagattcaaatattttatttgcacgtatgactatttttcttttaacgcataaaaaataaactgttcaaaatttatgtttgtcactataaactattaagattttttttgtagaaattaccagttattcttaagtaactataagggacgcgattgtaaaaaaaaaattacaaaaagctctcttgaataccataaaaagaggtacactaccaaactaattttttaaaagaaatgtaatatatatgttttcttataaatagctataataatatatatatatatatattatactttttgatggaatataatatacagtatatatataactttcaattttttaaaaatagatgacataaaagaaaagagataataataataataataatgaaaggctgactttgattgttgattgatgttttggcggcatagaggtagatggaaaggaaaatactaaagtgaaaaaaataaggagagatgtttatctctcgaaaaatttatagtgatgtatacaaaatctgattcggtaagagatgataagtggtaaaagtg

SEQ ID NO: 182974 - DNA, 842 bp, Cannabis indica
attaagttttacttaaaatattatggcgatttctagaaccctcaagaggcatgtttcccttcctccgtccggtacccaaaatgggtttttggtccaccctccacggtggtgtggtggcagttgggtttggaatcttctctcctcccctcatcatttctctgctcagagcattaattgtgaaattaatgcttctgatggttattatctcctaaagatcctttctgctgtaactgttcatagtattaattgcaaattactcttcccacaaagccttaagccttgtttgtcaaccccttatttatccataaccctcatttactctcaccatcaaatcaataatctgtctgaagatatgttctctctaatagaagaggcggcgtggaggagaaatggtgatgatgaagcctgggggaatgcaatggcctgcaaaactactcaagaggctaatgctagggatcaaccaagagtcttcttgaaaggtctgatctttttcatctataaatctcgtcttcgttttcattattttctcatttctgtttggtttgtgtttttgtctgggttgcataactcctttgttttcaaaatgaattctctaagttcctctactgttccccctctaatgctcactcctgatgagaacatggtttataccatgaatgaaactcaagatgaagcctcccctgaaaattagccttctcctcaaactctgcactgttaaacattttaatcgtgcctccctcattaaaactctagccccaatctggacctctcagtgtcgttttcctgttaccatttctgaacactctgatggtctttttcttgtcacctttcttgtgagggga

SEQ ID NO: 182975 - DNA, 920 bp, Cannabis indica
atagtcttcaaatctatttaagacattttaatggtatttaatttcactttaaatcttcaaattgatgcataactttatatgctttaattaactagcaaacaaattgtgagtcacaattataaattgaaagagaaagtatatgtaaagaaaagtacatgtaattaataagtatttacacgaatttatagatttatatttgaattacatatcaatttgaatgtactatttagattttatatttcatttgcatcatacttcacagtaattttgggaataaaaaccatatgatatcaagaaaaagaaaaacaaaaatgtaattttcttttttagaataaacaccaaaaatgtaaatataatggttacctattaataattagataaaaagaatataaatttaaatataacacttacaagcacaagccgtcttagctcagccggtagagcgcgtggcttttaaccacgtggtcgtgggttcgattcccacagacggcgttgatttttgtattgtttatttatttatttatttttttatttttttttaaaaaaaacttaaataaattgttctcctttcatatttaataataacacaaatttttagttagctcacaaattgaatttgtattcatttttaacattttttttttgtttttgtttggtttttttagggcttctatttttttagtttcaatttattttttctttttattgggtttttttattttcgtttgtttagtcttaatttctgtttcattttgttttttttttttttttttccctaaatgttttattgtttttcattttattttcttcatttgattatttctcattttgtaatatttttttcatagttttttaatagtgtaaataccttctgtatgtgtttttttaatatgttttttgtctagttgttttctgtctat

SEQ ID NO: 182976 - DNA, 762 bp, Cannabis indica
ccgtaattaaaaaattatgctttaattattcatgtttccctaatcaactcataattagtttaagtaggattataattctactctaatacccacttaatcacatatttaataaaatatgtccaattaaaatatcaatatgttttccaggatattacaataatcgttatgttagtaaaattgaacaaaattgaacaaaaggcattaaatccaacaaaaattaaatgaagataataactgcaatttgtaaggagaggaaatttgacaaaaaatgatgtggtagtggagaagatagaagggagactgaaaagttaaggtaagtttggttaagcagaatgaaaacacataaataaaaggaaaaattgtagcaaaagtccctaaaaagttgagtttgatgcagataagtccccaacattgaaaattggcagtaatagtccccaaggttacattttttgtttgtccgctggtacccaattttaactgcaccgttagattctaataaattgccatgtgttaattttttattggcaaaaatcatattttaattaaaaataatttaaaataaaaaactaaaaaatatattttaaaaccataaaaaaaaaagaattccttttcttttttttttctttcttcgtcttcatcataaagcaaaacaatttgacaattcgaaaatacaacccacaccccaccctcaccccacccaaccccaccccccaccccactcccactccccaatccgtgactctcaccccacccccacttccc

SEQ ID NO: 182977 - DNA, 798 bp, Cannabis indica
gacctcaatcccaaacccagacccgaccccagacctggccccaaactcgaccccgacccctaacctagacccgaactcgacttaaataaaatttacaaaacacactttgtcttctgtttttaaaattgaaaaataaaattagttatagaatatttttttattttcaaaaataaaaattttaacaaaaaaaaaaaaaaaaaaacaataattgttaccaaacgaccaaaataataaattaagtactttctttattaaaaatttaatttaaacactttattgcaatatctttaaaataataataattttatttgctttgtcatagagaaggatgttcttaaaatttgggattatatggtaaggtgtatgggttttatcacaaaattaattagcaataataagattaattcatgcatcttatatatggtgttataatatgagactctttacacgtatcaataatatgagactctttgctcgtctttttgaacctgttcccccaaagtgtttaataaaatgcatgacgtttcatctcaaaaccaatttatgaatgagagaagtacccaatgcatcttattatatatgatatttaatgtacacacacctctctaacaaaggcatatctaaaatgtagttgtgaacttgactcaatctttattctactaagaagttggtagttcgaaccattactcttgacattaaaatctaaaactactttcgacatcaagctggtaactgaagagttagtctctcccctatctatcttgtggggtatgcctttgctgcattttttatcttaag

SEQ ID NO: 182978 - DNA, 585 bp, Cannabis indica
gacctttctctattgcatattagattcgcgaaggtcggtttcaaagtcttgctcaatgtttggttcgcgagtaccgaatatctcttgctaagatttccaaagaggtctccaatgatttctgtgaggtatgagtttcttccaagtgaagtttgtacttgagagaattcttggaactgcactctctttgaattctcagcttatttatttggaatgtttctacagggtgttcgggcaaggttagtggataaggactttgctccaaaggtatggccacctaacataaattgttttaactgaatgagaattgttttctggagctcagaacaatcatctgactgatcgatttcgaaaaaatccagtgggagcatccaagtttaaaagatgtgtcagaagacatggtggaccgtcatttctcaccacttcctgaagttgagtctgaacttgagctacccactgcattgcgagaaccatacatgtgagaccgacgagaaccaaagattattgaacttggaaacgcaaagcagaagcgcggttactaagccggacccaggtaagatcaaaaggattgagtgcatttttgctatg

SEQ ID NO: 182979 - DNA, 731 bp, Cannabis indica
gcgctacttctcccatagccaattagttttgagatggaaccccattcatcttatccccgaattctaacagagaatatctccaactcggagaacaaactcatccacaggaatgggttgtttttatgcacattaacacttatccaattccaaaaccagtaataatatagattgaggaagccaaagaagcatcaaacaattaaaatataaaatcaaacaaatattaaatgtttaagggaatacataccagtactaatttctttctcactgaaaaataaattattaatgataataatatcgattgaggaagccatcagatggtagcagtaatactaactagtgaatcaactatggacaatagtgatcggcggcacgatcaaagatcagaaccaaagcattttcatgactagaaaggcgatgccgaagaaacacacaacgaaagaaatcgctgctaagatcgaagcagccacaccaaccgcgcggggcaaaggcagggctagccgatcgctccggcatcgaaaagggtggtcacgctaagatcgagtgcccatctgtaagcgacagtaccccaatcgcaatgacaacaccagtggatgcctccacacaaatattttaatatatcagattggaaagataaagagatcgatgactataataaatcctaattaatttaaattgaatcatacaaattagtttggactaatttttttttttagctactcttactaataata

SEQ ID NO: 182980 - DNA, 721 bp, Cannabis indica
ttactctcattctaattataaaattccctttttaccattttattttagaattctcttctccccaatatatctttctccatcatctttatgtaatagataatatttatgttaatttttttttattattattattagtaaaagtctaactaattattttattatatatatttttttaaaaaaataaatgttataagaaaaaattattgtaatttgtaataaaattaaaaataattataatatattaatatgtatgaatttatttaaataaattcgataacaaatatcatacttattttggtaattgtatatttaaccgttattcaatcatctagctagcttaccaaatacttatctacaacttttccaactcacagatattttgaaattatattataccaaatactcatcagttagctttttctcacagtacagttacggttaatttttctcatagcacagctacagttgctttttctcacagcgcagctgtgccgaatcgaccctaaatctattaactattgatcaacaacaatatcggctaacagatcaaagaactatctaatcaacttaagttttaataaaacttaataaaatttaaatgtaagcgtaaataaaagtctaacataataaactgaaacgacgaccaatgttaaccgaaaaaagtttctaaaaactagagatatatcgagaaattaactacgcctaaaaaatgcccgatgat

SEQ ID NO: 182981 - DNA, 605 bp, Cannabis indica
  modified_base (101)..(101): a, c, t, g, unknown or other
tttttttttccatatttaggtaatccttaaataattaaagtaattttagaataacattagtgtaatatatttacttagagtagaattctttttaaaaaaanatgtataaaaatattaaattacataaaaattaaatatcacatattatttatcattcaatgtactaattattatacgaaacataacttaaattataaaaataatactaatatactaaaaaaaaaacaaacccatattataaaatttaaatatacaaaaatattaaattatataaaaattaaaatactaaacataattattattcaatatattaattattaaacaaaacataaattaagaaattataaaaggatactaaaatactagaaaaatacaaaaaaacatattataaaatgtaaaacatgaataaaaagatggctaatatacaaatacttagagcaatgtaaatttgtatttatttaatttttcaatttaatttttattaataaatttagatttttaataaaagtaaaaaaaaataatgttaattaaagctgaaaaaaaatcataagaagcccctatggagtcggttattttcataaaaattgactccttagggtccatat

SEQ ID NO: 182982 - DNA, 808 bp, Cannabis indica
cttggcatttgaagattggtttacatgtcattggcaaatgaaacatgacatctaagaatgagtccatgtggtatacaccggtttgtccacgtgacccattccgatcggcctacatggcacaatacaattggtctacatgggactctaaagtttagtaaacttaattcttttgtatttgaaatgtcaaaaatctaatttaagataacaaaattacttaaatatatatttcataaatcatcatagtatttcagaattctaatacaatattgataacaaaaaaaatgcataatcacaacagtatatgaacttttaaatgcataaaatttttcataaataagtgaataatttttaagacccaaaaaaacaaagaagaatccaaggcaagccaacatcgatgctctggccaaccaaagcaatgagaacccagccgctgatgatacttctgacatgtacaaagaagtgaggactccaagtgtagtttttcttgttttttttctttttattttcagtttggcctaggggcatttttttagtacatatggccaaccaagtggattttgaacttggataatatttcattttgttttaagataactagctggccgagcagcttgtaattccagagttatcatgctttgttatttttcaaaataaatattttctcttatgttttaaataattatacatgcaaatctttgttttccaagcttgctattacctatgccttatacaagttacagtttacccccaagtcgatcgagctaaacttaggactcttgctcacttgcatcgtacagtttaatttttc

SEQ ID NO: 182983 - DNA, 813 bp, Cannabis indica
taatttttttatataattatctataaaaatattattaaaaaaattatataaaatataactaaaacaataaaaatatacatatagtttttttaagaaaaatacacatattgtaaaaagaaaatgaaaaaataaatcacaaatttaaaccaatttaaaaatggttgacttgtttaagaaatacgagctgaaacgaataaaatacgtcaaaaaaaaaatacgagcctacaagtcgttctagacttattcgtttatcaagacatgctacgatttatattttttggttgtatagtaggacaatattcataatttgaaaatcaaatacaaatatagatcgagtaagctcgacacacaaatttatagctgtacagtgcactactacactctctctcactcttgagagaaagacttgcacaataagagacagctggcatccacgagtcttaaattattattattatttctcttacttttataatataaatgtcctattgttattatatgacgttactccatgtaagtatgtagtttcttatgaactcatttaaccaaacttgcaaccttttctgtaccattcatcaatttcaaagaaacaaattaattaagaagattagtttaatgaataattaatatttattttctatgaatttttttacgctattaaattatatttttttttaatacaacttgcgaaaagtatctcctaaaatataatgtttagagtaatatagtttttttttttgaataatttagagtaatataattattttattatattttatttaattttatcgtaaaataaacaaagtgatagat

SEQ ID NO: 182984 - DNA, 635 bp, Cannabis indica
aaagagaataacatatatattcaagatttttgctttgaaaaattattatacaataactttttgctaaatttatgtgatatcgtatcaagtatcaacttagttatcataaaaaaattctgaagagttttttatttattattactttagtatataattatcatattaaagaataaataacatttcccttgtaatttgcccatataataagttaattaaggaagtaataccatcctaagcaacaagctcttattagttaataattaatcaatcaaggggatgaagattaggatttaattcatataaacttaaatctaggaatctctctgtgccctataatttgatacttattattattattattattattattattttttttgtagaagatttgatacttattttaatgttccaaggaactctattatataatttattccacaaattacgataataatcatacacgaaaataaattatacatctaaataaataaataaataaattaattaattaaaaataaagttgatattaatgataaaaattaatatctatattatgtgtccctagaattggttttaactgtaggcggagtaagcttgtgtctaagatctacccatcaacattgagctctccgtac

SEQ ID NO: 182985 - DNA, 928 bp, Cannabis indica
agtagaatagtcactacacatacatactcttaaaacaaactacataaaaaatattaacatttgaaattttatatagtttatgagttatttatcacaaaagaaatataaacggtaggtcgaaggacagttattgtattttctataaataaaatattaataaatataaaaatattaaaatttgtacaaccatatttttataattttttattatttttgtatattctaaattaatcctttaattttattaagtaaaataattaaaaaaatgtaaattgtttataatttaatgctatagctaaatttgataataaaataattgaaatagcataaatataaattaaaaagtagtgtgtatctataatgatacaaattttgacacaatatttgttatgtgctaaatttattaaaaataattgcatattaaaatcaattcaaatctactcacttttataagtttattacctaatatacccttacatatgttactttaattaattgagtctcaaatgcaaagaaccccaattctgtcatagcagttcaatgcatgcaatctccacctcttccatcatcactgactcaaaaatattgtgtaatgataaaaacaaaattaatagagtgattaaaaaaaaaaactatataaaaaaagaggataaagtttaaagacaccaactaaaaaaagtatacagcctaatttttattattatatttttttttgttaaataaattatattttaactatatacttaatcatatctctaataaagatacaaataatgaaaactcaaatttatgagtaatgacacatactcttaatttacacactttatatatttaattttaattatatataaataaacagtgctccttaaaaatagtaatagttgatattgaaagcacattatagctagtttatagataatacatatat

SEQ ID NO: 182986 - DNA, 697 bp, Cannabis indica
atcaattattgggttttgttatctattttattcgacaattgatctaagtcattaattaatctatatttttataggagaatttgttctaattaatatataatacatggaagtagttcatgagtactttctccccatatttacttttgggttatgtacatagtttttttttctttttctttagtaacaacacttttatatagttagttgagacagctcccaggggaacgaataaccttgatacgcaactggaatatataccataaaataattattaatttttattgttattttttggggataaaatatttagagtttaatataaaatttataaaacataaaatagtctataaaaaaaaatattgaaatataattaaaaagtaatcaactaataatttaaactaattttgtatatatattagtatattacggtgagattctaacattattgaaagaaagtaagaaaataatgaattgtggagtggaggattttttttaactcctgattagagagagacatatctttaaaatattgattattgatatatgtatatatacatatattaggttattattaaatgtgtattgcacgtaaattagttatatttttagtttttattttgtttatgtgtagttttaaaaagaaatttaaataaattttttaaatttttagttgtttttttttaaaaaaaaaagttaa

SEQ ID NO: 182987 - DNA, 662 bp, Cannabis indica
gtttttgaacgaccgctccaaaacccatacaacagtcagaagatcgtaacccacatcaatataagtttgaaccacccttcagctagaggtgatcaaggtgccttcgggggccgaacagtcggactaacacccgaagtatgaccagaagccacacatccaattctcaccttagcttcttgataggtccgagcaaactaaaaggctaagcctgttagataaattaacaattaacccaagatctatttgtatataacatagaacacaataataagatataataattaggtatgtgtacctgattgatccatagcaattatctctgtttgatccacagcagttactccaatttgatagtgcaatactatcaactaagtcttcctccctagatctctaaatcagaagcagtttattttctctgattatcaaaaggtatacaattgtgatgagacaatatgtatttatagagttagggaggggacttagctacaaaaccctagttgggctgggcctgctcatcaaaggcttcagtcaactagaaaagcccacacttctgcttcacctagactttactcacagatgctaagcccattaacaattgatcaccaacaacatgggctaacacagcaaagaactatccaatcaacccaagttttaataaaacc

SEQ ID NO: 182988 - DNA, 697 bp, Cannabis indica
ccatttcttcttcaaaaaaatatttacttaaaagtttcatattatattaaatttattctcctttttcatcaaaaagaaaaaaatgtatacttaaaaatttcacattatatgaattttattaaatacaaaataaatatatataaatattttgactctataatttgaaacgtagttactgaaaaataaataacatataagactagaattatagagtgtttggtctttgttaatacatgttatatacatgctattagtttaacttgtatcgaagaggtttaaaataaatttctatgcggtatcttttaataaaattaaagtccatcttaatttttttcttaacatatataattttcatttacgtgtacaattgagtctcttttttattataatttttttctctattaaaaatcgaaatgaaatttcaaattttttattattatagttaataagtctataatcattcattttctttccagtttaaaatttctaaattatttatttatcaactaataattatttttaggtattcattctcttttttttacaatttctaatttgtgtatttattttttaacgattaatgtatatatttaaaccaaatatatttactaaatatagaagaaaacataaatttagttaagataggtcttttattattatcaatttaattacttatcatataataattattttaatc

SEQ ID NO: 182989 - DNA, 381 bp, Cannabis indica
attaatcaatatttgataatgcttaacagttaaaagtttctttttttttttggtaaacttaattacattaacatatattaatccaattatcaacatatatcctgtaaaaattaaaaacttaagtttgctgctaagtaatataaactccacaaatcactcacacaacataaaaattgtttgatgtatttttttttttttgttgtcattttccaattatcattctcttctagttgaaatgaaaaaaacaagagagagagagagagtttacaataatatacaaatttttgtaattaattttcaataatgatgttactactattattaacgtgtcacgttaggtaaatctaagatatatctgacgttttcttattaattactaat

SEQ ID NO: 182990 - DNA, 557 bp, Cannabis indica
cctgtatgccacttcattattggtgggaagcctttagcactttagcctttctaataaaccatctttccactccaacactatctcataaatctcccataaaagtctaatttaaagttaaacccaaacttagcttcattgttgtaagatcttttgaagcaaaattttagaaattattttttttaatgtggtatgttgtttaaaagtgatttttagattatcatttttcattttttttaacgtgatatatctttagaaacatgatattttgtaacgtttttttttttttaccctaattagctattgattaactaatatttaatataggttaaaaatatgaaaaaaaaaaaaagagaaaaatgtggtatttaagttgagtttttttttttattaattattagattaattgatatttaatgtgattaaaaaatatgaagaaagaaaaagattaaagtagaataaagttaatttagactctcactatgttatttttttcctttatagatgattaatatttaatgtgattaaaaaatgtaaaaaaaaaataataaaaagactag

SEQ ID NO: 182991 - DNA, 742 bp, Cannabis indica
agatagcttcataatttcattataaattacatgtacacttgttctgtgttcagtgttaaattgtattagtattaattttcatgaaaatattaagagcactcccatcagtttttctactttattattcaaaatgctttactaaaatcttattttttctttcaaaaaaaaaaaaaaaatcttatttttctattccacttcacatttttacattatactatatatatttttttttttctatatcatttaaatattatatgttacttatataaaaaaaaaataaaaaataaaaaatattaaatgaaaaaatagaaagaaaagagaaagaaattaaaatattatttaaagaatgaataataattttctacatatagagaaacactgtttataatgtaaaatttttgagttattttagttcactgatcaaacataattttaacacatattttttattttttactttttgagttattttgaaaatattgttgtgagtactctagtgtgattgatcttttctaaaataaactaaaaaaaaaatctaactttggcaaagtttgttttattttttttagtatactaatcattattcattactctcttatactaattggacttatgagtaatgatcgtgctgataaatttttctaacaaaatatgaagtaaataaatatacacagtagtataacttagtacatttgagaaccaagttataaaaaaaaaaattgcagaacaaattagataagtg

SEQ ID NO: 182992 - DNA, 867 bp, Cannabis indica
atgcaaattgtgagttttatcttctagagttcttgaagaaacttgtgaacttatcaaggaggtatccttgtggcgttcaacttgacttatcaaacggatttccatccccgtttgtggcgtcttccttataccaaggttcgtgcttcgctaagcattgggtcgaggttccattccaacatcgtttgttcttggtggctgttccatatttggtgtcgggtttcatcacaagttggtgtggttcgtatcagttggtatcagggacgaacgtaacgtactacgtttccgggtttcggtactttacctttttaccttttttacttttttacgtttttaggttcgttcctaactaaattttactttaaaaaaaaaaacctaaaaaaaaaaaaccttctttacgtttcggtttcgttttttacttttaatttttttttttagttttttttttggttttaggtttacgtttcgttttcgttttcgttttcgtttccttttcctttttaaaactttaaaacttcgttaaccccgtaaaccttagttttggttttaagtttttaacttttttcgttttcgtaccaacctaccgttttcccgtttttccgttttcgttaactaactttttcccttttttaccttttaccttttccgttaaagttaaacgttaacgtaacttcgttttggtttagtaatttagttcgtaacgttaaccgttaaccttttaagttttcgtttccttactttactttaacctaacctactttagtttttttcccgttttttcccgttttcccgttacccttagtttttacgttttaccttacgttaggttcgtaaacgaaaaggttttagggttttaagggaacgacttag

SEQ ID NO: 182993 - DNA, 719 bp, Cannabis indica
atttttacattgtaaattatttgaatttttttaaaaatttacaagtaactgtatataatttcaacatatataattataaaaaataattaaacttaataacttgggtaaatgctcaaagtttagtgaaatacctttttaaaatggtaaactataaatttattttttttaatcttcaatctattttttaaagtgatatttcagttaatcaaaagaaaagaaataaaaaaataataaaaaaatgtactatagatttatgtattttttttaatttattttgtgaaatattatattatttaatcaaaagaaaagaaaaaagaaaaataatactcgtcattagtgtaaaatttctctaaaaataaaaaaatcattagggtaaaaaaagaattattttttttgaaatgaaatataaaattattaaaaatatttaaataaatgattgctacaatatttatcttttagaaggaataattgtttaaatatatattattgataaaaaaattgtttatttataatagcccaataaatatcgaggaattaaaaagactagaaagaaaggggtaattactgataagaattaaacttaaaaagttgagtttttttttcttcttaaaaacataaaaagagattatgagaagatgagccagccagccagccaggctgtcaaacgaaagacattgaattgaaacgaagaagaatgtagtgtctgtctgttccgtccg

SEQ ID NO: 182994 - DNA, 515 bp, Cannabis indica
ccactgtttgggaaaataggaggtggccggaggtgtttcaccatatataactagatgagtcatgctacaaaaaaacaaaaaagaaaaacttttttatgctatttgtttacttcaatattattcgtgctattgtgtaaaaaaaatattattggtgctcaatatcacaaaaaagtattttattattattggtacaatttaatattattatttttttttaaaacaaaagtttttcattaaatagagcactcgttttgttcaagatacaagaaaaatgcacaggtgaaacaaaaagactgtaaaaatacgataagtccataataaaaaaatttctcacaacaacatgcacatttcaattagcaaagcctttaataaaatagtaaaaacaaattataaaatgaccttaacacaaacttactatcttcaatataactaaaccaaacatagaacaaaacactaaaggacttcagatagcttcaatagacaccaaactatctgattcaagtatcacaaacgag

SEQ ID NO: 182995 - DNA, 363 bp, Cannabis indica
gtaagacacttggaagtagtaccatacaaataataaaataataggctaattaggatttttttcccccgaactttgacatgtaccaaatcatgccccctgaacttttttggccgttaaaaattccccctgaactattgagattgttagatttaaggatttttgtctaatttcattcaattttactgtttcagtgattgtttatgtactaaaccatgctctccagactttaatatctaccaaatcatgccccttaaactttgatatgtactaaatcatatcccctgaactttcatccatgttaatttttttttacaaaattagacaaaagtcctaaatctaacaatctcaatagttacagggggt

SEQ ID NO: 182996 - DNA, 506 bp, Cannabis indica
actcataattatctaattagggttttgctaatcctttttcttaattccgaatattacacgaacacacatgaaaaggagggagagacaaaagatatatcgaaagggatttatatattaaatatgcatggtatgtgtgtgaattaaattaaataaataaaaaagtgtgtgaataaaattgtacatcatatttttgataataaaattagaatagcattctcatacgtaacaatttataaatatataattaaaacattatacggtgatgggctagactcatatctagaatctacatactcaaaaccccaaaatattatacacatatatgaatttatatagaatagaaatgatagtttgaataatttgtaaagggtgacaataatattcaagcccattaccacttttcttttaattaaagcccttaaatgatatatctataatttataacttaaataaaattcggccttttatcattaaattacatacataccccttagaagatatatata

SEQ ID NO: 182997 - DNA, 574 bp, Cannabis indica
cattattcgtaactttctaataaaagttgtttcaaaacactgtttttgtaggaataattatttaaggtactatttttttttaaaatatttacatttttacgttcaaataatgtttttttttcttacatttttacggttttccaaaaaataacacgaaaacaacatagaatcaacaagaaaacaacatcaaaataacatcaaaataacaacaaaaaaacaacaaaaaataatatacagataacaaaaaattaacaacaaataaacaaaatttcaacataaaaagaccgtatttatgaaataaaatcaaaaaaatcgtaataatgtttaaaattccgtgaaaccgtatttttgttattttttttttttgtttttgtgcatttgtgaaattaacccttttttgtatcttttaagcatctggagagttttttagagtttatatacataaaataattgtatgttgtatttatataaaattatttataaattttcagaaaattttaaataatttttaatactgaaaaattgaaaatacaattcaatattttattatacatgtgaaaatatttacttatac

SEQ ID NO: 182998 - DNA, 667 bp, Cannabis indica
aaccctaaatgttttcgacattctaaatatctagttatgttgtctcgctaaatttaaggtactacactataataaagtttataggccaaacgtcgcattctactattaccagacataaaatataaaaaatataaaattttatatataacataattattacacctaaaatttaaatatatctccataattacaaaattaattattataagcctacttctaataataagtcttaattatctgctaattcttaaaataaagttaaacgatcattacattctcactccaaattcaagtgtgaagtgcatatagctattacatttgggaatcaaggaacaattcattatggaattttctatactacaaaaaattgtaaagtacataaagaaagatattagtgtaaggttttctcattttaaaaagagaaaacaagtaacattgatgggagattgagttcaatcgcttaattgagctcatgtttcggttgtaaacggttcttttttttttctttttttaattggttgcagtaatattttactaatttatcaaaaaaaattacctgagtatagaaatacaagaaaattgaacaaacttaaagaataataaaaaaaataatcgatagcataaggattcaaattgtaaattaaataatggtgacttggattgctca

SEQ ID NO: 182999 - DNA, 894 bp, Cannabis indica
caatatatacatatatatatatgtgtatgaaaagattataaaatgtagacaacaccgcgcaaagcgcgacttagttccctaataaatatataaaagagagtaatagtatttattctccccatatgaccatatgttttaggggttacttttatgaacatcctcaagtgttattattcttctttattcatatttatttttaaatatatatttttttaatataaaatatctacattaatttttattattaaatatacattataatattataaaattaataaaaaatattctgttaacagttaaagttaatgtaaaaaactgaaaaatactgttaaaccaatagttttgttatatagccgcattttatatttatgtacttataactcaatatgtatttaaaatatatctcatatgtatatcaacttttattatgcattaaactttaaaatttgattattttttttttaatttgttcataaaagtctttaaattttgcttaataataataataaaaaaatcactactaaaattctggtatatagtttcgaaatcataatttttttatcaataattctgcacaatattaaatatatatattgtaggaattttacttggtgaaattccaagtttacctacaccactcaagaaaacttgtcaaaacgacagggacaaatctgtcccagaaaaattcaatttaaaattcaatcaacgaccaaagaaccctggtcgtttagcctacacgacaatggaaacttgtcgttcttcactcacacgacaaatcgtttaaaccaaacgatttgtcgttctggattgaacaaaagtaagttcaattcagagtctaaccctagctcatttgtcaccttcgacattcgtagaatttctctaaatctctctctc

SEQ ID NO: 183000 - DNA, 853 bp, Cannabis indica
tcatgtaatttctataaaaaagataaaaaattatcaaaatgtgaaaaatatatttttgcataaacaaaatcgaaatgttagtaatataatttcagatttgtattgaagcaatgacctttccaaattctaatagtaaaaaagcaaacaaaaatgagtaaatatgatcttacgtggaatgctttgaaaggattaaagcttgttcaccgtacactttgaaaaaattaaactttcttcactaaactttggtgaaaataatgctacatataaaaatgatattacaaaattaaataggaaataaaaaatcaaatctaaaaaaaatctaaataacattaaataggaaggtataaaaaattaattttaaaattcgaattatttagtcgaataattttatttacaaaataatattagtggtattagagaaataagagtacaattatattagaaaagtttttaaaaaataaatatagtaatatgaaattataaatggtacaaattgtgattatatattaagtaagttcacgtgtcaaaatttatagataaaaatttctaaaaaaaattagtcacccagttttagagtaatctaggttatatactaaagagtttgacaaagtatagtaatcaatgatttataccacttaatatactaaaaagtattaaatttttcctaatttaaggtaatctaagttacatatgtcacaatttttaaaataaataaataaataaaatggtacaataaatcacgcggcacactctgattgtgtcacaactttttacaataaataaataaataaaatagtacataacataacaagctcacattaaaaattcaatatattctatttcgtttcaacca

SEQ ID NO: 183001 - DNA, 664 bp, Cannabis indica
gttacaatctgctaaatccagttcaggtgaaagtgcattggagtaaacaaatatggggagacttaacacaccgaaacataattttgtatcttggctagctattcaacaaaggctcaaaacaagagatagatcgttcaagatgggaattaatgttgatcaacaatgtctgctatgtaaaatgcagactgaaacttcagctcacttattctttgactcctcaatatttcggttgtgtctgcaacaaatcaaagattggctgtaatggaaaccgtaaaatcacagccttactggttcgattcgatggctcgagagagctaaaatcagtaagtttaggaagcttgtaatagctgctgctgttactagcttagtttatcatatatggaagatgagaaatgtgtcttactgggataaggaaactcaagatggcatgagaatgtgcaaggatttgaaggctggggtcctccaaagagtggaattattttggcctaaaaaagtttctagtgatgacaaagagtggttctactcattgtaaaacccgattattcttcttgtacaagttgtatagatacataatttaggcctgattttttcgggtgctattaggatctaaaaagttttgtgagctaatataattttcttgattcattaaaaaaaaatcgataac

SEQ ID NO: 183002 - DNA, 697 bp, Cannabis indica
tagacttgtgaagtttggattacaagaggaggaatgttgtatgtaatgtaacacacaaatgagagcacacaacatctatttttcaatgtccttttgctgtccaatgccttagagaagccaaatgttggctgaattggagagcttcagcatcaaatctgcctatgattataaggtggattggaagagtgaaggtgagtagattcaagaaaatgtgctgcctgctgtcattgcagggttagtatactgtatatgggaggctcggaataagtatatttggcagggagagctgccgagttgcagcaggctaatggagaacttgaaatggagagttaaaagccgaattatcatggttttgcccaaaaaattgaaatgtaaagatagagaatggttttatgatttgtaatagtgtaaatacaaagtatgtatagatgtattaattgaggcttctaattgtgaagtgctcctaggatgtaaatggttttgtgcaatataattctctaattcatcaaaaaaataaaaaattgtagtacatttaaaagaataaataaaaaagatgaaaatgccaatttttataaataaaataaaaaaattaagcaaaaatttactataacaacataaaataaatttaaaagcaactaaataaatacttaaaataatatgacaaaaaattatgacagaagatattagagagatataa

SEQ ID NO: 183003 - DNA, 850 bp, Cannabis indica
atgactctttttttcttcgttcatttttttttttgttaaaattttcttcattggttttgttcttatatattttggtaaactcaagtattttttaaaaaataaaaacagataaatgattgttaattattatgaaattaaaaattttaggtttagaaaaaatcttatacattttatatgtattacagcttgaagcttaaaattattttttttttgttctcagtaatgcaatttagaattctagtttgaagaaattttaataaaaagataaataatatcagttcaaatattaatgaaatttgttttatttttattttattatatataaataatattttattattttattaaatataaataaaaagtcacccatgaatttctcataattagcatcaaatatcagttcaaatattaatgagatttgttttatttttattttattatatataaataatattttattattttagtaaatataaataaaaagttacccatgaatttctcataaaccaagaaattcagttatataggcacactttatatagaatagatatatatataattaataatgttatttcgcaaaaacagctatgatcatttatatgtttataaaacatcaatgcaatgctatattttcaaatgatactgagaattattataaaagagatctggggggaattctatatgtttatatatatatatataggtacctggaaaaagacgggttccacaatcacaatttgtattctctagtaccacaagtcttggaatgagctttccagtcagattgaactgcatattttttagacaacttctcacacttccacttcttctcctaccgtgtttttcgact

SEQ ID NO: 183004 - DNA, 914 bp, Cannabis indica
aaatcttaactaaacctaaagatatactatttatgaactaaaatattcttttattagaagcactattttgagagttttgaactataatttaactttgtaagtattatacattggaattgcacttaacaagtataaattaaaacaattttaaaattttgaagagcacttgtgaattgtttgtattttctattttttttttttcttttctctacagctaaagagatttttaattttttatatattgtctggtccttatattgatataagataatatgcatgataattagaataatcgaatgcagcacattacctacaaaagttacggtgtcaatttagccaactatgtcatattaagtttcattgcctaccaatataaggtgttataatgtttatatatattagtttaagttgataaatcaatgtttagagattgacccatttacattttgacatatgaatatggtatcttaatcacgtttggtgaaacactagtcaattattgcatattttcattgaccaaggttatcttatggaaaataacctgcctcataagaaattttctccgtacgacttttgaatttgctgtgatttcgtgtgattgctggccatgtacggtgggccgttggcctcgagtagtggcatgttgtccactgacaccgtacgtggtgtcgtagggtattgcatcccttttttcctggttaggaaaaacaaatcctgtatccctgtgagtgctgctcatagacttccttactctctgtgttttcccctgaaaccaaacccttcgtctctagccttcgaagcccaagccgttacctccctgctttgagtaacaaccttttgctgtggattctgactatggcttcatcggatactaccctggtgaatgagatgattgaagaaactgagaactgctg

SEQ ID NO: 183005 - DNA, 855 bp, Cannabis indica
taccccctaaggggttagtctaggggtacaccccttattatataaagggtttatctaagagtacatcccttactccctaatggggtattctaggggtatatctctacccctacaccctcacggtccaagtaataacacattccacctacataagacatgattgatatagtgcatcttcataacgttaagactacacacaacatcgaagatcaagtggaaggagcctcgggggtaccaccccgaggtgacgactatcacccccttcggagtgggtctcgggggtggcaccccaaagtaggggctataaccccagagaaagttaaacggtcataacttactctgagggaccttcatcgccagtaactagttcaaatatttaaattccataaaaagttcaatagtagttgtgaacccacaaaaatagcagaatattatcacaagagtcggattacaaccacattcgaaaactaaggagacagttgagatatctccgcaatagccgcgtctcttgaagcaagaagcactaacctttctcttatataaatggtcacccattacctgggaatggatccgaaaatttgagtacttagagaaaaaaagactatgttattgttatcttttgcattagagagcatgttattaaattttgtaatactgattaataaaatataaatggaagtagactattactgatatcttcggtcgaacctctttaaaattctgatattattattttatatttatttgattattttttttaattttaaaatctttatttattacaaatttcaatctgtctcatttaactaaaaatctaatcaatgcatattaaaaaaaaaataaaatttagtaggt

SEQ ID NO: 183006 - DNA, 508 bp, Cannabis indica
ttaaatcttatttattacaaattcaatctgtctcatttaactaaaaatctaatcaatgcatattaaaaaaaataaaatttgtaggtaattttagaactacaatatacctttagaagttgtattaaaatagtcttttcttcttttaattttagagaaaggggaattcgaatttggaagtttttccttatgaagaaaaatataaaaccactaaattgtaattagcgtcgaaaaggatttgtagtaaagtgtattataaatttttttagtcattttaatgaaaaaagaagggaaaaagttgtaatgagttattattatcaatagaattaatgaggcacctgttttgatttttagaaaaaataaaaataaagaggcttctgtttctgacaaacaagttagtagtacaacagttaggttttttttttttttaggaaagaataaattttaaaaaaaaaataggcatcaactgcgtgggcaacatcttcttcaccacttttttattattattatt

SEQ ID NO: 183007 - DNA, 723 bp, Cannabis indica
gtcatataattcattctagtgtggatagacggcccggcgcttgctgcatgatctccaaagaacatggaaacttcatacatgttatcaaatggagtacccagattattatggatgggagatgttagcgagacaggatgtttagcatccaaatattgacgaaaccatcagtctttagcatctccatattcctattaaattgatcgcaaaggacatgcatgtttctgtcatgctcgatgaggacatgcctcatctcagtaccttttctataaataatagtcgatgcttgcagtagttcgtttcagagaaacggtgttctcgaagactgttgggttttatgccctaaataaaactcatttcaatataatcagatttacttattaatatagatcagaaataacatttaatgtcgcatggttcacatgatttatttcatgattatatgtacataatgtatgaattcatctgaaacccttttcacatacttgatcctgtttattgtgttttcaacacattggaaagtaaacatgactatgtgaataaagtttcctagatttatcagacacagggttttactgatatgataatctacaacagagtttacttgcatttggagaaatgctatgttcttctcagcatgaaagtaaagctcaggttggatgcatggagtatgcatcggagggaccgatattgaactttgtacttagtatttattaaacataccgt

SEQ ID NO: 183008 - DNA, 640 bp, Cannabis indica
gatagttggtgcgatcaagtttgatcgtgagagtagatgtgagggaatgcgagaacggattccaggaagtcgattgaggagcagctgtagcagtagcaccaggatcagaggtagaagacgacattgagaaatgtcagaacatcgattgataccatctaagagtgtagagacactcgactggtgcagagcaccaagaaccaaagaaaacagagtgaaattgaattgagagtaaaaatgcagtagttacttgcatcctctcatgaacaaagcctttatttataggtgctagaaagttgttacagtataactgaaataacagaaaaagacagctaaccaacataacagaaatactactgtacactaactacaatgactgttaacagaaataatcagttagcttatactcttttcctcatttttttatttttttctaaaaatttttttataaaatattttttttttttgagtaaaaagtcatatttttgttaacttgtaccttaaaaaaattataaaatgaaaacttccacggaaaaaatttggattttatattacataactatttttttttactataagagtttatatgtgcatttgtaaatattttggacttcggaattttggtggtactcgtaaaccctta

SEQ ID NO: 183009 - DNA, 611 bp, Cannabis indica
acattgtagccaggctaataataataaattaccattcattgattgattattggagtacgtttttctttagccttttgttcataatatacaattttaatagtttctttctttctatctgttgttcttgttttaaaaaagatatgattattgattggaaaataaatctataggtggaagaagatgctggaatagattttattaaaaaatattatcgtaaactgaattatatgccttacattagaattagatagaaaaagagtctatgggttgaagctactggtagtcccacgtcaattcaaacataaagacattgtgcatatatgtggactgttttcaattacttgtggttaatttgtttcatttactgatcacagggcatcctcctgttgctgatgttagatcattgactcattatagggagccttaggagttcgagattagaaggcacgagaaagagggagatcattttggcctggaagctgaaataaatttcacttaggtttctttaaacatttcacttttggttgtaatatagatatttattatttatttttcaaatacaatttatttttgaatttgtagtatatttttcttgaattgtatctcaatgc

SEQ ID NO: 183010 - DNA, 630 bp, Cannabis indica
catgctggtgatagcttcagctgttttcgtgtcttcttgattgcaggttcgacctactcctggccatacattaggttgtgtgacctatgttacaggagatggacccaatcaaccccaaccaagaatggctttcactggagatgccttattgatacgtggatgcggaagaactgatttcaggtgcaatgtctctccagaaatatctgtagagatttcttaaagatttcactttgattggtgatcaaatgccagcttcatttcacttctttgttctgcttacagggtgggaggttcacaagaactctacaagtctgtgcattcacaggcaaggatttgggtttaggaattagtttatatttgtacactcaggttctttatgcatgtattggcctaacacttactctcatttggctatggatccagattttcttcattgcccaaggatacattgatttatccggctcatgactacaaaggattcactgtaaggaatcaaatcatctccctttgcttgcttctgtataacagctgcttatttgacatggttgaatttaggttagcactgtaggggaggagatgctctataatcctcggctcactaaagatcaggtgattctttattaattactc

SEQ ID NO: 183011 - DNA, 683 bp, Cannabis indica
  modified_base (611)..(611): a, c, t, g, unknown or other
gataatttattttcacacataagcaaagtgagactgctaactttaatacaccatccttacgtttgcttagaaagtgtgggtataaacgaacgacctttaagagaccacaagactgaacgtgacatttgaaagaatcccacaaggtcaactatcgaaaaatttatgagtgtacacgtcgagaaatttgtgaattttgaaacaggttaaagaccccaacacaaggtcccaaatggaggttaaaggagagatagcggaagtttggctcgtctttttagaccgacgacactttgggctcacaatggatcacaaatggctctttttatggttcactttttttagatcggtggcagtttggactcaacgaatcaaaagtgtctttgataccattttaaaatttgggataagatgaatggaattctatctcaaaactaattgacaatgggaggaatagctcattcatcttatatatgataatttatttccagacataaacaatgtgagctaaactctaatatgagtgtcgtattttggtagttgggctctccccttttgaattttgttgttaaattttttttatccccttttggctttctttttatttagagtttatntttttttttaaaaaaaaaaatgtttagcagaaaaacaagtttattaaaagaacaccttgacataataataat

SEQ ID NO: 183012 - DNA, 713 bp, Cannabis indica
ctactacctctaaacttattcttgaattctctcttgtcaggtcttcctcttccaatgtacagactatcaccattcgaatctcccctgtcatcagttttcttttgaatttcctttgagttgagtgcagcctttacctctgacattgtcaatgtatcttttccataaagaatagtgtctacaaaatgctcataggttttaggtagagaactcagcaaaataattgcttgatcctcttcctcgatcttaacacctatgttgttcaaatcaagaactattctattgaattcatcaaggtgacatcttaattctttgctttcatccattctcattgcatagagctttttctttaggtacaatttgttggctagggatttcttcaagtagatggaagcaagtttaatccacagaccagaggcagtagtttcatctgatacttctctcaggacttcatctccaagacttagtaaaatggcactgtgagcttttgattctgtgtctcttttgatctttacatctgttagttcttcaagttgagtaggttcgatagcttctgaaattccctgatgaacaagcaaagctttcatcttgattctccataagctgaagtcgtttgtccctgtgaacttgtcaacttcgaatcttgctgatgacattttcaggttgtgttctttgagtcttgaaccgattcttgaatgtcaattctttccttcacc

SEQ ID NO: 183013 - DNA, 548 bp, Cannabis indica
actgtttcctaaccgatctcttttactatattgtaacagtcttgattagatatgttcagtatagctgaattcatcaatgaaatagtcgagctttgtttttcactaaaattcaaatctacactatctgattaataaaataaggtatataaaggtgtacattacaactatatccctttctcaattttttttttttttttgaaatataattaattttgcctaaaataaaattaaattcaaacaatcagcatatctattttagcacttatagaaattattactcaaatttccttatatgaatgtgctataacagacattctacttcgctttgaaaaaattagaatagtttaaatttaaagtatcgaaaattaatattattccaacattcatatacacatctttgtgtgttagttatatgcatgcaattaattatttacattattgaactttattttaggtatcatatatatacaaaaaatattacatagaccgatggagtacctctatataacttatatattatatctagattgtactttataaaaaaaaat

SEQ ID NO: 183014 - DNA, 1178 bp, Cannabis indica
ccttgcggtacagacattaccatgttctggcagaggggacaacatctgacgggatgggcccaggcatcagaggatagccacgtcactgtaagaagacttccgaatgcacctttaaggcttccccgtccagatgcgcctccttaactctcaagagggcgtagttcacttcatctcctggaaggaaaaaaaggagttcgggagcacgaggatcttatctctaggggtgagactcaagaagtatcgagagctagagcccacctccgttttggactcgacctttgcatgccgaaaggctcgagctactgatgacgcagatcaattacatcaatatgccactcttcgtccattaaaaaacgtggataataataataataataataataataataataataataataataataataaatgaatgaatgaatgaatgaatcttcaatcccattgcaaaaatattacaaactgcatattttggtatgatacaaacaatttatgcagtttgatcaatacccaaaatcaaaatccataattgttgtgtgggatttaggggtgttacataaaaatgctgatccaattctatctgcacaatccgatccaattcaatctaatctacaaatgcgtatatccacacttgtatggagttggatgttgattgacatagtaaagtaatcgattcagtccaatccacacatatttatatatatatatataaaaaagaaaaaagtacatatacaattaacattttaatgtaaagaaaatagtaatttaaacatctaatacatataatacaattatatttcaaaatataatagatcaaacatatattttatttttatatataatttttttctacatacaatttaaaacaaaattaaatatttctttatacaattttttttcttcctttaaatttgttattttatttattttaatttattattaaagacataaaataataataatttattttattttattgctagttatgtgaaagaaaaatatttttttcataaatattaaataatttaatattaaaaagtaaccaattcaaaataaccgatccaattcgtaattttgcagattgaatttaattgaatttaagctatcgtgcggattgaattagatccaaaaaataaaatcctcacttagtgcgaatcgaatgcactataaacaaaata

SEQ ID NO: 183015 - DNA, 1083 bp, Cannabis indica
aaacataaaacactgaaactttcacaaattaaaagacaaaataattacaatgacacacaattacataaaaaaaaacatgtttaaagtgatatcaaataactctttactcaaaagttatcagtcatgtatttcgcttagataggctatcatttttcccccgagcctcgtactctccaaacacatgatttactaccaactacgagtcactacagatctcaatgtgttcagcatatagttcccaagcaagttttagactggcaatgagggcttcgtactctgcttcattattggaggctctgaacccaaatttgaccgcatcatgcaggtgttgcccctcgagtgtgacaagggcaatccatatgccagacagtggatctgtagccgacccatctacgtgtaatttctaagtaggtttgtcttcattgttgatcgactgaggttcttgtactgacctcgggttgccttctgaaatgctttcttctttgcccttacactaaactacaaaatccgctaaaacctgtcctttgattgttgttcggggttgaaagattatttcatacttacccaattccactgcccatttgagtaaccatctagaagcgtcgagtttttgtaatatttggcgtaatggttagtcagtgtatacccgaacaggatgagcttgaaagtaaggcctcagcttccttgttgctaagattaggcagtaagtaaccttttcaatcagcggatatcatccttcattgttatctcttaaaaaggtcttctcatattcctttgtccatttcaaattttcttatttcctcgcatatgttgaagaaaggatcacacttgtctgttggccttaaagcaaatctactgagtgcagttatccgaccagttaagctttggatttctttggtttttgtaggcgatttcatatccaggagggcttgaattttctctagattggcctcaatacctcaggcattgacaataaaaccaagaaacttacccgacctgactccaaatgagcactttaagggattgagtttcatgttgtatttttttaggacttttaaagcattcatctaggtcatctatatg

SEQ ID NO: 183016 - DNA, 1259 bp, Cannabis indica
caatccatcattccaccagctatgcgcgcacacaaccttaaaggaattcttctaagaactactcctcaacctccaagatttcttctagacgttgtcatgatcaattgggagttcaagtactggccacacgatgtctttctcatgagttgtctcatgaattctcttattcaaagtcgatgatgggacatgttgtctaatgcaattctacttctgaaatttggagtgtcttcgccaacctatttgctacacaatcaagagctagactgctacaacttcgtcttcatatctaaagcttgaagaaaggatctatgttcgtgaatgaatacatcctaaagatgaagaatcttagagctgtcaactactggccacactctaatagatcaagatcttgtaatgtacattcttgaaggccttgacacgaaatatgaatctataattgtgttcttgacctcttgtgttgattctctcaccctccatgaggttttatttatgctacaaaattaagaaatgcgccttaaacagaacacgacttctaatcttgacatagttcaggaaaatttcattcaactcaacatgaggaatgactctaattcaagcagaagtcaagatcatagaaatgccagaaatcgtggaaactacaacatgaatggtgatcgtggttactcgaatggtagaggttgaggcaacaggcctatatgtcaaatttgtgaaaaattgggacatcttgatttcaagtgttactctagatttggtagcataattcaaggtctagatccctcaacaaatggatcactttcagcaaatcaaacaataataatccgcaagccttccttattggatatcaacttctgttgatagtggtgcaactcaccatattacaccagatacaaatcagtcacccaagcaaatgactatataacgtccccgcttcaagcctctattgggcccttacacccacgaaatgaatggctcttatacacgagaacgtcactctggctgcttcatggactgatgactgagcctacataccaacacaagtgtttccagcatgctttgtcctcactcgcacgcttcctgggaaaactttccaggaggtcacccatcctgaaattgtctcaggtcaagcacgcttcactgtggagttctttcgagatgggttatcgaaaaacaagatgcaccttgttgatacgtagtaccaatcaatcaatttaagctctcttcaactgtgtagtcccatacctacacagtctcagaatcat

SEQ ID NO: 183017 - DNA, 479 bp, Cannabis indica
tatctatataaataattaaataaaaatgagtatgtatttttagttacccctttaaaattttcttttgatggcaaatatttgacataaatctaccaaacaagagtgtaatatataagtacaaaaatatagtaggaataccacttttagaaaggatatttataattttgatatttcaagaaattataatttaatatataaagatatttttatggcaaaactcttttaatatttgtaattgttatacattaaccttaatagaaaaacgctaaaagtactttaatcttacattttgttgcagtcgtactcttttttagttgttaagtgtcaataaggccactaatagtcatcttaaaaacaagtgacgacatatttctttaacttatttaatacatagtccaaaatatgtcgccacgtatttcagagttgacacttaatagccaaaaaaaatacatctgcaataaaattgtaagatacagtac

SEQ ID NO: 183018 - DNA, 503 bp, Cannabis indica
atgactcaattgcatgtgtacattaatagtactcagtctacttataggggctacttttgtttatatagtgtgtggccaggtacatttggattagctatagccaaacatggtcatataggcctagctaatagaaatcacaaaaattgatttgatgcgatccacgtatattgctttccatgcaggtgtacatatataaatttatatttgatcagactcgaagccacaatcactaacaaagtaactctctcaaactaattattttactctattgaaactgcattttatttatttaattatctcttaacttttttatttttcattaattattaatattatattttaatacattttattctattaaataaaataaatataatatatatataaataagttacaattaaataaaatattttaacttaataaatagtcgttgatctctatatttaactaaacacaatattcataaaggtaaaaaatatacaaaatatatatatatatgtat

SEQ ID NO: 183019 - DNA, 631 bp, Cannabis indica
atcactctacgtgccatgtttatttttagtaattttaagtattgatttatatttatatacattaatgttataattttgatattgtattttattaaaaaaaaatcttattaaattataataattcatactaaaatagataataaacatttatcttttaataaaaaaatatttaacttgtttatttttataaaattgtttaattaattttacgaaattgtttattttgaggtttaataaacatattaaaaatatatggtttcatgtaataagttttcaaaatgtataaattttttaaaactaattttttttttagcacatttttttgtaattattttgtttttgttgtacattttatgaaaaaagcccaaatatttttagttggtatgaaatggcttttcaagtcattttatttaggaaaagtaattccttagtttacatgaattacaattcccatggaatgagttttccaatgacaataaacaaaccgaacactttaatgatctttctttaggaatagcaattccatttttacactcattcatgtaaacccaaacactacctaaagtttgaaaacctatttctattctaactataatactaaaagttatactaaaataatattttttattat

SEQ ID NO: 183020 - DNA, 644 bp, Cannabis indica
caaaaaacacagttacaaaaactatacatacataggcacgacacacaaaagaatctccagttcaatgtataaactatcagtactatcgaataggattgtgacagtatctccataacaaagatatagcatctttacatgtcagtttggaattcaaaaacctttttctcaaactttaggttgtcactcaaaactctgacaccattttcttattaaaaaaattaaccaaatggagcgagatagagagacctgtagacatattcaacataccaaaggctcaatagtacacaataatcgggtgactcattgaaaataatgaaaaccttattttagaaaaacatcaagcatggaaaaacatacctatcatcatcatcttcccataggtatgtatcctcctgttatacaccacaagaaaacagaatatcagggcaaaaactgggaaagcaataataattattctacaagatattatatccgcgagttcctaatcgaaataagtagaccagaaaatgctgcttgataccgagaatctgagagaggagaaaggagaatgggtcctaggctatggaggtgcactcagaaatttaaagtcgactaaataatactcaataccagtatacctatatattacgctcgaataaagaagg

SEQ ID NO: 183021 - DNA, 618 bp, Cannabis indica
tggtgaattttagtctcaaagagagccccaaaacccacattatttatcttacaaagatcaagaacctcacgctgtttatctacattgttcagccccctaacattccaaccaagaatattgagactatccattaggatggattgaaagatcagtaaccaaacctccatcaacctctcctagaacatcataaccattgctacaatctgctctcaacattggttgaatactagatttcgaacccctctttcttggagtaacccaagtttcattactgctggggttagatatcatttctgctaccttattttcctcactaccatcaagattcccctctgataaccccttatcatcacccagaattgtagtaggattctctggtggttgctgctccttttctgcattattttcgactggtttggccttggctccttgctggtttttcctccaaatgacaggctttcctttgttacaattcacaaccgtatgcccaagtaagtcacaagccgcgcatttggtaggaagccattcatactcaatcggttgttctacaagctgctccttttcattaacaaacgaaattgcttttggtggttcatcttttatctcaacatctactaa

SEQ ID NO: 183022 - DNA, 967 bp, Cannabis indica
aataatattttatttcataaagatttaactaagttttgaattgatgccatgcgacaacgtgtgataattaatgttaaaagtacttaaaaatgtcaaaaattgtaacgaaaattattttagccaaaaaaatagtaattttttcttgaagtgtaataaactaaaaattttaattttttttgtcactaatattactatatttttagtcttttcaaaaaaaaattattatatttttaataactgaattatatttattttgttgattttatttatatatgttctaactagaggtaaagtagctaacacaagccttctaaattaaattaaagtcgatataatttttttacaagagagtgaaacaaacaaaccaatcaatattattgaaaaacttttaatatttaatgagagataatatataaatttattactaattaattaataaccaattctattaatagttaattttattattattataggggataaaaaaataaccataattaaggacatcctacaaaagtacaagtaagttaattaagttaatcaatagatatagtgttttttactagctaattttgagcattttcatatatacataacatgatagatgtttttcataataaaccatacaatgtcttgtggcagttaaatttctctgtggcagttaaatttcttctgtggcagtttaatttcttcttcaattttttcttcttccttcaaagaaaattttatataatttttgagatgatgttatctttttaatcgattttgggtatgttgcttgttggaagcggcaacattaataattgattaatgagatctacataaccaccatgcgatttcaagacaccgactctcagatatgtattctcttatttttactgtttttggccataaacgtttctacaattccttattattcttttttgtttttctcatttgatttatcatagaattttgatcttatcta

SEQ ID NO: 183023 - DNA, 763 bp, Cannabis indica
gttgttacaaagcctcgcagttaatgcatttaaaagtgtctctgcatatatcaaaagggggcaaggaccccaaaaagaaaaaaaaaaaagaagaaaagaaagaatagagaagaaaagaatgttgaaaaccctattgaaaaagcattcacggttgatttttatctctaatttttgttctcattaattgcttgttaaaatttattgaagtgtacttcttatacagccaaaaaataataaaaagagataaaaacgctaaaaaacctattttgcttaggattaggaagggcgggccgcgacccatgatttccatgcctaggcgcgtcccttttatttgggcagtgagttttctactgcgtcgactgatcgtattttcgctataattctctcgatattgctcggaattggacgattcaagatgttccggaaagatgaaagagagatctagagcttttatgctttgtcttttttcaaaatctaattagaacatagtcgagtttaggcttgaagtttcaactttatttttttgctacaattttctgtattttatagattatctttttttccatcttattccattgatattttctaatttttttatattttaaatatgtaaaaataaaggataaaaaacgtaaaattactgcaaacaagagtagaattaaattaaaaacacactaaaaataatttaaaagtaataccaatgaaaacaacctaatagattcattaaaaattcaatgctaaattagataataaattattgcag

SEQ ID NO: 183024 - DNA, 720 bp, Cannabis indica
aggactaggatcgggattggagactcagacctggtcctaggacccagacctagattcgggacccaaactcaaaaatagaactagaattgtgatccaggaatgggactgggatccaagacacgaccccggtctcggtcccaaacacagacccggacaaggatacagactggaacttaagatttgaatcgtaacgagactgggaccaaagattgggatccgaatcttgacccaagactaggggcttggatttaacccgtagtcggtgtctagatcttggaatcgtaccaagacctgaacctagaaccatttcctgaccaggacctaatcccagactcggaccctagacacgaaatcggtacaagaacttgaatcaagaccctggaacatgaattggacctggacccaataccagatctagacacaaaaccgaacacggaccttgacccagactaggatcgatactctgacccagacccaaacctaaactcgaatttgcgccaggacctacgacccaagaccttaaacccaggatctctgacccgggacctagactagaacccagacccgtacccaaacccggacccaaacccagacccgaacccagacacggactgaaactcggaccctgaccaagacctagaccaagacctagacccagaccaagaccaagaccaagacccacactcgtaccagaactaggaccgagacctgaaccttgat

SEQ ID NO: 183025 - DNA, 689 bp, Cannabis indica
  modified_base (29)..(29): a, c, t, g, unknown or other
agtgctgcacgtgcagcccatgagaggcngcaacacccccatactcgcgcaggagcaggaggatgcaaggtgtctgaccgagaaaactcggtcacctacagggtgacatgcgcgcgaacttttatctgaaggagggacacgccgagcattcagacaaaatatgtctgagattcgcgcgcgcaacctcgtcttgtccgagggtctgtgcgtgcggtgctcccaatctcgacaccattgaaccccgtttttcaaaaattcataactttttcaatttttatgagaatcgagttccgtaaaaaccaaaattgtgtaattttcaacaaagaatccaaataaaatattttcagaatgaaaataaaattattttcatggaaaaatttcgtaaaacacatacattcattatataacacataaaccaacatgaacacatccaaatcaaaacacaaataatattcatcgtttttaatccaaattttacgaaagtaaatcattaccatggctctgaggccagttgttgggaatattttaccaggatctagatttactaacaagtatgttgattaacatcctaaatctgaattctctaaaacaatgaaataaacacataagggtttaagaaaaccatacattgtgtgcagcggaataatatctccttccattaaagatctctagccattgattcctttctg

SEQ ID NO: 183026 - DNA, 962 bp, Cannabis indica
atataactaactaaactaatattcatttatctttattatgttttacaaaggttaactttgaactatatatttaaataaaataaaaccatatgttcaattgatgagaaaaattactaacatatactaaaattacataaaatatcagtaaattattactgttgttgcaatttcaaatattattatcgaaaaatttaactatctgttgatcttaaaattcataatcaatgtgtaacaaaatttagtaacaattcttattaattattctaagacattattacaaaatcaataatttataggccaaattgacaatttatacttaataaattcattggtgactaactttgatactttagattataatttattttgctcctagtataaattttagaatagtaactaattgtgatacttttttaatataatttatatactttggtaaaactcagcttactcaactatttcttttgttaataattaaccactaattattgtttctataactttcatcatagtattagtgctgccataagaattataataaccacagtgtgaccaactatgagttttgttggctataacaacaatttttacctgtcacattaaaagtagtgtttccattataaatttgatcctctatttctttttattcacattaaattgcctcacttagttttttcatcaatgactattttacactatctattacattacattattttttttgtcaaaattgtattacaacttccaattataatgtacatttttatttgcacaatgtaatatacattctaacacattaaaataatataatttggttaccttatttatattatttattaattttagtttatacaataaatatactttattattacttttttttttcttccttcaattacaatttttccttttttattttatttttttttatttgtttatttgtctatctttctatcttttta

SEQ ID NO: 183027 - DNA, 550 bp, Cannabis indica
gatatcatttcttaaatatatgaaagagcttaatatgaatctatttatatatgtagtaaaatattattttgtagctacattaatattttcttataaactacctaagtaaattatattataaaatttatttttaacttatactcagcggtgaattcatgaaattttaccaatgtaaattttaccaacattgatgtaaaatttaaataattaataaatatatatacaattaaaaaattattaaaattataatactatatatttgtaaatcaataataaaatatatactataaatgctaaatatgaaaatgtaaagggactagaattttttttatgtattgtccaccagtgtttatgctcttttattccttattaataatatatatataaataaatataattattttatcaaattattaaaattaaaaaatgtaaaattatttgaatttgatacaaaaaataaattaacgtaagtaaagtaaataaaaaataattaaaatatcaaatatttaaaagtgttgacttaatgttccttataaaataaaagtttggg

SEQ ID NO: 183028 - DNA, 685 bp, Cannabis indica
ttattaaaaaaaaagtttgaggataaatttgccaaaacatatataatttagagactaatttaataaaaaaaaaaaaaaaaaaaaaaaaaaactaattaagtaatacttatataatatagagatttgcaacaaataagagttatatatatatatatattaattagtaatgaacaaactttagaaaacgacacttgcttctatctccaatgtgaaacgtacatggcgaaaagttaaaaaaaaatatgaattcatttatataaggctaattaggatttttgctccctgaactttgacatgtatcaaattatgccccttgaacttttaaggtcgttgaaaatgccccatgaactattgagattgttggatttgaagatttttttccaattttagtaaaaaagtttaacatggatgaaagtctagggatcatgatttagtacatgtaaaagttcgaggttcgaggggcatgatttggtagatatcaaagtctgagagcatgatttagtatataaacaaatcactgaagtagtaaaattgaaatgaaattagacaaaagtttttaaataccaaaaatctcaataattaaggggcatttttaacgaccttaaaagttcaggggcatgatttggtacatgtctaagtttaggagtacaaaaaccttaaataattagtccaaaagcaaaggtag

SEQ ID NO: 183029 - DNA, 644 bp, Cannabis indica
gaaataatcaatatatagaaacaatagaaaaaaaatatacttattttagtatagtataaattgtctatgtctatttttatgtttacaattataataaacatactaataatataaaatactttgtatatatatgtttattttgttttctatttattaaacatactaatttaataaacaaaataataatattcagatatgtttattatatcactctatgtgtcatgtttatttttagtaattttaagtattgatttatatttatatacattaatgtttataattttgatattgtattttattaaaaaaaatcttattaaattataataattcatactaaaatagataataaacatttatcttttaataaaaaaattaacttgtttatttttataaaactgtttaattaattttacgaaattgtttattttgagttttaataaacatagtttattatttaatgattaaaatgtatggtttcatgtaataagttttcaaaatatataagtttttaaaataattttttttttgtcacattttttgttaattatgttgtttttgttgtacatttatgaaaaaagacccataaaacttttactcgagaaaatgaaaccgccaaaatacttattagtaaaagagaaaagacc

SEQ ID NO: 183030 - DNA, 620 bp, Cannabis indica
acttaaaatatcctgacatgagagagtcacatggagagtatattaaggtgataagagtaaaatcggtaaagtgtttaaagaaaaaaagtaaaaataataggttttaagaaaaagggtaaaaataaaaaactacaatataaaaaaagtatagagtctaatttcttcccgtgcaaaagggcttatgcccaaggcccatatccaaatctaaaaaactctttgataaaaaaggctccaaatttagtttttaaaaatgttttattttgtatttttattattatttattgaaaaatataattattttttttaaaaaaaatacctaatttattttttaagacttcatattttataaggaaaaagcctaattatattttcaaactattatattttagatttttatgctatatatgaaaaaaaaaaaaaaaaaaacaaaaaaaaataatactttacatatataaaaaatttaattagtaagtttttactcaagagcatccattagcttgagatgggcctggacctagttctatcaaaccatataggctgaagaaagggagcctgcagagaattggcccattgcttccatttcttagttattgctttgtttatcaattgtttcatttaga

SEQ ID NO: 183031 - DNA, 549 bp, Cannabis indica
cattactgtaactctattattaactctagaatattcctactaagtgtaaagaccgcttaactttaatatagaaattagcatataaatatgatttaattatgaaacttgcatattagttatgaattatcagtttacggagatttatttgaattcagaatgcattttatatgtcatatatgaaaatttatattttttgcatgttttgtgcccggtaacattggaacgcgacgtttgactattagaatcacatcttagtatttttttagtatagcgaggcaatatagttagacattgagaatgtcgggattaattgagattttagaattgaccaaattacccttaagtaattttatgactttttagtttaatggggggggcaaaaatagtactttttacccttagatgctttttgcgttttagtggtttattatgtaagttaaaatctgattattaggttaatataaattagaaaaaatctttctttattttattttattccaaaaaaatgaaaaaagtcatgaaatggaactctctctctctctctctctc

SEQ ID NO: 183032 - DNA, 761 bp, Cannabis indica
acgggtcaggttcgagtacaaatttttgaactccaaacccgcaaacccgaaactcgatcaacctgctcgatgcttagccctactgcaatacaaataactattgtttgtgaataacatatgtgagataacaggagcaccattggccactctacaccctttaatctgctttgtactctcaaaattctttatcaaagacgagaagccttctgcattgatgagaaacaaataaaaggacaagggatccccttggtgaatccctcttttagggacaatggggcccatctctctaccactattaataatagtataccgtactaatgagacacatttcaacaccaaatgaatccaatgatcagcaaaacccatcttgtgaatcatgtcacgaaggaaatcccactcaactcgatgataagccttactaaaatctaggttcaaagccataaagccttatttaccctgccttttcctttttaagtaatgaatgacctcaaatgagatcatgatattgtccacgatcaaccttccaggacaaatgcgctctgattatcggatataagttgcggtagaaccatcttaagatgattggccagaacttttgacaaactttgtaaaggacattatatagtgatatcggtctaagatcattcatagaagtaggacttttggtttttaggaataagaaccaaattggtatcattaagactgtgtggcatatcaccattagccaaaaaattccttacaacgtgtaaacgatatccgat

SEQ ID NO: 183033 - DNA, 671 bp, Cannabis indica
ttctttctatttaattgacaagttaacttaagtattttataatctagttaaagcttacaaacctaatttatgtgaaaactccctatattcctatggtacgtttaatcacaaagaaagaatcaagtaaatcaactcataagatctacaaataatcttaatactttcatcctaattaaatcaatttacatatataataatcagggcatattcaaatctcacttttcagaattttaattcgaattcataaataacgattatagatgaccaaccaataattgtaaaattagaacagattgtatgaaattgaaataagaaaagaatatgaaattaaatgataacattaatctataaaataaattcaagtggttcacatagtaatttttaataaattagctattaaatcattctaaaacaataaaaattcaagtaaaaacataaaagatagagatagatgagaaaaaatattgtttagagtcctccaatagtatattctgctccaaattgtcctctgatgctcaaaattagtctctaatttcgaatggtctccaaacttagccaacaaccctcttaaatctaaaaaaaattcaagtttccgaaaatcaccaaagccgcgacaatgcttagaaagtcgtgacattcattataactcgcgtcatttttttaaatttttt

SEQ ID NO: 183034 - DNA, 1034 bp, Cannabis indica
attcaactttttgagatatgtctttcatggatctaaaaattgaagtcatggtattagttttatgcaaattaaactagatttccagttgaattttagtttcgcagtagtttttctacactttttttatgaattcgaaacagcccctattttgattgattttggtcgtcttctcaggtgaagtcgccagaattaatgatggttctctttctgattgaatttttgtttcggttgcattgggttgttgcgtagttgcacgatagttgcgcaatggttgcgtgatagttgcccaggaagtatggatcctgggttaaaggtgtgtaagtggtattgtgttaatttttttttttttattggcttgtatatttgtttatttggccagctggaagtatttttgtaatattgttatttttttttgtaaaactgaaaaaaaaaacccaaaataaatacatatgttaaaaaaaattaactaaataaaagacaattgataaattaaagaatattctacacaaaatagtgaatctaaaaataaagacattgataaattatagaacttattatgatgtgattttaaaatgttgtcctcaccgttttatagacacaactgtatttttatcaccgtatctcacttatagttatcattatatttagggactctttgaaatgagttaatattagcaagagaatggtaatgtgaaacattaccttcacattaccttgtttgttctaagggtttaaccttctaatgttattcctttagtaatataactactctggaagaggataatattgataactaaaaaaaaatggtggaattgaattattccattttattgtattaatttgaatactattttttgattaataaataaatttaaatatcattaatattttaattattataaaaaatattgcgatatatatttaatctgtgagataattttttttttatatttttaactgagttatttctatgttattagcataatatatagatgtattatacataaattttatgtgaatagtgtacataaatg

SEQ ID NO: 183035 - DNA, 653 bp, Cannabis indica
tactgccactctttattttccccaatggaaacccaagagacacggaaatggtaattattaattcttgttattatattggaatattattaatttagttgttcttgctattaatcttgtagttagtattgttgtagttaacagatcaagtctatatatatatccttcatttgtgactccatgatatcaagatcattaattcgatcattatttagttacgcaaattgattatatagtggttgttttctttacagatttatatatataaattaaatatgatttaattaagtacttacacagaatatgccatgcattatgtaattatttaaagaaaaaattaaaattctttttgctctctttatatatagtactcctaataatggttttaatttcattttgatctaggtgttgctgcagctctgattgaatatacctgatctggacagccaatgaataatctgatgataagttttgtagagatttttgattccaggaaatttgtataagctagttgatatatataattaagttcgtgattatagcagagaatttatacttagtctaattagtgataagtacaactttcttttttattattagtatgcttagttttccattttacctcatttttcttttatgaaatctattaatcatgt

SEQ ID NO: 183036 - DNA, 1014 bp, Cannabis indica
ttatatatatatatatatatatatgtatatatatattatcatggttcataatccatttgatcgataatgcgggcatacacatgcagggatttgcgtgttgaattttacacaaaatccataccaaccaacgggagaatgcttgaaaaaagaccaagagaggataatgcaatgggacagcatccgcacaaccctttgctgccgtaacacactcacggccttgtctcaagccttagccttgcgaacactcatgactcagccacccgacaccgccacaatcttcatctcccaacccctctggagaaactgcacagctggccctttcacccgccagccctcggtgtcggcagacttatgcggcttcagcggcttgttctacggcgacagcagtagtcactgctccaacttaactcttcaagaagtaaagcaagccaaggcgtatgaaggtgctgtcacagcttgcagcaacacctcttatagcgattttaatggtgtctgtcctaaatgtacggcggccttgacgagtctgagggttgaaataatggctagatttggaaaagtaaagaatgagaatgctgagacggctatctgtaccgtcgcagctgtggtgtctattgtggccgccactttggcaagtagtttgcggactgaggatatcttccagtgcttgcttttgttagacaagttgggtaagataatatatgttaaaattaaaaactcaaaaattttattattattattattaattattgaaaaatataattaggatttttgcccctaaactttcacatgtatcaaattatgtttcttgaacttttaaggttgttgaaaatacccctgaattattgacattgtttgatttaaggacttttgtctaattttagaaaaagtccttaaatccaatgatttcaatagttcacgatcatttttaacgaccttaaaagttcaagggcatgattagatacatgtcaaagttcagacaacaaaaatcctaattagcccaattacaaatgtacg

SEQ ID NO: 183037 - DNA, 592 bp, Cannabis indica
aaaatgccacattctcttcaataatttagggtgactattcaatggttacattaaaaatgtaactatgatagttatattttttttatgacctactataacaaattactaacaataaaaattctatttttagactcaaattaattatatacttaaaataaattaattttttaatttaaatatttaatatgacattattcatagctaatttttataaatattttttatttataaagaaataaataaaatcaggttagtattaggttacaggtaatttattaattatttttatctaatttctaaattaatcacaaccgtttaataatgatccaatgactaaaaataaatgtaaccactacatatttgatgtaaccattgaaacctcttccaatagtttaatacatacttcgctactaatgttatcgttttcttctaattcttttgtttttttttttccaaaaaatattttaaaaataaaaattattagtttaatttcagatattttatttatgaaaataaattatcttttcaatttatatatagatatataacctaaatatatactttttcttttttcaactacaatatcctttac

SEQ ID NO: 183038 - DNA, 675 bp, Cannabis indica
atttttattgagttataattaagttttatttaaaaaaaaataattacaaatactatttaagtattattttaaaaatataagacttaatttattattttttattcataattttacaaaagtcacatacaaaatagtatttatccaataatttatgttgtatacaataatgtcgcttgataattcttcaaattgtttgacaattcgctaaactgttgattctttcgtgtatagagagtagtacagtagagtttgtaatttttctttaaagacaatgtaggcttagtataattggaaagatctctctatatattatatctaaccaaggaaatgcaacatctgtagcgtatgagagaaatcaaatgacattttcatgtggaatatgtaatagaaatgaatttttttctgaagcatgaaatgaaacccaaccagaaaattgtttcattggatcgtttgtgtgattggtttaggatttttgaaaattattttatgtttttgaaaattaaatggtaggggtctacttaagattattgattggttgagtgttttcaaaaacaaatttgaatctattttgagtttttaggataaaaaatgaaaactactattttttatgtttttttgtgtttttacaaattcattgaatctaaaaattctccaattattctcttatttttttta

SEQ ID NO: 183039 - DNA, 924 bp, Cannabis indica
acattttaattattataaataactttattcgaaatgtgcttttatttttattgtatatgattaatatttgtgctaattacaaataaaagaaattttacataaatatattatataattttatattagggatttttttatttttacacttcaaaacaagttttttttacattttttacagaattctacaaagaaacccctattgcaactagcgctgcaaccactttagaaacccaaaccgtaaatttgaaagaaaaaaaattaaaaaaaaaacagtatatggggtaattcccctttatattattcataaaaaaaaatataaaatagtattagactgaattgagattttattcgtaactaaaaattaatttctttcatgtaaaattttaaaaaaattattaaaaccgcgcgaagcgcggatctattccctagtttattataaaaaaattaagttataataattctaattaattcttatatattttctaactgacactctttcaccatttactcacactctttctccaatgcatctccatctcagcattataacataacatatattttttatttatttatttgcatcatcttattcttttttttttcatgtcaaatttttctttttaggatcatcaaattatatccattaactcatattctctctttcatctctatttcattattataactatactctatgtacatagagcaaatttattgagaatgatatagtaaatcagtgataactataaatgacatataataataacacagcgactttgaatataattacaactacaagtaagatacgatgatgataacaatttaaaatcataaataagtttccatatattatcaattctttctaatatttctttattataagtttgaagtatatctcttagtagtaaatgattatatataagt

SEQ ID NO: 183040 - DNA, 568 bp, Cannabis indica
agtatggttttgattttggttgccgcactatttaaagatccagtatcagttttagaagctctctcttgggttgaaaataatgtttctgtatatataggcgaacaacaaagttctgcagggttgactgcaattttaagaaaagtggtaaatgtcacttggtatagtggtgtggtgatgttccctacagaccttttcaactaattaaaagttacttagaaattaacatgtatagttgggggattcatgtcggcttcagagaatatttgaatatgtaaatgacccatccatgtagcatcatagttcattcttactgtttcccacgtccctaccacacctaaaaagatttcgaattataggccggattcatacactataaaagtagaatgttaaaattttgtgctttttattttcacccttaaaagaattaaatgaataaaataaaactttatgccttttgagctagtgaggtgaatttggaaattaactggagatttcttttccccttaaaaaagtaaagaaaaaagttgagataccttcactttagttggtagtaggaccacggttttaa

SEQ ID NO: 183041 - DNA, 1016 bp, Cannabis indica
cgtttttctatcgttacattttgattagtgtcctggttctttttttttttggttaattttttttaatattgtttttgtataaaatagtagtcttctacttattaagaagaagagatttttttacttttacactttaaaatagtttattttttgtatttttacggaattatacacagaaactcctattataactagtgctgtaacaaaaaatcgtacagttactcctattgcaactagcgctgcaaccactctaaaaaatcaaactgtaaatttaaaaaataatatataaaataattcccctaaaaaaatatagtagtcttttaccaaaataaataaattattattcagaaaaaaataataataataaataaaaaatttatcaaaaaaagtaaaatattatttaaaaaaattgcttattttaattaaaaaaaatataaaaacaacaataaaattataaaaatatagtatgtacggaatttttaatattttacgatttttttaaatttatttataaaaaatacagttttttatatattatttttataaaataccgtaaatatatatatgtgaaattaaatttaaaaaataatattttttataattattcttattttcgattcaattgaaataatacgaggaaaaaaaaatttgtaaaggaatctatagccgttgatctaactagctgtgactactcttgaaaagaatcgagaccgtcaaatcagtggcttgtgctgtttatccctttttaagctaaaaaaacctcagaccgaaacgaacacacacgcacaaaccccaatggtggcccacacgtgcaaagatcctcttttattaagcttacgtggaagtaaattcgcctgcgtactactcacgcgggccatacgttcggtgtttccatatgccacgtaggattgacccttcaaactatgggtcccacgtggcttttatgattgacggtaagattcgtgtccttttttcatttgataatttctcttaaaaactgagccaaaaactcttcg

SEQ ID NO: 183042 - DNA, 782 bp, Cannabis indica
aatgtggtctttttcgactcttgaattgcaggaaaaaggagattcgaaagtgaaggacatatctagtaaaatgcaaagtgtgtaacacttgctgaagaggtaacattaatagtaatgttttcctatttaacactcattctactcatgagagtttgtgtccgagcctcattgatcgatgaatcgtggatttgatcttcattttgcagtgtcactttcgagagagaagctcgtgcagattcgttttgagtatactatatatctataatactaatgtatgcagcagttgcagaagaagcacctcaaaatttgaagaagaagatgaaccgaaaggcggtcagtcaatacaaaattgttgtttttattaccaactgcagaaggagatgtaagagtttggttgtgtagctatcaaatgagtcattaaactcacttttagttatagtttttggccaaacttctttctcttctttcttttcttataatgcttttgtttagttttttcaccatattattatatctgattttgagtcaatcaagttgttatggcttatgtacttttggtgtattatatttatgtgcttagtgaaatcccatatagtataatttaaacatttttcagattattagagaaaggtaattgatcattcatcattatgttttgagaaatgataaaaggaactagcaccacttaaatgtgtcatatcgctaattaagtgatacgttaattatttgtcaaagcatcatattttctggaatcattcatcagttaatttttttagttattg

SEQ ID NO: 183043 - DNA, 671 bp, Cannabis indica
cccgcattcgcacctttaataaagtttatagaactcatgctacatctgatctgctaatttaattagatattttatctcttcctcggaacaggtaaatcagaaatttgatctccatgcccagaatcggaggaaggtctaagaagaggcaacatcaacagaatcccctgcatggctctttcctgtctttgaatgccttgttagtacggtggatactaaccttttcaaagggtcggtcctgtcttgatgccgagaattcggaatagaatgccctctttggaatagaatacagagactaggctgcacatgaaagggaaagggcttactactctcactaatatagaatacactctgagggcggtttgtgcaagttaaattgaaggcacttgcagctaaggcgaggaatcggccaaaagcgctcgcaagggaagattttagcttatgaatggtctaagagcctactgaaagtcctagaactattatccacgttatacacgatcttactattataactagtcttgctattaataggagaactatcttactattaactctaagctaagatatacaccttattaatactaatccccgaaaaaaaagtatccccatccccagtacggaatgtttttaggagtaactactagtgtttatcttagggaataaattattaagct

SEQ ID NO: 183044 - DNA, 501 bp, Cannabis indica
tggcctttgtccttatcacaagcactaacattgtgcccttggtttgccttgaatttggcgcaaacatccatagtagaagattagaaattgttaacttctgccttcacctctaattccatagcccatgaatgaatcacaactttctttggttcttcaaactcaatcggtaactccacatccaaccccaaattagagtgagaattacggaaattctcattctgatttgcttcttcttgaattagagagagctccagttagttcgagacaattataatggtttggattgcaagtttttgaaattcttttttttacgccttttcatggagcgagaagagaaaaatggcacgccaagagagaatagaaaatctttaattaatagttgttgtcgagcaaatttcgcaacaccaaaagtatgattaatcgatagaaagagaatatttgagaatagacaagtgcgagtattcaacctaaaactggcgagtactcggatgggaatgcgag

SEQ ID NO: 183045 - DNA, 635 bp, Cannabis indica
tcctcttctcaatcttacaagtttttctccctctcactatttcctcacactaaatgtttctcctcccccaaactaattatgtagcttatgatatcatggataacatggtgaagaaaaattaatagtgtggttgaatttttttttttcaaatcgatgggtgaaaaacataacaggtttaggctcaaaaggttaactagggatacaccttattacggtaggcttgaaaggctcaaactatccaacaaatgcctaagtcatattccaattgaacactatcaaggatttcgtctcaaaagaataaacatgcaagttctaagctatcctgtcaatcttaccacaaaccatagtaaaacaattataacaattttcacagattgaatatttgcagataaacacaggtttctaagcatccaaactaatccaaagagttaacagaatcaagcacacagttattttacaatttcagatcacatcacactaatcagcagtatacaactatcgtcaagcttattgccattccttaactaaaacaaaaaaactaaaacagaaaattaaaatgcagaaattaaagtgcagaatttaaaaattttaagtctctccccccaaactaaatatgacattgtccccaatgtgct

SEQ ID NO: 183046 - DNA, 1163 bp, Cannabis indica
gcaaacacaactacattattaggattaaactcttttccttgccatacgagtctgttacgggcgccccatattgcccaacaaacagctgccaacaaacatttctgctcaccatccgcctgcaaaaaactgctggtgcaccactgcagaaacgaaaaatctggtgcaacatttgtaccaattccaacccggttccagcattgctgaacgaaattgcaagtgacaaggcagtgtaaggttgtttcttcttcaacttggcaaagaggacataacacacagctcaccactcttttagttcgcaagtgaactaaagtaggaagacattcggagcaagcacgccacaacaaattagctatcttcgggggaactttcaagctccagagcttattccaaaacagagaagattggtcatcataccagtaacctttatcctgctgcagaaaactatatgcactcttcaccgaataaatacccgacacttccttagtccaagagatttgatctgaagccgtgggtgcctgaaggggaatacttttgattaaacgttgatctcgggcatcaaagagatcttcaatgacagcattatcccagcccccagtgtccatagaaacaaatttgcaaccgttgctgaagcaagagctgggtgactagaaaccacataagggttcacaggatccggcagccaaggttcaccaaccacagaaatcgaaacgaccattcccaatgctccatcgtataccttttcgaatcaactcttgcgcttccaaaatactcctccacacaaagcttggattggaaccaagttgggcagtgagaaaagaaccatttgagtagtatctagccttgaaaactcttgatgctaacgaattgggtctagtgattaatctccacccttgctttcccaacattgccaagttaaagtctcttaaatctcgaaaaccaagcccacctccttttttatttttgctaagtttgtcccaagccatccaatggattcccttattagaattcttcgacgattgccaccaaaatttggtcatcattctctcaatttctctactaatttctaatggaagaaggaatacgctcattgcatatgttggaagagattgaagaaccgttttcactaagatttccttacccgctcgagatagaaacttgccctc

SEQ ID NO: 183047 - DNA, 904 bp, Cannabis indica
tgttcttttcacttttttagtccctgaatcaaatgggaaatctctggaggagatgtcaggagaaagcaatgaagaaaacaagtaacctttgttggtttgtagaaccctttagttggtaaccagtaacctttgtttcaatagaactgcttcttatcttaagatgtaaatcattattgaaacttcagaaattggttatttgagatggtttattgtgtgtgccagtgttttgtagcttgtttttttcatcaataaaacttagagatttcaccataaatatatatccataaaaatactgatctacatctgagaagtaaaaagtaaccaattttttttttcagcaagtagataaacattaagcttagcccagcttttcacaccccaccaacattgccagtttattcatcagattggcaaaattacaagttagaaggtgttgtatttgattatggcagctgctgagagcattaactgacagaaaatagagaatccaacgcttgaaagtgagagtaaattaagctcagttcgctcgctctttgattacttcaagatccatctctgttggatcggtagcctgaatctcgtagtgaatgccttccagctctcttcgaaacctgtctttggatgtggcatagagcatcttcgagcgaattcgagcagttgaaggagacctgataaaattgttatgcaaagaacaatacataagattggatgatatcactcaatgaaaaccaatatgaaaactacatagaaacaaagctttgtgttaagcttaagaccccaaacccgaactttgtttaagatcccctgtgaaataaacaagtcatctaatcaaacaaattgttcatacacccgaaaaagcattgcacactaatctataaaactgattagggatactccttgaaat

SEQ ID NO: 183048 - DNA, 626 bp, Cannabis indica
gcatctctgctacattaggaaagctcggggcaatcgtggtgccattcgggttcgtctacttggctcagaaccaagagtaggccaaggtggataaaggatttccagcaggtattggggtcaagaattcccttctggttttaggtggaatcaacttcttaggtgttcttttcacttttttagtccctgaatcaaatgggaaatctctggaggagatgtcaggagaaagcaatgaagaaaacaagtaacctttgttggtttgtagaaccctttagttggtaaccagtaacctttgtttcaatagaactgcttcttatcttaagatgtaaatcattattgaaacttcagaaattggttatttgagatggtttattgtgtgtgtgcgagtattttgagcttgttttttcatcaataaacttgagatttcaccataaatatatatccataaaaatactgatctacatctgagaagtaaaaagtaaccaatttttttttcagtcaagtagataaacattaagcttagcccagctttttcacaccccctaccaaccattgccacgttattcatcagattggcaaaattacaagttagaaggtgttgtatttgattatggcagctgctgagagca

SEQ ID NO: 183049 - DNA, 581 bp, Cannabis indica
tggattacaccagatgaaccaggatccagtgaagtgcagtatggaaaatctaacaaaaattatgagtttacagcactaggaactgctcccacaaaatacactttctaccaatataagtcaggctacatccatcactgccttctctccaaccttgaggtaatttttaatatttactataataatattataatataatcttgagggtaggtgtttaagaattttttttcttcccttcttttaaatattggtttaaatcttctggttcatacaaacaagaaattttggtatattttaagtagagtttggttaacattttttatttttaaagtttttaattacaaaaataaagcaaaatttttatttttaaaattttgtttttgaaaaataaaaatgtgttttataattacttttgtttttgaaatttaaaaataaaaaacaaaagtctgttatgaaaatttcatttgttgatattattcgggttcgaggccgggaccgagagcggatccaagtctagggcagggtccaagttcggtttctaataaggtctaaattgaggtaggagtccaaaatattaattaaaa

SEQ ID NO: 183050 - DNA, 599 bp, Cannabis indica
taatgaattttaaatgatcatctagtacatcgccattgcctcaatccaagtatgccactgtctacatacttggttggatgagtaccagcatctagtgaaacattttcctacacgtacagatatatgtaaaattatgaagagttataaatactgaaattatttattttaaatttatatataccgattgttgtgggggtaataacctatttattggattgttcatcctagtcatacgagtgactattgcttgataacggttactgtcaacccctactttgatggcaatcgcactcggatttaaaaattcatatactctgtttagccaattgatgtctaatagtatttttttcatgtgcctgataaaatgtcataattaacgaccgtcgctgtcaaaagaatattatcaagtttattattaagagttagaaatcatacttgcaccaaactcttataggatgggctcccaagtattgcatggtgcacaattcatgaatgtcattttaacaagccaaatagagtcatctttgttcccaaatagatcataagcaacctgaaattggattatgcacgactttagccaccttttgacggagttctaa

SEQ ID NO: 183051 - DNA, 728 bp, Cannabis indica
cgaggatgtcattgtcggtctgagatcgcgatctagaattgtgaatttgtcgtggagcaacagaggtattgactacaggtgcagaaaaggcatcaggattagactccgattgattgtgcttagttgtggatggaggaacaccctcttgagagagtgtggaggttctccccattaatgcagtggtcaaggtttctattgataccatatgaaaaaagtagagtgcaatagagaaaaatcttaaagcttgtattattattattatgtgtattgatttacaggtacatacatatatataggcatacattaactgagttagttagaggaataactaacttagcttagtgaataacctaactaactgagtcaagaatggtttaactgtatcgtaactaacacaaggataagggtaatctcataatatctcttgctactttacatttgaataataagtagtcactattttgtttattttaaattcatgaatttttattattaattatttttatgtgtatccttaatagaagaactaatataaagaacaaaatttcttcaaattttatgattattggaaaaatggaatatagtaattaataaaaaacaaacatccaatgcaataactataactacgcgggaaatgttgaataaaaatacgatctaacaaataacaggcgctatgcgcaaaaaaaatgcgcaatcttgttagtcagaacgtttgacaaatataactt

SEQ ID NO: 183052 - DNA, 598 bp, Cannabis indica
aggttgatgattgagatttgatagtaagctaatgtgacaattaattcttttctcttacgtacttaaaaagaaaagaaattatagttttgagtgaaattagatatataatggttttctttgagatttgataggagtaaagttggggtttgatgaaagttggctagtgttacatcaactaaatacaaaatttctcatgtatcccccaaggtgatcatttatcgtctgtcttatttatttgatgtgatgagagtatgagagtaaaggatgatacacggggtgtaaagtggcaaatggatgacacttacttgtacggtaagcccactttggggaagcttccaaaattcttgatttgttaaagtttgataatgttagaaattttattagaatggaaaataaagtgagatatatatatatatataatttaattgtaaaaataatacatatattaaaataagagattgatgaaatatacataaatatatataagtggaagaagatgaataaacatatattcatgtaatataatacatatatataataagaaaagaatatatatgtaatacactaatttacaactttcaacgttgagtgtagatta

SEQ ID NO: 183053 - DNA, 1132 bp, Cannabis indica
aattaaataattaaattttaaattaaacctataaatttgaaaaattatattttgttaacaaacctaaatatctattcaaaaataccaactaacttttcaaaattgaagttatttttaaaagaaaataaaattaaatgtctaataaaataaaatgataaataagtatcatttatttgattatataatttaacttaaataaaataaaaataatttgaaagttgacaaaatatctggtcagatttttaaaattttctagattattttaaattaaaatatatcttattttaaattttaattaaggccattttataaaaatagttaaataatgccaaatataatatatctcacattatatttaaaaataagataaaataattaaattttaaaaataagataaccaattaagaaaaaaattagattttatctaatttacaagtttaaaatttactaatatctaaaattaattaaaaaaaattaattaattttattctaataattaaatttaagatttgaaaattaaaatctaaaatcaaaattacacaaaaaattacaaaactaattccatgaaaaaaatgaaaaaaaaatttggaaatattttaggatttggtgtcgaatagtatagcattgcataccatccgcatgcgtggatttgcgcatgcaacctcttcgcacgcgcaaggccctagttcagaaaaaaaaatgcccaaacgggtgaggaacctcggacagatgcctattgaaaaccgcctgcatcccgagtgacacgaagtatccgcgcgcgtatggggtgtcgcacctcttgatttttaccaattttcaaaaactcataactaattcaaataaaatcgaaatctaattctgtaaaaatgtgaattgcttaattttttccaaactatccaagaaaaataatttgaatacgaaattccaattattttacgtaaaaattttgcaaacatcaaccaatcttcaataaacacacatatcaacatgaatcacatccgaatcacacatacatcgttttaaatctatatttcttgaaagtaaatcattatcatggctctgaggccaattgttagattatattttaccaggacctagatttactaacaagtatatttttaacatcctaaat

SEQ ID NO: 183054 - DNA, 620 bp, Cannabis indica
acacttcattggaatgtacttgtgctattattgcaagattttatattttgatcatccgttttgcatgatgaatgatcccaattgatattaataagctaaggcaaagtttacgttgcgaattaaagttacccatataacatatgcattatgtccatattatacgtacataaacactggtagcccatatgcatgcatgtatataattaattagttatatatatacatttatttttaccaacaattagtcctggatatattcttatcatatgggtacttgctaacaattcattatcatgtatactgtatacatatattactgtatagacatatgtgttcttaattagttaagaaaagaaagtagaagccagtgaggacttttgttcaataataaacatcacatgttaacatgttagggtggtgggacagcaaagttggtgcaatatacatacatatctttatatattatatgtatatatatatatatgtatgtggatatatatttttcattttttgttccccaccgctttttgaagataccacactaccactactatactactatcactacggagataatagtacagccagccgcgaatgctacgcatcctcctgattatatt

SEQ ID NO: 183055 - DNA, 547 bp, Cannabis indica
aaaacttttatgacaatacacaatattatataaacttttgttagatgtagatataggtataaaatattgtaagactaaatacacaataaatcttttttttttttttttttttagaaaaagacacaataatcgtaattaatgttgaataaaatattattaaggggtcgagagaatgatttacttttgatcgttcttcttctttattagggtttttttttttctgtaaaagacaaaataaatatatgtatatatttatagataaaaagatatttcttaattaattgaacatataattaataattgattgtttaatattgatagagcaatactagataacaaaaatgacaaaaattatgtgtttaattaattaataatataatctgagtaatgttacttttaatctctcattacaatattttagttaatttatgtgctcaaaaatacatgctctatcacaaaaatgacaaaaattatgtgtttaatttttcaattttctttttattgacggtgttcgatatactaacaacatcattccaatcattcctgt

SEQ ID NO: 183056 - DNA, 711 bp, Cannabis indica
aaattcaaatatttaatttaggatatttattattattttattatagataaataatattttattattttattaaataaaaattaaaagtcacccataaaattctcaaaaaccaagaatttcagttatataggtatactttatatagaatagataaccatcacctttttttggttttgttttaacctcaaattaatgttatagtcgtatatttatatataaattaaaaaaaaatacaccaaacagctctatataatctaaaactatattgtttatcaatcttattattttctctctccatctctcttcttattctctttttttttttcatcttttgagattgtgattagaaattatataatacaaatctactgagaatactcatatcatctactcaaagaaaggatgatccaacaaaaaaaataaagaattggtttggcattcctacatcactccttattgttcttttaaattatttttattgcttatgttatttcatcttatattattcttttgtatataatagattctcaacaataatataagtatacataattagatctagagaattttatattgttttgtgttctgttttttatgtgtaaatatcagtattttatcattatatgtattactattatgaatttattactattgtttatgattctgagtttgctatatttaatgacagtgaaataaatatgtcgtactaat

SEQ ID NO: 183057 - DNA, 581 bp, Cannabis indica
atttacctcccaagtttgcgtgggatcttcttggtcgcacatgaacttagtcagccacgaagctgatcatatgggtgacgcgtgtctggttctcatctttgatccgatgtgacttgatcgaacgtctctttgatgtttgggacatttaatgctatcttgaaagttgtacctcaaattatgcactgacagttgcacgacattgcatgtgtgacatttgtactgttgtaatgaaacctaacgttactttttttggggaaaaacccaaaattttaaattttaaattgattaattgatccctccaaatatctataaaaggggatttaagccttattgaaactcttttagccattttatcttctagaaaatcaaagcaaacaacttttctctttctttcaaagaaactctcttataatctccattgctaaagccatccgagcatattcagaaagctgcaaatgatgaataagttgtattttcctctcctttatgtaatttcttttgaatacatgcaatatttttttatttttctattgtaaactctgtgttcttgaattattattgactgatctaagagtagaaga

SEQ ID NO: 183058 - DNA, 506 bp, Cannabis indica
attttgtaataatgttttgacccgtgacaaactctgctttattatttgtaaggcgtatcctggtctttctcattcaataagcaatgaagagcttaaagtatctggagtcatggatcaaaactcgtctgcaaagttcttcttagttcttagagatttaatggtgatatcaccttattagtaagtcattattgctgagcatcacattcaaagggaaaaaactacggtttcaacaccttttctgggactggtattctgtttgcttatatgaataagtttttatttttaaaaaaaccacatctttatatgtttttatcttaatacaactaaataccatttgcaccaacctttgcatcatatcattttttaaacaaacgagtatatgcttaaaaagaaaaggtgaaatttggaaggcacaaataaaattagagagttgattaataggaaaaatgaaactgcaaaagcactattaagggctcgtttaggtaacgccgtattaagtcgtattg

SEQ ID NO: 183059 - DNA, 567 bp, Cannabis indica
gtccagctaagcaaaaaatttgtactttcaattctcccttttaaaattaacaaatataactcagactaattttttagttgataatattaatgtatgtataatttgccatatgtgcttaatatatatacaaagaccattttcatttgtgtctattccggtttcggttggactttaacaatattttgtggggtaaataccattttggaccctgtgttttgcaaaagttacagattggaccctgtgttttgttaaatgacaaaatggaccctgtattttctaaaatagtaaaaataggaccctgagcttaatttttgataactttttttttaatacaaccaacttgaagacaatgcttaatacgaacagatacaaaaaatgtaaacagttttgtcatatagcacttttaaatcggattataattaaactttattttgacaaaaaatcaattcagggtcctatttgtactattttagaaaatacagggtccattttgtcatttaacaaaacacagggtccaattggtaacttttgtaaaacagagggtccaaaatggtatttaccctattt

SEQ ID NO: 183060 - DNA, 1037 bp, Cannabis indica
ataataaagggtataaattaaatatatagaaaaaaaaaagtaaaaatgaaatggattaacaagaaaaagtatagagtgcaatttccaattctaaatgtatagcgaagtggtaaaaacccctttcatttatttttgtaagaatataaaattattttgtaccctaaactttgtgactaaaagtttatgcctcctatatttatatgtcttcaaatatatcccttaagctttaaacaatcatcaaaaactaaggtattgtttagtaacacttgttttctcatttgttagtcacaaaatgaaagtaaaatttttatttttgtaaaataaaaatgtattctgtaactattaggatttaggcttctcttgcttcagttagtggtttatactgttttataggaaatagttaattcagttaattaacttctttgttttctttaggtcagtagttagttatgtttaactaactttgactgaatgttagttgggttgttagggtgttcctactgtatatatattgtaccattctctcatttgtaaataagtcgaacattacattctcaataaaatgttttctccttcttttcttaatagtaaccacttttattttttcaattttgaaaatagaaaataaaagtgtgttctgtaaagtttatttttatttttattttttgattttatttaagtcaggtctaggttgagggtcagaggtggggtttagcgctaggatcatgggggaatttggggtctgggtctggtcggagtctaaaatattaattaagaaaaaaaattgtttagaaaaatattgaaagtggcgttttttattttcaaaattttgattctcaattaaaaaattaaaaaataaaaacatttttatagaacatgtttttgaaaaatatttttactttttcaattattaaaacaaaaaactaattaaaaatagtgttatcaaacccccccccccccctaacttttatgttacattctgttaatgttttcaattatgttgttatgtggcataatattatctaatttagtttgct

SEQ ID NO: 183061 - DNA, 657 bp, Cannabis indica
ggatatcttttattctgttcgcttccaagatagtagccttgcaatacaggtagctatcatctgcaaagagcatatgagagatacgcggcgctccattcgccaccttacacccatggataaggccagcccgttcatacttgttcaataaagccgagaggccctcggcacagagaataaacaagtaaggggataatggatccccttgtcgaataccccgggaaggtataatcggccctatctccttattctcatgaaccaccatgtattcagctgaagttacacattaatttagtaacattataaaatgtcattaaaatctattttgttttttttccttaaaaaattgaaaaattaatttaacaaactccctccttctactccagtgctacccccactaactagccgtgcctcactcaacagcccaacctctctttttctctttcaactcaaattataccgcctactggaatttgtgatgtcgacacaaaaattgcgatggagaaagaaggcgagatcaacttcggagttggccgtatcgcctcctcccatctttcggttgcccttgtctttcagatcaaggtaatgcttttcttacaggcataatcagagaacggcagagagagaggcgccatacaatttttctgaaatttcatttcg

SEQ ID NO: 183062 - DNA, 911 bp, Cannabis indica
gtctagtcaaaaactttatatcacgagaaacgttctcccccgatgaaaaaccaacatcagctgtagatttaactggtacacgatcatcaataaaaacatccttaaaaaaactatccagtagtaactacttaaactcttcagaagtgggcctcaaattcttcacttggatctatacacaataacatcacatacaaacaaatgtaaaaaataaatttaacagcaaaaaaaaggtaacaactataaaacaattgtaaactaactgaacacttaccaaagaggcaaataaaaaatcttcaatgtcagatcttgcaaagttgaagtaccctagtcaggacaatcaccattgctccaattcaaaattctcagaatatgagaatgaagtcgtttgccaaaatctcctatcttcctcacacaacacttgtaaaaccacacctaaaaaacccaaaggtaacccactacaaaattaggttttcccaacggttaataagagggtcaattatgaaaaccgttggaaaaagtaagtggagatttttcccaacggtttaaaactgaagcaaaaaaatcgttgggaaaaaccaatgccaacggtgaacaaccgtgggcaatacgaaatgaattttttttaaaagaaaacagcgaatgccaacattaatttataactgttgggaaatgttctttttagttttaaaataattcaaattaaaaaaaaaagaattttctttgcttaataaaaaaattttatatttaataaaagaaaatactaaaaaaagtttcagatttttctaaaaaaaaaaaagaaatttgtactttttttttttgtcataataaagaaattagtatttaacaatataaatataagggagttctatttacaccgccatacaatgataaatacactctgttatttaaag

SEQ ID NO: 183063 - DNA, 633 bp, Cannabis indica
gcatccacaacaacataaagtcggtacctcataggtcgggttccaccagattggcctaagttaatatgttattagtatttatcccaattagtgaggtaaagtgaaaacgtataagagccctagcactataaatataagaacatcaacccatgcaaagggttgaaatctcattcatcaattgctcaggcaaattctaaggttcaaacacttttatagattctaaggctttttcagtcttagcataataatattgactcgtgtataataagactcattaatgttcaaaccacataaaaaatctagtgttatttcttcgttatttgtctatttctttagctttcatttatcttttattagttttcaaaaatttcggtaaacacatgccaataaaattatgtaactatatttatatattttgctaaaaaaatatatatcgctattatacataataaaataaaataaaaaaaaatatcaatgtaaaaataataatatatcatacaacaaaaacaaaaaataatgtacaacaaaatatgcatgccaacaactcacaataaccctattaaaaagagacatattttataataataatgattttaatgaaactaatatagatatactatgatatttaagtga

SEQ ID NO: 183064 - DNA, 767 bp, Cannabis indica
tatagcattggcaggggcgtgtctctttgctccatccaaggcccaagcactcctctaaatactggtgcgcagggctggattgtgtagtgtcggcccataaaaaataggaaaattattttcaatattaattctttaattttttttaaaatttatggtttgagattctaaagtagtttttgcgataatttttatgtaggttgcaatacggattttggttgaaatttaagttgtttcgttagtggtaataagggtttccatgtagaattccataaaaaatatatatataaaaataaaaacagttttgaaatgtaaaaataaaatagctcctaaaaaaatatagactctaccgtgctgctaatttttcaaaagtaggttcagcacagtatgtaagcctaatagacatcgcttctccaattagagggacagagaagttgagtactttggaagccgcccacaaaattgtctccttatgattcctaaccaaagacaccatgcaaatcgaatcacaaccaactttcacattaaaattgattttggcccagtcatccggggaggggaccaagcaagagactcagatgtcatcggagaagttaacaaacatgaaccataatgcacataacacatatagatagagtcaatatactgtttaatattacatatagagttattatgtacattatcattatgagctttctaaattgtgctgactataattgaagcatcgggaatagctcttgaaatgttcacacctctagtctttagactct

SEQ ID NO: 183065 - DNA, 563 bp, Cannabis indica
ctcttttacgattacaaattcttagtttacttaaacaaaaaaaagtaaaaaaaaatttaacaaattttttaaaattaaaaaaaatattgtgaacatagaaaaagaaaaaacaacttttgtactgattcactattttgaaagttattttttcagctttatacttcttaataaaaaaaaataaaaaaaaaaataatggaacaaaataatgattcttccttgactctctctaataaaattgttcgtttctcctattttttttcttccttttgagagttagtaacatttgaaatggcagaacttttttttaaaaaaaaaaaaaaaaaaaaatcgaaaatagtgaagttacatttagagataatgtttttggtaagttgtattttctaaattgtgagagactagcaacactgaaaaatacttgtgttgtggttgatggatttcagggtaatttattagtacaagccagtttggcatagttgtgttgtgggaaaaagcagctgtagctgtgctgtgagaaaaagcagctgtagcaaaactatggaaaaaagctgagctgagtgtttggt

SEQ ID NO: 183066 - DNA, 637 bp, Cannabis indica
atgcaaaaatgacgggaagtgcattttttagatgttaaaagtttccataactccaacacaaataaattatttagttttccatggggattacagaaattttcatttagaattggtgttaaatttcttggcagctttgatattgttcgtgatacattggggatgatacgaacagagtttccacatacagcgtatttggttgcaggaactcaggtaaggcttaattttatttatatatgtattttcttgttctgcagacagagaaagctgctggaatcatcagaatattcttttataattgtttataacaatgttaatcagtctatgttgctctgcaggcagagaaagctagttcaaactccataggaatatttaagatatccaacatttctgggaaaagacgggaactagtccctcctaaaaaatccaccactcctgttactgatatggaaaatgatgatgatgatgatgacagtgatagtgaatcagaaagcgaagatgaaggccctgatggatctgggtcgcaagtgctgcaggcaatactgcatttttactttaattattaattttagttgctgagaaactttgcttattctcaacttttcactattggtatttgtatcttagtttcttgtttctt

SEQ ID NO: 183067 - DNA, 875 bp, Cannabis indica
agagactcggaggatcactgggtttgggtttctgggcttggagatcaagtttttgtggtccttttggaccatcggcgaccgtagtggcttggccgtggttgagccgagaacaaaagagagggagcggggtgagagatggtgaggtccgactggcgatatggccggagcaccgtgctcctagtctgacttcggtgtcgcaccaagccaaaagggagagagagagatcagtataaagaagaaaaaaaaaaaaaaaaaacggaccattgatggttccacttcgaggagaataaggaaaagaagaaaaaaggaataaaaaaagaaaaaaagaataaattttaaattttcattattttaaattatttttagatatttatgtcattcatattaggttgattaataaaaattagtcattgtacatttatatatatacaatttacttttgtaaaccaaaagtattataaagcaaaacgtagagattgaagagttcagcaacttttttaatctaaaactgtgccaaattttaaaattttaaaaaaataaccgcaaattaccaaaaaaagtttaaataaaaaaaatatattatctctctaagagagacaaagacaatgcctactattttgaatggaggaaattagattatatacctttttcatattattttttttttattttttttaaattttattatttttctttttttttaaatattgtaccaattttgttcctatcacttcaagatactctctatgtcactcgatattttgggtacaatacatataaaaagaaacatatttaaattaattaaaaatttaaggtaaatttaattaattgattgataaaagatgtattttttaagttatcccttttgaatgagt

SEQ ID NO: 183068 - DNA, 766 bp, Cannabis indica
ctattagttctacactatatatatagagttggagtatattaatattattaattattatcattattatattgaccgtgttattaaaataaatagataaaataaatatatggaaatgtaattattaattatattgtagaggaggagtaagaagaaggaacgtagaagagagaaaagaatggttagttatgaggatacatgtatcttatataaaaataaataatagaccactagtttaaatttagtttcctacctaataggaaagtacaaataggtaggtagaaacgtttttaagttatcatcttggtacccgtacttttggttagtatagaagaggaaaaagattaatgatttagatgaactaagaaataacttcaatactattattattttgaagaaattaaacttaatatgggtttttaaaactttgatataaaaatatggcacttttagatttgacaatttttatggcatatgttttaaattattttatgatatttttttatgtcatatataattttaaagtgagttaactatatttgtattgaaaattaaaataataattttttttctatatattaattaagtataaatattttaactttttatttttactaagattttcatatatatatcgttaaacgaaaatataaattaacaatatacatatctattctatataaaagtcgtgtctatataataagaatttttggtttatgagaaattcatggatgattttttatttatattaaaataaaatggtttaatt

SEQ ID NO: 183069 - DNA, 661 bp, Cannabis indica
cacaattgatagatttaataaaaactcatcatatgatttcaaaattattgttatcgttgtatttcatttgtagtcgtcgttatacttaaagttaatgttatcaccgtagtgtagtcattactgaatcttattttattcatcactatcttttccattaaatttattttgtacataaaataaattaaacaatgagttaactattcacactttttatataaataagtcccttataaatttattacttagtattcataaatgttttaacacgatgaattactcaatagatctcaattctcaaagcagcttccaagcatagccatctctcgattttacacattaaaacataactaaataaagattaatgcaaatatcagtctcgataaattgcactattgctgctttttgtcaatgaggatagtggcattatatgaatcatccttgataacaatgttaagaattcttttatacaaataagaatttataataacaatatgatttttaacaaattggtgatatacatgataaataaattaaagtaagagtattcctaataattttttactttattctttaaatacatcattaaattttactttatctatttattctcaacttttatattatatacaccagcttctctatttttctttgtatattattt

SEQ ID NO: 183070 - DNA, 621 bp, Cannabis indica
  modified_base (513)..(513): a, c, t, g, unknown or other
gatagaggttataattgtttatattatatatcccatcaaaagtagtttttttttcttttaagcttactttgttattgcttttcaaaaacaaaaattacttcccccactataaatcgtgaatcctccaccatataatagtgttaacactatgtaataatatctaataataatagcaatattaatttatacataaattatttaaataaatcaaactttttattaaaaaaaaaagaataaaaaaaaatagaaagaaggcattatattaaactttgttttggagaagtattgttaattagagttgttggtccatacgcgtcataattaagtttgattttattatatagtacttggtaaggtaggaaatccccaactatatttttaatgaacttcattaatcgaatttattacaacttactatcaaattgtgcattatttgaaggctagctatgtaattattttgaattcagtaattttgctattaataataatatttttttactttctagatctctntagagagataattaagcttaattaatttagatactaatctatatatatttagttaaaccgttcctttaattttttttttaatttagtaaaatactagcattttattaa

SEQ ID NO: 183071 - DNA, 675 bp, Cannabis indica
atatatatatatatataaactttgacatattgaagttcatgattagggatcaaagattgtaaacacaacataaaaatcacattggttttagtgaaaaaagttttcttaatttggttctaaaagaaacttcgatcttcaaagtttgtatcatcaaagtatcatataataaaatatgctatatatatgtgtagtgttaattttgattgagatgtggtgattatagtttcttaaatatttataactttgtggtgtaattaagcctttgagtagtgttgatcagtgtttgtttttctctcaaataaataaaacaatcaacatcaatgataacacttaaggataacacatatcaacaaataaaaaaagtattaatagcatatcttttgatcataataatcaatcacacttataaatatgggaaatttttatttatatacgtaaacacatattaatgacataaatgacgttgagtaattatatataattctaataacgtgacaactcagcaactataccttattatcaaaaatatcacttaccgaccaatcaaaaaaggaaactggctattttgttccataaatgtgtcattttcttccattaattatgggattggattcttgaataatatgtgtaattaaaaccaaataaaaacgtttacttgtctgggaccatagaaaa

SEQ ID NO: 183072 - DNA, 552 bp, Cannabis indica
tataaggaaaatgattgaaaaaaaaaagtgtgaaaaacaaacaaataaaaccaatttttaagtttgatatggaaaatttggttgaatcgagtatttttttaatacaatttttttttttaagtataattacataaaacacttttctttttgtaattttttttaacatttttaagttttaaatatttttttatatatatttttaagatgttttataaaaacaaacacaaaacaaaatacaaatcaataaaaaaaggtaaatacacaatcaaaagaaaattaacaacaaaataataaaagtacaacataaaaataaaaaataaaaaaaactatattttcaaataagtaaaacataaaaatatcaaaaatcatattttctgtaaataaaatcacaaaaattataaaattatttaaaattccataaaactgtatttttataatattttattatttgtgtgtatttgtgaaataatttttttataccaaatataagagtttattattcattattttctattttttttttcttatattttctctttctttttctttctt

SEQ ID NO: 183073 - DNA, 588 bp, Cannabis indica
tcacatacttctccatcttgatatacacccccgataccatacacaggtcgtgtccgtacaagaagcccctcgatgaaaaagacattagtaagagggatctaaccaagttttgccgatttcacaaagattttggccattacactaatgagtgtaggaacttgaaggaagagatcgagttcttgataagaaggaacaatccccatgtaagccggtatgtccaagctgaccaaaaccaagaataggtccaacaaaacaatgaccttttgcctccaccaattactggacatttataggtcatcatcggaggaccccacatttctggggattcaaataacagatatgctggaactctttgacacaagaaaggaaacaaagtcctaactatagaggaaagaaatttgaaatagccaaaaatagatgagcccaccatcacctttgttgaagaagatgttgctcatgtcaggttccctcataatgaccctctagtcataaccacacaaatagggaatatgatggtagcacgctgcatggtgaatgatagggcctcctccaacatcatcttcaagactgtgtacgaaaagatgggac

SEQ ID NO: 183074 - DNA, 623 bp, Cannabis indica
atgcgcacaaacctaggtacccctcggggcccaaacccaagttctaaacttggacatatacaattttaataaagtatttctcatgtgggacccatttactcacacactttatttttttttataaaatttcataaagttccaacagattgtgttttattttgaccatgtaataagttatataaaattgtgtattattttgaccatgtaataaattatataagattgtgtattattttcatcatgtaataagttatatctcaattattattattattattattaataataaatttaatgtattaaaaataaaatttaaaatagttgttgcaacaaaatattccaattatatttttgactgataaattatttagaatattttttcttttaaacgaacaaattaagttgctaatataactataatttacgttgttaaaaaaaaaaagtcaacttatgatttttgcatatacttaaaataaaaaacgctcctagctaacaatttttctatatattaaaacaatactttagtacatttgatttttttttcttttttttgaattaacagggaatcacgtgatgtagagtttactataattaactacatttttttttttttctgttttttc

SEQ ID NO: 183075 - DNA, 746 bp, Cannabis indica
catcattaactttataatagagaagtaaataaagaatgtaatagtgtttagaatgtagagaaaatttattcattctctaaatatatttaaatattatatataatattttttttttgaaaaaaaaatacttttatcagaataaacaatattttattcatattttaataatataataatatatattaaaaaatgaatattatttaaataatatataaacaaataaatagagaaattaatatatgaaatattgtaaaaatttgagataaaataaataaaaaaaaaagttgagttttgatactgaacaaaaaataaagtatattataatagagtaaaggtgttcatacaatagccgattcaatctaatccgtacgattcaaatccaatccaattcgcacaagtgcagatatttgcacttgtgcggattggattggaattaaaaaattaaaaatccgtacttgtgcggattagatgttgattgacatgtaaaagtaaccaatccaatctaatccacacatatttataaaaaaattaaaaaattatatatacaattaaaattttaatataaagaaaataataatttaaaaatctaatacatataatacacatatattttaaaacttaatatatcaaatgtatattttattcttatatataactttttatgtacaattttaaataaaattaaacatttctttataaatatattttttttcttttattgaatttgttattttatttatttttaa

SEQ ID NO: 183076 - DNA, 820 bp, Cannabis indica
atatcacaagagatatgcactcgttgaagaagaactagacttgggatgtaataccgtgcggaagatggtaaagtcatcatatgcaaatgtgtgtataaatggtaagaaggcattcgaggtgtacaagaggcacggtataaaacaaggttggttgtgaagggattctctcagattgaaagagtcgactataatgacgttttttcttcgattgttaagtacaaatcgattagaattttgttggcatttattgcgtgtcaagacctcgaactagaacaattagatgtcaagactgccttcatttatggacatatgaatgaaagaattctaatgaaacaacttgaaggatttgaagaggctggaaaggaacactgggtgtgcttgttacggaagtccctgtatggcttgatgattatgtgaccaagatagatctaaagagaagtaagtttgatccttgtatatagtttttagagagaaatggagatactttgtatctgttgctgtacgtagatgatattctgatcgccagcaagagtgtacaagagatcaagcacttgaagcttcagctaaaaacggagtttgaaatgaaggattgggttcggctagtaagatcttaggcatggatataagaagggaaagatagaaaaaactatgtacttgaatcagacgagctacatcaaaaaaatttctaagataccttaaaaatgagtaactctaaaggcagtagtactctgctgttcacacttcaaactaagtgctactcagatgctgaagatgatactagaagaaagagatgtcaagagttccatatgctagttctgtt

SEQ ID NO: 183077 - DNA, 562 bp, Cannabis indica
attcaatctattataacacaagtaaatttatacctggaagtggaacagtaatcaattttggctccaatatagttagtgtgttaaggttgatgttctaaaaataaatatttatggataatatattaaagaatatatgaaatacgaatatattataaataaaaatattaattataaaaatataattaataaatattagaaaattttatagttatatggagagtatgatattagaatgaagtaaaaaaattaaaatcatactatatgaataaaatatgtgagtagggtactgaagtatagaatctttaatgcagaattagcaaatatgatttactaagcattatattagtgacatgtgatttttattcggatcacatatgtagataaaaatttagtaaaaatattgtatataatttgattaaacatgactaggtcaatatgaattaatatctttaatcaacatgcactactaaaaaaacgggaatttctcaactttttaaaacagtcaaataattgtattgtcgtcggtctctatgattgacgcctattcgactgacacaaaact

SEQ ID NO: 183078 - DNA, 647 bp, Cannabis indica
aaagagtagtgaggatccaaatgcttttttcaatcgttagtttcggtttgaagcttggcggactagagactttcggagctcttttgtggttgaccatgcatgaaattttttgtcttacgattgggctcctggtagagtttttaaaaaagtaggcggtactaggctcacactgagcaagtggaacaaggaacagtatggtaacctagacacttgtataggcttattggaacaccaacttggggatatccagaaactgcctactggctttgagatgctgggctagagaggtggatgcgaggagcgccctgaacgaggctttaaaaaggaaggctctctactggcaacagagatcttggacttcttggacaaagggtgacgatacaaaattaagtgatcaattatgttattggtatcaaaagggtatcaaattgtcatggaaataatatgtagataatataagttaatttataatttgttaaggggccaaattataaatatccgagactcattctataatgagcctataaataggtagcggttccaagaatgtattctctcccttcccatcagagaatattttagagaaatagtgtatttttggtaacatcataatctttgtgcaatcccaacaatagattcaagttaat

SEQ ID NO: 183079 - DNA, 650 bp, Cannabis indica
atgttcatttaagaatcctaaaaaatattaggcagagtttctcatatttctataatatttcccaattatctaacaatgcaacaaacaatgcaagtaaatcaggtaacaaggtaaaataatcataaaagtatttaacaatataataattgctatcaatccaaccgcaatacatttatatcgcagaacctactcactactgatgaatatctaacatcttcaaacttctctataatagttttattaatagtaaaaatttattagtcaataatgcacctctagctagcaatcaatgatcaccgatattttgaattgtttttcaataacaatccacaacctacaatattaaatgtaatttaaaaaagtttaaattaaaattaaagtgaaaatagtaaaaagtaactaatacatacataactagtgactacatacttacataactgcatattatttagcattacaattaatttatacttgctaaaatattactaagtcaaaactactatagcattatactttgaaagccattacaatccaatagctaagtatatatatatacactaaaaaattaatcattaataaaaaaaaagactttcattttcattgtaatcattattttaacttacatatttgagacgctaaatactataagt

SEQ ID NO: 183080 - DNA, 537 bp, Cannabis indica
atagtatatggagtaatttcccttaaaattatcactatgtgcacatgtatacacacatgatagtaaaatttcgaaatcaataaaaacatgttacatgtacataaatttatacagtgataatttacacagtattgaacaataaaatttaaaggacacctcaaatttacaagaaaaaatataaaataaaagagaattgccaaaaaaaaaaaagtaagtgctatagtcaatctcctattataatattttagttaatatctatgcccaaaaatacatgtctataatatttttttcaattttttttactatggtggtattcgtaataaattactcgaaattttttaaaaatttacaaaataatattataatataataaatatcgctataaaaaattaaagaaaaattacaacatataattttatgaataaaattaattaaaaaataaatataaaatattgtaattaaaaattaaaaaacaaaacaatgtcaaataaccttaaattaataaaaactacagatcgaaacccaaaaactaatgcc

SEQ ID NO: 183081 - DNA, 859 bp, Cannabis indica
gacaaactaccttcttctttttttcccatgtctcattttttacaattgaactacggtgataatagagatcgagcaatgtcatctttacgatcataagatccatgttttctaaatataatcatttgttgtattatatttttctgggtatatttttacacacatagtttgtaaattttgttttttttttttttttttctcaaatccatacattctcaactattcattattgtattactctatttttctatttttctgttagtttgtttttttttttttgttttcatttgtttattatatgatatactgttgaagttttatttatagtgtgcatatgaggccaagtattgcttgtcatcatattatatttgtaatataaataatttaatgttataacttttattataacgaatgagattgtttaaattttatgtgaaaatttatcataaaagatcattgagtgatgcataatactatactcatgtagtaattaattatgacctaattaacgatgacaacaaaaaagacatcgctaaagactatttcatacacacgaaagaatatgacaatattttgttccctaatttcatttttcttctttcaggtgtatggaaaaaaaatcttcaaaaagaaaaaagtcaaattactgtcttaatttttactgtctttgttaaatactcgaaaagcataacagtggggcgttgatgagtttttaggcaaggtcgagcgatgtcgtccttgcagtcgtaggggatgttttatatgagtagttgatttgttgaatattcttattctgggttttgaaatttattttgtaaagtagtttttagtttttgttctttttgtaatattttagtatgca

SEQ ID NO: 183082 - DNA, 627 bp, Cannabis indica
ccattggctcttttccaggacggaaagtgatttcttcatgaggtgtgtcaacattttctctgttgccagccatgcagaaaattgttttctgaatgtaaggagggttttttctgagattttttcataaaggctcttaatggaagcaccaaactgttaacacagattttcgttaactatatttgagcctaagtcgtgataaacttgcacaggaattaaaagctagtaaagaaaagataagaacacaaaggttcttacgtggttttgcagttaaaattctgcatagtccacgagtcaatcttattagatttctgatacagctctcaggctttttctctaatgattttttttgtccctttttcagtgtaacttgctcctatttataattatataggagggcagttaattacatggttgattgatattgtacaacaattatcccctgaagtcatgagatttgattacacaccacgaaaaataaatgtggttaatatttgaaaattccacagctgtgacatgtctgcttttactgggtcagtgtagacgtgtattaaatacattgtagaccgtatcgttctcggatgtctcgctgggaacgtggcaacaataaccttggtagcgagctatatc

SEQ ID NO: 183083 - DNA, 664 bp, Cannabis indica
atattaatctatagtgacacgcaaaacgtgtgtgggtaaacgtgtcccgacatgctaagcgtgtcactatatcattttacttttttcaactttaattaatatctttccaaaaaaaaactttaattataaatataaatataatcagattttcttttattaaataaataaacaaataaataacatatttttattaaaaaaacctattcatatcttatttttctaactctctctcttccttcataaataaaaaaccctaaattttctacacataaccgcaccttctcttctctcttctcacagcagccgcacttctcctccctcttctcagccagccacattctcttctgagccagccacattctcttctcagccgcacccgcacccgcacctcgtctcttctcagccgcacccgcacccgcacccgcaaccgcactcgcagccgcacccgcaccttctctcttcccagcacctcgtcgccacctttctcctccacagtcagtcgccctctctctctctctcattcacctttcgcgcacgaacctcctcgctgaaggtaaataggttttttcaatttttattgttcgtgcgtctctctctcgctctctctcgcggtgacgacgtttatttttgttgtacagaagatctacaggtgacagtgtctacg

SEQ ID NO: 183084 - DNA, 744 bp, Cannabis indica
tttcatctcgcctcatctcgcctctctccccaaatttcagtcagcctctccatttcctcacctcctcctctgatcaggcccttcaaaactcagcccagcaccgcctgaagttacgtcccaccgcctgaagcgtcgcgcgtcagctcagcccacaccggtctctcctccgcctgaagcttcatcagcataccacagcggcaatttttgaggtataccctcattttgaatatgtatatattgttttatatgtttatataatctgatataaatttgttgttgggaaagtatttatatgtttagataaatttttttgtttaagtgtttgtatttattttagatatatgtttaaatatatatatatatgtatttgagatatatgtatgtgtttttgacaatgtatgtattgttttaagttattgtaattttttttctttttaatatatctgtgaaatataatctgattttttttaaataatatttcgaaaatattatatatagattttaagaaaaagttcagattcattgtttgaatcatatagaaatgaagggtgaaaatattaggaaatagagaaaagaagtggtgggctgttgtgtttgatttttgattgtgaaaatccatgaaaactgtaagaactattttttaatattattatttgttttaagtgtgtttgtatttgttttttttttttttttgtttattttgtattgtaataaatttgtgatttactttgaaaattgtaatgt

SEQ ID NO: 183085 - DNA, 769 bp, Cannabis indica
ggtttcttctttattttaaattcaaagtatttgatgatgattgttgctggaaaatattggaaagatgttggtttgaagctcaagtttagagcttgaagttttggagtttaaggcatgattttaattattgtgcaatctgaaattatggggtttattgttggattttaatgcataaatatgtgttttagaccctataatatttgctagctgctgtaagtggattaattgtgattttggttgtgaaaagcaagcttgagttcatggaactcaagcttggtgctttaatggcactttttgatttttagtgcaattgttgggtttaagttgtggaatatgtttattatgacatatattgatgctctggaaagtttgggaatgtttggggatgatttgagtgagttttgggggtttaaagattgagaaatttcgtgttctctgcccagacaaccggaattccggttggttcatccggaattccggttggagttcatcgggaaatgctgaattttgtttcggccataacttttgactcgggactccgtttgggacgttctttataccgttggaaagctcttttcgagctctatgtgattatctgtatttgaaatgccatgaatttattttatgaatatgaaatcaggggttaaccctatttgtgaaaatcccggattgtgtgactaggattaccggcacctggtcaggagcacccggggattcggaatctctgcctttgcgggacaacaggtaagacagtagttgcacgtagaga

SEQ ID NO: 183086 - DNA, 831 bp, Cannabis indica
ccgagttacagcttctattgttaaaatcctcacataagatacagcaaagttatgaacttggaacaataagcttttttttttgattcaagcgtttatatattacacaatacataacctgggactcgaacccaggacctccaacacacacgcaccctactatggccacttgaactaccctcaatatgtgtttcgagatttttgttttgtttctttttccactatggtgacaaaattcagtctgagagaagaaaggttcacaagattttgttttgggacattgatccataatagaagattttgataattgtgtaaattatgttttggctatgttacattatgtaccgtatatttatttgaatagttttaaagtaaaaattgttttttttattttattttgaggaaaaattaatgataacagagtatattatggcactacctaacatgagtaacacatcctacggaaaaaaaaataaaagaactatgaatatcaatcattaagatcttaaaaacagaaattacaaatgaaagaacatttcaaatgagtagaacgtagattaatttgatgggttctagggaagtgtgctcaccaaaagactatggtagttcaggttttcgtgagggaaagaagtggaacattgctatgatgacaaagaatatttaagctatttcaactaaaaaggatagcttagcttgtgggtttggtggattgatgttgtctaaagaagaatgtttatttttggttagtgactcctaatcccgatgctagtaggtatttcaaaaaattaagtaagctcagagattgtattggcaaacaagctatgcttgatgctt

SEQ ID NO: 183087 - DNA, 634 bp, Cannabis indica
agtggagactactaaactttggaagctttgtagttggggaaattttattaagccgaattaacagaaaccaatgctcgatcaagacgtacctctatacagtttgtttcgttcgtgatttcgttcccatgtatactgtaacccatgagttccatatcaatcaatccgcacctatccaccactcccttgaatcctttgatgagccaattaggatatggtttcccacctttcttatcactttgaccaagcacattgttcatatccccaattaagcaccatggcacatttgaccttttagcaagatcttcaattaaatcccaagtgagttttcttttagacctgttaggctcaccatacacaccagtaaggcgataacttatgttcccaccatacacgatttcagtatctatatgattctggctaaaagacttcaacaagacttcatctttatttctccacagtaaagaaagtcccccactatgcccttgaacatccacattaaacataccctcaaatcccaaagaatttttaattatctcaactttctctttcttacataaagtttcactcagaaaacaaaattgggttcctttggtagaaccatctccttaaggaattgaacattccctggggtccc

SEQ ID NO: 183088 - DNA, 656 bp, Cannabis indica
atttatatatatacactcacagccttaagtgtggattagtgagtatcatcatgacttgaacaaagtataatacatttgtctaaaagcttatttcctctattttctaagtactaagggaagtctctatgaaattgttatattcaaaattcgactgtcacttcagcggatgacacgtgtcaacctgggagaatacgaatcaacaaatataatggtaattatattaaagaatattaaaatggaataactcattaaatgcagaaccgatagagtatacctataactcgttgactgtaaagtcttgagtgagacacaaaagtacaaactattaattcacatattgacgagaaaccatttcgtatatgaagacacgatcataaggacgacatcagtaatgcaaagcgaggcactaacctcactacgcatgaagagacatagacgaggcatgatgtctgttaaaacacacttagcgtataatatacattatacaaactaagtataacagttgtatgaatttgaacacgaatagcaaggcatccatcttgctataggaaggcatactcatggtaccttcactaatcagcttcacacatcttacaatgagatccactactccgtcaagtcaactctctcaaatagaaactgacattcaaatgatg

SEQ ID NO: 183089 - DNA, 562 bp, Cannabis indica
gttaatgcctagcgtcaatttataaccaacgctaatgagggtcttttgtcgtcaattcataatccacactccattttaatagtgtcggttctaaaaaaaaactgacattctaaccgacaggaatgcctatttttctattatagttcccacaaaccaattgttgtttctttattggacacttcttgaagaacttcaccctcaagactaagtaagattatacttaagattgcactgtgaaacctttactttgatggtatattgaactttccatcatcatcttcttcattctttactgcatgtagctttcagatcaatggcttcagcaagtccttcatgcactaagagtgacttttcattttgattctccagagactgaagtcattgtggcctatgaatttatcaacttccaactttacacaagtccattcttgaagctttcttgaattcttgcaccaggttcttgatgatttgagcactgagcccacttgtggtgtagagcactataccaatacaagacatcattcaatcaatgacactacacgagaatgagacaaaaactaaa

SEQ ID NO: 183090 - DNA, 695 bp, Cannabis indica
atgtgatcccacactaaagtttaattttgtgatgagaaaacctaacaattttgaggatgttgagtttgggagagaaataagattattatagatattgttcttgaggagaaattgatgttaaacttagttccaactatcacatttgacactatttagatttccatgcctttcattgatcaagaagtgaatctaaaactttgatatgacaatatcaaacaacttcccattcaagatatggtaaatgtttcaaataatcaaactcagcaacctcaaagacaagtacaattaaaaaaattatgagagaaaggacataaggaaatagtagaatgattgaagatgatccaatatccttttatcatggcatgaaggttcaaactctcaaaattatattcatatcataaataaggagtacaaattgagttgagataataaagttttgtattttttcctattgctataagctgtaaaaccaattggttataaatgaatatttatgaccaagaggatgcaaattcaaatgtagagaaatataagtatgtaaagaattactcataaagcatacattcaccttaaatagactttctttttgtttaaaagtaaagactatttaggtacaagcatgtcactaactctcattatagtttgtaaatgaattattaaagtttctaatttatctaatggtaatattgtatgac

SEQ ID NO: 183091 - DNA, 600 bp, Cannabis indica
atatacttttcttttatataccataatacataatttgttttaacaaataatgatacatgatatatatattaactaaaatataattggaaatagacctccacatcaatatgaaaactcaaaatttccatataacacttttgtttgggattattattattattattattattattattattatttaatattttaaacaatatcgaaagggataaaccgtgaatttatattccattttgttattgtcaatggtcaataagtcaattatcccgtgtctattttacaatattatattcataaacatgacgtagcagtgattctgatgattacgtaagtcttacgtcactttacttggaggcagtaacatgaactttacatctgtaagttgctaattaacaattgattaattaactcttaaaaagatttggacacaatgaaaatgccagagcaattaaatactcaattaaaatgatatgatttaacaaaataacaatattaaattgaaaatgataaatttttagttaaaagataaacacatagaaaagattagccttggccaataaggcaataactattgcttggtcggtgggtgagcgacccaca

SEQ ID NO: 183092 - DNA, 728 bp, Cannabis indica
tcttctaggcatgcaaaccccattatgatttttcctatagcgggttgcagtactacagggtattgatgcggcgcttgaagcccgttttttagtcagagaggaattacagtttccatgaccttgctgccaaatttctacgttcgagcgccctagcgctgaaatccaatattgaggcgctacacctcactttccaattcttcaacattagatggtccaatcgcaccgaacgttttttattttttctcagattatttttcttggtgctctatcaacaaaactttttttaattaattctttttgcacatatttttttcaaattcgctctatttttctctaatgcaaaccttgaaaatattaatagccaaaagtataaaattgtacaaaacacaattaaaactaattaaaaatactttaaaatcctaattaaaattatgactaattaagtcctaacaagttgccacatttaatataaaaaaatacattgactaaaattaggagattttacaaaaaaactgaattttggggcattttacaatttagtcacacaaaattttaacaaaataactgtcaacacctactttttacttttatatgtacacacctaaacacatacgaaaccttcatcttcaaaacgtacacctattcagcaaggattccaccacttaaaattgaaagaccttggcatcctcgttcttcttggtctggaagtagctcgtgtttaaaacggc

SEQ ID NO: 183093 - DNA, 749 bp, Cannabis indica
tgtgcaattagttacgactaaaaatataccaataaggaagagaatagatacttacttgttaaagaactacgcctgtgtaggggagaactctgtatttgggttcgagacgaacgacagaatgaaatctggggacgcctgagattggagattgaatttgaggaaatttgtagaaagtatgtcaacgacaatgagggcatgcaaagtttcagaaaatcaggatggaaatttcttagaaaagattgaactttttgaaaagggaaaaatggtggaaaaatagctcctttgtcgttttatactttgaactcaattaccgtaggattaaggggtagaagatccaacgagtagaaatgggaaagaagtggaaaagattgttaagtaatgcaaatgatgtgcctcaaaaccataaaatcgacaaattcaaaagcatgtatattttcaaattggattatgacggaaatacccacggtaattatttaaaaagcacttttcattgaaaaggacattttaaggggaaattgttatacccaaaattcggctataattaaaaaggtcacacgtgtcaatttcacagaatatgtatcaacaaatataatggtaattatatcattaaatccaaaatggaataactcattaaaatgcataattaatagagtatatttgtaaactcgttgaaatgtatagtattaaagcaaagagaaaggatatacaaaactatcaaattcatgtattgatgagaaatcatctgtctt

SEQ ID NO: 183094 - DNA, 1199 bp, Cannabis indica
aataaaatgaatgccataccgatgaagaaggatttatcagaagttgcaaagtcgttcctgaaagtttttatttttctttttcctttcaaagtatcatttgttttagaagaagtgggatctctttgtttctcatcgtttcgttagatctcttctaaattgctgttggaaatggcctaggttgacaaactgtcaacctgggtgttgggcccaatgtttaggtcaacctaggcgttgggtcccaatttcagcctccaagtcaatctgtttctttctcgaaagtatttgatcccccgatttggatggagatgaataaaatgcttaggataattctttaatattgtgattggaagcaccccaggttgacaatatgtcaacctaagtgtgctcgggccccctggtgcctcaggtgctaaaaagggaaagtgttctgtttctgatttcggtgcctcaaatatgtttgtgacatctcttattctttatatcatttatgcaccctataaattatatcatttatacaccctataaatgatcgaaataagtccccaacaactatatttctattgatacatttaatcacattcaaataaaattaataactcaattaatttttaagaatggtaatatggagaggagttacaaagtttgttattttaatctttcaagaaattgcaactctgatttgtgctcaaactatgtaacctcatattgtatgttactatttaacaaaatcactattttgtcacacttaattatttaatctaaacattacattatataaataatataacattcccccattaaatttaataatatctcatttataacaaataattttgtaacataaaattttatttaatcaaccaaatataatattataaagtaatataatatagataaagttaattgtataaggcgatgataaggcaacctaaaaatatttgaaatacttctatctattttttcttaatttttgtatttttctaattcttttattctactttaaattttctttttaattctctcatttttctattttttattttattttattagagatcattaattaattaattaattttctactttatttgattagagctcattggttttgtcaaaaaaataaagatcattaattaattaaaattaaaacaagaaaaattgtaataactgtttataataactaataattcactttttta

SEQ ID NO: 183095 - DNA, 676 bp, Cannabis indica
atcaagacctctctgtctccattttatgcattctttttatgataggttcttcctttcaaaatctagagctgctctcaaatacaacagtcgtcaattcatctgcaaaatgttgcatacatttaatgattttagtctttttcggggtatgctgatcttgtttatttaattgttgctgtagaatcgtgtccctctgtatgtctccagttaatgacagcttcatgtctggctcactggatcacagcgtcagaatatgggatcttcgtgtaaatgcctgccaggtctgtttcttatattatacatgtatctattcttctttaaattacaaagaaggtgatccatccatacaagagtaggaagaatggatcatcatgcagacaagcactggtttctaaataaagggcatgaacttttgatatgctcatttagagtcgtgcaactttttaatcttgtcttttttttgttattatcctgttgttgctgtagttgcttgtaattttcagggaatcttacggctgcgtggtagccgacggttgcttacgccaacaaggtctggtgtttgccgtggcaatggaaggggtgctataaatgtttgattcacgttcttatgacaaggttgatagctatgtgctttctcttggtcagtttttttatcttttcatctcatggatctaacaaa

SEQ ID NO: 183096 - DNA, 671 bp, Cannabis indica
tttggattttcttttaataaattcaaaacgtaatttgtactgataaattttttaaaaaaattacagttttacaaaattaggtatttatgttgttataaaaatcatttagtttatgctactttaaatttgaaattttgagtaattatattgctatttttttttttttgaagaaaataagtaatctttaaaataagaaaccgaaaccttccggccataataaaaaagttaagagcaaactttaaataataactaacaaaaaaaaaaaaaaaagaaaataaaaaaagaaagaaaaataacttacagaaaaacttagataaaagacgcctgtccttaaaagaacacagcttggcaagcttgtgagccttttcgtttgaagacccttgagcagtcaaagaattctaatatgggcatctcttctgcacttgccaagtatcatgtttgcacttgtcagattaatcgctaactaaacatgttttctagagattcccaaatctcataaggataaactgtctcgactatttctaatttctttatgagcacattgctcatatttgcaagcatataatgtgttgttagataagattcaagtttcattacttttcttccaatttaagtaacacttgtggcagtaatctcaggagagccatgtagtcttcacttattaaaataat

SEQ ID NO: 183097 - DNA, 557 bp, Cannabis indica
cttgtaggagttttaaaatctcagtagctgttagaaggggacatctaattaagtgagatagcatgcagtttgcagtgcctcttccccaaaatttcttgtctaagtccagcaccctttagcatacatctcaccctctcaagtaatgtcctgttcaattctctctgcaatcccattttgttgtggtgttttcaacaacagttttgtgtctagcaatgccctattgtctttgacaaaactttgtgaactgatcagagcaatattccaaccattatctgtccttagtttcttaatcttccttcctgtctgattttcaattagtttcttccagttgacaaaagtttgaaatgcttcatccttagacttgagtagaaaaacccaaacgtcttctagtgtagtcatcaatgatgctcatgaagtagctagcacctcgaattgtcttagtcttgaagtcaccccgagagatcagagtgcacatacgtctagctttgtcccttggttgtgtgtattcctggagttgaatttcactctgctgcacttaccatatacacattcttcac

SEQ ID NO: 183098 - DNA, 641 bp, Cannabis indica
cacgaggataaacattttactatagtattgatgtaattttttttggattatacttgagttagattgtttgggaactccagttcaactttttgagatttgtatttcatgaatctgaaaattgaagttaggacattagttttatgcaaattaaactagatttatgcttgaattttagtttcgtagtagtttttctacattttttttttcatgaattcgaaacagcccctgttttgattgtttttggtcgtcttctcaggtgaagttgccggaattaatggtggttatcaatttggttgaatttttgtttcgattgcgttgggttgctgcgtggttgagcgatgattgtccaagaatcatgaatcctgggttgaaggtgtgtgtgtaagtggtatttatataatttttttttatttgggctgtgtatttatttatttgaccagttaaaagtatttttgtaatattattactttttttagttaaaactgaaaaaaaaactttgtgttaaattttattgtcaaaaaattaaaaagactataaaacccatcactcaataataataccctgtgaaaaaaatctaaaataaaattactaatctaaaaggctataaaacccactagtcaataataataaaaaaaatactt

SEQ ID NO: 183099 - DNA, 891 bp, Cannabis indica
cctcctggagcagcatgaaccttggtagatggccgatcctacaccaaaaacattataacaatatcaatattgaaaacaaaaaacaaaaacacaactcatcacagcaatccaatgcaaaaggacaccataaatatattttgtcaaaataaatagggacatattgttgtattgtcatattgttatcaaaaaaaaaaaaaactattgttgtcatattgtcattatatagtaaagagatttttttcaagaacatatgtgctatttcttaaatatttttagatggacggtttgtttttacagaatataaattcttaaaataattaattataatttgtaaaaatatttaaaatccttatatcactaaaatatatatatagaatataatatatttaaatcatgcaatttttcataattaaccataaaatacaataaaaatcacaaaattgaaacccaaaccttcaatcaattccaagctaatatataaaaacttctgaaaatgaatatgtactgtattttttttcgtcttttttgtttgggttatatgtgtcaatcttattatcagctaaagtaaaacaaagaaaattgtgagaggaaaaatttactgttataaaatttccacagttctggccatcagccctgaaataattgttggtagtgttgccatgaattcctgctgggatttctttgtcaattatctttaggctttgaagcaacaaccacaggattttgaggagatgcattgttttgcgactgtaactgggcctgggttttgagaagtttgggctttttttagcaggctctccacttccaaatagatagcccaaagagctttgtcctccaccagcactgactccccggcccattcttaaccctgccacccatcatattattagt

SEQ ID NO: 183100 - DNA, 915 bp, Cannabis indica
gtttaagtccataaaatgtgaataagacaaaaaaagatttagattacatgggcataactagttacataaatatgataaagacaaaacaaatagaaacacttaaactaaaaaacaaaaaccagaaaaaagctaaatgaatagagataaatattgttgatgaatcatacaactaaaaacacacgtgcctcatagcttgctaagccctctttttcatcacaatgtttgttttccgcatatgaactgtcctgacagtaaagggaaacaagtcacttctaaagtaaagttgagtccctctgattaagagactgacattccaacacacataaagattgaacagaaactctagatcatatgaagtaataagcctccatgcataaaaacatttgatcagaaaaatgaaataaggtacaacttatctgcagtaagatgtatatgcaatctatggtattacctttaccggaaacaacttctttctctgttctccacctcagaccaatctaaaagaaaacatgcaaaagaagcaatcaaattagaagcattgaaccatacacaaaaagtctattgaagtacttttcccttgagtattagaagcaattaattagaagcattgaattatacacaaaaaaaaagacatagtaaaagctagataaataccttgcccggttttgtaatgtgacatatcagctagacagtatctgagatgagtttaaggcaacaatgagttgctctatatccaaggaactgatcatgtgttgaaattcacaataagattataaaacagcccacctatatattcacattaaaaactattcctactgattgcaaaggatactctttaaaaagcttatcatagtatcgcttcaccagcctttgctcccaagacgtatccatgtcatcttcctctgagcgtatgaa

SEQ ID NO: 183101 - DNA, 521 bp, Cannabis indica
aggggagttttatttacatttatgaataagtacactccaatatttaataaagttaagcttaaaattatttttaaaaattaatcttaataatttttttaatttttttttcatattattttgtgttatttcaatagttattttagttatatattttttaaaattttaataaaaaactttcatatagttttatgttataacatttaaaatataatttatttttatttaataagtatattttttaagaatataaattggaagaaaaaaattacaaaaaaactaatataattaaatatattttgtgtaaaaataaaaattattgaatttctgcctacttataaatttttggctgcaaataaaaattcccatatttgaaaaaaatctacagtactccttgggctatttggtagatattctatatatgtatacctagggtcagaactgaccctaggtattggtggggctagggccccgcgtctaggggtccacttattttaggtgcctaaaataaaaaaaaaaaaaaa

SEQ ID NO: 183102 - DNA, 665 bp, Cannabis indica
atttttaaaaataagtgcaaatatttttatatatatataatctgatatggttgaattacacaattgtacttaacgtttttaaaaaagttatttcatagaaaagtgagcaaaaggtttgtattctacagtacttggttgtttcttaagattctgcatattcttatgtgtattgtgtatagttggtttttttttttttgaattcaatattgtgtatattgttgaaactaacacaaatttatagatatatatattcctatattatattaattcaacaattatttttattgttatttgctaattaaatatttgaatacttttgatgagtcataaaccaatagaagaatgtgaatttgatggactggtttttcttttctttttgctttttagttgtacgttatatcccactaaataagaatttgacacatggaaaacaaaagtgactaaacttgaattcatataataatgaaaaataaaagtacaaaaataaataaataacaaaaataaaaacaagtagaagaataataatgatggataagagggtagaagacttactgaatcatcatcctatccgaaacacacctcaatttcttcaattaatattgtttcttttattagttatcatactattactatactatatagtaagtatatgtaaaatctaaaca

SEQ ID NO: 183103 - DNA, 757 bp, Cannabis indica
ggttacgataggatgagggtttgaaggagaatttcagttcatttgatggcaacgatgattcaaaagtaagtatcaattgttttaggattgacaacactgtatatccatttactaagtttttattagtcgaattttgatttgggcttaatactctctgtatcaggtgtctgatgatgaagaagatgatgagagaatttctgacactcgtactgaaagtcaacctgacaaattaaaccacagtttaaatctcaaatcctcagcttcttctaaaccaggtaatgctatttaccatactattattttgtatatctcagcaactatttcgttttacaaattatgtaaaggaaatattatatctatgttatttactagaaccgtttgttttataataaaaaaataaaaggttaaatttataagcgacacaaactctgtttatttttagaagcataagtacatcatgtttgtaaaattgtgattttctttagttttgtcaaataaactttgttttgatattattaaaagaatattaaaagtaattgatactatctgtttctctttaaataaaaaaatttataatttgtgacttatatgtgttttgttgaagacaataacaaagtttgtgttaacgaatttaaagaaaagttaccgtttactaaaattaagtacttaatgtccgccaacaataaatatggagtttatatcacttataaatttgaaactttaaatacttatgtcgctacttactcaaaataaaaat

SEQ ID NO: 183104 - DNA, 544 bp, Cannabis indica
ttattactagccaaagggtactccctttggctagttctagtattttatagggagatctagttgcttagtcttggtggttagttgattctattcagtttgaatagttttctaattaaagttttattctgttttttgatactttttcaggtggaacttcagtattttattgagttgggagcgttgttggaagatgttatagctttattgtctaaatttccgggggcagttttgtcccatggggctcgctctaagattttagcggcctatggttggcaaagcatgctctgcggttagacgatgagctatcctggttcgaggaggttccagcgccggtggcggacgtgggcgtcgtaaattcatgagtgattttaatcactttgtcaaaaaaaaaaaaaaaaaaaaaaaaaaaaaaaattataatataatatagtatgtacacgtatgtatatataatgtgtgtgcatgtttcatgggtaaggattactactagtgcacatttatattaattaaagttaaatatatacttagatatatatatatatat

SEQ ID NO: 183105 - DNA, 380 bp, Cannabis indica
tactttaaaaatatgggtcaggcccagcccaacccgtttataaaatgggaggccggactcatataaaaaaagtgggcttttataaaaacaggctgggtcgcccgaatgtacagctttagcctctttataatagagattctttaaattttttagctaaatgtcataaaaaatgcctccatcaactcctttatatcatagttgtgtaatagagatacactcaaaccaatgtaatttgttcaatatgtagagaatgaataatgcatgctctacacttattttaataatatatgaataatattttatttatgtatgctgtatatatgttcaaaaattattattttaataatgtaaaaataaatataaaattaatttaataatgt

SEQ ID NO: 183106 - DNA, 986 bp, Cannabis indica
agagagagagagagagagtaatgacgaagttagagagagagtggaccggggcgaattggaggtggggtaatgtatgcgtctcaatctgagttcgactctgcttttttttccttctacttctgtacggtttttccctttttctcttctgtaagatttttcttttttttctcattcccacggaaacttcctgtaattccaaaccactttcattgtttttcaaaaaggaaaacaaatgtgttttctttttaaacttttcccttaataaaaatgccaaccgtatgacaacaatgaaagaaacccaatatttatacatacaaaaaaatctcattattttttttttttttttttaacttaccgttatataatataccgttaaaacatttactctaatagtttaaaaaaaccatttagtctaatattatatagtgtatttattggactacatacaataattttttaggcttatctagatctaatttaattaaatattaaatgttaaattttatcctttgatgcgacccaattaatttcaatcattcaatcgatttaatattcattagatcagttctattcattggatgtatttcatgtatagtatatttcgagtttattacctggtattttttagatcggatcggatccatctaatattttagatccagtatttattagattggattggattagtccaatctaaaaaagtaaaattttaatattaattttcatacatacatatatattttaagctaattagcaattttactcccaaattttgacatataccaaatcatgctccctgaacttttttggctgttaaaaattctccctgaattattaagattgttagatttaaagaactcgaacctcgactcggaccctacatcactattattctatttttaaaaaaaaattaaatgatttatcttgtttactttatcagaaaacgtaatcgaaatgctgaaattaactaaattgtccttttgtag

SEQ ID NO: 183107 - DNA, 814 bp, Cannabis indica
aagtatttttttttttttgaaagcaatagaaagtattttcactgtcacaaaaataacttaaatatttaagtagttgaacaatcataataatttaactaatttcgttctgaatacgtgatgaaaatttatatacaacttcaatgtaaagtgccaatctttccattttttgtattgtattggaatattattatgaatttcatgttagtacaatatttgtattatttaatgacctacttttacaatttattttatttttttatactttagtgatttcttttcttttttttttttctcaaattaaaaaaaattaagtgttatttgtaaagtctacattttatctttataatttagataaatatatacttggtagttggtaccctgttttatcgaaatattaatttggtattttatattttaatattagtcatttcataaatgtaattttaaatgggaaatttgattttctatgcttagaaaatcaaaaaatttgatttttaaaccaaaaatttaaaacctaaaaaactattccttttttttcaaaaccccaaaaatacccccctcattattctcaaccatctctctctcttcctcctttctctctcaaagcaatcccacccgaaacccaactaagaaagcaccaaatccaaccgatccacctccggcgttccacccaaaacgccgatcgaccaccacccacggtgaaccaccgcacccacggtagaccgcacccacccacttcctgcgattttctctgaaactttttttttttcctgcgatttgagagagggaagaagacaaaggtccgatggtcgga

SEQ ID NO: 183108 - DNA, 649 bp, Cannabis indica
ccgttaagcaagagcgaaaccagaggaggaatcgcgccacaagctccgattgaagtcttgttctcctctaccagggcaagactgagcagagcacacgccgcgttctgtttcgaggtctctgtacctgtcttgagaacgtagactaaagattttatcgctccggcattggtgattagggctttgttttcttcgtggagagagaggttcagcaaggccgtcacagcatgttcttgagtccacgggtcgctgcaccggaggagaggaatcagagcagggaccgcaccggactcaccaattaaggctctgttgtcggaacgattcttcgctaatagacggagctttgcggcagctgagcgtttcacggcgatcgaagttgattggagaccgtcgacgcagatcttgactgtcggttgtagatcttcaggagatatgctctcaattatctcggttgagaaagtatctctctgtagaaacccttggcatggttcaggctcggctcgggattcctcagtttcgctcttgggcacgttttccggcgacggcaagcacgcgagtctctgcaactcgcccgagatatcgctgctacaggcagaaaaatcactgaaagcctgagaaagctcgagaaattcctcctcagtcgatgtagact

SEQ ID NO: 183109 - DNA, 876 bp, Cannabis indica
actatatcgcgaaacacatcgcgaatatcatcgctaaacatcgcgaaatatcgctaaatatcgcaaatcatcactaaacttcatccctggcctcagatttattctatcattgcaaatacatcgctaaatatcgcaaaaaactggtaaaccagaaggaaaaaatgcagaaaacgagagaggccgtgagagaagatgacggcgaggccttgcgactgaagttctgggtctgtgtgttcgacggtaggggttctaggtcggggttaacgctggagaaagagagagagacatggatgtttggtttttatttgtttaagggtaaaattggatagaaaaatagtgtgagtatattttgcatgatgcaaaatatgctagcatatttttagtagataaattaattttaagcatataatatcaaatttcccaattgatatcagtacaccacactacatgataagttggcttatttgtatgttgtattagaccgtattgtataatattaaattggattatatattatatttttatataatattattaaattttaacttatactaaaatattatatatatttagtgcccataaaagttaataccacatgtagtacataaaaatattgtatgaatacaatttaatataaaactatataatacaatacaatataatatgacgtactaaacaaatcctaactcgttaactttaatttaaaagttaaaagcgcaaaatgtgatatatttgtggttttgatgtgctacatctttcaagatttttaagttggtaatatattgaaaaaactaaatgaatgaaatgaagtgtgagcagtgagctgggttgagaaggatttttgcatatagctagctttgttttaaagaaaaagtt

SEQ ID NO: 183110 - DNA, 538 bp, Cannabis indica
aaagtgttaatatcaatgctcatataaatagaaagattctttaaatttaaaaatagataaatccgtaaaaagtgaaatatacaaaaaaaaaaaaaaaaaaaaaaaaattaaatagatatcaatagaaacagaaatttaattaatagatctgttttgatttgtgtgcaggttattagttacttacttttctagtggtagcgagtttgatatgcaataatggtgttgagtaaatcaaaactggaaattgggtgttcattacgaagggagataattgaagtgatattatgtaaaatgtttaattaatagggttaaaatgcatgagcaaatattagttatatcgaataagccaacaagatatttcatgaatgcacaccacaaacatcaagtatctcctaacctcttcattttctgcgatgatgaccataatggaaaatttcaatcatatttcatctaactccttctctataaattcacacgcctaataagaaggatgatacttttcttcttatttcctttgtgggtagccataatggtgtaa

SEQ ID NO: 183111 - DNA, 980 bp, Cannabis indica
ctctaaaagtacatataaaataagtatagatgatgtgtcctaaaataattggtgggaacaaggaagacacaccaatttaaggacaacaattctctagagatagctcttgtgcagagagtttaagagacctacctaaggccaacttcagtgggtgttgccctgtgtgttgccaaaaaaaaaaaaattagcaggtctcactatatgatgtggcatgaaagaataagaaaaaaaaaaaaaaaaacagtatgctccaaaaagaaaatcggggtactaaatactaatttaattaaaaaaaaaaaattagtataactattatagttacataattattaagtagtcaccaactaattataatttagatcttatttttatttataattactttaagttagaatttaatttttttataacaaattaaaaattattcttaaataataaaaacttctactcatgaagtatgtagccaaactaaatcttggctagactttgtatatgtctatacgtaaaaacgcgtcacatgtttctcatttgcttcctcgatatatacaagtaaagtggctttgtttgtcctttgaggtcattgtgaagtgcactaacatctcacatgtttttgtccaatcacactttatgattgttgttgtgacacttttatgtgtaaatattatcattattagagtacactatagtgaaccaaactagattatgcctccatacaaaattcaatatagattaaacccaagaggataatgtgtattattagttatgtgtgaactaataaatatatatgaaatagtccgacgtgataggagatattttcaatattaacaaattaatcgaaaattggtggtggaagtggaaccttcttagtggcaattgatagtgatttatgtggactcttccgagtgcagcttatcaattccaatttgattaagatatattgataggcttagatgatgatgattcatatatgtgtttttcat

SEQ ID NO: 183112 - DNA, 653 bp, Cannabis indica
gtgagatgcgggtactaactcatcggagttggactacttctcttatgattcgatggatgaccctgcgcagaggcaccttatttaggaatttcttttttttgtaaagaagccaacaaagcctaagctcagtccggagaatacccgtcagagatccgtggtcagacgaagatcaacgcgggcgggtgccaccacggccgtcttctctgtgtgctatcacgtaacgggtgagggaacctcttttttttttactaaaacctggtcaagtaaaatacctctcttcgtcaaagaaggtaacttgttcccatgagcctgtaattgatcaaacctctagcataggttcattcgtagaagccagattattcttcatatgttcttcttttatcgctcaatccgtccctttcattcggaaataaatcgagggtcgcctataactgtccatgtaatgtccctctgatagtcgctgcaggatcacacacaatcatcagaaaaaaagtttttgaacccctcactgaagaaatgatttaaaaagagcctgaaattggccgacaccttcgcgcgcatatgtaacttatgtcaaagtgatgcgccaacgtctgcgaaaagtcaaaactaggtttcaatcaaaattcgacatcacggaaccttcatttgag

SEQ ID NO: 183113 - DNA, 521 bp, Cannabis indica
ttaaaatataaaaaaaattcacaaattgaacctttaaaaaataataacatatctaatataagaaaatagaaaattatctttctatattttctaagtttgtttttttcttttctttttctggatagttaattatctccattaataaagttcttatttttattcagctaaacaaaataaagttctgatttttacattcaaatcccatatttttttttgttttagatcagaaataatacattagaaaaaaaaaaaaacgtaaaagtagatttaggcaagccgtcattttccatgaaagtgtcggtgctgtaattggagaagaaaaaaacaggatttttttttattgatttatttatttgaaaaaagaaaaaagaaaaaagaaaattatgaaactgaaatatctctctttggttgtattattaatctttgtgggtatagaataagctgttacatagttttgtctttgtaaagctttaacctttattctctctcttatttattgggttataagggtcaccttgtgt

SEQ ID NO: 183114 - DNA, 514 bp, Cannabis indica
tgtattatgagtatttccaattttttttttaaatgtacttcaaatattgtcagagacatgattctcattagttaatgagcttgtttagtatataaagcgtggtcggcaaaataataataatcataatgttttagctttaagtttaaaataataattgaatggttagtagtagatcaataataagagtacatgttttagctcaaaacagaaaaagagcagtactagtacatgtcctgtttatgtggtggaatacaaaaactacataattattaaatgatgttttctctttataaattaataaaaccaaaatttaaattgtctatacatcacaaaatacaaatcattcaaaaggtcaatgctataaaataaaatacaatttgacctatggcacaaaagtaaacaaaaggcatgatatatatattctatataaagtgtctatataaccgaattcttggtttatgataaattcatgggtgactttttatttatattaaaaataaaataatttattatt

SEQ ID NO: 183115 - DNA, 569 bp, Cannabis indica
tgtattaacatgtatattattaaataacttaaaatccaaaaatataaacgtcattaaattgatataaaaataaaaataaaaaagttaaagcaacagaaagctcagtcaactctatctgtaggaaacattactcttatccaaaataaatgtttgagatttaattcaaaaaaataataacaataaatgtataatatgtttcatcaacgactttggtgcccttaatcacttctttttaggaggatatatattaataacttatgaaaattttagaggtagttaaactaatgaagggtttagtcaaagacatgtgtgtatacaagaatattatgatgagtttttggtacaattatgtgtgatagttactagagtaatttatattttgacatatataaatttgttatgtgaccctagatagttagtagttacattaataatatgtgtacatcagggccggccctgaaaatatatgggcccaagacggattaaattttggggcccttaaaaatataataaaaaaaataaaaaaaaaagagtgttatgggatttgaacccatgaccttaaacattat

SEQ ID NO: 183116 - DNA, 728 bp, Cannabis indica
agaatacttgtaagagcaataggcgacactacaacaattttatctatttgcagcggatttattaggggtgaatcaaattcgcggctaataatgacaatatgagtggcagagctcaacatctgctgctaatggtgtttctttatttttatttttttataaatttattagtggcgggagtccgccgctattgcccgccgcaaatactattagcggcagaatagtctgctgctaataagtgggcaggaaaatttccgcactttcagttcgaatattattagtggcggaccccgctgctaataataataaataataaaaaataaaaatattaaatgactattagcgacgggacattggcggtggaccctaccgctaatagttctataaatacccccgaccctcttcccctatttttcccatttttggttctctcatcagttctcttccccattttcccccgaccctctcagccattttcccccttttccccacccaccaccaccacgcaccaccgaagtaccaccacacaccaccgaatatcaaccaccaaaacccatttcatgtaaatatttttttttattattttatatctctactagtttatgttattttaaaaaaaaaattagggatatatattgtttttaaattttaaatctatgtatataatgtgtattgatatatagatatataccttatttttatgtatatatattttttgtgtatatatatat

SEQ ID NO: 183117 - DNA, 1071 bp, Cannabis indica
aaagcgagttttgaaaataattaacttcctttaaaagcatgataatatatataggatatttatacctcacctaatttaactttggtttggagaaaagtcatttcatatatgaatttttatttattattcaaaagaaaaaaaatttgagaaaacatagtattcatctacattattaagtgataaataatttcattcatatgtataacgatttcggtgatcatatttgtagtatagcgaatctttggagttcaatcacatccccaaactttaaaaataaaaattatgggatacaatgagataaatacgtaaattatgatttcgactaaagccaataagcaattgaataagatgaaagtccttaatactactcgttgatttcccatatgaaataagaaacgatttcgaatgagattcaaaaatgaagggcaccacccaatcttaattcttgttgtttataaaacccaaggagtacttaattgtaaaaaaaaaaattaagacaaggatcctcaagcaagataaaaccaacgaaaaatgttaaaaggcacttatcatgatgactatatcacttttgtgagctgtatatcgttattagtacaatttaatatcaagtttctcttattatatttcaataaaaatcatagaaattatttactatttatagggtatcactttataatagtattagtcattttagtgtcttataacagtgctcgtaactaatcgactgtacaactgcataaacattacataattagataaaaagaatagtgggatggatgttagttagttagggtgtcatcctatgatcatcatggtgatttgattaaatcttgatctttgttcatgaaattaatcttttatttttcttttttcttcttattgtgtgtgttttcctattattggccaaaaacaagtaagaatttagtaaatgtatgcatcatatagatgaagtcaaatgaattgaaatttagagtgtataagtgattgaattgatttgatgtagtagctaaggttgagtttttgttaaattatggttgtaattaactagtgttgatgtagaaccaaaaaaaa

SEQ ID NO: 183118 - DNA, 786 bp, Cannabis indica
agagtggactggtggtggtggtggtgaatgaactggtggaggtggagaatggactggtggtggtggtggtgagtggactggtggaggtggagattgtaccggtggtggtggtgaatggactggtggaggtggagattgtaccggtgggggaggggaataaactggtggaggtggtggtggggagtacactggaggcgggggagattgaaccgggggaggtggtggtggggagtacactggaggcgggggagattgcactggtggaggtggtggtggggaatacactggaggtgggggagattgaactggtggaggtggtggtggagagtacactggaggtgggggggattgaactggtggaggtggtggtggggaatacactggaggtgggggggattgaactggtggaggtggtggtggagagtacactggaggtgggggggattgaactggtggaggtggggagaatgaactattggtgtgggtggtggccgacttggatcaattggtgaacgtctagtgggatcagggggtggtggagacgagttgtgtactggtggtggtggtggtgaatgggggttgttaacaggtgatccattatggggctcaggtgatggtggtgatggtgagcgaattggtggtggaggagaggaaatgattgtggcggtgggcttctcggtacgccgaattggagatcgtttttgtgggattcaggatggtgtaagggtgtttgtggagggatggaactggcttggaaggtgaaggcccctcacaggtggtgatttc

SEQ ID NO: 183119 - DNA, 682 bp, Cannabis indica
ctcaaatagcaagcaagcaagttctataatttttcaaacaactttccacaagtcacaattagcatacataaactaattcaattactagaatattacctaatatgatttcatgttcttttaaagcacaaaattgaaattagtcaagagtataacatcaccaaacacacgaattttttctcaaaaataaagttttcaaattgtgctatctacctacttttaaattgactcacattaagcaaattaactcacattaaaaaaaaaaagataattttagaactaaaaattaaaaatttaagttcacccccaaactaaagtgacacattgtcctcaatgtgtcatttaaaactaaaggaaagagaacttacttgcgcaccacgtcaatatggtggtggtggcggtggcgggtagaatccacctcttgcatccattagggcccttgtgccaaacgaaaaaaaactatcctccaacgttgcattttttaaagctgtccttaaattgagagtcaccttcatcatttccacatagtagtcttttcatacgtcgtcaaaaagttcgatagtttagacttccctttcttcttgttggtagttacttctagaccattctttacaacttccactcgacaacaagtaggaatttcagttgtggcaaataccttgaaagtttcttcttctttttgaac

SEQ ID NO: 183120 - DNA, 717 bp, Cannabis indica
cttcttcttcctctacttattgttccagtgtgtttgattatgttgttcgtgcattgttctgaagcattttgacattttctcgttcttgtgttctttttgatgtgatcataagtattgcagcggttgttgtgctgttgttctgcgggttgacacataatggatatgtagtgaaatcagtttctttgatcttcaattgcaagtaaaaaaaataggctcggatcattgaatatttttatcgggggtattctttcttttacttggtactggatttgcatggttgttgttgttgggttgcattgcaatgaagagagtagaatatgtacgagctgttcatatttgcaatccttttgtatgaattctccactagcctcataattgacataatttttccttcttcccattgcccattgctcttcaatagaacgggtatagattccataacctgaatttttttgacagtatttcaacaattcaacattttcacaaacagacgacaatcgtaaaacaacactaaaacaactattgacaatgtattgttatttcagtgttccagctatcatttgagtgtccacattatatgtatttccatattttctattaaatttcctgtaataataagaacgactctagaacactatagaattgtttaaaaattttaatttaaattcgtaaattgttcattttttttttcgaaattttaatgttatatttaaaaat

SEQ ID NO: 183121 - DNA, 1007 bp, Cannabis indica
attttttgtaaaaaaatgtagacaaatattatgtggatgaaagaatatataataaaaaaataatattatattttagcaactataaatatgagcatctaccatgggagttgcctattagaatggtcttgtcacttatacaatatggtttaactttcaagacaagtttttaaaatataaaggttgagtgttgccaaaagagatggtcatgtcattttcttttttctttttttttttaaaggaaaaaaatttacttttaccaagaaattttattaatttaatatttaaaatgtgatatatgagaccataatgagcaacttttagagttgtcaaccattagagtactttttgtacaaaaaaaaatgtaccaaatcttatgtagatgagagagaaaaaaaaaaaaaaaaattaaaatgtgttatttttggcaatatgcctcctattggagatgctcgtatttctctataaagtaatttagaataattagcaattttatctcttgaattttcgacaatacttattttgtctgctgaaatatactgcttgttaaaaattttcaacaacaaaactaatcaaaactgcaaagtaaaaacaacgccaaatactatttattttatctccagcagtcgcaaacaattgattgtgatgagcctcactccatggaattatttagcaacatttctttcaatttcagccaactttgatcacttcaacctcttaatgttctcatcatttcaaagaaattcatgtcaagaaaatcagcatcagaatttcaattctaagacctttaattagaatatcagatatttgtttgtgatcatagacctttagacctttagaatttcaatctctttctctgagtttgaatgtgaatggactgggagtagccacatattaaaaaataagaagaaaacaagaaagaaagaatgagatataattatatattttatttttaacatagctaatagctaatgtagtacaaggtttcatttacatggcatgagaggttt

SEQ ID NO: 183122 - DNA, 911 bp, Cannabis indica
ctgccttttttatgggcacattaaccaaatataacaccaaaataattttaattgttaaataccctcttttataatcaaagtatcaaatataacctcacctaacttattaaaattagagtttttaaagagaatataacctataaaactggatataaattaaaaaaaataataaaatgaaggtaaaaattaaaataaaaataaaaagtgagtataaagtgtaatttcttcctttctttgtctgagtccttttggcccataaatccaacatattaaaaccaaagaccaccaaacaacaaaaagatgacattttttaacatgaagagaaagagagagaacaaagaatgagcttccaaagaacccaatactcatgagaagaaaagattcaatctagactatttataccgggtaagttgaaaaataccccttttattaatctatgaatcaagtttacctctaattttatatttatttgaaacatacctctttttagatgtattgtacctaaaatatcctaacataagagagccacatggagagtatcttgaagtgataggggcaaaattggtacaatgtttaaaaaaagaggtaaaaatgatagattttaaaaaagaaggtaaaaataaaagaagacaatataaaaaaaggtataaagtctaatttcctcatttttatacctctagcacagtttatgggcctttatctattgggccagtccagtactcattttggcccataaagtttctgccttttctgagttcttagttttgagatgaagaaaaaaaggagtaagttgaaaaatgtctcttttatttatcaattaatcaaatttacctctaattttatgtttatttgaaatatacctctttttatatgtattgtacccaaaatacccttacataaaagaatcacat

SEQ ID NO: 183123 - DNA, 631 bp, Cannabis indica
gtatatgtcttgtgaaatttgtcatttcaatttctttttttcttctcttaatctctttctaaaaattgaaaaaaaaaaaaattaaaacctaagagcatgtttggtattgttttctgttttttgttttaaaaaattgtttttagaaatgagaacaaaaaatagtttttaaagtttttaaaacacaagtcacgtttggttagtgatttttaaaaacaatattgaccaaaagtgaattggtttttaaaacagaaaacaacattttgttgtttttaaaattcttgttttttgtaactttgttttctgaaaactgtttttaaaaacaaggccaaacaagccaaattgtttttaaaaataattttctgttttaaaaactaaaaacagtttttagttatgatgcaaacatgcactaaaacataaatggctctttttcctcatctttctccttcttctttacagtagctcaataggtacttcacaaagaatctagttatattatttgagatgaaagcttaaccattttttgagttaaaagcttcatcttcttggatctcacacttaagactagcgtttcaaagattcattgaacctaaattggtcagatagggatcgatcaatgtctccaaacccataa

SEQ ID NO: 183124 - DNA, 509 bp, Cannabis indica
aatcaaatatatttctatttctattcttccaaattatatagatagcaacagcatacacatcatttatgattttgtagaaatggacaatgatgattttaccgcctccatcctaagccctccctcaatatccataagggtaaaaaacagccaaggaaacaagccaactcaaactcgactactcctcctcctgccaaaaagacactctttcccttcttactcccattcattgcattgctccttcaacatctcctacaaaaggcacaaaaaagagtattcaaggagcagaccaaaacaactccaaaaggacctttgggtcatctgttcgagctatatatcccttttcatgctaaagtgagtaaagacaggccttctctagcttttgacatcctaactagagttgctcaattcatgtgtaacttgggatcaaaagatggaaattcctccaaactttcttcaattgatccaagggacatcgagaagttgtagtttgttgttggtcgtagaattca

SEQ ID NO: 183125 - DNA, 717 bp, Cannabis indica
cgacaatttgtggagattttatcttcccagcaatcatattacccttcaccactagtatcacaagctcaggacaatgcacaaacaactcatcttaacttgaacactaccggctcagattttttagataatgtgcttgatgaagacaataataattaaattaagttaattttagttatctgtagatttatttaagtttttaattatgtttagatttatttaagtttttaattatgtgtggatgataattattgaatttttatgttggacaattttaaattcttattttattgttaattttagttttaatatttattaataatattgatttttatttattattaatattattgtaaattatatatatttaaaaaaaaatcagattattattattattagaaaatatatatttataaatatatttaatattttttattttttattttaatattattgccggtggggtacccgccgctattaatgtgtcagatatgtaatctgatgcattaaatactggcgagtcccgttgctaatggtccgccagtatttatcattaatagcggcggatgtatcagtccgccgctattaatgattataccgaccaagcattaccgggggaacgaataccagcggaactccgccggtaattcaaataccggcggatttgggaattaataccggtagatttttccacctttatttattggtattgttgtagtg

SEQ ID NO: 183126 - DNA, 901 bp, Cannabis indica
tataatacaattcaacacaatatcatacaatacaatacattacagtacgatgtactaaacaacccctaaaatttgtgtcactatcccctttttcatatatgaaggaaattaaaaagaaaagaaaagaaaagagttcaactattcataaaggactatacaaactcaaatgatctgatttcagaagttcaactcgttaatattatgatactgtattttaatctcttatctttttctgtatacgtacacaaaagggtttggatttggctgaaataaggaacataacctcatacttaatatatgtacacaagaaagaaagaaacaatgttttaaagtggtaaaaggattctttctcaaaaaaaaaaggtcttgtaaaagaattagcattaatggatagattgcatttaaaattgggtgaaactattactcttgtgtggtaacttaggcagttgtagaaaagcaatgcattgcactttgcagagcagagtgtaagccaagaccacctgtctgagaaggtgagcccgtgactgtgacacagagcagagcagtgcactccctggaactgtagctattctcttccttttggcaagccaagccaaacacatgcaaactacttttctttatgttaccttttaatatattaaaaccttcaaaattctaggcttcttaatttccacggtaactctccaatttaaaattgatatgatatgataccaaaaatcaaagttcagtttcagagtcatggtataaatgtatactacatacataaatacataataaaaatacgtgtttctcaatggatggacgagatagtatcgctacaatacaaaatgcaaaaccaatttttttttcatttacctactctctctatctgtagagttttcagagtatgaaactttaaagt

SEQ ID NO: 183127 - DNA, 1130 bp, Cannabis indica
tcatcggtggcagcttcaaattgttgggtagaggcgtggagaacagctttttgggcagcataggttgcagccgcctcttgcaggtcctggatggacacaacttttgaattgtttccaaaaggagcaatttctcctatgcctgccagataaaccataggtaattgggtaataaccaaacccggttgtgtgtcggcgttggttgtttcctcctccgtgacgatgcgtttcttccctgggaattgtcgacgacactctctaagttctgcagcatctccattagcaatagctctatgcaccttcaggagatttcgagtagtgggatcagtacaaagttttttctgcaggacccaatcgtggaaccactttgccagtggcgaggagaaagttgatttttcaggtgcttcattcttcaaccaaacaccatacattgggaaaaaaattactgttggcgtctttgatgacggtcggtgatttgaagcacgtactctgctcatgagtaagtagaccgcatttgaaacacaactttggaagcttctcatatttatactgtatccataaatcatcaattctttgtcttcgtagatagaagcctgaaaatatgggtttgttaaggtctatagtggccctgaaacgtagggaactcatgcccacagcgtcctctataccagttgggagttcataaactggtgacgcttttgaagctaactctttaagttagataaattccagtaaaaggggggattcgatcaatgtatacccagataggggtttttgtcaaacctaacttccatgggagatagccaggcaggccatggcatgataactatcaacgccccacatacaaaccacggccttcgtgccagtacattcagtgcgtcctctcttcgggcaaacgtgaactggatgattccatcctcaagttccttccacttccagcccttgatagcattccaagacagttttaaggaaccttggattgctgcttttccgaatcggtggcggctaataatcttacccagtagcacttggttagcctcctggggttcatcaacctctcccgggttgagagcaaaagtaatgtcgtcatgtgagatttgcacagagtcctcaaagaggttacatacaccggt

SEQ ID NO: 183128 - DNA, 786 bp, Cannabis indica
ctgtgtcaacacagccacactgtcccagaattccaccaacaatgcctctgtttgttcaaattgtaataaatctcaagtttccaattatgagttgtggcacaataggctaggacatccctcagaaaggattgtcaaatctgtacttcaatcatgtaatatccaattcagtaataaaacacctctttcaatatgtactgcatgttgtttaggcaaaaatcacaaattgccatttcctaaagcttcccatactgtctacacagcacccctgcaactggttgttgctgatctatgggggcctgccatacacacttctagtaatggatataaatattacatccaatttattgatgcctactctaggtttacttggatatacatgctcaaacaaaaatcagatgccttgaaaactttcactcaattcaaggctgaatctgaacttcaattaggaaagcctatcaaatgtcttcaaactgattggggaggtgagttcagaccatttactgaccatctcaaacagtttggcatcatgcatagacatccttgcccaaccactcatgaacaaaattgtttagttgaacgcaaacatcgacatgttgtggaaaatggtcttactttacttgcccaagcctcaatgcctatcaagttctgggatgaggcatttcgaacctctgtatacttgtctaatagagtcccctactccctgtgttgctaaaatgtctctccccatagaaaaacttttttctaattctaaccagacttataccaaactaaagacatttggctgtc

SEQ ID NO: 183129 - DNA, 747 bp, Cannabis indica
tatataggactcctataaaaaaaaaataaatgaaggtcaaattgacaattcataatttaagaaaaaataggaatggaaattcttgagtttgtcactctcttcaatctcaaattggtgtgggactcacaaattttattctcgttgctcaaaataattagagaattaaacaagttaatcaaattcattgcttatattctcatttcctaatcccataagtaaacacactaattaattgtaacaaatattagaaaagtatacacatttttgccaaaaaaaagatcttttagattgagtggggctctaggggctcgcattaaaaactggctggatagcagatggattagctcttccattagttatccactcatgaaattcatgagactatctctaatagatagtgtataaataaaaaataaaaataaataattaaaaattagtaataaaataataaataaaaataatatttattataaattaaaatataatctttattatattttgtgctaaatttaacataatttttaatacatactaaatttaaactatattagtatattatacatcaccattaaaattcaatttttttgaacatgagctaaaatttttctatatatgtatatatatttataccattaatggagatactttgatcatagaaggagccacttgttaatataattgactattcatttgttctatatccacgaatcgtggaccacgattgatttacgaggctacgctctgtct

SEQ ID NO: 183130 - DNA, 1003 bp, Cannabis indica
gttataattaccgtgtaacagtacaaaagaaataaaatggaaaaattagtatagggtgtaaatttcccaaacaaaatggaggccaccaatcaaaattgactgttaactaacaaagcctcaaaatcaacgaccaaaccatctaaaactacttcttctattctactacatcaaatctcccatcttccccaattttccagcctacaaatccagaaaactaatctcatctcatacagaaatggggttcttctccttcgcctttgctggcgttggattcatattcatcggtgcatgggaagctttcacctttctttcctcaaacccaaatcaaatctcacttccatcttcacctcttacctcgattcaaaccccctcaccatcttccaaatcaaattacccagataaaactccgtctttttcttcctcctccttatcattcatctccatctccatagtctctttcctctttattataaattccttggtttccttatatgacgcgattgagttacgcgaccgagttggaacggctcttcaattacaggttctagcaattgcttctctcttcttgctctacggcatcatgggtcttatggtaaatttctcttcttcgctcgtcagtttaatcggtcttttcgctttcgtcgaagaatttctattgttttacctccaaagaaaagacccaagtggaattgaaaatcgttactttgatcttttgttagttcctataaccgtatgtctattctccacagttcttgatttgaaatcacccaaatcgatttttcccaaattcgctcgtgggattgggttaattttacagggaatgtggtttttacaaatgggtttttcggttttaacaccaatttaatcactcatggttgtacattacacgaaaagagcagaggaaattacacgatcaagtgtaagggacaccctgattatcacagagctagggctattgcaacacttcaattcaattgtcaccttgctcttgtagtgatcatag

SEQ ID NO: 183131 - DNA, 559 bp, Cannabis indica
taatttatatatttatatatttactaggttgatgttatgtaatacacgtaaaattagtgtgtgttttttttttaattaggttcaactaggtaatgttttttttttttgaataaaagatgattttattaatgcatttcttgctcaattacatcaaagatgttactcggaatggaggaaaccgaataactaggtaatgttaagtgcaatacatatatgtttaatttttttttaattaggtcatgtatttttttttttttttaaattttgtaaataaagtttgagattttgatcttttaagaaattttttttagctattgctacgttggtgtgtcatttgaatgtgattatatatatatatatgtattttaaatttttaattttttttattaggtaacgtaattagatgatgcatatattgcaatttactatattcttaacaaaactcacataactaaatttggatgtgtctgtatataggtttggattcataaatttgattataaagatctttttatttcgcaaactttacgaaaaatataagtgtgtgaatcggtttacc

SEQ ID NO: 183132 - DNA, 597 bp, Cannabis indica
ttatgaagttgatgggacccaagaactccaaactcaagaacacgataaaacagtagcaaatagcacaaacagcagcaataataggagtagaacagtagcaaaacaatggaagatgtgtattgaatgtatgagaaacccaattacaaagtatgggagcccttaggcccctttgatgcaaatagagatttactcaatacattgcatacccaccaatcctccttagtattctatatatactattgtaatcccactcaaacactcctcttaatacaataacccaaatacccttttattttaatatatgctagcacaccacactaatcctaggtcctaacagaagtacttgtgtttctcactctatatctagttatattagtatggttttctttatgtttacttgtcataacaaactcaaatatgcataaccaagctgcatatcttgttggttaaagcaaactccttagttgatataattgagattgttgatgtgatatcttgctcggagaaacatgcagtgaccgatgtttgaaaccctggtagccatttaaagtcaattatccgcttgaccatcaagaacacacttaggggctcgttggt

SEQ ID NO: 183133 - DNA, 520 bp, Cannabis indica
ctctctctctctctctctctctctctctctctctctctctctctctctctctctctctctcttaaagtaatatagctagatatatgtatatatattttattgcatatatagatttcttggatctgacagtttggcaacctcatcatgttcctagctttgatttgatcatttgaaaatataagtataataatagtttggcaagttggcatgttatacttaaacctaatataatggactaccctttaactattcaattatcttagattattagtctgagttgtttttttttttttttgaaaatattaattgattatattccacgagaggaaatgaatgtatatatataaatataatgcaaggaaatgatcataactctttatttttaaattaaaaatatttttcgtctatattttgtcacattaatgtgtggtctaacttggttagtcagtaaacaagtaaataaaatatatggtctactttcttttattgtgaattaattttgaaataaaaccacgtcctt

SEQ ID NO: 183134 - DNA, 526 bp, Cannabis indica
ctaatattaaattgtatcaatagctgtcaattaagtagctactactcatgtatagtgttttttttttccttccttcttcttcctattttagatgacatatttttttattttattattgcttaccttctccagtatcataaagtataaattattgcaagggtctgttaatatctttgcagtttttcattttttttttttggttcataaactcgagtaggtataataaaagacctatgtaccacacatagtccacactctcctgtatatatattatataatcacactcaaacaaccctttttaattcaaagcacataattaaagctaactatataatgatatttattataaattactggctcgtccactaacccagactgaataaagaaataaatgaccccattatataactctttctggtttgcttttaatagcatggttttcatgctttggacactgctataaatataatcctttattttgcatttatttaataataataataataattattttttatctttttgc

SEQ ID NO: 183135 - DNA, 538 bp, Cannabis indica
attacgagtaaaaaattatggaggaaagaaagcttttatttttttttttcttattaatcataacaaatggatttaatatattttattgtgttcataattattatatatattttagatttttttaaaaaaaattcaacaatttcacaaattgacttaattaatataaggtagaataatgactttgattgcatgtatgtcaatgtaaaaattaagtcattaatacccaacatgttattttttgacttttctttttcttgactatatattattttagataaattttttataaacttattagacacaattaaatagggatcaattagatgttaattttgaattaataaatattttattctcatttttttacataatttataatgttaaaaatataaaaatatagtttaaaataataattacttcaatacggatataaaaaaatacttgtaaaattgaatgtttaaaatttaattttgttattctaaattattatttttttttaaaataaattaaacaattataatatgcacaatatgcataa

SEQ ID NO: 183136 - DNA, 641 bp, Cannabis indica
gttttacctttagtagttagtgcttaataaagtagaacaaaagccaaaattagctttagtaaccgttcttaatttcctccaatatgcattccaagagaaggcaagaaaaacctactacgtaccttaaagtactataattaattaattattctcaccaccaccacttacccatcaatattggaataaagaacccacataaaaagtaagctatagctatagctaagataatctttatgactaataccaattatatatttattttttaaaaagtaaaactatgatcaaaaccaacacgttaatccaattttatcctttttggtattggataccaatatgccactgccaagatttgatttgatttaagaaagagcctattaatatatttttaaaaaaataattgagacaaatttgttgctagttgaatatgtataatatatatatatatatatatatatatatacaacatacacagcaatataacatcttattagacaaataaattaatttttagtttactattacgtttatggtagtatgtaattattctatgtttactaatgtagaatagtaaattgtagtataattattctatgttgtcataccgaattaacttagtaataattatgactaacaatatataa

SEQ ID NO: 183137 - DNA, 721 bp, Cannabis indica
acccatcattttctatttttttatttaaaatgttaacttatagagtcacgccaagcgtgttgggacatgtgtattcaatcacgccaagcgtgtcactatatgttaaaaaaattaaattattttaaataaatttaattatgatacagtaacgcgccagacgtgttggtacatgtgtatccagtcacgctaggcgtgtcactatatgttaaaaaaaaaaggcaaatcaaattttttttattagaaggcagaccaatttttaatttatttcactgcaaattttaatttattacagcagatttttaatttattttttttaattttatttatttacgtttggtataaaaggaaaatgatgaaaccctaaagcccatcacttttcatcttctaagtcacgagctctctgctctctattccctcatcggcggcagccttctccagccgttctccagccgtccatgcccaagaaaaatctcgagcttgctttctctttctcgtccctctcccctcgatttatctctctctcgctcgctcctctcgactccaccacaaggagacactttcaacgacttttggccatctccaccccctcgcgacactcctctatttctcccgttctctctcgacagttcaaggtggcgccgaagttattttctttctcgttctgttttgtgtatttctctgtttctctctctctctctttgtctcatttatgcaggtggca

SEQ ID NO: 183138 - DNA, 281 bp, Cannabis indica
gaatttgaagggacctaatttaaaattgtaactttggttattacattttctgacactcttactgtactcttcttttgaatctattagaactctgagacattgatagttatagattagtgaagctcagtataatactttaatgtttggaactcaaattagatgatctgtttgtttattccggttgataattcaaaatgatttttttttcttctttctattccactttagaagatagatttatattgggtaagtttttttttttttttttttagttttttttt

SEQ ID NO: 183139 - DNA, 843 bp, Cannabis indica
gggacacttggagctttggtaatgcgtagtggaggagtgggagaaggttgggagaggttttgatggtgtgttggggagaattggtgaagaaggagagagttgagggtttgagtttgaagattgtgttgatgatttgaggtgatgatatcggactgtggttgggaagctccttgccggagaagatttgtagaatgggcttgaaggccattaagttgttgtgtttgggcttgggcttgggcttttgggttttgatgattgtaaattgagaaatagtgttagtttatcattactttttttttgggtaatagaaaaataagtatttatttttgggtagtgttattatagagtcatttaattaaaggtgtcttttttatattgtatgtcttatagagttatgccattaaaaatagtaagaaattgaaatgttttgtaattgaaatagtatttaaaaaaaaatttattagcaaaataattttttatagtcgcaaaagtgaccataaattagactgtatgtataaacgattattatggtcacaaaatggttatagatttacattatgcaatcattaaagtaaattaaatgaaatcgttttataagttttagtatttaaaatggttagtttgattaatttaaccacttgattttgattttgtttgcaatatatttgagaagcatcattcccaacatcttaaactacacatgtactaatggttatttgtatacgataaataatttagagagatttgctcataagtgttaagtttatgtataccctttcataatgtttaatttgaacctcaattaatatacaatacatgttaatttaacttatcacattatac

SEQ ID NO: 183140 - DNA, 568 bp, Cannabis indica
ttagttacaaggggccttcactaagtgatactattccacccttgctcacacgttttgagaagacaagaagtgtaaatgaaacacatctccctgcattggagatatgatgtaggacatattgggttaagtagaaaggtatccctcatgtaccctttgacataaaggagagagaaagagtatgatttcttggtgcttcgattgtgattgatgtgtgtgagaagatggagaccttgcttggaatctgtacgaagtggagggggacctcgtttgagtttttagtgaaatgaggtgaggcctcagtgatggcccctcgtgaagcaaggtgaggcctcgttgatgtcccctcgtgaagaaaggtgatgtttgttgggatttgtgccctaaaaacagtaattaatgcataatatattagagaatatatgcaatgcaatgcaatgcaatataagataaatgatatggaacattttacaatttatgcatttattagattaaaatatttttctaaatctcagttaacccatattggtagaataggctaacatttcataaaacccaattctacgcctca

SEQ ID NO: 183141 - DNA, 587 bp, Cannabis indica
tttgtataagtgacaacttgttattgcatctctttaaaattaggatttaaaataattaaattggttttttgtttttgtttttttattttaattttaatttgcatcacaatgactttaaattgtaaagtgttataataaagtacactgtgtgctacgaatttcttaagtcgtcgtaaatctcaacaccttgataatggtatcttggcatctctgagtttgagcaaggtgtgatatgctttttctgtctattgcaatctttttgttgagcattgtaaaaaaatatacaacagaaattaatcataacgatagttataacattttttataaaataaatctttttcttatatatgccgtccatacaaatttcataataatataaacatgtcatcggagtctccacgatagaaacgtttccaatatatatatacatatatatatatatttatatttatatatatatatataaataaacagcattcacaacgtcaagcaaacaactatatacatagaaagagtaataagagacccacacaaattaacaagataaagttaggtgtacaagtagattgatatgaactaagggtggt

SEQ ID NO: 183142 - DNA, 632 bp, Cannabis indica
gtcaacaataaccaatctaaaaggataaaaatcaaggaacggctgagtagttactttagtatatctcacttatgatttgaatgaaacgtggggatatccatgtttcataatagtcatatttgaattaattccaaaaaggataactatcaacctatactcctataaatagggatagatttcatgagaaagtggacggtaaaattgagtgtgaattattattattctaattttaaaattgtactctgtatataaaaaagatccctaataataaggactcaaggagtatgtagagtttaactacaaaatcacgtaaaaatatctggagtcattaatttttttattgcttattaatttctgtaaaatatttattattgaaaggctatttaattttaattaacaaaaaactgcgttaataatagtgttcaattatttttattgaccaattactccaaatcattttttttaatgactccccaaataatttctttgattaatataaatgtaatcaatttttttttaatttatataatatatatatatataattgaatttttcaaaaaaaaaatgtttatagaagattgtccaccaaattaattagtctttgactctacgctaacaataaatatagcatt

SEQ ID NO: 183143 - DNA, 624 bp, Cannabis indica
gaaaattttgcaccataaatacttattttatatgctttgttgtaaataaacactcaaatttaaaaaatagcaaacaaaaatagttaagtaaccaatttttcgctatatttgtcactacccttgttcaaaaaaaattctacgtgtcaattcttaattgatctaattcatcagagacctgtgcttttgttacaaactcttactcttcctgagtggaagcgagatgacatcacaatgggttttgtggttggattacctaaaactacaagtttatacgattctctttaggtgattgttgattgctttactaagtcaacactttttatgtcagtgaagataatatatacagttaatcagtatgaagagttgtatattaaagagattattcttctacatggggctccaatgtccattatctcaaacaaagatcctaagtttgcctcaaattaggaaagtatttaaaaaactatgggtactaagttaaaattcagtataacttgccatccaaccaaatggttagtttgaaaggacaactatgattttgaaggacacattacgggcttgtgtaattgatttaaaggttcatggaacaactatttaccattattaaaattcttttaacaacaa

SEQ ID NO: 183144 - DNA, 629 bp, Cannabis indica
atatgtatatacattataatgttttattcttgtaagcctttgtctattaaaatttcttaagaaatactttacaaataatacttacaaatacaattgaaagctttgattacaaatggctttgtctaataatgattataaagcatataagacataaatagttagagaaaatatattgcgggagaaaagatatatagggtaaaaagttgagaaattgaaagaaaaaaattgttatttatgctctctcacgagaagagccttcttaacgaaatgccgaacaagcctgatacaacaatggaagatctccttgctagaacgtcgaacctcacagttcttgacgaagatgggtgggaaatcaatccgaatggagggtctgaagtggcttccttctgtgcgatggggagactctgttcaaatcgtcctctgaatcgtccccttctcaaaaccattctgggaagagtctggggagtttcggacagagaatggggagtggaaatcaagctttccactaagaatccagctttctggttttctctttcgaatcctctcaagatttgaaaagattctagccaaaaacccttggttcctaaataatggatttctaatagtggaaagattcgatggaattccac

SEQ ID NO: 183145 - DNA, 640 bp, Cannabis indica
gctcctttcaagtaacataaaatttactctaatgctacccaatgataaattattggagaagacataaattgactaacaacgctaattgggaatacaatatctagatgagtcacaattagataattcaactttccaaccaatctgcgatatttttcaggatattcaaatggttccccatcacgtgtaagatgcatagctagattcattggatcattacaaggtttttctgtctcatttaacaaatcaagtacatactttctttaagatagaaaaatacattgtttactctaagtaacgtcagcgtccaagaaatacttgagcacccctaaattcttcgtgtgaaactaagtatgaattaaagactaaagggatgagatgcctttagtatcaattctagtaataataaaaccacttttttttttttgtaaaagaatttattttaacgtattaaaataaaaataaaatgcacatatcaaaatatcccatattttatttttcttaattaattatctaattagtaaaataaataaattaatatatatacacacacatatacatacatatacatgaattagggcccagcctttggctgtttatggtggtggcgtcgagtggtggtcgtcgaccaccttggtcgact

SEQ ID NO: 183146 - DNA, 684 bp, Cannabis indica
tttcaatatatagtgtaaaaatttctttaaaatatttacaaaattatttttggcaaaataatttgtgtatataccgatccacactgaataaaattagtggctatattgataattcttaattctttctccttctaaatatgtgggttgttttgtttttgtttgttttttatttttttttattttataggaattttattaatcttttttgtttgtgaacaaaatagaaattttacttgaaatcatcactgagcatatttcagttttctttttcacttttttttttttaaaaaataaaattatatcaaaacgatcatcttaaaaaataggtcacaataatataacttttgagctcaattaactagcaatgtgattgaaatttttttaaaagaaaaattaatacaaaaagagataaatggatatacatttttaaaaatttatcgaaattgctctattaaaaaaaagattatgtagaacataagttaaccacttttaaatatgaactaaccttctttcaaaaaaaaaaaaaatatactttttagtaacttataaaattagttagtatattaaattagtttatgttaaactttgattaatttttttattcttttttatttttgaactacaaattattttttactttttaattgtaaatagtaaaaaaacaaaatttaaaaaatgtttaac

SEQ ID NO: 183147 - DNA, 718 bp, Cannabis indica
tgtaaagtcttcatctcaaaactaataatagaagagtagcgttgagaatcatggggttccatctcaaaactaattggcaatgagtggagtagcccatattcttatatatggctcaattctctatcatttattcaatatgggataatgtccacaatagcctatatatatatatatgcaacttattttaaacatacctttttttatatatatattatacccaaaatacccttacataagggagtcacatggcgagtataatgaagtgacaaggataaaattggtaaagtgtttaaaaaaaagaaagtaaaaatgatagactttaaaaaagaaagtaaaaataaaagaggacaatataaaaagagtataaagtctaatttcccctaaaataaattaggagtctgagttggctgggcctcggtggtgcaggtctggtctaacttacaccaggaccgacgcaactaatttgttttttttaaaaaaaaatatttataggaaaaaataaaaataatgaaaaaaaaatatataataaggtagttaatagctatatgtaattccaatttccaataatgttttagattttcttttaaaaaagttgatgtattaccatttttaattggggtaagagaagtagcatcaggaaggccattagggcaaacttgagccaactcatctcgaatccgagcttgccagtcgggatgcgaagcgagcagcatcaaac

SEQ ID NO: 183148 - DNA, 1114 bp, Cannabis indica
aacattaccttgtattataatgattttttccttcagtttataattattaatatctaaggcatgttatgtattttttaatcaccgtgctaatatttgctaataaaaaaaatgtaatatttaagtaaaaatatgtaagggttttcaaggaggtggctctggagagttggaataaacctttattttccaagggtttaaaatgtatgtatctaggctaaaacattgtttaatgaaatttaatagaaatactattggagatattggtttgaattatcagaaagtcaaggagaattactaagagtgttcatccaatctaatccgcactattttgtttatagtgcatccgatccgcactaagtgcgggtttcatattatggatctaaatagttcaaatccagttcaatctaattcgcaaaagtgcggattggatcggttattttggattggttactttttaatattgcattttttttgaaaggaaaataaaaaatgcaaataacaacaaaataaaaaataaaataataactttattaaaaaatattttttttacataactaacaacaaaataaaataattattgttattttatgtctctaataacaaataacaattttaaaaggagaaaaacagttgtatgtaaaaggatatgcataattttattttaaattatattctccttacatataagaattatataaggaatgaaatgtacatttgatttattaaattttaaaatatttgtatcatatatattagatttttaaattactatttttttacgttaaaatattaattgtatatgtaatttttttaaaaaaaatatataaatatgtttggattggattcgatcggttacttttatatctcaaacaacatccaatcaccataagtgcggattttaaaatttctaatccaatctgcactttgcgaattggattggattggatcgtgcagattagattggattgagtattttatgaacacccctaagaattaccaagaggcaagcacatctgagagacccacattaccaagaagttgagtctgctgtcgttattactttcaacactcagcaatagatatgtaacattctactagctaaggcatgttacaatga

SEQ ID NO: 183149 - DNA, 557 bp, Cannabis indica
tcacttgtatttgatagttttatattggaaatatgctttggaccaaagaaattcctcaccatttatggtagccgaccattgccactctttgggccacaaagatggcagtggttggccaagtggtttctacaccacttggtggccttcctcacttagttttgacatgtatatgatgaaaaattacttttggcaaatgatctccttcccatttagtgtggccaacctctgccactcctttgtgcacaaagatggcatagaacggctagggtaatttcttggtgagaaatagtttctttcacttgtgttacactcctgcgtgttgagggaacatattttgagaagtctcttttggtattttgagagtagagaaaacggtcatcctcttgtggttgtgctccacaaaaagagagagcattgccatcatcatgtggcagtggtcggccatgcattattgaatggctcctcgtgcaattttaactttatgttctagttcaagcctttttatgcctaaataagtcaagtccttgttgggttccttgtcggattgaggtctctag

SEQ ID NO: 183150 - DNA, 820 bp, Cannabis indica
tcgggttatttttaactctttagcatcactcggaacagcgtctgtagcgaattttcgccaataccgacgctaaagccctttaaaaacccgcctttaaagcccaattttatagtagtgtgggttcttagcataagttaccaattaaaattatatttatagaaacactatacatagttttttaaaagttaattagtgtttattccatggtgtgcatttctattttggctttgacaagtttgagtgaggttaattttgtattatattataccccatatcatacataagatgtagaatactattcgaaaaatagtttgatttttgatgcattaatatttttttataatgatttttttttatttagtgaaagaattgcatcacttttttcaatacaaaaaattacatctgatttttatttttattaaggttaacggtaactaatcttttaaataattaatagggagttgtattatcaataattatttaatcaaatcatattaaatatggtctattttaacaattaaaatacataaaatataatttattaaaagaaaaaattataaacatatatgtattgcatgtaacttcaaactagtaatttgaaatgaacaaaaaagtttgaatcaagctagcaggagaagtacaaatttacaatactattcacaattatatttatagggataatttggaaagcaaatgtgaatgacgtggtttcaattttccattagttttccattcaaaataaacaaacacctcttttaagtaagactaacaaccatacttttttccaaaaaaagaaaaataaaagaaaaaaaagtaaaat

SEQ ID NO: 183151 - DNA, 1363 bp, Cannabis indica
cgcagaattttttttcttacatatcataaaagttatcgataaatgaattttatactaattattttttttcgacaatttctctttttttaatatacaatactagcgaacaactacttaaatattcatttttcatcttaatgcgaagtataattttttactatattcatagctgaaaaaaattattttgtggtagttataaaagtatagttataagagttataactttatacacaattaaaaaatttaaggtgttacctaacaaaaaaaaaaaaaaaaaaacgcatgtcttactagttgctaagcaaattaatatatattattaaattaaaaataaataaaaaatggtatgtcaaatcaatattattaaagaagaaataaatacttaaaagaaaaaaaaacaacaaataaattttcatataaaataaataaacaaagtaaacaaagtaaatacaaaaggaagaagttaattaatatttataaattttagtttgacttcttcaaagaaatttcatataataattacttaaaaaactcaatttacatatataaatctaagaacatatatattattctaggagagccatggctcctatattgtgtcaggttcgtgccaatatgttataaccggcaccacaaatggtatcctgccaacaaccaaaacaaatggcacaacatgtgtagtggccacttgaaatgctgaaagttgtgagccatagcagtgggcaccacaagggacgcgcccattggtatttatttttttttataaaaaaattgtaattaaaattaatttatatttatatttaaatattcattaaaaactaataaaaattacaataatcaaaataataaaagcattcaaataattacatacaactactaaattaagtgctcaaataaaaatacttatattgtcacattaaaataactaaaataagtgttcaaatataaaatacttatattatcaaatttattgttcaaatgatacttatattgcgacaaatgacgacattataattccaattgtgtggactcctcctcgtcctcatcatcatcatcgccattctctctagacagttgttgtggaatatgcgatatttgtggatagtaaggttgctgcgacacttctggcatttgcaggtagtacggttgctgcatgtgtggaatttgctgcaatgatgtcatcggtgatgactgctgcatatgagacaccggtggcatatgttgcattgatggcatcgaaggcatctgctacatatgcggtgtttgctacatagaaggcatccgatgcaaatgtgacacatgctgaatatgcgcaatctgctgcatcgaacgcatctggtgcatctgtggcctctgttgctgc

SEQ ID NO: 183152 - DNA, 888 bp, Cannabis indica
ctaataatttttttgaagttgtaaatatgtagtattttgttttttcaaaataataataatttttattaggcaggttagcctaatatacaatcaaacattaagatcctttatgaactggtctcattcgctttaattaggcctttcaaagtcatttaaccaaaccccatccattgatgaaaacaataaaaagtcatatttggtttagatcgaaaaattcgattggttggttctctattggggaagagaagacccataaacagtgggccaaatcacctaattctctattgctctatacaattgagcccaactgatgttattttttgctaccatttgttgactctttagtttgtatatttaatattatttattttaaacataaaagaaaaagaaaaaaagaaaaattaagaaggtcggtttttcacaccaagtcaatatttgagagagtgacaccaaaattaactgctctagaaaatgatatcagcccagaaaaaaaagaagaatgaaaaggtagatttacgaaaagaacaacaaattaacaacaaaatattggatttgatattttctataaagcgttatatgtatgataataacagtttctatacgtttagttcatattgaattgaatacaaacatgttaataataataataacgaaagaaaagactatagtttctatacttttagttcatattgaattgaatacaaacatgttaataataataataataacaaaaaaaaagactatagtttctatacagtatatagccaaaaattacaaagcccaaaaggagaaaaggatcatctttttttttattgatatgatcctcatcaatggctttatcaaaatcccaagaactaaattaactctgtaatgatcaattgtataccc

SEQ ID NO: 183153 - DNA, 603 bp, Cannabis indica
ctttaatatagagaagagataagttaatagcatgcataatgagtttattttacatttttcttttaatgcaataaatagtacttctccacatgtacagtaagttttttaaatttattttattatttatttttgtttattttatatgtggatcatgtccatatatatatattaatattatatatttaaaataaataaatatatattataaaatataacattttagtgatatagagaaaaaactaaaaaaaaaattaggtatatggtataatataaaagtttgaagtataaataaaaaaaaatatagaggttttgataatataattttaaaaaataaaagtaaaaaaactaaacataaatgctcttagcaatactaatgatgtcctcagtgacagacccataatttttgatcagtggggggcttaattattataaaaatatttattatttattttacattaaaattataattattttgtgggggggctttctactattttattgtataattatttgattaaatagaagatatttaatttttttctaacattattttttttattttactggggctatagcccccatactttctttactgcgtccgtc

SEQ ID NO: 183154 - DNA, 511 bp, Cannabis indica
gttaagtttagtttttttttacagtttttaacggtttctaataaaaataacaaacaaaactacataaaagtaacatcaaaataacaacaaaaaataacatacaaataacaaaaaaataaacagcaaattaacaagagtacaatataagaagacagtattttctgtaaataaaatcaaaaaaatcgtaaaaatatttaaaatttcgtgaaaccgtatttttgtaattttttttcttgtttttgtatatttgtgaaataattccaaaaagtaaagcacaaatttaagcccaaatataaaaacaagttgacctatttaagaaatacaagccagcacgagtaaagtacgacacgaaaatactgggcctatgagccatgtcgggcctaccctttaaaaatgttggctcattacgacacaatttatatttttttgtgctacggcaggacacaacctattttttgaaaagtacaaataaatataggttgggccagcatgacacacataaatttactgc

SEQ ID NO: 183155 - DNA, 810 bp, Cannabis indica
agggtgatttttagctaagtacccaactcaattttaaattcaatccataaatataatattaaataggagaaaattttataaaaaattgtagagctagttttcttaaaataaaaaatacaaaaatgaaaaacagagaggaagattcttttaatgaaaaaagaaaatgtcagtgttagttaagttaggcctgaaattaatatgataatacaatgtgattaaaataaataaaaagtaaacggagtatataatatcgagcatgctaagtgctaattaggtagctaaattttttgcagtttataaatattctctttttttactaaaaaaaatatctatatttatagatccaaattttaatgtatacattataatatatatacattaaaaacgaatacaaaataatatatgtcatgtatatgcactttaattccatgtcattgcccccctatctcataataagttgctaaaatgtctatagtctatatttttaatgtgtataatactaatactagtcactacctatatgtccactagttatttatttattttgaaaggaagtgcaggaaataaaatcaaagatattaatggtggaatttgtcttaactgtaaactaattatgtgatttctaaaaaaaataaaactaatattgtgtgaattaaataatagattttctgttcagtggaaaaatgttaaaggccacaaattaattaatattcccattgatcatttattaatatttctaatacgagtattaaattattatatttgctgctgggatctcaatatacaccgtattgcttcatgtataggaaa

SEQ ID NO: 183156 - DNA, 728 bp, Cannabis indica
tttgtttcaacaaatactacttttctaagaaaatgactaagtctgaaaacaaagtagcaaaatagaggagatatttttttcttgattccaaaagtgttctatcatcttattttatataagatggtcccactgcctctgttgtcttgacacaaccgaagaggataattccacttatgttcttagacagaaagtcacggtaccttgtcgtagtgggagggtttcaaggaactcaccctgttatgacttggaagacacttgtgatgaaatccattgttagtttaaacaagtaatggattgtcagaataaggaactaagaagtaaagccaagagaactatggttaaaaccattcatatggagttaccaaaggttttctattacaaggacaagaaaggaaattttttaaaataagtctattcaatggacttaacaaaacttcctgttcctagtattataggtttgagattatctaaacctatggcttgtggtatgcctggtaatttacttactctagtgcaagcaacttactttagtaagatgctggagcatttttctaatggcaatctatagaagcttctcgacttctagatatagattttatttatctaaggaaaagtttcaactattcgaaaaaagataaaggccaatgaaaggcacctcaacatggtgtttgcacttcaaatcaaatcacttgagagagatatgatgatcaagcacatacattctctat

SEQ ID NO: 183157 - DNA, 873 bp, Cannabis indica
accacttcgctcgcaaccttccacatcaacgccaaacctccactgtgtccccgattgtcagccacaaagcaactatcaaaacccaattgggctctagttctctccaaactacccttactacataaagtttcacaaagaaataataaattgtgcttcttttgggacacaaggtccgctaagaattgtctggcccgcgggttcccaagcccacagcaattccaacttatgcaactcatggctctgggggggtctggaaaccagagcccgccaaaaatccattttttggagtccccacaatgtcctgctccatgacatccattacatcattataacctttctcctctgggcccacgataccccccaacccattacctggccttcttctttttgagtcaatcacagtagtaaaagtagagtcgaagaaatccccattttcgtggacattcaaagacacatgttcaccattgacttccaaattctccaacctgctacttcgattctcattaagaggctgataatgagaaatatcatgaccatgattcatgccaaccaatcccccaattacctccgaattcctaggaatcaagataacgttgtgatctgggttactgccgtgatgatcttgatgtgtttccccacgcaccgccgctcttgattggagccattgtgccccaaaggtcacctgtcgcctttgtgtcgaagctctcagttccaagctgtatggtttttcttggagatgtagtggcttcaagaaaatccttggcaaaaacctctccgagtgtccgatgatttcgcaaataaaacaaaaagtgggcaatctttcatatttgaaattcacccagtaccatgatgcatcgtccttgatgattttca

SEQ ID NO: 183158 - DNA, 552 bp, Cannabis indica
gttttagttttttctttagtatgaaatttttattttagcaaaaaaaaaaaaaaaatgaatacaagtattatatatgaacgacgtaatgatcatgctagaaatgtcatttaaaaatgagtggacctaaaaacgacatcacgatgagcttatgaatcgcgtggctctgataccttaacagaaacagaacagtacaaagtacaaacataaaatgaatgaattctcattaagcttcattgataagcaaactagagtttatatacacgagaaaaacatagagaaagcaaagagagaggaggttgttacataactaacttctaactgaatttggacagctcactccagctcactaactaactctaactaacatacactacaccttatcaatctttaatattgaatcacaaatttttgtatgcaaatctttaaatgacccttcaaaaccaaaaaaaaaatctgaataactcagaaaacgattcaaattcgagagggagagagaaaagtctgcgatggagagagagagtacgagaaaaaagatgggaacgggtggtagtg

SEQ ID NO: 183159 - DNA, 499 bp, Cannabis indica
attgaacgtctgtacaagaaaagaattcaagaaaatgtaacaattcaaatacaatcctatgatttttttttactctaaataaaaaatatgatattctattgcctaagaccatgtcataatctatttagaagtaagagtaaaggaatttatattatacatatttatagatttggcctaaaagggcctcatcaaggatcatgctgatactgcatatttatgatattatagcaccatctcccatttatttattagtcaagccattacaacatgtggcacttaagggccaacccatagccatgactagtggacatgtactgacaaggttgattttgctttcctctgaaggttttgtttctctccaaacatgccaataaccaatagctaagcaatcaacaaatgccacaccattctactgtagaatataaataatccgcctagacttttagttctcaatcaatcattctttccaaaaataactcactagcaaactgacacgcct

SEQ ID NO: 183160 - DNA, 532 bp, Cannabis indica
acactcgtttctaaacaaggaaacagaataataagtaaattaactaacttggtttaatattgttttgggcttaggcccaagtcttaagatgaagcccaactgtttcggcccaaatccaggtccagtcatgcacagcacaattatttcataaatactcaaaaatgaaagttaaaacgtatttagggattatttcatatgttattatttttattttttttccttattaattatgttttgtttattttcacttaaatcatttttctctctgtgagggaatcaatcttcacaagcacaagtttctcaacttcatgctgctaagacaattctctattcttttttttgttgagtttttttgttccttttgtagagagtaatcctaaaattgttgtaatgtgaaatagtaatagtaatagcacagcaaatagtgagtatgatatgcactaaagatagaaaacgagatttttattatttgactctcataataaattaattattataattaaaaaaataaaaaatagaacgaaaacaaata

SEQ ID NO: 183161 - DNA, 672 bp, Cannabis indica
actgaaacacctatttaaaaaatgtgtgctataaactaattaaaagtttaaatttattcttaaatatatgaaaatcttctttaatgaaaaagtgttttgatattactaaaaaaatagtgagtaaattattctaaattttaaaaatagacttataagaaattcattttttcagaaaaagttatatacctatcttctctcaaaaaacttttcaattaaaaaaatatatatgttttcttaaaaagagcttgtaaaaaccgagaggtaaatagaccaatgtattattggggaatttttaaattttctttttatttatgacttaaagtttttaattataaaagtaggttagtaaaattttaaaattataaaaatatatttttcagtaacgaaatgattaaaataataataaaaaaaataatcttaccaactataaatttaaaataattaaaaataactaaaaaacaatctcataaaaattataatgcaactataagataataaaaaaaaagaactaattaggatttttgcctttcgaattttgtatatgtatcaaaaatcatacccctcaatttttaaagtcgttaaaaataccccctaaactgttgagattattgcatttaaagacttttgtctaattttagtaaataagtccaacatggatgaaagtttagggta

SEQ ID NO: 183162 - DNA, 916 bp, Cannabis indica
aaataaaaatactcgaaatgaatgaattatatgaacatgaaagaactagaatataatactcttgggataaatcctaacgtgttactttggggtttaaatattggtgaaaaatccagtctttgatctattcttgttatcgtcaactttttttccctagtaatagtactaaggatgtacattttcttatggggacgggttccactggggactcgccttagtggagatttttgtctatatacagaataaagtaggaataagaattattttttgtctaaacgggatggagattttattttatttttaataatattttatattttattagtacattaatacttttttatgaattttagtttcaaaaaaaaaaaactatttttttatgaattttaaattatattttaaataataattaatttattaaataataattaatgtgtacggcacaatttgatatttttatatatttaaatttttattataactttttcttattaagaatttttcattcaatctctactctcattaagaaatttttcgtctcattttttatggaaaataaacggagatagaaataagacaacactctctgttaatttttcgtccatatatgtgcatctctaagtactactttgattcttttactttatggggccgtttggtacgaggtatttaaaataatttaattataggaaatattataaaagagaatataattaaagaaaaatgtgcaaattatatttgactatgtaagataatatgtaatcatattctcgataattgaattatactgttggattgaatacatgaatcttatatattattttaaaaaattaaaataaaaatatttttttattatatttatataatataattatacataaaaataaaataatcatattaaaaaaatatatttatt

SEQ ID NO: 183163 - DNA, 782 bp, Cannabis indica
aaccacttctgaatcactctccacaaagacatagtcatgtttcctgagcctcgccgtgtccaacgcaagatgacacgtggccgcctcaccgatcagagggtcactgaagttaagacaagacgtagcaacccacacaaccgctcctgagtgatccctggccagggccgcaatgcacatagagtctccaccaactttaacatcacagttgattttgatccaatcctccggcggaggcgtccaagtaggcgtaaccacaagaagcaccggggggaacaggtaggaggcataaactgtataacaatggaagatagagttaattacattcacaatagtatcctgagtcgagttatgtaccttatcattgcgggtcttccaaatcatgtccacggtgattgaagcacagagaaatagctttttcgcatcatccccatttaacttaagtttcaaatgaatttaacccaatcccagaccctaccaccagaaccgtttaacgggtataccccccaaggggaggacctccaaatgtgatgtggtaggcaaaattgcaatagaggaagaggtggtcaacccacacaacgggcaagtctcgtcatcaatatggattctcctagccagggtatttctgaccggcagagcattagagaggataatccacccaaaaggattttatgcctttcagaactttagaattccaaagttttttccatagggctggagctaccacacaggtaggggcgtctatcatacgcctgtatcagataatcagacttggtagtgaattt

SEQ ID NO: 183164 - DNA, 645 bp, Cannabis indica
gaacaatttgatatagttttatgaatgtaagcattcccaaaaaaaaaaaaacacacaattggaaaccatttaattagaaactaattagtaataacacaatttatccacagaaataaaatgttggaacttgatcaaatgtgcaataaaaaaaattaaaagaaaaggatagaaaaaaagtgcatcttcaactctgtttttcaatgcataaaagttataaatttcaacctattttcaatcacatggaaaaatattcagatcataaaaagcccatgaaatagacaaagctgttggaaccagcattattacacgaaacaatccaattcctaaacaataaaagtaaaaacagagtgagtgttggtttacatacagagaggtcctcagtaatattggagatctcttccttggcctttttggaaatccaaaaactgccaactttagtcagagctttctccatttttggctggtgtttttctcactccttcaattttctcaaactagagagttttataaagaagaaggagaaaaggaagaagtttctatatttgtttgcacccacataacaactcaccacaatctcttttatctctcaaacacatggatgttgtcttctttcatactgacaactcacgttaatatacacatgat

SEQ ID NO: 183165 - DNA, 1108 bp, Cannabis indica
aattaaagagtaataaaatataaaaattaaaataggaaataaaaagtgtgtatacaatgtaattttttcatttcatatacatataaaataaaagaatcacacgtgtagtatattacttgaaccatattttcagcatattaaattattttaaaattttaaaattttacaagatgtcttaaataactatatttatattatttttcgtcatataccatcatccccctttatttacttctctgaaaagaaaaggttacattataagttatcgcactaataatcatcttattatagttctgtttagtaacaactttttaattatttttttttattaaaatataacaatattatcaaaaaaaataggttctataaaattatttttactttttaatttttaaaatcaaaatctaattatgaaaagaaaaaaaattagctttcaaaatttacttaaacaaattttttttcttaaattataatctatttgtattttctttcattaatattttgaatcccaactctaaccttgatccggacttggcctctgaacccagactcctctcaaactagaacctcagacatggacctgaactccaggcttggacctagacctagacctcaacctagacatggacaccggacttagacccaggccacgaccttagccccaaacccgtacttagaccaaacctaaaccctagatttggactcagacacagacttagaaccagaccccgagcctgagcttagaacctggtccaataccctggacttagaccctgaactcgaacatagaccctaggcccagacccagacccacacttggaatacggacccaaaccccaaaccctaaactcacgcccggactcggaccctagcctctgccccgacctagcccgaccatccccaaactcagacctagacttggaccctgagcccggtccctgcctcaaactcggaccatagactcaaactcctaccccaatcctgaacttagaccctggctctggcctaaccacgaccacgatatttttatttttaaaaaataaaaaatagctataattatttttatttttgtttttaaaatttaattttttttttgtttttgaaaaaa

SEQ ID NO: 183166 - DNA, 895 bp, Cannabis indica
tttctttttcaaaagatcttaaaaaatgtgaatgtagtcactactaggatctaatatttcaaaagcatgagcataaaagtgaaacattttaaagatgagtacatttacccaaaaaaaaagtgggtataaaaacacaacaacttaaaaatattaggtacagaaaatttgcagcacactcccttaaataggtgtgtttcaatagaccacatgtttgtttcagtattcacgagaatttttgaatctattttttttttataatcatgtatattatagttatttaagaattatttgttttttttaaataaataatttacattgtcgaaaataaaagttcaaacaattacttaccacgtgtataaaaaaaataggagttttttcatttttacacttgaaaactaattttttttgcatttttacgaaattctacataaaaactcctattgcaactagcgctgcaacctaaattgcaacaaaaaatcgtatagaaactcctattgcaactagcgctgcaaccactttagaaaccaaaaccgtaaatgtgaaaaaaaaagttaaaaaaatagtatatagggtaatttccccaaaaaaatactacgcaccatatcttaattataatatttgttattttttgtaagagtacatttttgttagttagaatatttgataattttttaaaatttttaaataaactactacactgaaaaacaaatttaaatagtctactacacacaaaaataaaatataatgtttaaattacattttcgttttcagtacattaaaattattattaataaaataaaataaaataattaaatattacaaataaacacatttattaaaaaaaattaaccaatttaattttgaggtgatttcaaaaaaatgtaagtttgaagaa

SEQ ID NO: 183167 - DNA, 800 bp, Cannabis indica
ctttgcccttcttctctttcataatttttctttgttgatttgtagtatacaccatataaaattagctgtgctactccaaacactatgcctaatccatttggtacctgaaattattattatttgttagattcaaaattacttaaatatataaatggggttcacaaaaatgctcttatactagagaagaatgattttaattatgatggtatatatattcattgtagttataactagagccgactctgaaatataatcggtataagaaaataaaattaggcctttatttaaaagaaaatgtagtatttcttaaaatcagtaaaaaaaattgtataattttagtaatgaaattttttttattgggcttctaggttaggtggccctaagcacaaacctagcctacttatgtctccagaactgagtccattataataaacattttgtaaaaattttaaaaatttcaaacaataatttacagtgtttgaaaacaaagtgtttgaacttaaattgaaaattgaaaatttcttatatattatttgtatgtataaaaggaggatgtgattgagtttagagattattacaaggagaaaagggtcaaaacgaatgagagcataagtagaccaaatgagacaattaaggaatgcaccaaatgacagtgaaaatggcataaactccacactttttgttgacatcaccaacttctgcaatatatacaaaataattatacattatataattaattataatatatacaatcatatatatatataaatttatatatcactataataatagcattatat

SEQ ID NO: 183168 - DNA, 592 bp, Cannabis indica
aatataaaatataaaaaaaatttctttttcttcaaaaaattaaaaaattttaaaataatttttttttaaaaaaaaattaaaaaataaaaaaaaaccctaaatcccccatcccattcttcttcttcttcttcttcttcttcttcttcttcttcttcttccctgctaaaaaaaccctattgaatgtccaagtcatattcgaatgtccaactcacaataaagcttgatcttaaagtgtaatgttagggttgacacgtggaggaagaagaacgttaagtttcccaactaacccacgaaaatagcgatcttccctagcatagcggagcaagaatatcaaccctctaagtgatacgctaatgtgaggacactcatctaggaacaaaccttaaagatgacgctcatccctggagaagtggagtaagaccgtttctctagggaaggaccacgtttcgagaggtagtcgttttcctaagataataaataggcccacactgggactgagaaggtgggacggattttcactctctttctctagttttacgactaaacttatcatttctttacgatctgacatactctttctcatttcggtgag

SEQ ID NO: 183169 - DNA, 580 bp, Cannabis indica
atttatctttgttcgattatatgtgcatatatcctaacttgtaacaaaccatggatgcctattattatttttctttatttttgaattctgatacattataccttaaaatcataatattaatttgcaaatcatgtaacatttggatttcttggttcaggtttggagtaatgacaaatacgagagcgtggaacacagggtgatggtaaactcagagaaggaaagattttcaattgcattttttttaaaccctgcacactacactgttgtcaagcccttggatgagctaattgatgagaacaatgcccctaaatttaagtcgtacaattggggcaagtttatgacgcatagaaaagacagtgctttcaccaaacaaaatgttgaaaatatccaaactcatcatttccgcatgcaggagtaaaatatacctatatgctataatttatatttatgtactgtgtatatttgtgtaatatatacagaggtgttgtatatatattgaaaataaattgtcttctgaacacggttcaacatgtatatgggtgggacaagtttaatgatcagttcttacaaaggtgttgtc

SEQ ID NO: 183170 - DNA, 799 bp, Cannabis indica
cctatctcatcccagagacctttgaaaaagccagcaccaaaaccatctagccctgggcttttcgaagagtgaataataaataaagcttctttcacatccttcttagtttaacggacgagttagctgcacttgttgcaagatattcagcttgtttccattatcaaggcaatcatgttccatccttcttgtagcagagctctgcctcccaataaagttacgaaagtgattgaggaaatgatccacaactttatcatactcatcaacaacaattccaccaacactataggaacaaatcctattctctgctattcttgttttcatgattgaggggaaataactagtgttttcatctccaaacctcagccagcacacttttgaattttggtgaaggtagctgatatattgttttcgagcctcctgaaagcagtgtatgaagatttttccccctttacagctacactacagtgaggattattggccagagtcacttgagcattactgtacaactctctagcatctctataaatgctagccacatcttcctgtttggaaacatagcagtttttaagaacaaggttgatcttatacaactgttggtttaagcttttaagatcagtaatattcttcttcaaccaagcggttagcgacattttccttgtaaccatccttgaacatccaatagttgcaaaagcaaaacagtttagagcccctgttactagtctttgagtgtttaatgagacatatttgtgatcagaaagcactccccatctgtaacttgcttcagtgtttggaaataatc

SEQ ID NO: 183171 - DNA, 561 bp, Cannabis indica
acacaagatcttctaccttttgcgttaatattctcaactctatatttttttttttttgcatttagatcatcaactctgttttttgtttttgttttttgcatttaatttcttatcttccgaacattttggagtcgttatatttagatttggtactgttagatgataacacaattgcaactgtttttttaaaaaaattatgtattggcataaacatggtcattagtttatctcagtttggaatttgagttagaactctttatttgtctttatcttgttactattgttcacatctctgtttctatagctatatagtttcagtttagattataagttggtaatattcatgttgcttttttctgttttgttaatgcctaatgcttttaatttttttttccatctgacccctgctgatgcagttagaactctattttccagtgtctcaaaaactagggatatacatgagcaatagaatccggtcttcagataaagatgtgaagagattgtgttctaagtatgcagagcttgagaaagcatgggagaactgaccgcgatggttcgata

SEQ ID NO: 183172 - DNA, 1184 bp, Cannabis indica
tggacaggacttagtaatactacctaaaaatttctttattttctttttgttacaaatcatttcttacaaggagaatataatgtattcatgtgagtcctaatcaattactggaaaaagaattctctcattattttcttttgttgtaaatttttttatctgactattctccttaatgtggttcattgttgtattaactctgtttttattgctgctataggatgcttttgtcttgtgggacacatttggtttcccgttagatccgactcaggtacatggagttcatcattgttttgtggtaaatattttaaggatcagatccttattactttatcctacagtttatggcagaagaaagaggcttacaaatgttgagggttttaataatgccatagatgaggcaatagaaagatcaaggaatgctcaaaataaggtattagttccttctatgtcttctctccaatacatccaattaacataatttttgttttagataagtcactaaatactataacttgaaatttcaagaattttgatggatggagggaagagtaattatttcatcaatgcaaaaagatatgctgaaggtggttatgactcaactgaacctttttgtaatgatatttttgcagcaggtggtgctgtagtacttatggatgctgatgctactacattattgtatcagaggggaattgcagcaacagatgatatcttcaaatttacttgattcaaggttaatgccaatgccactgattattattattctcttatgtatatatatttttatatccgtaggtatttgtctactgttacactaccaacatggttggttttacttttagggcacaagagtaacaaaaatggttgggcagctatccttcattgaaatacttgtggagtttattagaaaaagaaccctcaagaacaaggagtgtgcaacctcagttcttctttagttggcatcaaacaattgataaaaattaaactaaataatattaaattacaaaattttaggattgttgctataacttttgcaatatgtaattaatttatagttagttttaatgatacgtacctagaatataagttttaggtatcatttctagctattaaaatttttggtatttatgtaattagttaatagttaattttattgttatcgatcatacaattgattattaatttta

SEQ ID NO: 183173 - DNA, 773 bp, Cannabis indica
caaacatataaggtaaatactaattacagcccatttcatcttttttttttttattattttttttaagcccaagcccaaaaatctctaagccaacacaatcaatcttcttttatattatcttttctagatattttatctatatttttcttttttaaaaaaataaataaaaaaattattaatattctcccaagataggtttgttagagagatatgtggctaagatgatttttttaatttaaaaagagattattaatatttaaaagattgtttaattttttgggtttaattattgggtttattttttaacgggagatcaaacctaatcgttaaatttaacagaatattctgttaaaccaagaaatgccgttagataggcacttttaatatataaagatatatatatatatatatacatatatattaggtatagtttattaattaggttaggtgatgatatgtattaaggatattacaaaaagtaaaaacagtcagcagcaatggctaagtgttttaagttaaataaatttctctgttagtaattctgtttgttgaagggtattagagattgcttaatcactttaaatatttggatggctttaatttccaagtatgttgtatacatgtatatgattgatatcattcattgatattcatgatataggatttcacactggcatcaatgttgctgaggccatcaccagcaagggcttacatggacgtaacccaagaggggagttgtgatgtaaactcagtgccaagagtgtttataaggc

SEQ ID NO: 183174 - DNA, 550 bp, Cannabis indica
attataaaagaataattagaaataatactgactcgtgaagtatataaattttaactacaaaaccacgtaaaaatttttattgtttattttatttagtcactataattaatattctaattttattgacaaggcttcattatttttaatgaaattttaggttaacaatagtatacatccaattgtaaatgcataaagaatttctctcattattaattaaaattattaattattgtttttttataaattattttatttatttatttttttttacataattacattcgcaattaaataaatatacacactacatgtaattatataaataaaaaatcaaattttaataatattataaaacaagatgatttttttagaaaaatatgttgggcttttgattctggtttttataaaatataagtgggatcttcattggtgttaaccttcttagtgttatttttatttgctatgttttcttttttttttttttttttttatatattatttttattttaatatggtgttgctacaccacctttctattattatggtagta

SEQ ID NO: 183175 - DNA, 509 bp, Cannabis indica
actaattagttttcttttctatgattaataatattttaattagaaggtagtttaattatattattctaagataaccttttaaaaaaaaaaaaaaacgccccgaggggctaataataacaatataatacaatcggtaaagctaatattttgggatgacaagcaatatacgcattgtagcacattaattaaccaatattggagaatttatgaaggcatgggaatattataaatattaaaaattttaagaaaataacaaaaatataacatttctctaataattattttttgagggtaatcatcatactttagagaaaaaatgatatatgaaaggaaaaagaaaatagattccttctatcctttaaactatcctttaaaacttactgtttatcttaaggacatcttaaattaattaataaaccacaacattaatattgccagttacataaaaaaagatgtactttaaaaagctacagaataaaactttattatgagatgtgtttctgtccacc

SEQ ID NO: 183176 - DNA, 636 bp, Cannabis indica
taatttcagtgatctcaattgtggttatgtttatctacctggtggccagtccttcgaaatcaggtgaccggaaagggaagcaagaagaagcgttaatttactaaacacaaaaatctaatggcttcccaattgggcgtcacttgatgcaatgatatggctttctatgccattttatttacaccttttgttagttgatgatatagacttattgagaatagttgttaatgctagagacatccggaatcattgacttgctatcaattttggtagagacattattatatgttttgcctctaatgatattataaggaagtttttatttcatttttttattgatggacttgtaagtgggcttggtgttacaaccattaccatcttgttcaagaagatagaacaaaaatcagagtttttattttgggattttttgagccaatagaaagaaaaattaataataaaaaagccaagtgatgcagacagttggattattattttggatatgaactaatctaattctcatgtgagactctgtcatgttattgaaaaaggaaaaataatattaagaatgtgaatcttcttttaatagccatacgtaaaatccacaaaatcatacaaataaaaattgaagaaagcaacgtt

SEQ ID NO: 183177 - DNA, 514 bp, Cannabis indica
tctggcgaatctgaatagtgatgaatcaatgatagaattaaatgagaaggcaattagggggaaattcgtggcggcgtttccatctataattggtgtaatgaatcaagagagtggtgttaatggataaatttatggcgctaataatttgcctccagccagaaatttaactgataaaagtcaaagggcaaccatttaaataaattttgggaggaaagtggcttcacaaaatgaaggagtattatttatggaatccaaaaggagatgtcctaatggtgaattcaaaattgaagagaatgatgtaactatgggccaagttaagcaagggcctctaaaaaacttgcagtccatgggcttagatgcaagggccactttcaacaatgagtgttctctgctagaactcttatgggcttgggaacccttaggcttttcagttcatattggatttaattatccaaaaaaaaaataccaatattatgtttttgtgtgaaatcttatgtaagcgagatacagtgaa

SEQ ID NO: 183178 - DNA, 565 bp, Cannabis indica
attttactggtttatacagggaaccaatcaaaaatcttaggcataatatgtgggctttgattcgtgatctagcaactgtggaaggaccttgtatcatgggagatgtgaataatgtatgtagtgttgatgataaaagaggagggcataagtatcctcaagctcttattcaaggttttaataatgctcttatcgatggtggtcttcatgatttcaatcttgagggctatccttttacatgggagcgtggaagagggtctgaccgttgggtggaagtgtgtattgatcgtgcaatggttaattaagattggttatcatgtttctttatggctaaattatataaccttgaggtgagcacctctgattattgtcctattcttttaattcttagtcctgctattctttttacctcaaaatgcaattttagatttgaaaatgcttggttaaaggacccaatgtggctccaaattatccaagattgctgggagattcaagagggtcaaattttgaaagaaaaatttagattttgtggtgagaagttagctatttggggttatgagataactag

SEQ ID NO: 183179 - DNA, 992 bp, Cannabis indica
tttttgttaatgttatagggcttctcaatatctacttcggatataaaaaatttgcctatcatatacggcggagatgcaccagctgaaggttttgaaggttcatcatccaggtcattatataagttttctaatcaccaatttcgcaatactcattcatacttaagtataataatattttaatttaataagttgactctggtcaattcaaattgtatgtttttttttttttaaaaaaaaaattgggctctttttttagcagatctagaaatatagtttgcattgtattttttaaaaatgcttgctatatttgtcacttccttcccagttaaaaattactttaaatttactacaaataatagtttgggataaatttttactaaatcccatatgttttatttatctgtcattaattgtatatttaattttgattaaatttatttttgggtcaaatatacaatcgcggtggaagtgttgctagataactatatcaatgttagttcatttattaatataaacgtatacatatatattaattgtactttgtaataaaacagattttgcagaacaggttcgttagacaagaataaggtgatgggtaaaatcgtgttttgtgatgatttaacatctggtggtggacccctactggctaatgcagctggtgctgtgttgtctggccgagaatttggagagacttcaagtccttttcccttgcctacagcatacctcactcgaaaggatggtagccaagcatacatatatataaacctccactaggttggtaatttacattatgcaataaatagattataactaaaacaatacattacattagtaaataaataattaatatataaatgattaattaatgaattatattgcattgcagaacccaactggaacatatccaaaagtactaaacagattaataagatggcacctatggtagcttccttttcgtctaggggtccaagcccaattaatcctaacatcct

SEQ ID NO: 183180 - DNA, 696 bp, Cannabis indica
acttttaccccccttccccccctacccccctccccccaccccccccctaaaccccgtgggatggcaatacatacatttaaataaaatgtgtccaaatttgagttacatatgtggacattcttaaggcaataatgtgattgagaaccattatgaaaaatgattagatgaaaaatagggattttagaccaagggtgataagggtattgaattgtaagcaccagtaatgacagactgcccgttatctggtatcttgatagtagctccaaactgtgaccgcggatatcagtactgatgacttttttggacattttgctctttcttgaatgaaaaccaaatttcaaatctatgctttccaaagacttctccattctaagaatgtcttcttcttcttcttcttgtttttttttccttttaaaaaaaatgtgaaatatggactatatcattgatcgctttgcatttcattctctcccaccataagatcttgaattatatttattttcctttctgttgaatactttcataaacagtcttacatgtgtaggcttgttgtcgttctgcaagagaagacttatgtatacgacattaatagtctagcaatcttggacaccattgacacagttccgaatttaaaaggtgaggcattgatgtgaatttcttattatctatattaccattaacatatcatatgaaaatcac

SEQ ID NO: 183181 - DNA, 862 bp, Cannabis indica
aatctcatttattacgactccgcatcggttggctaaaaatctagttaacagctaccaacacaaacacgaagggaaaccaaactacatgaagtgacaaactcagaacccaaaataaaaatttgccaaagttgcattccaatcgacaaaccccaaaaatctatatacatgcataaacttatgaaactcaaatactcagaaaaactatccaaacaattttaacctccatttcatggtgaagcgtttcttagacatgtccatcccaaagtttaagaaaaaattcacatagcctacttcactaagcaacatgaaaacagtcataaccctagcttgaatgagaaatttttatcctaaacaagaaatgataaaaatttggtgaagaagagacggggtgctgtcgcagaaatttgcctaaagccttcgagtccaatccattagacagttgcaactggtctggaagtcaaaactttcatctggcagggggtatattaggtcaatttgaaggggttcaatgtctgaaaatatactcgcaaaagatttaacaaatgttgggttaaacgctcaccatcttctgatatccactagtgaaggatagtgggagaggaaaagcttgcaaaagaaatttggagtctagtatggaaaatgaaggatatgacaatacgaagtgtggaaaaaagtgaaaaaaaaacgtcgaaaccaatttatactgcaagaggaattaagcattttccaactcaatggtccaaaatctccttctcaaaagtatcattatatccaaacagctggggagttgaaaggattgaaagctattatttgccatgatttgcctcaagcccagcgatcaataaaggaggatcttttcaaa

SEQ ID NO: 183182 - DNA, 808 bp, Cannabis indica
cacttcaagaataggataacaattaggcattaacgatttgggtaaacaacaacaggattctcctccctatcatctcatcttgcttaactttaaattgtgttattaagttttctgaattactttaattcttttaaatcataaatacttttgatttgccaaatagaaatataggtatagtttagtagtaattaatccaattccctgtggttcgacctcacttgtgtgagctactacttgactgcgtatacttgcgtagtgtttataattttcgtaacacttatagacgtgtctgttcgaaccctttcagcacctcatctggtcttcgttatcttgttcatttggctccacaacagcttctgtctgtgtattgtcttctggttccacactatctttcgtttgtggacattcttccaggagcttcgttttgtacaccacttcaatacttatagtgtctttgtttcctgtttttcttgcatcacacggagacacactacctttcttggaggtcaagtgaggatattctaactcattgaaaaaaacattctagcaatccaaacttttggtttacctttcctagaaatgtggattctataccccttggttctcaaggcataacctaagaaggctctcttcacggatcttggttccagcttgtcaatggattggtgtacatatgttgtacaaccaaatgttcttaaatttgttagcttaggagttctgttgtacttcatgtcattaggtttattaagtctattactctattcgagtctcctatttacaggtaggttgcggttgctaaggcttgtct

SEQ ID NO: 183183 - DNA, 837 bp, Cannabis indica
ggttggggaccgagccgaggatagtaaagcacaagcgagagagaagtcctttattgagttccgaattcgggtgtcgctgaaattgaaatctggacgtgaggatttgtcaggaagaagttgatcgattacggctttgacggagatgtttccggtctccggtgtagtatatggggtttccaatattgttttcctgatcggctccgataacctgagaagaaaatgcaaggaaatatgaaaacaacaaacaaagagaaattggagaaaattcagaaaatcagagctttggagagagggagattactgaaagagaaggccctgaaggttgaagatagattccgccattttttccaacacaatctgagttctgagttctttaactcggacgaatcgaattcaggggtttagggaggttcaagttcttgggtcttcttcagtcttcaaaaaagaaaaaacaaaaaagtaaaaattatttaattttttttttcaaaaatacaaactctttttttttacaaaaataaaaaattctaatttacgacataactatctaaatttatcttcattccacgcattatttaaaacaacgtcacattaatcattatattattaattagtcattgaaccattaagataaaattaaatttaaattaaactaatgaataaacttaaaataaaattaatacaattaatataccttaaatttaaattgtaatacaaaattaaatttaaaataacttttaaaatactagaatagaaatacgatcacgagtattgttcgagagagaaagagtggtgactctatcttctccgatcacgggtatcgttcaaagttccatcttc

SEQ ID NO: 183184 - DNA, 602 bp, Cannabis indica
aacacaaaaggcacaacacataaacataaataaactaacccaaaaagcacaacatgacacacgacaagcttaaaaaaactgtacaaaatattagaaaaccaataatttaagaattataataatatttataggaatttttcaattataaataagttaaaataataataaaacttaagtataacattgaatattataatttataattaaaatattaaaaaatataaaactaaaactatattttataaaattatttataaagtgtgatataaaataatttgagtatttataatataagtaaatattcgaattttaataattttaattagttttctatatgtctataaaataatgttaaaaaagaaaaatttgataaaacatgcttatattaggcaataaaataaaataaataacaacctaaatcaaagttaaatcactattgacaatgtaggtcattttttaatatctccataaattacccttatattaaaaaccccacactctctctctttcttctataacataaattttaagcacttatcggaccactatcaaaccatatcgtgcttttttatcaatcatatcgtacaatcatcagaccacct

SEQ ID NO: 183185 - DNA, 641 bp, Cannabis indica
aatatttaattgggggttttacttttatctaatttaattttgtaaatgttttttacttttattttattttaattaggaaaaaacttattgcttttctaccctatcaattagtatgacatggcaattcaacatataatgggtagacggttaggatggacggaacagtaaactgcaaacagaattaaactaaaggaggttttcccaccaaaaacaaagaaaatggggttaagtgttaaacaaatgaaacataagggagtttggctgcaaatttctcttttaaatttgattattttgatttccttatgtctaatttgtaattgtttatttagtataattagtttttgtgatttaaccactactataaaatgctcaatttgcgtcagttaacatgtctcactaaaatgtttaactgagattaaaaatagacagagattttatgctttaaagtgtaactcaagctaaaaaaatatcaatttgcgtcagctgatactccgacgctaaaagaagaacggagaaaaaaaagtgaaaattttaaaaattgtcttttacattttgcttcggtggaaaactgatgccaattgttttgcttcggttaaatacagaggttaaaccatttagcacggttatccaccgaagcaaaa

SEQ ID NO: 183186 - DNA, 1222 bp, Cannabis indica
attcttatttattaattttttttagaaaaataataattacatataatagtagattactttaatttttagttttattttttaaaaaataataattctttccatatataaactttatttatggatggtgattttaaaaagttaatattaaacaatttttatatatataaatatcttatattaattgtggctatctaacgaaaattattggtttaacaattttttaatcttttcttaacggtttaaattaaaatcgttaaatcaattaattaaatatctttttaaatttttaaaaaaaaaatagttttaaatatctaaatataatttaaaactaataacaaaattaaataattattttttatagataactcttaaatttaaattagacgttaatttaattaattaatcagaatttataacaatagcccaggtattcattggttattgtggtagaagctggtagttcataaaaataatggtgggatagggtttcaaagtttacatgattttaatctagctatgttagggaactaagggtggcatcttttaactcattatggtcgcttgttggtcgtatatttcaagtctggtattatcctcgtggatcgtttttgtctacaaaattggagtcgaatcctagttatattgggagaagtattcttgcttctcaagagttattgaaagcttgttccaggtggtgcgttgtttatggttcttctattgagattcagggacagtcgtggctttcgtgtgaatagcagtcccaaattacatattttcatcctaatttagagggggcaaaggtcaatttgaatatggtggaagggggcctgggtgtgagatgataaaattcttgaggatattttcaataattctgactggtggttaattaagagtattgtattgaatgataatcttaggtcggatcattggtattggttcaaagagagttcaagaatttattcgatgaagagtgcttacaagcttctctaggtacttcatggtaggtggtcggaagataataattcgggcctttggagggtattatggtaactcaaaattcctcctaaggttaaagaattactctggaggacatgttcggagtgtttaccacactgacccagttacaaggtcgacatgttgatgtgatcatcatttgtcttggtgtgctaaggtatgaatgaatcaattctctactttttggttgagtgccctttgccaaagc

SEQ ID NO: 183187 - DNA, 609 bp, Cannabis indica
taggtaagggcaaggccaaggctgaggaaccgtgagagcgagccggtgaagattgtacatgtcggggcggttaggcctagagcgaacgatcattgggacagtagtcctttttgtaattagtcgctaggcgacaagtattttgtattagacagtaactttgtaaagctttttggaaatgggatcccacagtcttttgtatgaaatattttataagttcaattaaaaagcaaaaattttaattaatcacgatttccataaacctcgttgattagcaacgagctgcacagtacgtttaaaaatcacgtaatacgcctatgctagttagggtgttacaatttgtaaaccacccaatatattcatttggcggtttagattttcattgtattatttagggttgtatttgttgtcggttaatttattcattttggttttggtcagtttattctggttgatcggttggtaaatttttttaaatatttctagtctcactagtaattattaataataaaaataaaattaacaaagttaataaaattaatatctatagtccctctaattcatatctcatgcagtcgttacatattaatttatggaattattacatagaaa

SEQ ID NO: 183188 - DNA, 475 bp, Cannabis indica
ataatattaatttaataaaataaatttagagtattaaataataattttttaacatagtggatagaagtactattcattatttaaaaaaaaaaattaactaaaaagacactaatatacataattaatttaataactattatataaaatattatcactaactatttactaaatattgacaatacttaaaaaaaaaaataataaaaatacattgatgtatgccatattttaatcattctcttttgtctattagttttcttatatgtgaaaatagtatataaattaatgatagtggaatgttatccatattaactactttactaattaacttctaaagatcagaacatttaagttgagttttgggtggactaacttgactaagaaaagttctatttgtggaataattaatatggctacttaaccatgcaattagagttatatgagcatattttatatttataaattggattgtgttaat

SEQ ID NO: 183189 - DNA, 516 bp, Cannabis indica
ataaaacatataactatgtaaaaattacaactttaaaagggaaaaaaaattcttcccttaagaaactaaaaataaaaaaacaagaaatgagactcacaagttattggcatggtgtatatctgcttcaagagctttcaaagactctctgtaagaagatttggtagcctgattttgccacatatgttccccctttatgggaaaaaatatatatatttcttcaacaatagacaaaagcccagaaagagaatgagataaaaaagattaatcctttcttagttttttctttcttttttgtttagagagaatgaagagagttttattttgaagtggggttctcaaaagagaggaaggaaagatataaagagggagagagagaggcagaggcaaaggttgctttgtgttcaaactactgtaatttgaagaaaagaaagggataccttcacattctcatgttgtgttatcttttttcttctctcaactcaaactcaactcaactgctctttttttgggactttc

SEQ ID NO: 183190 - DNA, 704 bp, Cannabis indica
gtaagctttgctcaaatccgtcttaattgccataacacctcttttacccttcttgttcttcatagcgtgtatcacctcctgagccaagaatgaacattctgctatccaccggcctgggataaaggccgattgatgtggggatatcagcctgtccaggattttcttcaatctatcagtgagaatgcgggagataatcttgtacccaaaattgcacagacttatcggacagaatcggtcgaaggagtttgcgttatcgtgcttaggaatcaagcaaatgaaagtgtggtttagagtcagagggagtatgccactagagaagaattcttgaaccattttacagacttggtcaccaaccgtgtgccagtattttcgaaagaaaattcctgggaaaccatcgggtccagggaactttagtggatgcattctgaacaccacattcttgatctcttcttcgctcgggatgctacaaattgcttcattttcctccatgtaacctggtctgagaataaggactcaaactcatcaccaaggctcgggtctgtagtctgatacagatttttgaaatttgagaggaagtaatctccaatctgctgtcgctgttttagccataaacccggagaagcttcgatcaactgatcgatttcgtcttcgtctgataaacgttgaagcatgaaagaattccgtgttgttatctccaaatttca

SEQ ID NO: 183191 - DNA, 796 bp, Cannabis indica
ttattttaggttgattagaatttcttttattgaactttaacatggtttttaaattttttagactgttaaaaatttatctaaactattgaaattattaaattattaaattattaaattatatgacttacattagcatttactaaatgtatttataagtattttgaaagttagaagtaaataggtaaaataatgggtaagtcggctaggcttgtgtttaaagtctatattttttgagggctcaaaataaaaaataaaaaaaaattattagtgtaaacaacaaatattcacagcttcccacaatattttttttaatattatttaatatatattttggagggtcttaaaatctaatttaccttaagctcatatattctcaggaccgactctataatatactctctaaaaggttaaggttatttttgttagattctctatctgtttcaatattcagaagaactttgtatttcttaaaaatagtacacacgtgactattttttttattactcgtggtaattaattgtttgaactttaatagtaattcataataattattataattttataaaataatataaattaacagaatatattgtgtgtgttatttttagtagtaatatatccatttttagtatttgtgattttcaaaaaaataaaattagtatctgtacatttataatacttatttggtatgatattatctgttttgggtcgttaagttcttacgtattttattttttggggttaaccttccctaaaaagacgtcatactaaatggtaataggtagacaaactcttg

SEQ ID NO: 183192 - DNA, 640 bp, Cannabis indica
gtttatctgttcaagaaaatgatccaacggccatgatacattctctctttattgatttgcagacactgaataactccggttcttgggtccactattgtgtaggccaagttgacaatcggagaactctttaaattcttgacatgggaaattggaccaccttcaatttttatagtcactctcgtcgcacacacagaatacgtgacttactaatggttggcctagactttgagagggtgagggtctaagatgaagcctaagcctgctaccgatttcagggctaagaaagatctacgctcatgcctcttcaactaggttccaaaaaataagaaaaattgtgcttctacatttattttaaattataattttatcttatttttacattaatatatgtgtatttttttttaaaaggttaaaatagaaaaggtaataaaagttacacaataggtgggggaattttttccattcaagaaagtttattgtctatcctaaaggcatgcttagccaatttatgagcctcaacattaaagttgtggctaacatgagagagatgctccaagaaaactaaacaataggactttaatatcaaaaaagataaccattcacttcattatacactatctgacccttcaaagttgagacc

SEQ ID NO: 183193 - DNA, 677 bp, Cannabis indica
aagtaaaagaaaaaaaaagaattgtcacaaaagtgataacaccatgtcaaattgtaactttataaaacttaaaatataagaaagaaaatgatatgattataccctgagatgtcacacgtgataaaaatggaacaaaaaaaaattactaaaaaatacagtatatcggcattgaaaagagtagtaaaaatgtaaattactgtgcaacaataaaattgaaaaaaacagtatgtggtgtaaatttctcatgaaattttttattttttattttgggtcctagccacggccctagcccgcctatgcctagtaccagggccgaccctgagcataggcaggctaggcctgtgcctagggcccacctagctcaggggcccaaaaaaaatttgtccctttttaaaattacacattttttatcaatattgaaaaatagcacattttttttccaaatgagggcccaaaaatatttttttacctttggcccactaaattttaagggccggcactggcctagtatcgaccccgagagcattgctatagggcactagtagtgtccatcactttttattatgtatagcatcctaagattaaattgcgatattctctaaaagttattttattaagttatatgggattccacatttaattatactaataataatatgacactgaaaaataatact

SEQ ID NO: 183194 - DNA, 558 bp, Cannabis indica
caaaatgatgggcatgatacctaatccattagacgaagagttttacaggaataagttgtctgtagagttgtatctccatgcaaggaaaaaacaagtggaaggttacttttcaaatttggaatcggattaagttgatttttttttttttttacagaagacttaaaatcaattctttttttattttttcctttttttcataggcttggaataatgtatttttttgatagatttgtgatattttttagttgttggtgtttttggatgaactaccatatttatgtttatattgagatgcaattaactagttttactgtttcttttttgcttatatattatggtgtacttatgtatagatacctaattttcttactttcaaactctagtaaccaaatattaagtatatagaattcaacaaatgatgttcttatagtgctacatttattttaaataaattattacaaagattaataaaatattattttattttttaaatgttttgggttaaggaaagaggatacatagttaactatctgcaaatttaaaaatactaatataatt

SEQ ID NO: 183195 - DNA, 653 bp, Cannabis indica
gtattatatatgccccccctgtatatagatgacatacaatatgtgtatttattctttgtttagatatacatatttttgactttttctcgtagtttccatccaaactttcacaattaacactgtttctagtcttaattggattcagttataatatatggaaaatgtacggccacttatatgtttttatttagtaaataaaccaagcatttagtaatttacaaacaaggtctatcaatgttaataaagtataaatatattacagattacttgaacatatatacattatatattcatatatacagagagaatcataaaagaaaattaataagtttacgaggaaatcttcaaagatttacacacacttattttaaaagtatagaattattttataaattgcaccatggccggcaccaacctaataagtagacattttcaataccttaataatatgatggagttaatttattagcagagaacatatatactacgtaacattaattaattatttaattaatatgtacaaatatatattatataataatgtgaaaaatgagacaaaaatccaaggaaaaacaactgttttttttttaattctcaaatgtttatgagggaggtgctcgatctttatagtttataccgtaaaaactgtgtga

SEQ ID NO: 183196 - DNA, 986 bp, Cannabis indica
ttgggtttgaggagagggcattttggggttaccattaaaagattagcatagttacaaaatttttaagatgatggtataattaaacaccattagtcatttttaagcataaaatgtcaaatttcccttttaaaaacttactttttttttttttgattgttggcacattgattgattacaatcccacttttttcagtatgacaatgagcaatgtagcttttaaaacttctcacaattttttttggagaaattataattactttacaatatcgaaaatataaaataaattgtttttagtttattttatatgattatgaaataattttttttaagttttatttttaacactataaattattcaaaaattaatgaaaactagtgggaggtcctaaatagtaagactgtagggttcaacttatgattagagccagtagatttttcattgtccccatcatagatatgattcctggtgcctctgttactggcactgtatctctggtgattcaccatagcattctaggtcttctattttgactaaccttttggacgggcttgtaatatttcacacccacttgtggttttcaaattggtggcgaaccgagtctaagaagtgtaaatatatgcgtgttgttttggcccgatcgatattttgaaacgtttgtaaaaatatagatcgtgttgtgctatgtcaataatttcataaaataattttgtgttttcatatcattctttactcgagccagtttgttttttggggtatttacataaacatgggaaaaataaagctagtttagataaaagtggtaagaaaatttaataggaaaaaatatggtatttaaaataaaaatttacatatataagattgaattaccataaaaaatattaaaaattcccttcatatttctttttttaaaaaaaagtcaaaatgaaactacagtgatcgccggagttatcactggtgctggaaaaggcgtcgggagtttgttgtt

SEQ ID NO: 183197 - DNA, 610 bp, Cannabis indica
aaagactattaccgttatttttagagattaagtactaatccacttcaaaataaatttattttttaaagacttttgcctcaaatttctaaaataaataaataaaatattggaggtacttttgacaatttgaatatgaattggcgctacaaataaataagcttaagtacatttattgggtacataacattgtcaactttactttaggacatttaggaaatgactaaaatgtctccttttcccggatttactaccaccaaaccaacataggcatttcgtacttcgttggtataaacgtactttaagtaacaaatcagtcatttcacatacgaatagatttacaaatattgcatttgaagttaaacgctctcaactccacaccctgactctactttccccaccaaagaagaagaaaagaaaatcaccagaagatcatatcattccttgtcagttttttttgtacagaaatggtgagttgggtaatctctgtatctatcctcatcgatctctttctttgcttttcaaatcttgttctaagctggatctatggttttttttttctcctcttcctttgagatggaagatccaatttcgtacatctaaacagataggg

SEQ ID NO: 183198 - DNA, 547 bp, Cannabis indica
aatggaggataagcacatggttattcgaaccattagctatgatcaatggagacactttcattccgttgggcatatttgatcctaacaaattttgataatacatttgaatagcttgttggattctctcttagtatcaatccacattcctcccttatcccttatggaattaattctactttgagctctttgggttctcaatgatgtatgaaaaaagagaaattttcatcaccatatttaatccaatttatttttgctttttgagctaaaaactacacagtaatgctataacatgatgatgtcttataatatttttttgatagatgatgtcgtataatgttattagtgcacataattgaatattagctcctacatatttaattttataattgttataaaaaattagttatttgtggtgatgttggcacaaatgcatctctaatagtagataaaaattgtactttaacataaaaattaattttatgatatatttatattaatttttattattatataaacttcaatgtataattgtaaaatttgatacaaa

SEQ ID NO: 183199 - DNA, 530 bp, Cannabis indica
cttgatttctttattttatgtcctttttgtttctggtttttcatatactctgttcatccctatttttctctaattacagtttgcacttattaaatcttatcattattaattgtttgattgtttaaaattttgataatttaattttgtactgttttaattgtaattttccaacaaaatttttatttttttcattaattatttagtatactagaaaacaaaatgtatattacattattactgaattactgtttggtaactttagatactatcatctcaaaagataatagactaattaaatacaagctgataaggataataatactataacatactcaattacaaacaccataaattaatggctacttagatcatctctagagatataaaagttgtgttatctttgacacaaaaaagtaattttgtgataaatttacatcaaattttaacattatacttcaatgtactattgtaaaaatttgatataaaatttaacatctaattaatgttttattaaaaaaataaaaactaat

SEQ ID NO: 183200 - DNA, 737 bp, Cannabis indica
aattgtgtcttgtgtaactatgtccacgtagacaaattttatgtacacgtgaatagcccaatatgacaagtaactgccaaaaatagatagaattagctaatgctaacaaaataccaattttagaggttttgctatcaaaatttaaattttagaaattaattgctaacaaaataaaaatattaagagtaatgtcgcaatttactattttttattaaatacatatttatgcatgtataatttgtctctaactcttgaattacatctaattagtgttacaatagtgttaaatataatataattgattaggagatatttgtaataatttttatactttttgaaaaaaaaattaaaaaaatatatacgggacaaaattataaaagaatcatagttcggatgatataaatcttattttgaagtaatgttttccactcttctaccataattatttattttaagaaaacaaagaattagagaaattttcacaagaaaattttaattagtgaatataatcagttttgttttgtagaatttcttcaaataaatacgtaactgattgtttttattcaatcattatcttttagaacatgtgaaaaagaagatggaaacaaattatcaaatcagagactactttgtttcattcaataggaaaatgaagagaaaggaggagagacaaagtgagaacatataattgaaaagaaagaaaaaaagttgaaacgtataacatatttaggcgttac

SEQ ID NO: 183201 - DNA, 742 bp, Cannabis indica
ttacctccaaccaaacgccgcctcatatttggcaacaggatgaagataaacgtttattattctttatggttttctatgtggacaagggacttaatttcttgcacctttggatctttccaaatagttgacatagcactttgacttcttttcttaaattaaaatgcatttcttttttctttttgttgtatgtagcttcctagaaactggttgcatttgcatttcttgcgtgcaatcgggacagcaatgtccatgagagcaggcatagcagctgatgcagcagcagctctacttttccgcatcctctcacagcctgcactgcttttccctcctataaggcaagttgagggagttgaagttcaacacgatccaatgggtggttatatttcgtcttacagaaagcaggtagctgtgatgattcatcagttcttcatctttttgtcgttgtgcgtgtattaacttattttgtccagaacgaaattaatacatatctgtctcgatcctgaaaatttctcaatgctgcattaaccagatagaggtgccggctgctgttgcaacaatgaagctactgctcaaggtattgcatcgatgctttgtgctcatggccccgatgttgaatggagaatttgtacgatatgggaagctgcttacggcttgattcctttgagttcctctgcggttgatcttcccgaaatcattgttgccactccattgcaacctcctgttttgtcgtggaatctatcat

SEQ ID NO: 183202 - DNA, 544 bp, Cannabis indica
tattcttctctttaagttttttttaaaggaaggttttcaattccttaaaatacatatgaatattgttttaaaataagatatttaaatacatataaatacaatgttacctaagaacgaggtaaatttgtccattatttttttttcaagatttcatatatatacaatatattaaatttcaatgcccaagttcacattaatatacccacgttataatacatttacttaccaatgtaactagattatataatttacatcagtagatagctattgttggcttagctatatatatattttttgttatttttttaattaagtagttaaactaagtataaaaatttaaatttctcttttattattcgtgattagataaaaatttgatgattttaatatttttaaaattaatatttatagttaaatttttttagtaataattcatgggtaatacccattaagaaatgatccatatatatatatatggtttgagtttttagtttctttcttgatacatatgtatgataatattctttctttcaaataatttttt

SEQ ID NO: 183203 - DNA, 757 bp, Cannabis indica
atctcctatatgagatattgatattctaagaataatattattgataatttttttgttattttagacagtttctgcaacactatatatatatatatatatttatataatttttttttatgtttttggttttttcctgaaactattaattaaagccataatagttaaatgatgatcattgttggaacttaattattagtcctttttttctctctggctgagacatcaatgattatacgtataagtgtcgtatataatagaaaagtatataagaaataagttaatattaattatatataattaattgttggacaaattattatgctaattaatgtgaatttttgtactgtatatattaattggagtacctattattatcagcaaggttaatttaatattttgctaaatttttagactatataagtacttggttgagaaattaataggatgtaataatttcatgtgtttaatattcattcactattttcactaaaaaaattactagtgacaatgtttcagtcataatatattttttttgtgactaaatgtgatttttagttacaataaaaagtgacttgtgactaaaagataatatttagatacaaattgtaaataaaaatacacttagtcacaacaaattataatttttgtgactaattttttagccatatgttttttagtgatcacaacgtatgaatgataaatttataattagtcacaacttttttactttttagtctacaagttatgttttagtcac

SEQ ID NO: 183204 - DNA, 500 bp, Cannabis indica
gtttgggtacgccctaggcacggacttagctcaccttggcccaggttcaaacatgcttttttcacttattagtaatgtgagactacttttaataataataacctaattagttacatattttttacatttattcattttagaaattaattttaaaagaaaattgtttgatatatcagtgtattattatgttattttaaaaaaataaaaagttgatattattatttaaaaatctaataatcattaatttttgtgaaatacaatccaaaatataaaatttagtttaaaattaatagatataaaggtgtaaagtaagtcatattgtgtttgtcaaaaaaaaaaaaagtcgtaattgtgtggctgtcattttgtaaattagccattaattagttaattaattatagattagttatagataaacatgtattagccacgtttacacggttacctactaacggatttttatatatgtccaatttacacatttttctataatcatatta

SEQ ID NO: 183205 - DNA, 682 bp, Cannabis indica
aaaaaaaaaaagagctttgatatgacacgatccgatactataaattgacataatagggcacaaaaaaaatgtacataaacacgacacgatacaatagtacaagaaacacgaaaggcacaacatgttatcacgaatagactagtccaaaatacacaacaaagtacaaaaaacatgaaagccacgacacattatcacgaatagactagtccaaaacacacgacaaaagacaagttcgaaaagtatggcaagacatattataaaacactaaaatttactattaataataatagatatgtttattaaaaaaaaataataatagacatatatttatcaattataaataagttaaataataataaaatttaaataaaatatataattttataatttaaattttaaactatgtaaaattaaaattatatcaatttatctatcgagtgagatataaaaatttgagtatttataagtaaatatttaaattataatagaagttacataaatataactaaagttataaaatatacatatattttagtaattgtaaaaaagtaatatgaaaaagtaaagtacgaattcgagctcggatatcattcgtgtcgtgttgggcctaccctttaaaaatattagcactgcacggtacatcatgacccatatttttgtggtacaacacgacatgactcat

SEQ ID NO: 183206 - DNA, 822 bp, Cannabis indica
gtgtaggtaagggcaaggctaaggctgatggaccgtgagagcgagccggtgaagattgtacatgtcggggcggttaggcctggagcgtacgatcctcgggacagcaaggctatttttgtaattagtcgctaggcgacaagtattttgtatagacagtaaacttttgtaaatggttttgtaatcgggatcccgagtattttgtataaatattttataagtttaattaaaaagcaaaaattttaattaatcacgatttccataaacctcgttgattagcaacgagctgcacagtatgtttaaaaatcacgtaatacgcctatgctagttagggtgttacatgttggaaatgggaaaaatttgaaagtggttgaagcttcaggctttgatccaagggttatatcctcctctaatgcagtccacaagaattgtcacgaagagatatataaggctaggcgtgcgagatcgatctccccgagcttctggaggaaacttaatgaaggaaagaaactgcctgtgactgatgaagacattttaaaaaaagtattcttcaagacctattccaacggctagagataatagggttttagccactattatgtctcgtaatgggcctacttacgaacagatgatagattggcctcatgaacaactttacaaatctaggcaaccccataagttcccagaacatactcattttccttggccttcttatgctggaaaattggacttgcagaagaattaatgggctcggtctaggtggacaaagtatgagcctgtcccaactctttttcatgatccgttggatgtcacggagcaggtgca

SEQ ID NO: 183207 - DNA, 589 bp, Cannabis indica
aaatctatatccttggattaatagttatcaattttgaaaaaagctgagagaaacagatttaaagaaaaaacaaaacaaatttagtgaaaaaaactaagaagaatatgatatatacatagaaatttagtaatacagactcagttaaaaacgagaatgccaatgatgatatataatctattttttctgatagtgtctaactaacttacaggatcaaggtttccaatgaagaggttagctccaacatccaagctctttttatcttgtgatgcctaaaacaatgcaaaatacatatacaatttactaatgttgcataattttctacacattcatacgaaagtaaaagacccgagtaacctttggagggaaaaataaaacaaataccttattgacacggattggcttcccgtaaagcttaatcatattaagcaccttgattgcctgtacaattgtcacgaaaacataattaaaataagattcttaactacaacaagatacataaataaaagttgatcaagtctcagcataagcattgaaaatctcataaagcaaaaatagaatcaaaaatcaactcacatagcccacatctcaa

SEQ ID NO: 183208 - DNA, 746 bp, Cannabis indica
attacgcatttttttttttcaaatcaattatttgaacaccaaactaataatcgtagaaaaatgtgcaatagactctttagactttattttcgacgtgataaatattgccaaatttcttaaataactacaacttatacaaccataagaaaattttgactaaatattttttaagatatcgaaacagataagaaaattttccaatattatttaatgacgtaactcaaggtttattataacacacttcttgcttttaacaaagtgttaagtttgactaaaataacacacaatagcaacatattagccgaaattttaattcaataattactataaaagttaatttaaagtattttataatattaaataattaactattaacttaatattttatcaaaaatctaaaaattaagttgttgtttgataatatttttgtttttaaattttttaatcacaaaaatataagtaaaatttttatttctgaaaaacaaaaatgtgttctacaatcacttttatttttcaattttaaaaacaaaaaacaaaagtgtattatgtatattttattttcatttgttgattttatttaaatcgagtccggggccggggtctgtggtcgagattgagacagggttcgggacctgcactggggtctaggttcagcattggggttggggtctgggcatggggtctgattccgacatctgagtcctgcatccgagcctggatccgaggtccgggtctgggtccggtcc

SEQ ID NO: 183209 - DNA, 661 bp, Cannabis indica
caatatgtttatagtttattccttattacatatagttcatatatgttgtatttccatattatatattatagtctaacatttctcacatgttaaaatggttaatttattatttatatatgtgtaaaattttgaaattatttttttaatgaaaaagtaacaaattaatagcatattcacatcaaaaccaatttaatagttgcttttttcaaaattcccaaaaaataaaaatttttagagaatatttttccatttttttattttcaataattattttaagtttcagtatgtatattgacgtggcacatcggtatttatgcaaataattttctttaaatatttttataattaaaatcaatataatattaaaaaattcctattttataaacccctgtatataagcgtattatgaagatgtattttatgatacattcctttttaaaatacatcaatgattgattattatactcttacaaataaaaaaaaaattaatggatgattatacagatttttgttaaatagttgtaatcagtttagtaggccaattttattttccatgattagtaattaccaaatcacatatctacatagtaacaaacatttaatgtagtttttatttcaaacattaaatggtctacacggcttttgcactttttcttttttc

SEQ ID NO: 183210 - DNA, 639 bp, Cannabis indica
tagtgaaaatctgatatggagttttagataatctactcagcacccacaccacactcatcattttctttttactttttctttaacatttcatgtacaaccatatactttttgttaggttagaataaaataatatttcaaaataaataaataaatgaaattactttacggtgttttgatattatttttataaaaatgttgtggaaaaagtcatcactcatagatatgaaaattcccttaggagaactatatattaattaagataaggataagaatggaatttcattaaggttatttttctcaaatgggaaaacaaatgttgaattagacttgtcaaaagaagattaatatacaaaataactacttataaatttatatatatagacaaggaatgtatgtagtgtagttattatagttattaataaagtaatttatcatttaaatatttaagttatatttttggaatttcaaaagtactgagtgagaagtgtcaagtgaatgatcatatggtaagatttgattagtctagatcattaaatttgtattttctatttataaataatttaaatataccaataaaaaaataacatagaaataaaaataaatgacttgacacttaaatacttccatgattctaaaaat

SEQ ID NO: 183211 - DNA, 1041 bp, Cannabis indica
tataatacaatatacattatatgaccatacgtcttcaatgtgttgaaagtttatatgtatatatatatatatattttcattaaatagtgatttaattatatgtttatataattaggtaatgtttaagtttatttatatgtttatatataagtaggtaatgacatacataattaggtgagtgtaaaaaaaaaaaagttgactcggtcaacaacccgcccgacccgaacacgtcaacatgccaacccaccaacctgcaacatgtgaacggacgggttcgggttcactttttttacccaaaacccgtaaacctgaaacccgccaacctaaaatctaataaacccacccaatgttcaaacctaatggttactcccaagtatttcattggaaatgagcattatccagttcaactgtctccatgaatttcttctttttttaatcttcgattctagacaaatatacattcaactttgctttattttcatttagacccgagcattcagtaaaaatcttgaaagccttgtaacacatccactaattccaccttccccttgcaatacactatgagatcatctacaaaatatgttagttttatggtactaattcaggtacgcagtagaagaattatatatctgattattattgtaccatagtcccaatgatctttagatgtatatatattaaatttaaaaaataaattacataaaagaaataaatacatctggatgcctatcaaggtatccttgattgttttcgtaagttgtatccttttgggttgattaaaaactcacattgtagtcttatagattgatccaccacacacaaggaatagtgtgggctattaggataaagtgtatatgaagttcttattggttttatggtactaaatcaggtacacaactgaagatttgtataaccgattatcattgtaccatagccaaggatctccagatgtataaacattaaatcaaaaacataaattgcatgaaagaaatatatgtatacatgttgatgactattagggtatcctcaaaaacttcttgt

SEQ ID NO: 183212 - DNA, 1359 bp, Cannabis indica
tcatccatctgcttattgctgattatattttgccacatgtcaatttatttgacgtcacctcgttaggaaaaaaaattgggaataataataataattgtatcatacaaataattaattctgctattacaagattttagagtttacatcaatttttgaaatatagactgaactttttaacacgacaagtcagcatgagctaagaagcacaagctagtacgaaaggatatggaattgaacacgataaaacacgatattacgaattaatacgacatgacatgaaaaaaatatgagattaatcatgatatgacacgataaacccgaaaggcacgatgcgataagcccaagtacaatacgtaactacgaatagactaaaatcttattttaatttatttgtaaagtgtgacccaaaactcatagcattattaataaatcgtcaaattataattattctaataattctttatataattatttataatatattgatgtaaaattatataaaattaattgaaattattaaaaattatatatatggtatagtaattatctcacaatttttttacaaaattattaaaagtacaacaagaatttgagttagtataacgaaattggctactcaaataaagcactacatgaaaatattaaccctacaagtcgtgtcaaaccacttatgatataattaatatttttgtatggcaaagtcacttatatatattttaaaaagcacaaaacaatataagcgccagctcgataagtacaaatattgattttacatcactaatttgaaaatgtttcattgtgcattgatgaacttgaaagtttttttcgttttgaaaattaataaatattgggaagacaattttgtattaggaaacttcctaattgaatcattttttttgtaatttgaaatcttggttgctctttgatatagacatatagtgtgtgagtaagagagtgtttagttactatgcatagtcccgaagctgatttgatgtgtggaaacttcgaagtagaagtaggaactaggaaggttgttctaattccaactttgtacatgccttgtgtaatatttaaaagtgtagcacttatatttttttttttaacaaaaaatatatactacaacaaaataattgaatcctttcaaaaaaaaaaaaaaactaaataataaatggaatgaaattacttcaaaaaataaaaaaaaaaattgaaatgaaaggttcttatttatcaaaggaagggaagggaggagagtaaactctggtcgtgtgcggctacaccgtgtctaacccgaaatacttggaaaagctgcccgggtcgaactggacaatgagtcaaacttcaactacaaattgacccttg

SEQ ID NO: 183213 - DNA, 588 bp, Cannabis indica
atttagtataattttgtgatttcttttttctattaagcaaaagtcccacatggtttgcaaatgatgtgtgtgttgtatttctaagctataaataaagtagttttacattcactttatttaatcatgggtgattgaccttgaatatctcaatcttgcctaattagttataattttttttgaattaattagtgtgtgcatattggaattaaaatttaatataaatctatatatatatatatattaatataaaggaaagtataaagtaagtgaggtggcgtcttataatttttcacctattttattggaattaaaatttaatataaatagtaaatataaatatatagtaatataaaagaaagcataaagtaggtgaggtgacatcttataatttttttttacttattttatctatgttattagaattactgaatttagtataattttgtgatttattttttctttttagcaaaagtcccacatagtttgcaaatgatgatgtgtgttgtatattggaattaaaatttaatataaatagttaatataaatttcgtaaattgtaaaatacgtattgtagtatactatttaaat

SEQ ID NO: 183214 - DNA, 758 bp, Cannabis indica
tgattggggtgtgctccggttttctaccaccgcccaccgagaaataaacattcgacagggaagagagagagggaagttttttcaattttttctagagagagagaggggtgcacgagaggcaagagagagaggaagagagagggtaagttttttttagtttttaactatttttttttttaaaaaaaagggtaaaatgggaagttcatgtaatcaatggaattaattttgtacaaattagtggagggtctaaattttgatattagggattttattaagggcaaaaaataaaatttcccaatgtaaatcatagcaccacatattaaaatacaaagaattattagttattaatttctatgctcacatcacaaactaatttattatcaataattaatttctaatttagaccagttataagtaataataatttttacattttttaagtcttgtattagaaaaaatatatttatatatatattttaataaaatatatagtttataaatttatttatgtaaaattaataattttattttaaattatagtagtatatgtataaatatcatatttacttaaaaataattttattaggatgtagtattataagtactgtttattattattgttattgtgtttgtataccttttggtgtttttgattttttcttgttctaattatatttatatttagttataattatcttcttactcttagataaatattctaatgtatttctttattatttatagcttaacaaaaactc

SEQ ID NO: 183215 - DNA, 797 bp, Cannabis indica
aaatacattgaaggtgtaacgataacttagtgccttttcaatgtagatcatctattagagggtgattgatcacattaggattataaaaatggataactaatgacgtgtctatatcatgaaacatatagagcgttctatatgactgagagtgcaattccaagttctaagtgtggattcaataaggaattaataagttagggaatttacttggtaaattcagttcgacttattggaagctcagttatatagacccatggtccccatactagttgagaccataatgcttgtaagactcagttaattgattttaattaatcaattataattctaaagttagactatgcctactttatgaattttcactaagcaagggacttgcaacagggaattttcacttcccaatatactgtctaacaagtagtttactgtacactcaaataaaaaaaaaaaaaaacgaaaaaaaaaagtagtttaataataatacacttttttactcttgtatataatattttaagccagcaccaatttcgaccatatgctaatataagatacatttgttttctatgtttccaaacccccataactaattgccttccccagatatattttaactctttcaaataaaacgataatattttaacattaaaaaatttgtctaatgtaccttctcattatagttttataatttttttattttacagttactcatttatttggtcgtaaaatcttaataagcaccaatttcggattttctaatatataatatacatttttttgtttctaaaaaactctttgcc

SEQ ID NO: 183216 - DNA, 614 bp, Cannabis indica
gttatttattaggacacctataaattttttaaaaaattataaatgatttataacgctgaaaataaaattcaaatattttgtatatatatttatataatattttgagcatattaatttttgtatatataattataatataatatttctattatataggatgtgagttaaaaaaattaaaattatttcacaaaaaaattaagaatatttttattttaacaagatttactatttcatagatagttatatcataaaattaaataagaaatatttacaacaaaagtacctaaagcattagatttgtagtacttaagtacatacccaaattattcttttagcagcaaaagcatttaaattataatgtttgtaatatttgtactaaattatttgattagcatcaaagatatttaaattcatatgtttatagatcttaaggaactaaattatttctagaattatttcattaataactataaaaaaattacaaaaatacaaatcaacgagatttcttaaactgtgattgaatcaaagaattctaaatggtcctgattgaccaaatcattcacaccgaatttatttagtccgatctcaaatgatttgatccgaattgattaagg

SEQ ID NO: 183217 - DNA, 730 bp, Cannabis indica
agggatttctataatttttttttgtaatcatcaagatctgtgtatagatatccctatttaggtattattgtgttctttattttcagatatgagaaaagataattgttgtgggaaaaataaatttagggttttcagttttgagttttgggactgagatttaatttgtgtatatatttgtgtgtgtttatttatttcttggatttgagtttgtttaaatttagtttaagtttggttttagtatttaatatttttgtgtgatatggatttgaaaaataggttgtggtggtagtttcggtagtggtgggtggtggtgggtggtggtgtttacgatggtttcggtagtggtgggtagtggtgtttacggtggctacggatgatggtggtttcggttgtgttggtggtggtgtttacagtaactttggatggtggtggtggactgaagaagaagaataaaagaaaatattaatattttttttttcagaaaaatatgttatagttaaaaaaaaaaatatatctttgtttagttttaattttaattcttttaatataattatttacgtgggccaataaaattgtgccagatgtatactgtgtccacgtgaataatccaacctagcagttaacagctgaatttggatggaagttgtaatttgctaacagtattgtagttttgggggttttacagcctaaatttgaattttgggataaattgcaagtaaaatgaaactat

SEQ ID NO: 183218 - DNA, 638 bp, Cannabis indica
ctatgatcaagtgccggtttggtgttctttgtgtaatgcaaatgatttcatataattttttaaagtgtctcatatttaatttctctattatcttcagtttgtcagctcagctctgaaagaacccagtttggaattccatctgttaaatccggtaaatatcaaacggcgagtaatcccttgctttcccacagaaggtgggaaacaaacaacactagaggaagaggatttggtcccttcagctcttatcaaattcagaccgagcgaaacagactccattgttttcacaggactgcgcaatgaactcttagaaattagcgaaccacttttaccggattcagctgtttcttcaacgtgagcttgaattcgggtaacatcttttactcaaactgtcttgagaatcttcatgtttctctcattggtgttgtaacttagttaaaaatcatatattgattttttttttccacaacttataattgattgaatgtacaattatattagcttttgccctttgattgaagcctaaaggcttaatttcttcattttatctttgtaaagaaatttggattggaatttgattttttttttctctttcttctttcattttcaattttttgtagtatgttgtaaccctatgtatc

SEQ ID NO: 183219 - DNA, 1013 bp, Cannabis indica
gtaagagtattgagccatatataagaacatgggctactccactcattgccaattggttttgagatggaaccccatgattctcaacatggtatcagagccatatccctagcgggctttcgatccacacctgtccagatggttagccagccgcacgagattcagatggtgcaaagacacctgagatccgaataaaaataagcgagtaaatggcatggcctatgataaggtgattcaagattggtcagcaaaaatagccaccatcttgagggggatattggagaacattgtcccacatggattaaatgtaaaagtattgaaccatatataagaacatgggctactccactcattgccaattggttttgagatggaaccccatgattctcaacaaatatgttataattattatttgtgtgattttaaaatttgaatgttaaaagttttaaaaaatcatagttgctaatgatttttttttttttttttggttattttgatgattgtgaattttgtttgatctagctctagttttgtttttatacgtacggagtggttttgattttaagattttgtatatgtttgttcttgaagtttttcttatttatcatttatatcccataatttattgtatcttacacaagtaaaataacatttagttgtgacatgtcaatattgtataaggtttgacacacacttaactatgggtctttttctagtgataacttgaagaataccttttttttgtgtcaatcaacatttagttaagtgacatgtcaatattttataagaaaattgtctaatataccctcacattaacattaaaggctgaaaattaaatcttactgttttgggttgaagaaagagtattatatgaacattaattataaaagtgggtagaaaaataaaatgttaaaaaagggtaaaaattaaaataattaacttaaagtgagtacccagctaatttcctcaacccttataaaagaattgtccaatatatatagagacattcttatagc

SEQ ID NO: 183220 - DNA, 666 bp, Cannabis indica
caatgataaccaacgagccaatcattgtgacacaacgtcaaaggattgctccttctctatatcgattaaaccgtgcactagcgagaaactccaaatagtaaaattagaaaatctgtctcaaatcatgtaacccctcacaaatgtgcctatattaaattgttaagtattaaagttttataataatttcagttgaaattgatatataaggctaattaggtcaaagagggtatacatcattccaaaaaatattttatagtttttgatgaagtcacacaatgccacctgttgtaaatcttctccaattattgtgatctgggtacgaggcgctatgaatccacgtggtactggaattgggattatagtatttttctcctttattctcaaaaattcttcaaccatccatctgattgccttggagatttgcgccatgatctctcgaatgaataatagatcagctcgatcaccaccacattttcaacaaggcataggacatttacccttcgacataacacttcttaatggtggttgagcaagtggactctatacgaaataccataatatatcaaaagttgtatatatgatttgtaatgatgacttctaggaaagaaattttacctcagatgttaaaattaaatatttaggtcaaggaaagaacatattcactac

SEQ ID NO: 183221 - DNA, 697 bp, Cannabis indica
aagtcctaacctaacatgactcgagatatgctttcagattattatgtaagaagtggataacatgattcgatctagaaccactcttatacaaatataatatataatattactatatactgagaatctattttactatataacaagcccctttttccacacacaccaaaaaaagaaattacatataataaataataagaagaccaccatttcaataaaataagaatacacctagaccaaaaaaaaaaataaataaataagattaccatggtacaaaaattgggttcatattggttgtgcttatttcgtgtgaactggagtacattattaagttgttaaaaaaatatttgtattgtaaaattacttaggtactagtgaaagtctatatttataactatattaatatgagaactgttaaagatattggtaatatttaacattattataatgtattatatcactattaatataattattaaatttcatatatataatttaatttaataattattatgaaaagctaattaattatttgtcaacaaaactatccatagtcaaacaagaattagttgcacaatatatatttttattgtagtttcaaaacgtaaaataattctattttatttatgatggagtatactttagctatttataaatatattttagttatatttttaaaaaatttaactaattaatagta

SEQ ID NO: 183222 - DNA, 824 bp, Cannabis indica
ctataaattcaaatttgtttgtccagtcaaaaactcaagaaggccagattaaatcaaataaaggttatccctagtgatcatataacacagctctaattgatgaatcagacgattatttttaaggtttttttaggggagtttcggattttgagaataagaatgtaaaataaaatttatgtttgctaatattttaataaaaaacttacgatataggttctacctttaattataattttatgtaatgaagttttttatacaaagtaccacttaaaagcaatgagattgtgactactccagtcatcatatataattggacaacctgttcttgtcggttaagttttaatgaaattaatggccaactacaaaagatgatgctgtgtcatgatatgaatctttccgagcaataaagtgttatctcccaatcgatttttcttcacaaaaatactagtcaatctaaataaataattgataatattgtgtcacactactgttacattgtacgatatttttttagcgctttttcttttctttatatttatattttttctatatggtagttggggtagatctaaagtatggacacatatgtcaatttaattggtctatctaagaaatattttttaaaggaaaatttattatattatttattaatataatatgtagaataaaatatggtaatatatttttggtaaaggtccacacttgttacaaggtctagggctcatagcatgggactcagtttgccagtttaagacaacaaggggattggattcaggaaagtagaggaatggaacttgacaattaccaagtatatttgggcaatt

SEQ ID NO: 183223 - DNA, 716 bp, Cannabis indica
gaccccacaaaaaataatgctcaatatcgaccaatcccgtgcaaaattcggctttcttattttactataggacacatgtttattgtttattttgcataatagacttattttgattttttttttacaaaataatatgtgaaatacattgtaaaagaaaatagtaaaaaattataatataattgtttttaccaaaataatattgaaaaatgtaaatgttcaataattactatactaatacatattgaaaccataactaatatactaatatatttaaggttgagacatgcatcccaaccctttcaatgaaatgaaaagtttaaattaataatttgataaataattatgtaatatatatatataaatatgttatcttgtgaaaagcaatatttctataataataagtataactttccaaataatgaatcatgtgaaataatattaattgtgattattttcattgggaatggaaagattaattgttcttccaattatgttctaataaaatacaaattgccctgttggaattcacggacctattctttcaagttgtctttattaattattacattttatatattattaaagctaaaataataataaaaaaaaatatgaagatattttcacaaaaatcccatataccactgaagcaataatttaaaaaattattacaaggaaacaaatcttctcttcatcaaatattaaatgtaatatcttaa

SEQ ID NO: 183224 - DNA, 490 bp, Cannabis indica
gtaagatataataattaggtatgtgtacctgattgatccatagcaattatctctgtttgatccacagcagttactccaatttgatagtgcaatactatcaactaagtcttcctccctagatctctaaatcagaagcagtttatttatctgattatcaaaaagtatacaattgtgatgagacaatatgtatttatagagttagggaggggacttagctacaaaaccctagttggactgggcctgctcatcaaaggcttcagttaactagaaaagcccacacttctgcttcacctagactttacacacagatgctaagcccattaacaattgatcaccaacaacatgggctaacacagcaaagaactatccaatcaaacccaagttttaaataaaaaccaaataaaaatttaaatgtaaagcccaaaataaaaagtctaaacaggttatacttgtggggtgctcctatggagatcggtgtagggtacccggt

SEQ ID NO: 183225 - DNA, 798 bp, Cannabis indica
ataacaaattagaggttattctgaaatagaggttctattgtactaagttattgttatgtgcgcgttgcacgtatacttaatcatattttttagtttttatttttgttgtttatttttaaaattttataaattaaaggaaactaattaatttttattttttttaaaaaaaaatattaaaaattttaaaaattttaaaaaaaataaatataaagttaaagaatattaaaattaaaaatacttccaatattaaaaattataataaaaaataataatgttataaataacatataaatatatatatattatatttataagaaataataactaatgaatgttctttgaagatctggtcaaatctacggacctctttcttctattccctagtagagtgtacacgtacgaggcaaaatcttatggtttcatcatgtaatttatatatatatatatatatatatttatattggatggaaattggatttagacttttcgtaataatgtatatgtaaatattaatttatagagtcggcctgagatttgcaccgtccttgagagtcctttgtttagtatatcatgattatatttatatatggttttttattatagagatatgttctctggggtttggagaggaagaaacttttataattaatcacaaaaacaaaaatgagcaatattacttgttaattaattgtccattttactatttataagataaatggaatcaagtcaagccctggtgttggctggcatgaaaaattatatatataaaatagtagtttcgcacgtgcagtcgcatac

SEQ ID NO: 183226 - DNA, 1138 bp, Cannabis indica
tggagtgtctttataaattttggagatgtaagtaaaatttcccaatgaatataccaaatatcaaaactatcctttaaaaagtattaaattttaatattaaagaggtatattaatattatagtaattttactaactaatttctcctcatccttccgacatttctcctaatacccaaacgatacaaaggagagatattatcctctccatctttcctaaattctccctccatcatactctccatccatccttctccccttctttcccaccaaatatagcctaaaaaatattacattaaattatatggtaattaatacttaatttcatcaataacaatatgatatttaagatagtaatagacactaattgtactttttatatttctctaagttaaattatgaattatcttttttatcttcattttattatttttaattagataattttttttaaaaaaaaatccaaatatactataagttaaaaaatgttatcaagtattattaacactattttataaatatataggtgtgtatcaaatataaaagagctaatactattttggattatgtattttgtaaaaattactgattggattatctgttttgttaaatgacaaagtaaattatgtaaaatgatataaataggactctgagctcggtttttaataattttttattttaatataactaattgtaaaaaattcttgacacgaacaaattaatgcagaaaatgtaactatttttgttataatctatctacatcaagttattattaagttttattttaataaaaaaaactaaatttaagatattatttagtactattttaaaaaatacatgatctaatttgtcatttaataaaacagatggtctattcaataatttttacaaaatataaagtttaaaatagtatttactcaatatatattattgagtttaaatggggtgatagagtatagttgaattaaacttattaataagattagttactactatatccaaaatgtggagggattgttggtgttggattggagcgatgaaacgtgacgtgtctgtctttctctttaaatcaaaaataataaatacaaaaaaagtgaaggaaagacgggaccgccatatgcgcgatttcctcatctctctct

SEQ ID NO: 183227 - DNA, 634 bp, Cannabis indica
agatctactctcactctcactatttctcgctcttgctctcttctcttaggtcttttctttcattgttgggtttgatgggatgttgaacggaggggatggtcacacgggtagtagagttcgcaaaatgggacaaaggggctcaacggcagtggtggaggacagaggtaagactctcatcgtggtgggaggctggaggtggaggcggctagagcttgaggaggaggacgaagaagaaaataataaaagaaaaaaccaaatatttattctttttttttatttttaaatctgtatttttctttttgttttgatttagaaaaaaatattagtggtggtagtaatggttgtgtggtggtgataacgatggtggtaatggtgtgataaagatgatgataatagtggttgaagtgtgacagcagggccggcccaagtattgggcagcttgggccattgcacaaggcccctatttttttaaggtccaatttttttttttaaaacggaaaggtctatttttttctttttttttacctattatatatacatatataacatatttataattgaaaaaaaaaaaaaaaaacgtaactagtaagtagaattagtagttagtatagtcacatagatttttttttttaaa

SEQ ID NO: 183228 - DNA, 972 bp, Cannabis indica
caggagcacgatttggtacatctcaaagttcaagggaaaaaattactaattagccttacaattttgattggtccattcatgcagttggaatgtggtggatatggctcacgattctaacaggaggaacagctattttcccattggtgatatcctcattgtatgttctgttgaaaaaatgtaaggccaaaaggaataggcaaagaaaggaacatactttgttattgcaagaacttggaaaagctggtaaacgtcataaggatgcgaatgaattgcagttattcagctttgaaagaatttcctcagccacaaatggtttctctgcatcaaataagctaggagggggtggctttggaccagtttataaggtaaaaaaagattactttgcacttttaggataaataattataccatttgacttgtttctgatgaaaaagttgcaaaaatcaggggaaatttatagatggacaagaagtagcaataaaaagattatcaagaagttcagggtcaagggctagtggaattcaagaatgaggttttactgattgccaaactccaacacactaatcttgtgaggcttttgggattttgtattcaaggagaggagaaaagtctcatctatgagtacatgcccaacaaaagtttagactttttctctttggtaatttcctcttctataaagattcttctattctgggtcatatgagaaagtttagacttaatcatagattcacatgtttgtttagatgaaagaagaaagtgttcattgacttgggaaaaacggttcaacattattggagggattgctcaaggactagtttatcttcataattattcaaggttaaaagtgattcatcgagatttaaaagcaagcaacatattacttgataaagagatgaatccaaaatatctgattttggcattggctcggatatttggattgaatgtatcagtagaaaacacaaactagagttg

SEQ ID NO: 183229 - DNA, 527 bp, Cannabis indica
ttatatattgtttaatcttatacatattataattaatgtataaatatgtaatattaaatgtaaactcaattaactaataattattcatgtgggaattcttctagatttagtttttggcagtaactctttcccaacatgtcaacatccacagttttaaattttcttatatatatatatatatatatataataatatcacaagtataaaatgatcctaatttagattaacttgctaaattaacaactgaataatagtcaatgttatgatgcatattacagaaaaacaaatctttaaaaaacatttactatacataatttactaatcaggttaggctttggttaaaaaagaatcattcaatgcctgtattggtttacttttaaaaaaaaaaatctgtattgtgtgtgtgtttataactataattccagaaccataatgttcaactttatttatcgaccaatcaattaataaattgcattacttgctctttcaagatctataagttgtaataaactatagtgtcatttttc

SEQ ID NO: 183230 - DNA, 839 bp, Cannabis indica
catagcctgtcatctcatatattctcaagtctgtgttagattccattaatgattccttgaattagaagaaaaaagattaattaaataataatataaaacgtggttagatgaaaaagaaaaggagaagagagttacagttgtccatggtgaatgagaaagtgacgttgacgtggtccgcgtttgttgacaattgacaagacaacgttactacacattactcgaacgacaacattaaaactaaccataatgttgtcgttttcttcttcctcttctcctctcctctcctctcctttgatgtattattgttttgttaataaaaactcgaaaaacaaacagtcaatgtttgttctttgttgttgtaaagaagaagaagaagaagaagagtgtttgttttgtttcaacaatatattttttgttattttattttattttaggaatgatttttaataattaaacctttaatattaaaaactaaaatgtcacatatatatcttgtacgaataataacgcgttttacctacgcttttaattacttctccataagaaattttgttgtatgcttttttcttttcattgctactatttagtgactagtagtgagaccaacacattgataaaaatgtgaagaataaaataaaataatttttagtatagaataatatgaaaataagtgaaaataaaaatgaaaaactataaatttacaaggatatataaaaatcaaaatataatgaatgggaaaaaaattaaaataaaaaaaaaaagtaaaaaatacaagttttagtaggggaagcaaaatagtgaaatacatacataaataatatgaacaaaaaaaaaaatag

SEQ ID NO: 183231 - DNA, 515 bp, Cannabis indica
cccatcctcatctttctctcctttctgaaaatcctgtcacaaacaccatcaaagtgagagccaggccatcatcccacaccccaattcttaaattcctataaacaaaacccctctacttataacatctcatatatatcaaatctctctcttcctcatctttctctccccatatctatagtactactactactactactgttgtagtatatatgtgccattgacatatggcttacccacctcacagtttcatcttccaatctcaccaagaagtagatcatcatcaccatcatcatcaccccacttccatggtaattaactatatatatatattccttgtcttcatctattgattattatatttgttaataatcctaattatgtgatttgattacaggtggtattaatactaataataataataatcagcaacagcagcagcagcagcagcaacaggcagcattcatgatgaagagatcactttctttttcaggtgttgatgatcatcatcatcatca

SEQ ID NO: 183232 - DNA, 820 bp, Cannabis indica
aatttttaatttagcacttcatcaaatcaaaaattatcttaacggtatttacatattaaaatcatgataattatgcccttaagttataaattttattctaaattagactacacatattacactcatttatatgatgatccaacacatattttatatatacaattataatcccaaataattatgtcgtctatgttctcactagtcaagatatattatagggtaaatactattttggaccatgcattttataaaagttaccaattaaattttctgttttgttaaatgacaaaatggaccatgtattttttaaaatgatacaaataggaacttaaactgaatttttgtcaaaataaaatttaataataattcgattcaaaggtgttgtgacaacacttttatattttctgtatctgtttgtgttacaaattattttcaagttggttataataaaaaaaaaactttggaaaactaagcttaacgtcctacttttactattttagaaaaatatagggttaatttggtcctttaataaatagatggtttaattagcaatttttgtaaaatataaaatctaaaatagtatttatcgtacactatatatacacataaatatttttttagaaataaaaataaataataaaagatatatataaatatgagatgactcaaaaatatataaaaggtgaatttaaagtgaaagacataattaaggctagtgaggccccccattgatgtgtgtgtgactccacccatatatgaaaatgacatatggggcttcctaaaagacactacataatcatcatcatcatggagaaaaacg

SEQ ID NO: 183233 - DNA, 785 bp, Cannabis indica
  modified_base (60)..(60): a, c, t, g, unknown or other
cttacattatagttggtaatttaatttattttttatattatattatataaaatattttangtacactatttttagtcctacccaagttgatgagtatatatttgaatattactaaaatgaggattagagatgaacagtgtaggaagaaacttaatatatgagatcatgtgtatatgtgtatatgcatatatataaatattattttataattaatatgtagataaattagttttattccttgattattatctaaacaagtgttcctaaataagccacatgaattttaattaattaatatatattgttaaaacccaaataataaggtggtaactaaacactctccacatattttgctacttattattttattatatttataatagaattttgctaactttaattaattaatattgatgcgtatatattatgtatgttctttttgtgtgtgtgaaagagtatttgatataattaatttgtagatttgtaatttgattaatattaatgaagattgtatatatccactatatattccttaatatctaaaattagtatatatatgttaattaaatacgattttgttgttcaaatcaatatttagtccttaatttttcataatgctttaccatgtgcaaaattatactttattttagctatatctagctacttaaattgggttgatattttttagcatataatagattttttagtaagtgtcatcactccataaatttaatttgtatatttacactttaattgttatttggattttggattttaatatggaa

SEQ ID NO: 183234 - DNA, 1148 bp, Cannabis indica
aaaaggaatattaaagggaaaagacttaataattacgtgacaaataattattaattgaatttaaaagttaaaattataagattaatttaaattattgttcatattaatcccattaataaaaaataattcaatatatgaaccctatttgattaaagtgacccatgaatttctcataaaccattttatttttaataataaactattttatttttaatataaataaaaagtcactcatgaatttctcataaactaagaattttgttatatataggcacattttatatagaatagatatatttgaataataaaagaattttaaatttttttaagagacttagttaatattaaaaagaaaaagaaaaaaagaagatagttaagttcttagattaaactaacctgcaaaaaaataaaagacaaaaaagaaaatatatgaattaataatattctttcatcatcgataataataaaaggaaagaaaatataaaagttagaaaaggaaataaaaatatagtgaactaaaaaggaaaaaaaggaaaattattataaattaattacgttaatggaaatttaattaacgtaaaagaatgaaatgatcatgcataaatatatagatagattacgtagatgtttttaaaattggttagaaataaatagattttctgaattttttaaattattattaattaataattttaaaaagtaagaataaaaaataagtaataatcaatcatcaatattaataaacctaataaaaaaattaaaaaaaataagaaaattaaagagagaatagatggaggtttcgcctcatacttctcctttatatatatatactagcaaaaagttacgtgcgaggcacgtatactaaattttatgctaggttttttagtgttatttgaaagtgatacgattaaattaaagaaaaaatattattagttattaggtgagattattattatgtgtatctaaatatttattttataatgttgtcaattaaaagtgaataccaaatgcaatatatcagtgtttaagaaagcttgatgatttaaatatgttcttaagttaatccaaaaataaattaaaaatttaatgttccaattatgttgtgaggatgtaggagcattgaatacacgctgatctagcccagcatc

SEQ ID NO: 183235 - DNA, 522 bp, Cannabis indica
attagctagaccaatgttattattagagcttggcgaagtagtaattgtgaatacaaaaaattatttaaaattgtgatgaatatatattaagagaaatacaaaaaaaaatactagtagttatttttttttttttttgtgaaaaaaaacagtggtacagtagaacctctatttaagaatactctattcaagaataacctctaatttgttataaaaaaatcaagtcccgatttgggccagttataaataagaataacctctaaattgtaattagttatacattttctaagtcccgtattaacaaagtatacctctatataagaataattacatcttaataaaatatatacatgtattttgtaaatttatttatgtaaaattaataattttattttaaattataatacatgtatgaaattatatttactctaaaatatttctattatgatatagtattaatgattatttattgttattattgttacattgatattttttggttttttaattttttttttcttagtg

SEQ ID NO: 183236 - DNA, 1300 bp, Cannabis indica
  modified_base (1266)..(1266): a, c, t, g, unknown or other
cgtagccatccaaaagaaatgtttcgtcgaacccatttttttgtttcgataggcttcgccaaaagaaatatatatgtatgtatatatatattatatagtgtgtgttaattggagtgaatgtggagaaaaaagtggatacacgcgcacatatatataccttattttaaattaatatataaatatatagaaaaccttgtttagaattgcgcgaattaaccacaatttctagagtatcctaatagcaatgttctaattacatataattaattttaagctctatccctaaatcccaactaccctaaagcttcattccaaaccctaaaccctatatatagcctgctgttatatatatacctaattaattaaacacatctcctgtatataataaaatttgtaatgactaaatatattttttgagatgagaaatgttaaaaggtatcagattgaatataatccgctcggacttgacctttttgtgtgggaaaatccgttctctatgggtgggttattaggtccgacccggtcaacttttcaggtgggttcgggttgaactcataccccgctcgagaagccggccaatttttttttatatagtttttaaattaaatatataacataaattaaacaatgtattttttatataagattttaataaaaattatatgtatgtgtaacaataaaaattgaaatataaatataattatttatattatttttctattatatatattttatctattaattagattgaaaatgaaaaatttaaagttatgaatgtaatatgtatgtgtatataatactaatgtataattattattttttaaaaggttatgctttatatcatttgaacatttaaatttatatcatatggtagacaacataactagtatagaatgtgtaaagttattttttagcaagttagatgctgaaatattttttatatatggtgtgatttgttggcttttataaaaacgattttatcacctttattattgtttttattgctctttttttatcttaggataaattattttcagcttgttttatttgtttggaaacttcttgtaaagagaagaaattctcttatggaaagttttgtttttttttttaattagtaaattttgtactattattatttttcctttaatgtagtccgatttgtgtcttgataagattagatcaaacacactgtttatggcaggtatgaagccaaaatcaatgattggtacacgtttttggtcaacgttttcttttttctggtctgtntttgttgcaacagtaatctctctttgtatgctac

SEQ ID NO: 183237 - DNA, 606 bp, Cannabis indica
tgataaagagtctgaacacactgcttgaacatggatcccacaaaagtgagcccaattaaggccaactagcaaaactaacgctttaaactataaaatagaaatcccccctgtacaaacaaaaacaaaaaattgatttcaagttagataacaaaaatactttaaaaattacaacatacaataggaaataaaccaattacaaaggtcctaaaataaatttaatcttcaaaaaaatcattctactcctacacagaagattaactactgttgactgagatttttggcaactagcttaatatatgaatatcaataataaagtgtgtttaaagaagatatttttacatagttcaggcgttaatgagccttagtccacgagtcacttctattggcattgaaggttcaaaaaatggtagatttcctacagagtttgacattgttctagcttgatctaaaattcttggatcctttttacagtgtacatgttaccctatttataggaaaatatatgtgggattttttggaaaacaaaggctcatgaggttccatctcaaaaactaatggtaaatgagtggagtagctcagtgttcttatatatggctcaatattttt

SEQ ID NO: 183238 - DNA, 588 bp, Cannabis indica
aaaggaatttaaaggaattgatgagatgagtctcatgagtgcctgacaagcattatgcaatagaataatttgtaattgatagagaatgagggagcaattatgttatattctcatacaataataattaaataattttataattttataaatatgatatcttttggactactagagccttcattatttttcactcactttttgatttgaaaagctcattgctctcaagtttttctttgtatatctctaaaattttattatttttggtttattgacacaacaaatcctcatgtcattctttttttctttgtatggtgttgatataatttgggattgatgttttactttttatgttgctatttttactatattattttatgaaataaatcgtattttgtaatttagaaactttaaaaaagaaaattacactagatatggtaaaagattcaaaagttttataaacaggtattttaaaatttgtgcattatctatggcagattccttacacacgccttcggtagcttaaacaatcttatggatcacgtggcagttttaagggactcataatttattttctaaaaacaatgccaa

SEQ ID NO: 183239 - DNA, 964 bp, Cannabis indica
agaatgaccattaccatagtaacaaaaaaaaaattaattattttttatctaatttttttattccattttaattttattccattccattcctattcccattcccattcccattcctattcctatattttcattcctccaaccaaacgcctctttagagactgaagtgggaatggattatggaagagaatgaatggatattatatagtactttcaactgctaccactgattacctatactggttttggttgtgcaactataaatgaaatgggccacaattaacaacaaaattctctaattctctttttttatggtaggtgttgctggggaaaacctattgcagataattacaatatattttctcattatatgtccaaaataggacatttatcaaacactgtgtaattagtaaattaaatatcaactaaactaccacaagcaactaatggattaaggtgaaaatcaactgcatatgtgttgttcaagatttggagagtctcttgtttatggtatcattaatgattttaaaaacttgttagcaagtttaaagagtgttattgtttattttattaaatgatctgttaatatagtgactcataattttgtaaaggctgttatattatactttagttgtcgtttcagtttagtaacatgttccaactgatttgctaccttatttagtagataaaatttgtgattaataaagttgattattccatttaaaaataaacaccacaagcaaataaaatacacaaatcaaacataaaagtgagacactaaaatttttacgtagaaacccaatgtaaaaaaaaaaaaactacagagaccgtagtctgatcaaatcttcaactatcaccaatgttcaataatggaattaaaatgtgcttctctagtataactagaggctcacaatagtatcaaaattaaataatcttggatcattaatacaatcatcatcatcatctc

SEQ ID NO: 183240 - DNA, 506 bp, Cannabis indica
attacataattggccttcatttaatttataaattgtgagcttgaaaaataaattagaactattattcatttttagtcatattttttaaaggattattacataaaatactaatttttgtaaaaaaatttaaatttttacgttttaattttttttatatatttttactgtatttcataaaaatacaaaaaaaaaaacttcaaaacaatataaaaataaataaaaataataaaaaatcaacaacaaaataataaaaatacaatataaaaatacactaaaaaatcttattttatataaataaaatttaaagtctacaaaaatattaaaaattctgtagagatcatatttatatatattttttgttgtgtgtgttttttttttttgaaattatttatttttgtaaaataaaaaaatcaaaagggtagtttagtaattttcttaatgaattgaaaattcgaaacgcaatccgaaaaaacccagctcgatttaaatggtaatataaaacaaaa

SEQ ID NO: 183241 - DNA, 545 bp, Cannabis indica
atgtaatttgtacatgtttataacaacagattacttttacacaaaattatattgtaagttcatattatatattagacaactaatacatttatgcttttttttgaggggatgagaagggaaatatttagatatatgttatttacattttatccttttttatagtatttgaacaaaatattaacgaatttctagacactgttaaatgaaaactgatcaaggtcctaatgttaagtaatttacaaaattagggtaatggagattaattgcagttatttggcaaacatttgacaacatacgaaacgtactcacacatgacctatcatagatgttacttttttttttttttttaaaaaaaaaaaaaattttagactgtgttttttaccgttatatattttgtgccgctgattttaatatagaaatattatgtcttttttttttttgagaaaatatagaaaaattatgtctataacattagttatagaggttctttttttttaaaaaaaaaataaaaataacgaaaacgtatagtggattaaattttatag

SEQ ID NO: 183242 - DNA, 908 bp, Cannabis indica
accacgagcttggataccgaatagatcactgagaagagctgcaacgaaagctccatgaagaggcttaccactattgttgccagtctctccccacatgtaaagccttgattcttctctctcattatgagcacgtccgtctttaatagtgtggtctgttgataggtaagaatttgttgtggaataaatgagaaatgatagtatagcttgtcgtttcacacttgtgtttcctaaaatttgtatgttcttatttgggagaagcctctttagtgccttttctacatagaaatgctcatatttttcaatcacttcataaccaatgtattctttcacccaaaaggccaatgctgctcttattgtttgtattatttgtggtgtcccagcattttccctttcttcaatctcctcataatataatgtgtcctgcattcatgaatgcatattatgtactaatatttttaactataatgtaatataggataatgcttcgttttatgtatttaaaaacgatttttttaattttatatttatattaaatattattttctaatttatttcttttttaatatgaagataatattaaatataaatataaaaaaaataataatacattaaaaataaaaataagggaaattaccttatatactattttttaattttttttttaaaatttacagtttgggtttctaaagtggttgcagcgttagttacaataggagtttctatacgattttttgttgcaatttaggttgcggcgctagttgcaataggagtttctaggtagaattctgtaaaaataaaaaaaaaaaaaaactagttctgaagtgtaaaaatgaaaaaactcctaaaaataataactctaattaaagttatttttaatacatctgcactactcaagtaattatcataat

SEQ ID NO: 183243 - DNA, 752 bp, Cannabis indica
aaaaaaaaatcattaaacatacaaaattaaaatgacattaaaaatccaaaacaaataacaaataaaaaaaaatatattaccaaaacttaaattttttttttttaaaaaaaaaacatactacaaaaatgaaagtatatcctaatcatataaaaaatacacatatataatagtcttatataatatacaaacatattatttaaaaataaaaaataaaaaattctaaaatatactgtatgaaaccaaaagtctacgtttaaattttttttttaaaaaaaaaagaaaagaaagtataagtttagctataaaatatagaacaatgcaataatttaaaaaatggtatacaattatgttaaaattgtaaatgagatagactaaagtagtgttcggtaaccattaaaaaatcagttttttgattaattaatcaaaaatcatgaaaaaactacaaaattttgttaagtaaaatttaaaaaaacaaaaaacaaaatggttcccgaacgaaatttaagtttattattaataataaactagaaaaaatgtgtgtatatgtaaattatctaaaattaaacacgagtcaaaaaataaagaagcgactcacatacaacacattttataaacccctaattaaatccacgaaaatttcgtgaattagaaccatcctggagtaaagctgactgagtcatcaaaagtagtatacaattagcaattttgttttccaaaagagggtaaatctggtaaaaataaaagaattaagt

SEQ ID NO: 183244 - DNA, 695 bp, Cannabis indica
gctaggaaggttagattcatctctttcatttccctaaaactatggaccccacttgatttgggaaggcagagcttatcccaaaatatttaaatgaatcccgtggttcctcttctcaaaaccccacaagaaatcacggacccaaccatcaattctattggccagactgttagagagcttggtggttttcattgcatacataggcatggatagacccacagacttaataagggtcgcttgcccaactttcgagagtagtttttctttccacccttgaagcttgtaacttaggttatcctgaacaaaattaaaattagcatctttctacttagaccggaaaagagggagccccaaatatttaatgttaccttctggcccactaattcccaaagcttctctaatctcctttttcacattgttcggagtgttattactgaagaaaatagatattttaagtttattgacatgttgacccaaccaagcacaaaaacttttcaagacaatgccagaagcttctagcttctcccagagagactctacgaactaaaatcaaatcatttgcaaagaaaactatgggagagagtaggaccactccgggacagacagattcttttaatactaccacttcccatagcttcttctagtagtcttgacaaaacttcgaccgcccatataaaaaggtaagaagaaagaggatc

SEQ ID NO: 183245 - DNA, 691 bp, Cannabis indica
tgatgtgggccccatcattccttccaaatctaaggatcatagggttgaggacctcttcatacgaatttttctatttcctcttaatgtttcgagccactgtctcttcaagcctttttagctgttcctggacttttgctaggtttacctagtggattttgaaagaaaggttgttggcaaaagcctgggttaggtgtgaaaggtattcggttgccaccagctcttaagcacacccattggcattgactgcatgggatcgaaagacttccggtttcgtgaacgtgtccataactttctcatggatctgatttggattcatacacgggaagcccagagacctcatttggcattgtgcggcttccttaattgcactagcgcactcaggtgagcaacaagccgttggttgaaccaataggggctctggcagaagataccaccagacacccaatcccagcagaagacatgttagtaggacgaatcggctcttgcgtaggcgaaggccattgcctctgataagccgaatgtcctgtacgctaattgtctgtggcgccgctaatccaatacgcgatccggggatctaagtaggtggctttgttgcctctcttttgatctattgtcgaagcaaaaagaagggcaactgtctcgaatcagcaatgccacatctgactcaatcaaaaagcatttaaaaacctcc

SEQ ID NO: 183246 - DNA, 729 bp, Cannabis indica
cataacatacataaattggtaagtgatacgccagatcaattttttctaggaattagactcaaaactaaaagtttttcatatcgatagatagtgtaggaaaaaccctaaatatagataaaatgtgaaaaactaagccctaaaatctaaaaaatctagtgaactgaaaccccaaaatggtttaccttttttctggggccctactaggaaaacctttcactatttctgtagaaatgtgaaaaaaaatttcctgcaaaaaataccaagcctggaaaacatgctcaaatctaccctaaattcaaccaaactctccaaaacacctattcaagacataatcaacataattcaaaagaaaaaaccaacatcaagcttctacaacgaaaatgaccatttaaggttcaaggttgagcttcaaaactcaaatcaatcttaaacactactacaaccaagaaaataactcaaaacatcataattaaccttaaaacataaaaaaaaaacatccctaaataaccccattttgtatagaaccaaaacccttaaattttgcatgaaacctaactttctactaagaatatcaaagagaaaaggttacctcaagttcgctatcaaattctttgtaagctgaattcaccttgaattctggtcctaaatggaggaacaaacttggtcttggttgggttactccatggtcaaacaaagaagaaagagagaaaggacttggttcttgatttt

SEQ ID NO: 183247 - DNA, 660 bp, Cannabis indica
gttttgagtagttagttacgaatattaactcaatatatatatagacttatagtcaattttgtatattgctttctctttgtgtttcatagtatgacaatattggaccacattagccctgactaagataagtcatcataaaatatatatatgagaaattaatttattaccaccaactaataaatattatatagatatatatacatgtaattacatatttaaagagagttatatcatatatatatatatatatattttgggatcttgttaggtatatatagggtgttacttttggccatattgtaggggcgtttttcatttctagtgagaaattatattttatctttttataagaaggtttattatagtagttagccagcctagtcattatgcctattttcgagagttattctgaatatataatttttagtgtcaaaaataaattaagttcaatatcatgcataattaacataaagtatacacttgctaatcactatttgaatcttattttttttaaaaaaaaataaataaattaccaactgtaattataataatgtacacattttatataaaaaaaattagtttacaaatatttctctatatatatatataccaaattaatagaaaatgaccctatattaaaagcaaaaattgatatacccc

SEQ ID NO: 183248 - DNA, 668 bp, Cannabis indica
aaatatagtaggcaataaataacaaaggtccttgtttgaataatattcagtgatatggataataagacttgtaagagtagaaatctcgtccactaatttgtttcattaaaacatggaaccagatcaaaaacaagcaatataattcccactttcaaacttaagattacaaaactcaaatcacagaaaaacaaacattacccagaaacaaagtcaagccacaacatccaaaaaagtcaacaaaagcacaaaatgcctaacaaagaccaacccagtaacaatctccaggttacaaataatgggtaagctctcaatttgattttttttttttttttcttcaaaaaagaaaacccaaaaatcaaaaagtaaaaagaaagaagaagaagaagaaaaaaaacaaatacttttaccttttctgtgtctctatcatcctcatctttactggtaatgacctcagaagaagaagagtttggtttaggttcctgatccatattatcgtccatagaagtcgcagaagccgaaactgaaggtccttgagacccaccggaagtaaccggaacttccgccaccggtatagtcttgccgaagagcttgatcgccgggtctttaggctccgacatttgtgctctcatttttacccttttgcgttgtttttagagagagaaagttag

SEQ ID NO: 183249 - DNA, 1118 bp, Cannabis indica
gttcattatttttatttattttactacaatctttttcttatttccctttttttttttacttcatcaacaaaggaccataattggttttggaatatcaaaatatctcaaaaattttgaaaatgtgtgtattatattaagatgtggaaacaagggaacgaggatagtacaaggataagatcgcattaacaattttatatttttatgtttctcttttaagccatacagtgatccatctaatcctcttttttttttttgtctctaactaaatgtaatttaggcatgtgagcaattattccaccgacagttatgtatatttatatacatagtggggttgcccatgccgaaaaaataatataaataaataatttataatttatttaaaaaaaaagtctataattttattagttttgaaaattaatttttccatgtgtaaattaaatttattttaaaagaaaattataaataaattttaatgtatattatgcaaattaaattttgtattcgatttaaaatagaacaaaagaaacttttactttttaaagaattgaatacaccaaattatattcaatctaaacaataaaaataaatttattttttgaaaaaaaaactaataaatagtataaaaataacaaccaaataataatgaagagtagacaaatatatacatctataacatctacaataaggatggatgttcaaaataaaacaaaatgaaagacttgtttttatctttttgtttttatcatttatgttttatatattttaatttttaataaatgattttttgtatttattattgacacctcaaaatattcaatgtcatagatatcatacttaataattggttggaaatatttttttgttctggttttttattttatttttatgaataacttttgtactatttttttttagtaaataattttttgtactattattattatgtgagagtagtacttgaagacactcaatatcatataaatgtgatatgaaaattgatattgaaatacaccaataacgatatgctacattttgtggtatttagcaccttaatctacccctgaacattttcgttgtaatatgtacagatctttattaacttcaattgtatgagaaag

SEQ ID NO: 183250 - DNA, 820 bp, Cannabis indica
gtaaaattaaaatataaaataataaataaataaaaataaataattttcagcaaaataaaaataaaaataattaaattataaaataatatatcatatataatcaagtatatatcataaatatataataaaatagtttatgatattttttatttaataaataattaaaatagtaaaataaaaatacttcaataatataaaattaattatttatcttaaacactaatttattataaatattaattttttaaaatacttatataaattttctagtattttaaaaataatatataattttattgtcatattgtttctcttagaatcaatttaaataactattgtttaattaataatattttaaattttaaaaacttacgtataataattcaaaattatacatttttactaattttaatgaataaggttttgataaaagaaaatgtatatataaatgtgtgataattctttcatttaaattcttattaaatttaaaatatattaataaaattaaaattaaaaaaatgaataaaaaaaaaaaactcacatgcgtgggattatttatcccactctgctagatgggataaataatcccaaacatatgagattagctggattagttctccagacttctaatatgtctaaacactgaattgaacaaattagcatgtctaattcgatttagtcatgcgtaccgaacgagcccatgaagtaaatctaaggctaccacgtaactattattcgacctttatttgtcccaattgattactatttttaaaacaccatccagataataggctagtatacatgcttccctatattttta

SEQ ID NO: 183251 - DNA, 562 bp, Cannabis indica
actcaagttgttactaatgcaacaatatttatgttaaacttaaaagaatgctaagtaaatgaggtgtaatagctatattgttaactatataccttaaaatccttcataaatagtgcatagatgataaacgcagttagataaaattcttctttctaaacattttctttgagtattttattagttgttattagatgaatttttttatctgttagtgagtatacagtctcgcaattataaattcatgtggaccaatactagcatgagtaattaaggatgatatgcagaggcgtaactaggattgaattttaagggggtcggctaatagtgcaagcaaacgtgtacaataacaaggcttcatatatagttatttaatgacccatattcttttataaatggtgctaactatttataattgatctaatatatatatatatatataaagtgtggctatataacagaattcttagttttatgaaaaatttcatgggtgattttttatttatattaaaaataaaatagtttaatgagaaattcaatgggtcactttttatttatatataat

SEQ ID NO: 183252 - DNA, 773 bp, Cannabis indica
aactcatcggcgcccgaaaagtcaccgaaaaagtcatcattattaaaacagtcaccagaattagatgtctcagatataaattaaaatagatctggttcgaataaaagcaaataacacaaaataactcaaaccggttataattaaaatagaatcggttctataacataatgaataaaaataaataacacaaaataactcaaatcagatataattaaaatagaattggttctataacagtgttataatgaataaaaacaaataacacgaaataactcaagccggttaaaactaaaatagaactggttatataatataatgaataaaaataagtaacacacaataactcaaaccgattacaattaaaaaagtaaagataaaattagttcctaaaaatactgaaaaataaattaaaaataaaactagtttcacaacaaaatacctcataacacgtaatacctcataaaattggttataatttaaaaaggaatatgagaatcaattccaaaaaatattgaggcataaatataaaaagaatcaactctataacaaaataaataaaaataaataataacacacaaaaacctacaaatataatatttaaaaagaaaatacggttatactttataaaaaaaaataaatttagtaaagtcaaagcaaaatacaaaagagatctttgacagccatcttgctcccttctaccgaacttgaacaggtttatattctttaaatgctaagtgcatattacttttattgaacatttattatgtattcta

SEQ ID NO: 183253 - DNA, 730 bp, Cannabis indica
gggaataaagaattactacaataagatcttagatggaaagttggtaatgatttttagatcaattgtgctactgatccatggctgcctagtcacactatttttaaacatttatggtgggttctgctacaaatcttaaggttgaggcattaattaatgaggatcgacattgaaatttatctcttctcaatagtcttttcttagacattgatgtggaaatgattcagagcattccattaactattcatcctcatgaacattagctgatttggcttcatgaatctaatggaagtaacacagtgaaattaggttataaattgggttctacccttgcggatcaatctctctcctctagttcacaacagtcgattcatatgtgaaaattttttttggggcactttctctcccttccaaggttcaaatttttttatggaaagccctccgcgagtgcttacccattgttgatgctctccataattctagatgtgttttatgtaattgtgatagtaaaatacaattcatgctttgtttaactgtaagagagctagaaaagtctggagagatttcattttttttttttaaattgtagaatttgcttagagagagacataatctcaaagatttgattcttaaagtgtggcaagaatggtctcaatttgaattggaacaatttgcttataccatttggagcttgtgttatgaaaagaataaggagaggcatgacacaaaatcg

SEQ ID NO: 183254 - DNA, 725 bp, Cannabis indica
ttcatttcttggttccatcatttaattgatactattttagttactgaattctgtgtttgggtatgtcttatgttgataactactgtcttgtatgtttgatttgactatgttgtcctctgttatgtcttatgtagttggaattaattgttctgaagatattttcctttttgacttttccttttgctctactttgtggtctgaaatgcctttcattattttttttttctttgtattttttttttttaagggttattttttttttttttttagtttgatttgagttttcaagagatgaacttcatgatcttagtttagtttgatttttttttttgaaaggttagtttagttgatttagttggttgaaagattgatattttattttttgtctcaactaaattaggaaagtgaaaaaaaaggaactatttttaccatttattagttaagagattttcttgaaagcctgtcttttttaaaaactaaggtgaaataattttcatttgattgtattttcggtggcgtttggttgggaggaatgaaaatataagaataagaatgagaataggaatatgaatggaacgaaataaaatttaaaaaatataaaaaaaattgataaaataattattaatttttttcttggatgtattagaatggtctttcttccaatttcaaaatggaatagtcattctacaaaaaattgaaaattgtttcctttcattccatttcat

SEQ ID NO: 183255 - DNA, 651 bp, Cannabis indica
ttttttcaacttatcactatgtatttacatgtaacttacgcttagtattaatataaaaattagtacacaaataaataaataaatatcattatttaagagtaaagattttatgttttttaaaaaataaaagtttcgaaattaattagttaataaataaaatttgaggactaatatatcaaaacttagatattttagaaactaatgaattaaatataaagtttaaaaaccaatttatcaaaaatatgtataatttaagaagttgctgtataaataaacttcaaatttattgaagttatctaatcattatgctttcttgcaaaaataaaaaattataatcagtatgctgatcctatgaagacaaatggagcccaacttgtaagcccatatacatcttaatgacacataatttggggattcttttttatatttggcacattaacttcgatctaattttcaaaaatgatttggccatttaatttagttttttcttttagggataatttcacaaatgcacaaaaacaacaaaaatacggtttcatggaattttaaatatttttacgatttttttgattttatttacataaaatacggtctttttatgttgaaattttgttcatttgttgttaattttttattatttgtatgttattt

SEQ ID NO: 183256 - DNA, 595 bp, Cannabis indica
actaagtggaattactattgtttagaatagaattttttccttcttttgcttgtgctatttttttttttttttgaatagtgtttgtgctatgtacttacattacttgcatttctcgttataagtttttttctctcacaagaggaccctaattttttaacactttcttatacattcatgaatgggggtttaattaattaatgtatatataccatattgatatattcatatgagctttttatataaatataaatatatattcaattgaatttattaaaacatgtcaaataaagtctttttttttttattttaagcatttatatattacaatcatgttttacttgagactcgaacccaggacctccaacacacacacccacttatggccacttgagctagcctcaagtggttatgtcaaataaagtcatataaatgggaatagcctcacaaatatagcaaatcttaaaccctaaaaacattgtatacataatagaaaaacttacataattcactaaaaatttagaaaaaattacaaaaatacgttagtgcagaaatttttatttttactcattgaatttttttatttacaaaaattaca

SEQ ID NO: 183257 - DNA, 883 bp, Cannabis indica
tgacaactcttttttcctatttgtttgttgggttaatattgtcatcttttgtatagtctctatcaaagtctttagttggttattctaatccagaattatctaatggtattcaattattaaataaataaaaataatagtttaagtattttattcataatttttattttaatggtttgatttagaaagataattgcaaaatttataactatgtaattttttaaataaatagaattacactacaaaaaacaactactacaactttttagtaataatacaatttttcttttactaaatgtaacttttaatcacaataagaagttatttgtgactaaaaacacatatagtaacaacaaattatgattttggtgagtaatatatttagtcacggatcctttaatgacaacataagaataacgattttataattaatctagtcacagttatttatttttacttttagtcacaagttttattgtgattaaaagtaagatcttttgtagtattatttgggagtactcaaatactcatcatttattataaatttaattcattacaaaattgttttataattttagtagtcatagttttttattgagtttaattttatttgaaaaatctgcaacttatttatttctcaaaatacataattaattttcaaacaaaaactaagcaaatatttgtatatattttaatgtatatgacaggttcatacatctaagaaagcatgtgtagctagttatccaagcattgttcaaaatgagattctttggttttggccaagcacagatcctcaatcaaaagatattcttacaaagaaaagacctccctatattgaagaaatagatgacccttcattctctaaaattgcatggggccatagaga

SEQ ID NO: 183258 - DNA, 559 bp, Cannabis indica
tatcattctcgatggtttttcgatatttttttcaactaaaattttcaatggttttttgaaaggttttcgacaggtttccgatagaagataattaaacgaagttggcttttaacttatccaagttatcgataggattttgttttcatgacaattttttcgatagttttttgatgtttttaggttattatcgagaaactaatagttgtaaaaataataataaaaaaaattgatccatatcgtcgttctccggtttatcttctcagtggtggtgacgatggacaaggattggtggttctcaaccttcaaggctttggttcggtgggtcatccattgtgaggacaaagaagaaccacgagacatctgtgctttccaaggttttggggctttgatatatggacaaagaagaggtggcactggtagaacttaggactttggtggggggaggggctttcggtggtggcgacgatgacaagaagggaacttagggcttccaggggggggggggttctctccaaatctaaagagagagaaagatgttttttttttaattgaaagggat

SEQ ID NO: 183259 - DNA, 696 bp, Cannabis indica
tttgaaaatgaatgatcttaggctcatatatttacaggactagatcaattatcattcactacgttactcattttataataaaattgaataaaatatgatagaagaactgcattagtgtaaaagttatatttcgagtggtattattaataagtcatctattataagaacacaacaaacttagtagtgtaaaaaatttaaggaaaaaaatcctaattattattttttttattttatttttttattttatattcttgtgaaaaaagaacagtattttgtaactatatttgctaagaatgttcacaaattttactttttgaggaaatctataacttataaataaattgctatagtggtatatattaggtgtagaaagtaaaaatcccaaaattgtgtccaacggactaacgggagttgaacgcacagagccagcagatccgttggatttgtcggtgttagtaatcaaatcactgaaaagacgttattagttattacctatatcgtcaatactaaaacaaaaacacagcatggggacaataatgcaattcagtgtatgggcttttattttgtttttgttttcatgaaatcttaactctactcattgtttaatcccattatgggttcaattcaaagtcatattctttaggaggtgttcatcaaaccgtccaaattgctcaaatcatctgcaccacacccata

SEQ ID NO: 183260 - DNA, 1175 bp, Cannabis indica
  modified_base (1098)..(1098): a, c, t, g, unknown or other
tctttctgatgctatcatcagattggttgataagaagaaactcctgccaagatttggaagaagcttgaagaacaatttcaacaaaagctttgactaacaagatctacataaaggagaggatattgggttcaagatgagtcatacaaaaaccctagatcaaaacttagatgaattctaaggatgcacattgaattggcaaattcaggagagaatgaagcaccaagtgatgaaaatcaagcaataatcattctgaattcattgcctgattcatacagagaagtaaaaacagctatcaaatatgaaaggacttcaataacacttgatgaagtcatatctgccctaaaatctaaggatctagagatgaaaagtgagaaatctaactctcggaatggtgaaataaatctaagtaggggaagaccatctcacaagaaaacctatcagagtagaggaaggagtaatagtactaatcatcacagaggttcaaacaaaggtaagagtaggtcattatcaagagattatggtgacactagaggctgtttctattgtggcaaaagtggccactataaaagagactgctatttctacaacaacaaatacaaaagcaagaaagggggcgggttccagaaagatcaaatcaaaacaaacatcagaatgacaagcaacaagaagctaatttttcagatggctatgatagtggtgaagtctatgttgcatccacatctttcaaagaagattggttacttgactttgggtgtacctttcacatgacaaactcgaggaccattctaacagattacagagattctaaaggaggcaaagtaattctgggaaacaacaacacttgcaacatagaaggctcaggtaatgtaagtttcaaaatgtttgatggtgtggttagaaccctaacaggtgtaaggtatgttccaaatctcgctagaaacctaatttctataagtgttctagatgacatgggtattgttagcaaaattgaatcaggttctatgaagctaagcaagggagctatgaccattatcaaaggccataaacatgaaggactttacgtatctgaatggagaatcagtgacacaatgcaacaanactaatcagtgacacaatgcaacaatacagtcaccagcaatccagaagcctaaaaggcagttctatggcacagaaga

SEQ ID NO: 183261 - DNA, 868 bp, Cannabis indica
attaatcaaacctaaatcgctaaccaaatgtacaatatagtgagtaacactttggtttgttatgtggtgtttatttattcattttatgtttatttttattttttaaaattaaaataataatttggattaataatattttgacacgtgacaatttaaaaaaagaaaacggctcagttaaaattaggactaacggacaaataaaaagtatgaccttgatgactattgccgctaattttggaggtttgggacttatttgtatcaaaccgaactttttcaggacttttgccgcaaatttcccagctaaaaatatagcccaacccacttatttaagaatctattaaatctcataactttcactgaaagtgctacttttaagataaaatttaaatagcgtcgtaaaaattcaaacaccaaaaaaaaaaaaacgacttgggcatgacccttaagaaaggcacccttccatcacaccacaatttggtagtcaatataagtgatgtttcttacttaatcaaattgcacaaagttgttagaaaataaagaaagaatagttctaattattttaatttaatctctctataaagttatggcaatatagaaacaaacttgacccattaaagaatggtgagcagccagcaagctatgccagctgaaaaaccaaaggacttaattaagtattgtgaaagcttcttggttggcttttattagtttcattccctttttcacaagaaattaaattagataataaaaattaaaaaaaaaaaaaaacctatcaaaattaaattaaagtcttcaattcaaagaatccacttttcctacccttaaatttaatttttttttgcttaatggattaaagatattcttgattgcc

SEQ ID NO: 183262 - DNA, 863 bp, Cannabis indica
aaaaattaatagtcaaatctataaagtaaaatcaaaatactgatactataaaactaaaaacattagtatcaaactaaaaacatgctttacttatagaaaaatccaactctttatttggagaacaaatcattttatagatccaataatcttaataaaaagaaatctctcctactggattgagaatgtggtaagatcaaaagagtagaagagtaaaaagaagctcatattggtggaattggagatgaaaaactaaccaaataaattattatttttttaaaaaaaaaatcagccttcttgccagaaaaaactttttatatttccaagaataacatatggccttttttgcaatcacataatagttaaagggataaaccttcaaaagtcatccctttctactgttcaaaaaatgtctatatgctataggtacaaaatatgactactcaccatagaaattttctatatatatattttttttgcttttttttgttttgttaaatttaagacatttttaaaaatatttttatatatattacagtcactttagattgttttatagttgtccatgttcaatgaatctaaacaaaatcagaaagtcacagtccacactcatgtaatattaatttacaattataaagcaatcatctcacttctcaattctcaacttaagatttggtaccagaaaggtcttaccaccaacctccacgtatctacagcagcatggaacggagttcgccagcatcattcaagcaccagagcacaggccccaagcccaccaatcctcgaagcccaacggaatccaattgatcgaccgtttcgaccgggtccccgatcgagtcgacctcgcccaaggacgatcggcgacg

SEQ ID NO: 183263 - DNA, 826 bp, Cannabis indica
ccatattagcaacgatttttaaccgttgcctattttgctcgttctgggacgattatagagaccgacgggaatactttaaacggttgtttaaagatgtcaggaaaaactatttttgtagtagttaattagattctaataatatttcaatttagcatgagattttttttaaaaaaaatattaaaaattgcaatgtattattctttctcaattggcaactacatagttggttgaaaaaacttatgcatgggaagtaattataatcaatgaccttattcatattaaattttgaagaaaaaatcactaaatataaattagtgattaaaaatacagtttttaaaaaataaaattaaagaatatgaaaaacaataacatccttctttttaaataaaaatatgtaattttattaactcaaatcatttaaaattataacatcacgtaaattacttagaatcgtaaaatttgaatatgtacaactaacatttaattataaagctctagttaaatggtaagtaacacgattagtagatcgtttaacaaaaattaaaaagacattattcaaactaaaaatatgtatgcactctaaaaatataaaactcaaaaataaaaatcatatctaaagaattttggaatgactagcttggatcgtgactaaactatctaactccaccaccacatcatgttgcctcaattcttacaaccaacttaacacctccttaaccaatagcttcaacaagaacagaatcaaaatttttactaatgtatttatctgtaagtaagaaactaaaactaattaattacatttcaaaatactttaaaaattgatatt

SEQ ID NO: 183264 - DNA, 720 bp, Cannabis indica
atatagcttagaaccatgagcaaagattctcatatgccagttaaaacctataatccacataaaatagacaaatggtttaaataacaactttaccatgccctaacaatatcaatagatcaaataaatgtgtaacctaacacaatacatttaactcaatataaatataaaactccaatagtaaaaactatttttattcggtcaaagaaaaagagaaagagaccataaaaaacttaaaaaaccatttttagtaaaacaaattgaaaaaaaaggagagtaaaaaccattttcaaaggaaagaaaaagtgatagtaaacaccattttcattcattcaaattacaaataaactatcaaaaatcaagaaaaagaaaaatgggattgtatctccatcgttgtcctcctccattattcgattgatttatgggcacctctattatcatctcttcaagctttaggaatttatcttaagaattaggacaaaagggacgatatggacaaaatcgacttatttttggtacctaaacgattttcgtcttcaatatttggggatttaggtagatgcgattttactttaactctcaaacaatttaattaatttaatttttatttagttagttgtagttttttaaatttattttagtttattagtttttagattttactaataaattaaaaaaaaaacgcctcggaattaaactcatggcgtacacgtgtctgcctac

SEQ ID NO: 183265 - DNA, 752 bp, Cannabis indica
attatgagtctcgaaattcgaagctcgaagagaagcccagaatgctaggaacagcagctggccgaaatgctcactggagctcatccactggtggcggcagtttttggtcaaagtggatgcatgaaggatcgagccacaaatcctcgaagcccttaaggaggagaacccaaaattaggtttttttgctcattaatcttctttctcaaacactaaacaaactgtatcctaagccaaaaaaaaaatagtaaaaggtatgccaaatagtactaaaaaaacaactcaaatggttagctaaccagtaagatgtgcccaacgaaattgtcttatacataattatccccataaacttcatatgacccctagtaaatattctttcataagcaataaaaaatcctaggtatgtactccaaaaatctcacataaaaacacatatgaaaacaaaatgctatatctgtagggtctaatagtctcccacttttctctttcattttcccagcaactaaaacaaaatcaatacaaaactagacctatgtaaccaaatcaaaagttatcatcattctttgtatccatgggcttattgatacttcaaaatggaggagtcagaggtactacatatatatgtatatatgtgatcattctacatcatccatgttaatgggtaccattaaaattttggatttagtattaactttctgaaaccaatgggatttgaagccccaaaatacacacatggaagatggtggttacaatac

SEQ ID NO: 183266 - DNA, 586 bp, Cannabis indica
ccgaccagcgcagattatatctgtcaattcttcaacaatgagatattggagtctagcacaacaatgatggttttggccaaataatggtgaaaagggaaattcaacaattcccttacgccatgaagtctaagggagaaggaggagaagtgtgcatgcttcactcttctgctaaaactcccaaagcaatgcatgcctaccggccatggtgagaggtgtcaccaaaacctgaagcacctgggccatcgagctcgaccaatataggtccacctgtgaacttaacatggccataaaaggctaaactctcaccagcttcatggctaaatataaaagcatatctccccaaatctcttaagattcaggaaaaaagtaagagccaaagaagaaggaagagcaagtgcaagacaactcaacgtagaaggtgcattgaccacctactcgatgcaggcatggccctcagggcacttgggggcgatggctacacgaggaaatagaggctagtttcaaagcttctaagaatgaggctgaagatgaagctctaatttctagccccaggctatcacacgaagcgtgggctaaatacctaaac

SEQ ID NO: 183267 - DNA, 709 bp, Cannabis indica
gttcattatattttatgctatttgaagtacacttattattaactatcttgtatatattggagtttgaatatcagagtatagtgtcaacaattcagcatggacattaaaatagacagagaggattaacttgaatgaagaacagaagcaaagaatccaacttgccagagctgtactataatgatgcagatatttatctaccttataataaccctaaagtgctcatactgctgttattcttttcaatgtaagagagcagaatttttttttttgtagagaaaccgatacaggttaaaataacaaaggtaacaaagttacgcaatcagaggaggactttcttccatctataacagttcattgtctatcctaagagcatgtagagataccccatgagaactagacaataaaaccataatataagaaaagaaaacttcaaaactaagaatcgtcacttccgatccactagtagaacacctgcaaaataaagagaaaaaaattaatacataataaatatttaataaaaaatgaaattttccttaccagaaaataaaataaaatatgaaattttatataaatagttgttgggttttgtgccctaattaaaacccatttcaaaataatcagatttattagttaataaaggtcagaaataacattttatgttgcatggttcacatgatttatttcatgattatatataatgtataaattc

SEQ ID NO: 183268 - DNA, 819 bp, Cannabis indica
cctggcacggtggtcctcgacgccagaagatgatggtggtcttgggctttctacctgcataatcgagagagagaaagaaaagagggtatttgcaaaaataaaaaagaaaacaaacgaaaaatttaaaaaaaaaaagtttttttttttaatgattttttaatttaaattttttaaatataattatttatgtgagtcaataaaattgtgtcacgtgtatactgtgtccacgtggacaatccaacctggcagttaacagctaaatttggatagaagttgtaatttgctaacggtattgtagttttgggagttttaccgcccaaatttaagtttattttacaaaattttatttttattttattttgcttattaggtaagaaattaaattagagaatattatatcatatcagcaacataatagagaaaattgacataatgtagctgaatactaatttttgataaagatagatagtttaagtagcatatttaatactcatgtattgagtataattttttagtgacaaagttcaggggaattttttattattcttatttaaatggtgtaagagagtaccattataaataaaatcgagataatgctaagccactaagctaagggagagatcatgagtttgaactcaaaaccttaagctattaaattattatgctaacattaaaaaaaaaaaaactcgaagacaatactattattaaaggaaaaaagaaaaaaaaaaaaaaaagggtagcaatatgtaaatttacataggaatgataggtaagccttgtattgtgacgtcggaattttgtgttatagtagcgtggcct

SEQ ID NO: 183269 - DNA, 604 bp, Cannabis indica
  modified_base (456)..(456): a, c, t, g, unknown or other
ataattactaaacaaaaagagagacctaatatttatttataccaataataatattatattttgtaagtcgttaagttctttatttttacacaattatttaacttttaactaaaaattttgatatttcctatttaaaataaaattacaaaaaaatactaattttgtgcattatttatttttttgtaagaaaatataccattaggaaaaataaaattgttacttttttaaattactctaaagattgtattgccattttttttattctctctcaagaaaacatgtgttatttatatattaactattgtttattatgttgagttaccccatttgcaagaagagtgagagcccaagatagaagagaagaggctgaagcagtgtgcatgtttgggccattccattgaaaaatgttatggagtccagtgagtgatgtagtaaagcccacaacaccagcaaggngtgagaaaattatgtaaaaaaccagttgccatgtacccattgggaagtgattggaaatatctagctggaatggacagaacagaagctgcacatacatatataaaatatgtataaaacccatagcagagtgtttatacatatatatttc

SEQ ID NO: 183270 - DNA, 683 bp, Cannabis indica
tacattgttttattaccaagagagtacagtgttggtggcaatgctttcaggcaatagtttagagctgaaaacattaggcctgtaggacaagtatgaaataaatgtttcataccaccatcaaaaaacagattacataaacttgagaaagagactaagagagaataggagttagaactagcttcattaccctgaaatgctggatccaagggcaagaattgtggcgtaagtgagccttacttggtgggttaatacagaaatgtatgaatcgcctatgcaaaccttgacttggaagtcaacctacattgatacaccaatgatttagacttcaaaaacaatattattttttcactgatcagaggattgaaagcaacctacctgcttggtcttgcatagatcttcatggatgtgaaaagtgtttggatcaaaagaatcatctgagtcttgaacatgaatggccaaaacactatcctctggcttaacaaccacagttagtaaccgaagtaatatctctctactgtaattatcagacttcaagccaacgatgatactcctcttctcgtgatctggcttggatctgaaagacaacctttggaggttaatccttgaacgtcccaccattctcaacaaaatggttagtattagtgttcagaaaccttctcattgcaccactgaataatgtcttg

SEQ ID NO: 183271 - DNA, 1047 bp, Cannabis indica
attgttaaaatattttgataatttattttggaatagatactaataaagtatttcacctataaacatagagtattagtcctcattctcatcacttattctttgaaaatagtaaatctatttaaaaaagttaaagatagcttcagaggcggaggtacattgcaaccaaatagtatgtatgcattatttttctaatttttattatatattatctaattttaagggtttgttatactaagtgtccccccgttgatcaaagtaaaatatttaaaagagttttttcaaataatattaaaacaaactttacttgtagagtaaatgtttcaaaaaaataattaattttcttatttttttcttatttagtaagtcattgattttttttatctattattaaatttaataattaataatataaataaattagcaaaattattgtccaatatttttttaaaaatatcaaaacacttacaataatcaagtatcatcttaatttttttttctatttatttctaagcaaatcacacgagtcactatttggtaaataaggtgatcatatatcattgggttttattttgatcctatactataaatatacttttattattaagataaaaaaataggaaaatttacatagattactaacttttcctattttcttacaattttactgtgatatgcggatattaacttttttactgatttttttattcggcagtatactgccttttgtgtacataatttttttgtttttttgactgattgggacgtgggctgtcataaaagtgacaagttctttttgtttttttttattttaatggatttaaaaattattatttattatttttaatatttaataattattatattatttttagattaaaatgttgatgggatgtgggttgtcacaaaagttacatgtttttttgctttttttttttatttaaattagattttaaaaatctcacccccatgtcccactattcatcttcttttttatcttcatcttctagttttttttacataaatccaacccccatgctctactattca

SEQ ID NO: 183272 - DNA, 565 bp, Cannabis indica
attaaaatccaatcatttaagccttcgagataaagaaaatgtctcaagcattgtcaaacataagcctcttccttcctctgtcatcatcaagaagggtgagttactcaccaaagcttcaatcttttccggtcgtcaaggccagggcagcaggggactacagagacaatcttgaccacttacagagagctccaactacgaagcaacacactccacctaagaaaagagttgccccaacagctccagtaggtataaatctcaaaacccatctcagataatcaacaaattcagcttcgttttcaaatttcaatgctcaaaatctgaactttatttttttgggtataggattatgggacaggtttccgacggcgagaactgtacatcaaatgatggagcaatggatagaattatggaggacccattggagtactcaaatgggtggtcatctactgtgccgagcgaggctactccgtacaagcgagggagaacaccatgggagatcaaagaaggtgaaacagagtcaaattgaggttcgacatgcctggaatgacgaaggaggatgtgaagg

SEQ ID NO: 183273 - DNA, 621 bp, Cannabis indica
ggttataaataatactttagttatggttatttctttagtccaagaattgtttttttttttaatcttttatgagtgattgactaatgtcttacttaataagtaatttaataatattttatttttagtaattaatttttttaataaatttttttatatatatttatgaaatatttttgttttaaaaattttatttgtactattcaatattcttgtattgttatttgttcatgtcaaaaatgatttttcacaactaaaatattttttcttaatttttatttgttcaaaagttataattttattttttattttatttgtaaaagtaattgcaaatattatatataaatacttgaacacacttgattatacttttttttcttttatttttcgttatattttcatttttttcaattttagaatattagaacatactatttctacaaattaatttttttttattttagcatttttgctattacttttgtttttgtaaatttagtttaaattatttaaatagttaaatcgaatataaaaatagacattttttttagggggtcgttttttcattttttacactttcgtaaacagttttttttttttttttttagtttatttttacgttaa

SEQ ID NO: 183274 - DNA, 528 bp, Cannabis indica
caatatagttgttgaaaatatttcacttaaaaacactctatcaggagtaagaatcaaaacttggcaggtaataataattaattatctcattttacttaactaaattaattaacaattttttttaaaaaaaaaatatgttttattatttggtttctatacagggaggaattggatcagttaaaaatgtatcattctcaaatatccaagttagtgatgtgaaagttcctataatgatagaccaatactactgtgacaagaacacatattgcaagtaaccaaagtggggcagtgggaatttcaggtattaagtatgataaaataataggaacattctcagctcagccaattcacctttgcttgtagcaaagaaatcccatgcatagatgttgatctaattaatattcaactaagcccttcaattggggtacaacaacagaggattattaaaacaagtcactgtgttcaaactcatatgggaaatctagaggcaccattggtcccttcaagtattgattattgcttaagaag

SEQ ID NO: 183275 - DNA, 592 bp, Cannabis indica
attttattaatttctcatattttattttactaaatattatgtactactatgcaatttttcttttaattttttttataataaatatgtaatatttatgttattatataaaataaaaacactaactcttttttttttcaacaaaatttatatcaatttttctttttcataatgtatcattctttaaattattgtatttcatatttgttatatatataaagaaacaataatagaaaaaaaaataaactaatataattatgcctagtcaatacccaatagtatatgttagatcgatttacttttgttttatttttttaagtaaaaaaaaattcttttcatgaataagcaaaaaaaactaattgatttaacatatattatatatatacatattcgattagagaaaaatttgagaacaatttaaaggaatgtaagaatataaaaaacacgaattttttttaaaagaatgatacaaaggaaaaaaaaacagaaagaaagaaaaataataaaaaaaaaattggtgcaaaatttatgaaaaaatatattttttcattttttataaagtaaatagccaatatttattataaaagaaattaat

SEQ ID NO: 183276 - DNA, 1122 bp, Cannabis indica
acaagaggatccttgtggctcttcccccttctctcccctggctacttggtgcacgaatacgcttttttggtctccccaatcttgaggaccagcatttccctttagaaatttgcccctctacggacctttccctttaggaagatcagagcaaacttctcgtggatcttgggccttcttattttttttccaggaataattgtagagtttgccttttggggaacctttaggaaggataccagatagggcttggatctcgatttttatgtcctctgactttctaatagtgacataaattcctactcttatttagtcttgcccaatgggttctgtgtttggatgcacatggatgcctacaatttccatcgcttttggcatacgagcattatctcttgaatcattctgttctgctccttttgctctgccaactgagcttcatggtcaacgactttctatctaatgccataagtttggtgtaactactatcatcatatgcctcatactcctcttggttttgttgtattccagatcgtagtttcatcttactcttctacttctactcgcaaagccacatcctctttgtctagccccctagggccttgaggcggacgtggttgcgtgtatgatttctagtttccaccatcgtaccaagaatttacttttgatattccttccacatacaactttctacatctctcaatgaaagcaccaaaaggttgactgaaattttaataactaattaattacagttgtttaaatgattaaaagagatttaatgcaagtatttttacatggttggggcattaatgtgccttagttcacgagtcactactatttaatatagtagtttttcttacagagggtgtttacaccattttttctgacccctttttaagaatatagttggaatatttatagcctcataaagaaggcaaaaatgttactattgtcacaagtgtcgaaggatggcttgcataagttcccagattaagataatagggtatgtatgtatgtttgtcttggtaggttgtataaacttttcctaggtgtttggtaaaataagcccttaaccttctttgattgacgcgatagtacactatgcatccgtcataagactcatagatt

SEQ ID NO: 183277 - DNA, 675 bp, Cannabis indica
atatattatcaaattttccttgtagaatcacccaatattatttatttatttatgggaatgatcgaacttacaatctctccattcatagaacacctcaattaccagctgtgccataagattttcatgtaatttatgaaattaaatatttatatattataagtttttatatatgtctatatattatttaaattttttggggcctcaaaaattattgggcctgggccgtacgccccggctgccctaacctttggccagccctggatctatgtggacaatcacgtgtaaactctgtctggatgattcctactgaaggcatagacttgacagttttaaaactgtgaggattccccttttaaatgtgcctgttttcaattttgtagttgttttaaatcaccgggaatactaaacggcaattcaaaattgtcaagaatgctcaaactatagtcaacaattttaaacacttattcttattagtgactgtcctaaaaaaataactgatttgaggacctacgagaattatgttttttgtggtagtgtttaaatgaatctatatagctagcacttaagagccaaaaacaggatgtatgaaatgcaacaaaaatcgtaaattaaaagaaatttttgctgccatggtcttttattaggatcatatctgtaaactattacttacattac

SEQ ID NO: 183278 - DNA, 585 bp, Cannabis indica
ttttattttttttgattgtaaatgaattaataatgtttttgcccattttttttttaactaagttgtctcttttttagatgattttcttctcgagtttggttgttgagtcttccgctcaatttactataattgtttagtattgtaatgatccctaaatctttttggtttttttttaaaaagaaataaagtgtatgtatatactatagatatagaaaaattaataatataattgttaacttaatcatccataacttttgcttaattacatgttgggatgtttttaggatagggcggtagggctttgcccaatacccctcaacccaagaggtctttactttattttattttttttaaaaaaaatctttttttaacattagcctataaatttttgctttatttttttttccttctaaaacggtttataaaataggataattacataaaatattaatttttataaattttttacatttttacatataaattttttatatatatattcattttagagtattatataaaaaacacaagaaaaacaaacaaaaaaaaccaataataaaaggtaaacaaaaaaaaactaacaat

SEQ ID NO: 183279 - DNA, 546 bp, Cannabis indica
tggtaaaaacttgtttcccaactttaacatatcaaccactcaataacaaacaatattttgtgcaacccttttcagaaaagaaaagcagaatgatgtctcaaactagaaaatcaactgagaagcatttcaaaacaataacaaaagaaaattactctatggttcttccacttctatctactctcatcattgtttagctgcaaggatatcatatctttaagcatttcaaactgagagtgttgaaccactctcttgagtactgtctctatgctcttctccaatccgtataagatttcatcaacctggcaaactcatcataacttatttttccatcctgcaagttcatggaaggtagttgagtaaataaactacttgaaataaaaacaaggacggtctcttatcataccttatcaatgtccacatcttccataatggcttcaacaacttcttcaatgttttcttcaacattaataccatcatcgaagcaatgtcgaagatcgtccatttctatatatccactttggttttcgtcgaatacttcaaacggac

SEQ ID NO: 183280 - DNA, 642 bp, Cannabis indica
tgaaagaacaagttactaacaccaagtatttcttaatattttatattttcattagtgaagcaaaatgataagtggacctttttctttaacaaaaggttgattcgtccaaacaaagcaaaaggacaatcacccaaatctcatcaaccacaagcatttcacctcttaaaaaaagttaagaaaaggtaaccaatatatgtgtacatacatatatcgtactcaagaaagaaaataagaaatataaatattcaaacaacgtgcatataatctcctctctaaattaataatatatcttataaaattattaaagtattagtaaactataagaatgtacagaaataataaaataaagtaaatatatatatgcttcaaaatacaaatgcaactagagcaaagccggtgggacgattgctaaagtcgaagatgattgtcgaaggcctagagccgaggacgactaccgattgaaattgttgatcttggaagaccaaaaaaacaaagaacttgagagaaatctaagtgcacagaaaaccattttaagaaaaattaatagcaaaaattttaattagatacatttaaacacaatagtaagatctatgagaggagagatcttagaggttaagagaaaatataaatatatatacttac

SEQ ID NO: 183281 - DNA, 620 bp, Cannabis indica
agttatcattattgatcaaaataagtagtacataaaataaatcaagtaatcatatacttgagttaatttactactaatttttttatacataagtaaataattttgttataaattccttacttgcctcatcatataatttgtgacctaagaaagaaagaaaaaaatattatcgaaaaatataagataataaacgattaaaccaaaacaaaaataaagataaaaaagattaaaaattaaaaaatccctcatcaagaataaagatttcgaaaaaaaaatttgacaaatctgtgaaaagaaagagaaataagtaacgatataggttaataaaagactaaactaaaaccaaaataaagattaacaaatattaaaaattaaaaaaattctcaccgaaaatagaggtctcgaaaaaaaagttgacaaatcttaaaaaaaaaaaaaaaaaaaacaaaaaaaaaaacttacgtataattgtgatgcaaaacagaaagaaaaagaagagttatagtcatataatatagagtaataaaaaactaaaataaaatagagatctacaaataattgataaaattgtaataaaattcactatataattataaacgaaaaaaaaaaaaaacgtaagt

SEQ ID NO: 183282 - DNA, 713 bp, Cannabis indica
aatcattaaagtagttttgggggtatttgatatagtagagctttgatatgcatgtcattaatatttacaatttttgtttttggtaaatagcggcaaaattctcaaaatttttatttttgtttcacttaatctcaaaaccaaaatttaagcggtaaaacccgcaatattcgcattctgttagcaatttaacattttcatccattttaagtgttaagtatcatgttggactgtccacgtgtgcatctacgtggatacaatgtacacatgacacaattttattggatcacgtaaaaaaattatttaaaaaattaatttaaattaaaaaaaattgtaaataaaaaaatatttttctttttttttctctctttattttcttttttccttcttgtctgctcattttctcgatatcccctctctctcgctctatctctctctctctctcaatctcctctctttgtctctctcagtcgttttcaaaacccggcagccaccccagcagttctctaaccaccctaagtctctctctcaatctcgatctcgtctctctctctccctttagtcccgaggatggaatctggttcacaacaacagtaaaatcgctgtgctcgattccttgggcaatttaagttcatctgatgattttacatttatatgagcagactatggtggcaacgctcaaagaagattaaagatcgattatgatggaaatctaa

SEQ ID NO: 183283 - DNA, 1053 bp, Cannabis indica
cacatccttagcacactattgcttataaggaaagctcaaaaatgtttcgaaggtgatagcccaacaactgtgtagcccgtgaacatcataaggtccactggttgttctactgtataccccaacaacttagaaaaaatatctataggaaaacgtctatcttatatgattggtaaacaatttacaggtttaaatccatctgcaggatattaaaaatttgaaggaaaaaaatagaataatctagtttgtgaaacccgaaagcaagggtctacaaataattcaactaccaatactgaatgcaaatcaatatggccactgacaagtagctcagtcaagcaaagtcaaagattacccacatactccaacacttcagtacctaaccttacacttcagtgccttatagagcacaaaccccgaatttctgtaccttacctgatgaactccaactaagagcttcaaaaattgcccgtgtgaaaatatccataagatagtgaatgtcaacgactaaattggtaccgaaagtgtgcgacgtggctggaaagtgcatattttaatacagtgatgcagtatagacctcagaatgttgcaaccataacacatggtgataatgcatagcattctacatacaagatttatctgattcaactgaaaaagagccatagtttatccatgagacaaaaacgtatataaaagttaatcgagttcatacttcaatttgattagccatctatgactaacataactttataaacttggcaagcataaacctctcgacatctgaaatatgtccatgcaaataaaaatgtgtatctagtgaagattgagaaaatctacctcattcaacctcggaataatgcgcataacctctggacctctactgtcaattcgtatgttggagccaacagcatcagtaacatcaatgctctcagttcctttcaactcccaatttcgggctttaaatgcaaaaggctttgaggtcagggcaccaacaggacatatatctatcacatttcctgaaagtttcacttgtcatcagtttttcaacataagtcccaa

SEQ ID NO: 183284 - DNA, 507 bp, Cannabis indica
atcactactcaaactaagtaaaacttaaggaatttaacaataaaaaaaaagattctagggtttaccttggttaagagatcttttaatccctactgaaaacaccaaaaaccagcagtaatcccccttgaccagggctggttcaaagagagagagggaagggaatagagttctttctatttttagtctttttcctttgattttccttaattcctctaagtgaaaagagtttaatctctaacttaatcttgctgaattaagttgctatgtgtcactcaataaggcatccaccaaatcacttgccttggaaatttactaagatacccttgttacataacttaagcctatttcaaacttaggggtaaaatggtcaaaaactatatgtaacaccctaactagcataggcgtattacgtgattttttaaacgtattgtgcagctcgttgctaatcaacaaggtttatggaaatcgtgattaattaaaaaatttcttttttaattaaacttatat

SEQ ID NO: 183285 - DNA, 695 bp, Cannabis indica
aaaagcttttaactttttcaaaatctgtgctaaacgggccctaagaattcattttaagtatttttttttttaaaatgaagttatatacttaattaaatctttaatgatatagtacatcttattaaaaatcaataaatatatatcatctaaataaacttatcgatagttaatgtcattttagtatatatagataacaaaaaagtaagcatatcttattggtttttttttttataaatcaagtaaatgtgataatatttcatgaaactaatcccacttcccatacactaaattgacattatttatgatctttaagtcatacttatacaatataatatgttcaaaaaaaaatatgcattagttatttttttaattctcttttttttaaataaaaataaaaaagggttaaaaactacattattttactgagttggcaaaacaaaatataatatatgtaattgatgttttcagtctctcctcttatatcctattcactaattatatccacttcactttatattcttcttctccctacaaaaactagttaggaaacctatagagctttcattaaagccacacacatcctttgattttgcctactctgccatccggtctgccactcgggaatctagcctggcgttcaaccacttcaagatcctcaaagaattagcgtgggcgcatcaacaaggtctacctgt

SEQ ID NO: 183286 - DNA, 847 bp, Cannabis indica
gtcttcattcttcattccagtaccctagcttactttttttcccttctatatattatagaaaagttattagcatatttatataaatttgtattaataaaatggggcattccaattaatgttgcaaccttatagttattttgagctacatatatataagagttttaaaggtcatataatttattaataaatatatatatatggtcaattaatgtgaatatcatttacaatgtatcgatcatgtcgacttaattaaatagttttgtatgttttttataataagtactttataatatttttggccaacttgtatcaatttatatatataggctttcaaaaaattaaaaaaaaaaactacatatttagagatcagtaactagtgactgagaatttactatttggtgatactaattaactccctatagctaataattacttgctctgccagagatatctgacatatgtatatatatagattataagatatattaagtagtccgactagtgttgatttgggatcctgggctaagaaatatattctgatcattatatatataaaggcgataaacatgttaattatataaaatataccacaatgaaaaacacaaaaaatatatatcaataatagaatataaaaaacaacagcaactattattcttatctcttcactatttatacataagaacactacacgtattttagcatattatatatataatatattagctatcttagaatagtaactgtgctgttctcctcgtttgctattagattctatacttggtgtcaaagaagaaatagtactatttcaatagtgtactccaaaaattacatatttataatacataag

SEQ ID NO: 183287 - DNA, 565 bp, Cannabis indica
tgattgttggagaaatcacgtctgatcctccgagagaatcttggttgttactaggcatatatgggccgccttaccagggtgacaaagaaaagtttttgcttcacattggtgagatggctctcaatgtcgcctcaccaattctattattagaggacatgaaaggaatgttgaatgacttgaaatacttcaattatgaaagacaaggtaactcctcttgatacgcttttgacttttgccgtatggttcaacaggttggtttggttgatttgggtttctaaggccctggtttacctcggctaaaggcggtagaaattctagtaaaggaggcacaatgaagagagctagattggatcgtggtcttgtctcaactaaatagcgcattctcttcctgaaggcgattattaaccacctctcctctacggcctctgatcatcggcccttgctactggatactccaagtggagttaattgcgaaggtaggacttcaagtatgagaaaatgtgggacagagacccccattgtttttggtcgttgagaagcttggatcacgacgactacatcacaa

SEQ ID NO: 183288 - DNA, 513 bp, Cannabis indica
tgacatgactagttattatttagtaacaggttaaaaccgaaataaacttctcaaggccgaatcttatgatacatatataggttttggaaaacgtcggaacaaagctttttgaaatcacaagattctaactgtaaagagttttgttatcattttgagtttgttgtaaagttggtaatatgaagttatttgaaataataactttttatatacaaatgctgaagttgataatgaaatacacttatttatttaacaaaaaagaaaaaaataactaatgaagaagaataataccattatcaacaacaaccattcatacaaactgatgagagaaataataaaataacatcactgtcaacctttccaacttaagtagttattttgtatggaatgtaatacattattttattttaattatttggaatatttcagccgttatttttgtttttttaataaactcatgtattctcaaaaaaaaaaaaaaataaataaaaccactattattattgttttaactat

SEQ ID NO: 183289 - DNA, 805 bp, Cannabis indica
cagagaaatctagagaaaacactctaagcgctcaatgttagattaccgctttttgttagttaattttcttatgggtttctaagttttcttaatattaaggtggacgatgaaacttaatgtatttaattaaataaatatttttatgttgtttctcagtataaatgcttataatttttcgcttcttaaaataatttctttcatctttaatatcacatattttttatagttaaaaattattaatgtttggttatatattttattaaaaataatattatttaatttatgtatttactttaaattatttcacatttaatgcttagaagttataattttaaagcgaatgaaaatctatttttgttagaaaataattagtttgattactaattaaattatgagaatcgatataattataaatatttttataataatttctccgaataccattaaaaatatatgatacttgtcaattgtcatatttactattaaatactttattttattttgttaccaaaaacatcattattttttgaactaggttagaattttaataacttaaattaaaaaagaattttcttcgatctcacacaatttccatggatttgacaataaatattttttagtttttagtacaattcataaatatatttttttttagtttttattttattattttttaatgtatatttaggcttaattgttatttaaaaaaaaaaagaaactaagtaatttttttttacagtgttagtaagaacaataaataatagtatgaagggacatgagaatttttaagtaaaattaataagta

SEQ ID NO: 183290 - DNA, 541 bp, Cannabis indica
tattgttgagtacatctaattttcaatgatatgcgaactcatctcttaagaatatgggcaaatgtgactattagtttggctctttagtaatctaaactaaagtggagtgaagacaacactttcaatattagtatattcagttacagtttactaattactattttagtgttaaattatattatacagtttcttttacatagttacaatcaaacaaagaaaatattaaattacatgagattggtagtggtgtacttgacaaagaattcttcgtctacacaatgcttgtgcatcactttataaacctcaataaggagtgttggaaatcgacttgagaaataaccatcgaatccctcaggaacagaccctaacaattcttgaatttcttggggaagttcgcggtagtgattcaacttgttccgaatgacacgcaacaagtctcgaacgctgccatactgtaccgccggtagcggccgaatgtattgatgaaagcaagcttccaactttcaatcccatttcccattcaacgcgacagctgctgtac

SEQ ID NO: 183291 - DNA, 565 bp, Cannabis indica
attaatgaaaaaatgtgtatatttagaaaaacataaaatggacacaatataaaaattacacaatttaacctaattataatttaaattataaaccaaaaaaaaaaaaataataagtttatcaaacccatttgttaatcttccagatagaaactaagattaggtaagttgggcttcaatctttatttttaatatattgaaagccaatcatgtcaaattctatcttaaaaaaaaataggcagagggacgattttaatctaattcaatttttaaaaaaaaaatagacgagatggaacgaatttaataagagatccaataagtattcagacaggctcggccctgggcataggcgggctaggcctgtgcctagggcccacccagcccagggacccaaattttttttttcctcttttaaaattatacatttttttttaccgattttaaaaaaataccacattttttctaacataagggcctaaatttttttttttatagcccactttgtttcagggccagccctgtattcaggttagacataatccattaaatcaaaattctaacccaattt

SEQ ID NO: 183292 - DNA, 575 bp, Cannabis indica
ctattttggaatataaaacaattttttagtttatttattttttttttatgatcgtttatgttataattatttaggattatcagtaaatttttagaaaattttgagtagtttacaattttgaaaataagatttacatattttattgtatgcgggactattttttttatatgcatggtaagtaattgtttaaatcttattttcatcattatgtagtattatatagatttttataattattattaaaaaataaaataagtgagatttaatattaaatttttatatgagaaattataaggatattagacactaaagatgccttgtagcgttcactataataataaataaatcatcccacctaaatttaatttacttattttatgtacacatgttagatattatatcccatatatttaaatttaataattattaaaaaaaataattaactatttacaaaggaaaatttaattttctatacttacatatacctaatattttatccctaaactaatacatatcaccattgaaaaatatatgactactttatctaaaatccaaaaataccccctctcaaattt

SEQ ID NO: 183293 - DNA, 558 bp, Cannabis indica
aatgtttataaagtgatatccttcttttctttttttacaaaagaaaagtcaaaaaaaaaacatgtttataaaatggtttcctctctataattgtgtgaagattcttaatattagctttaacatcataaatttattaaagtctacagactttaagataaattatttatgtccaatagaattaagagttcatgtgatttggcatctttttctacaccaactacatttttttattcattatcttcattaataaaaggaaaaaaatataaaataattgtagcaagatgacaaaatattagtttttttaattttttttttttgtaaggacaaaatattagctataacatactttaaaggacaaagctatagtttactcaactcaacaatcacttaataatttctacatggagatccaactacaatctctcccattccttttcttctctttcatctttgtgtttatggtaataaaattactcacacaaaccatcaactcatcacattcaaaactccctccaggaccatggaaattacctattttgggaaatattcaccaactta

SEQ ID NO: 183294 - DNA, 561 bp, Cannabis indica
aatggtatttaccctatatttaacttcttatgtttttaggatatgtgtatggtattgaccatgattttgtcccggtaggagagtttttatagccttccattctagatctaatggtgataattaaatgaataagagctcgtttggaacgccgtattaagtcgtattgtattgtattgtattatattgaattggattatatattatatttttatataatactatattaaactttaatttatactaaaatattatatatttaggtgtccataaaagttaataccacatatagttttacataaaaatattgcataaaatacaattcaatataatacaatacaatacaatacgacctaatacggcgttccaaacgagccctaagtgtataaaaatagttaattaggagtacactatattatttattatttatttttaataatattaaaaataaataataattattaaattaattaaataatacattttactctctcctcactttctctctaactagtctctatctgtctgccacgcctatccataatacatatatctccacaaacc

SEQ ID NO: 183295 - DNA, 741 bp, Cannabis indica
gtatagtataactcgattaattcaaatgagtccatgtgtgttgtaataaaacatattctttgtattatttgtttataaattgttagaatgattagaagttgttgtatatgttatatgaagttcctctcatcaagtggattgagcattctcccattaaagtttttctccattatatgtgtactttatagaaatttcagccgccaaaaaaattatatagatatttaagtgaaaaaaataaataatataaaaaattttgccataaaaaataattttttttcaattttaaccaaaaaaaaaaaagtataacagtattttaaaaatacttctagctggctaaataaataaatatacaacttaaataaaaaaaattacacaaataacacttacacacaccttcaacacacgattcatgcttcttgagcaaccatcgtgcaaccacgcagtaatccaacgcaaccgaaatgaaaattcaaccagaaagagaaccaccattaattccagtaacttcacctgagaagatgaccaaaattaatcaaaacagaggatgtttcaaattcatgaaataaaaaagtatagaaaaactactacgaaactaaaattcaaccgaaaatccagtttaatttgcataaattaatgtcctgactttacttttcagattcataaaatgcagatctcaaaaagttgaactggagttcccaaacaatccaactcatgtataatccccaaaaaattacatcaatt

SEQ ID NO: 183296 - DNA, 819 bp, Cannabis indica
attttaaaagcgataacaatgatcttatgagatattttatcaccaaaataattgtggatcgtatgtgtatgagagagagacatattcatgttgcactctttttcctttagattaggttttgtcccactgagttttcctgataaagtttttaacgaggcaactttaaatcatgctaatatatttgtactttatgtagcaagtagagaatgtgtgggagtgagatcatgacaaagcacattcagaaaacatatagattgtactttgtaacgcaatatcaatattagcaattctctatgaagataacgcgaaatgtattgatcaactaaaggtataatgaagaaaacgccaaaggcattttcaccaaattcttcttatctcgtgatcttaaagagaatagctatattggtgtccaaaatattcaactaagtgccaattttgtagacttattcataaaatcgttaccaacatcaacatttgagaagacgacatataagattagaattcgtagattagaagatctccacaaatacttaaataaagagttaatttatactgaactctttttcccttggttgagtttttatcctattaggttttctggcaatatttttaatgagccagtttttatggacatctaagagcaagtgttatgaaatattatatatggttgtctaaatcactaaactaattatcctcattaatgtctgattgtattttatatatatatatatggaagaggtttcaatggttacatttttattgtaaccatcatggttacattttttttaagccattggattactattaaatggttgtgat

SEQ ID NO: 183297 - DNA, 743 bp, Cannabis indica
acagaaatattggacagtgtttttcaataatgatatataaattatttgatttgctgcaacagtgcttttagatatataattatgatatatgacctattatcatttaaaacatttttttaggattactttaatttttcgtttggtaagaattggaacaaacagaagctattcaaagaaagcattagtcgactttgatcaactaaatttcaaattacagcaattgaaacttctacgaatcctacttaattaatttaatatattacaagtgtagatcttgtttggctctgatcagacactttttttaaagaagactcaatcagtcattgttattatttgaattaatttaataacatgtatataataaattataaataatattggtttatttttttaccagaagtattatatatataagcgagttatagtgattatgaactgaactaggtaattatttactgctttcatgatctcatttggagaaataatttaacaatctatcatggctagatgctataaatacgtacaaaaattaatacaagaccaataaaatataagatcattaatatatttattttatagtgtgggcacatttctactaattcattaaaatattatatgttggttttattatttcttggctaaatatataaagaaaaagacgtgtaaaattgtccgctctgatcagctcattaattaaatagcattattttaattagttggtataacattacaatcatacactt

SEQ ID NO: 183298 - DNA, 611 bp, Cannabis indica
ttttttaaaattaaattttaatagtaacactctcacaactactaaattacttacaaatgtaaggagtcatctatttcttacaagttaattgttaaaatatacactaattatatgtacgtcaaatttatataagtacatgtaatattattataattttaaaaatataacaattatttcaaaatttataatatttttatttttttaaatattattttttttaattttaaaatgaattttgaaaataatttttaaataataatattaagtgtaccaatataaacaactcacagtaacaattaaccgaatgacaccttaaatttgctattagttcaatagtttagagaattttaccgttaaaatttaagcttagaaaattaaatacaagtaaaacaacaattaagagggtttaaccgccaaaaactctttctaatataattttatttatgtataacaattttatcaaacattttattaataatctgatgactaataattatattaaaagaaaacttttattttaatgagaatcattggaactaattaaacaataattatattaataattattttctttgtggtggggtatcgggttgatgagatactaaaatagt

SEQ ID NO: 183299 - DNA, 825 bp, Cannabis indica
aatatttatttacgtttttgaaagtaatgatgaagacgtaactccactactatacatatacatgatcatcaaagatcgtgtgtgatgatttttctctgaaagaagaaaaaaaattgattgcctagaaaattagcagataattctgtggttggtgatcggctatacattttgagggccataaaactttgaaattttcgttccttaacctctcgataaaagtttcatcaccatgtgcaaagttacactaaatcaatagtttttttttccttgactaatattgagtcaagtcctagtatgttcattttccttttttaagaggaaaaacagaaatagcttattaattattttttaggcatattatttaacaagcatgtctcgaggcaaagaaaaaagagttattaataacaatgactagtcataaacaagatttctaatgccaccgactacataggtaatttgtgacttatgagagatttggatttattttaatttggtcaaatgttagtgagtgtgtgtcattcatagccccttgctttttttttaaaaatatatatatatatatatatatatatatatatacacaattgactgatcgatcgatcatagtgtgcatgctaattaattggtgtggagcatgtgagttggtagggttagaaggtatctaacacatgtttgctatcttagcagctatatatattaattatatttacaatatcaatgtcgttaattaagtatattattcaatcgaggtatttgaaatcaagtaatcaaaatgattattaattaacactaattacatcagtagtactactttacatatataga

SEQ ID NO: 183300 - DNA, 1387 bp, Cannabis indica
aatttaaagtgttagatgaatattatcattaaatactaactgtgttattatttattgacttttaaattttactttaaatattgagcaatttgagctattgcacaaaaccttcatttttattaggctgaatttctttctttcttttcttttttttttttttttgaaaaaaagacctatttttctcattttttttccctattatatataaataaataataaaattataaatgaaagtttaaaagcgaattcttaaagaaaaaaatcattattagaattgtggttttaatttacacgatgtatttttttttaaagggttcattattaaatttttacacaaggcccttaaaaaacttaggtcgattttgtgtatacagtgcttatctagttagtatttaaagataatatttaattgatgtctcaaatttatataaaaaaaaaaataaatttaaagagattttaacactaaaaaaaattaaaaaaattgtatataaaattaaaatatgaaaaggtttcacataatatagaaatatatattaaacacgtgaatattttccctatattttttttgaaaacaatatttcccctatatttaatagtatatcaccctcaaaatatgtctattttcatttttgtcttttttgttctttgtttttttcttacacgcacactagttttttcatttattttcaacatacgattttctcaataatacattaattactctctaacctaccctagctaatacattattattattattattattatcattattattattattattattattattaattaattaattaattagtattattagtttcttcgaagcctatatcgataaagtcatatatttagaaagtagaaaccaccacatgttataatgattattatgcttggaaaataaggttatgaaataaccacgtatatatagatgaaataaaaaatactttttaatcataaattttcataccaaccgagtaataaatctcatcataaataaaactatatatattttaaacttcataataatcattaatagtcgattggacttaattttatgaaggtttccaacttccagctaatattatacaacttacaagaaataagagtaaaatgttataattatagtaaactaattttatatatgttttttatttggtagaaattataataaaattttattttatataatagtctattatagttatagtaaactttttatttattattatatgaaaaattttgtaataattaattttacaaaatataattcaatcatttcattggcatcattgcaacgtaaaaaaaaaaaaaaaaaactaacaacgtttgtaaaccgttgaaactgtttaaaagttttattttttttaaaacttactaa

SEQ ID NO: 183301 - DNA, 627 bp, Cannabis indica
ttgaaatccctacatttacctaatatgagccatctctgaatgaaacggcacatacaactgtcgtaccggacgaagttttcagtttgctttctttgcttttgctgcatatattcgactttgtttaaaatttatatcattcctttttcacgattttttcttccacgtataagaaaaataacattatctacctagacacgtattataattagtttgatcgtaatgatatatgtgtattgtgatcccgattgttaattataattcaccaaagtgtcgaatagtaacatgaagtacagatttatattatctcgtataattagatcttggagatattcgtgtattatatatataagaaagtcgatgcaattattataagcacgttagcctagctggccaaatataacagcatatatcaataatagctagcaagttccattccatcaatcttcaaagttctaacatttaaattgttgattctgagaactgagaatgtagctagcttttggtttctcatttgttattataaccaactatgcatatttgtagtggggcaaatatacatacattttaaaaaaacaacaattgtttttgtgattttttttcaattatctataattacttaacataagg

SEQ ID NO: 183302 - DNA, 582 bp, Cannabis indica
gtgactgatgagtttacccatacgacatgtcgaggggaagttcaagattagtcgactgcaacagattgaaatccctctagaatcacattgcaagggatgttctcaagtgttttgtgaagaaaaagagaaattgaaggatattttgaagagtcaaagggtgtccatcactactgacacatggacatcaattcagaatctcaattatatggtgataacggcacattggattgatgatgatttcaactatcagaaaagaattatcacattttgtatagttgaagatcacaagggagacacaatcgcggcacaaattcatgagtctttagatgcatggggcattactaaattatttgcaatcacagttgacaatgcttcttcgaatgatgttgctattcggagcttgcgacagaagtatggtcaaatgacagatggtctcatattaaatgggaaatttttacacatgagatgttgtgctcacatcatcaacttgattgttgtggaaggtctaaaggaaaagagtcattcaatttcagctataagaaatgacgtgagatatgtgaggtcttctcctgccaggttgaa

SEQ ID NO: 183303 - DNA, 684 bp, Cannabis indica
atagtttctttgtatgttcttcttttgtcatatatgacccattttaactaaattttcgttacatacaaaattcttttatcttttggatatttagataggtttaattgtaataatatttatatgatggtgtatattgtatgaagatatttcataaattttttaaaaattttaaaataatttaatgcggcaactttaaagtttaagcaatttgttaccattttttattttatacatgtctattattgaaagatacagtttaaattttttcaaaatattacagtatgtatttcataattatgatgtacattgtgattgtcgtataaaaacattaaattaagattaaaataatttgaatgttatgttatataatttataaataatttaatgtaaacaaaaataaaagacaatttatttggcaatttaaatgaataaatagtttaattattcatttgccaaaagtaacattttataggagaataaaacgtgaaaataagatttgtaaactccatttgattacaagttttaaattgtaaggttttttttattttttttatttttattttttggtaggaagggatttgaatttggaaccttctcttagtgtaaaacttacactagtaatatatgcttactaataagtaatgagaactaatagtaaagtactcatttcatttctttatattt

SEQ ID NO: 183304 - DNA, 827 bp, Cannabis indica
aactggactagaaggacctatccctgctgccatttttcaaaatttaaacaatttgactgatctgtacgtaataaacatattaattaaacagatacttatttttcaccatgcatgtgactttatctaattaatcgtgttttaaatacatcttttaggaggatcactgatatggctggtgaaaagtctgacttatctactctaaaaatcaacatcaagaatagtcctgatcatagtgtattgtaagaaacatgtctcttgagatatctcttttacttttcaattgttgatataacctgattttttattttcagggtgctcagaaatgtgaatttaactggaattatcccaaatacaatcgtgaatatgattacaggattaaagatgttgtaagttttaatcaaaactcttttcctttgattaattaattgctttgaaataataaaattatttagtattaattatacgagatattcaacgacaagcaaagacattttatttatttatttaacacaattcccttgagaaaattttcaatatcctttccttttaaaaaactgaccagattgaaatagtgaaagattagtaacttcgtcaaatcgcaaccttaactccataataaatttaataataacataaaaagtatggtttgattaaatctttgaaaaaatgtcattaaatttacaatatgtaatataatacttatatttagtcattagatcattattaagtgactatggttaatttaaaattaaaaaaatatatattttatttccttataaaacttaattaattaatttttttttttttatttttttatttttttttta

SEQ ID NO: 183305 - DNA, 922 bp, Cannabis indica
ggtgaattagtaattactatgtgtatataatgcgaaatattccacaagaccatgccctactttctagtcaaaaaaaaagaaggggatggtaaataacaatcaatgtcatgtggtgtgtggtataattataatagtagtgtagtggtcatcatgatcatctgatgctccacacgagtgcccaggaattttgggtatggagaaaatgactgaaccaaaaggcaaaatacatgttcatatatatatatatataccctttactgcattgcatgcatcattttctgtatcttttgtcaactataacatacccaacgactgactgaccctactcgagattccaaaaagtattgactaatattaactgtaaatttctcacaagtcgttgctctgcggagggctatatactaattgaattatgacaaataattttccatttatttattaaattttagtaataagataaattaaggggacacaataaattaatattttcataaagagtgttatttgataaagcaaaggaattagattttctaattagtattaagaataattatataaaatattattgagtaatttgtggcaaaaatacttaagttttattccgagtagcagataaatacccaagtcgtatttttggcggtaaaaatacattccatcacacttctagaacttccgtaggtacctctctgttttcttccatgtaagtgtctacgtgtcatccttttattagtccacatcattaatttttatttttcattttaaaattcattaaaacttatttaataatcatttaaaaataaaaaaaaaacatatttaaaatgtataaaaaaaaataaaattaaaaataaattctgaaacctaaaaaattattctaaacctaaataattattttttttctcatttttttaaaatggatttttct

SEQ ID NO: 183306 - DNA, 700 bp, Cannabis indica
agaaaaaagagaaaaatccaagccttcatttccttttctccttctggatatccataatcttctttactatcttatttttcttttctttgccaagtttgagttatttcttcaatattcactgataaaggactattcactctgcttattctacaggtaactattttctttttcttcaaatagttctttcatttatttaattttcataattttgtgctgaaataattcgttaataattaaaggaattatttttctgctgctctttcaaaggggagttatgttataaatcaaagaagaaaatggctgagacgttcttgactccagttatcgagagcttgattcagctacttaaagacgaagttaagtccttaaagagtgtccataaagaagtagaaagcttaaagaaagaactagagatcattcaatctcttttcaaagacacagatgaaagggaactaaccagtaatgctgtgaaagtctggttgaaacagctcagagaacaagctgatcgtatagaggatgttgttgatgaatacagatggcatttggcgcagggcactgctgacaagagtggtttcattggctttttttacaacataggtggccgaatcaaagctttgaagtcccattatcctttgtcttcacatattcaagacattaacttatctttacgaagaatcaaagatacaggccaaggattcgc

SEQ ID NO: 183307 - DNA, 654 bp, Cannabis indica
ggacttttgtctaattttagtaaaaaaattctaacatggatgaaagttcagggacatgatttagtacattaaagtttgaagggcatgatttggtagatatcaaagtctgggaagcatggtttcttacataaacaattattgaaacaataaaattgaatgaaattagacaaaagttcttaaatctaacaatcttaatagttcagggagaatttttaacggccaaaaaagttcagaggacatgatttggtatatgtcaaagtttaagaaaaaaaattgctaattagccttgtaaaaatataaaataaactacttaatcataactaaatataaaaatcccaaaataaatatcaaatggtatgaacttgtgaattttaaaaatttgagttaggtaaaccatattgaaatttcatgtagaagggtaaaaaaggaagagcccttcataattcaaaagacaatataaaaagggaaataaattaaattttgaagcaacatttaacacaaattaatttaaattaaatcaaaatgtattataaatgttataacaaattatgaagtttttttaatttaattaataatattagtaagtaggtatattaaaatttagaataattatataaaacactatttttctacgtaatgttttacatatttacg

SEQ ID NO: 183308 - DNA, 939 bp, Cannabis indica
acagtgatgacaacgaatgagatatggtgataaaaataagtaagatacaatgagacaataagtgaaacataataataataatagttttgaatgatcgatatatgaaaataataatacattatgagaaacaccataatttttttcacactaccttatttaatttatttttataataataatttctttcaacaaagtaattaaaatactacatataataaattttaaacctcttaataaataattttaaataataattgataaaattagtgcatttagtttttaataataaaattattaataataatataaaataagataatatttataattttactatatattagaattatattttaaaataattatttatcataataataaagcgcgactatattagcctatttattcataattcaaacatattttaaaatatataaatatatttatttcattttgttaatatgtactataatattaaaaaaaattatttaaataatacggagaagatatgaaaaataaaatagagatgttgtattgtaaaagtttgttataaaagtagtgtattttaattatgtattttaaatgataaagtaaataaagttcttggggaattcttttaaattcttatccaattttttaactataatgttacaaaaagcattttctcaataataataataataataataataataataataataataataataataataataataataataatgttactaagcataattaaccccaccagtagacttctttcttttcatttttttaggtaaacattaatgtgataattaagtacaattaaattattatattaatctcttcttatgatatttctcacattgttaacatttttattgacttcttatgtgtctttactcacactaatttgtttgtcaaactagttacgtactgaacaatcat

SEQ ID NO: 183309 - DNA, 575 bp, Cannabis indica
gtgataaaaataaaattggtaaaataagtgaaacaagagataaatgtaatatattttgaaagattgggtaaatattaaagacatcaaatttaaaaaaaaaaaaatatgtattgtaattctttcaaatgtttgagttatatatatttttagttttgtattatttttacaatatattctataatgtaggatgcagaatactgaataaaaataaaaattgagtaaaaaccttataatattcataatagttattatttaattttttataatttaccaaataaaaatctatataaatttatttacattcttaaaaaaaaataatgtattatggaaagtagattatacaatttttttgtttatgtgtgctgtgcaatgtacacacttcaaaattctataaatagaaatgtagatattatttatctatgtacgtattattttatatatggtgttattgtattattaatgttttttttttaaaaaaaaatcttattgaatattgagttaattattgtaattaaaaagctataatggttaataggaaagtgctaattacaactttttattataatatcttaatt

SEQ ID NO: 183310 - DNA, 588 bp, Cannabis indica
ttttatagattttaaaatatttgaaccgtttatggaaaaaaaattattttgaaatctattttcaatattttaaatattcaaaatttatgtggaagatcttaactaaaaaaatgaattacaatttttttttatatataaatcacactaaacataacacttatctaattactattgaattataactttttaaatctaaaaataaaaggccaaaatgcactatctaaaatacatttccaaaccaatttattcaaattaattatttagaattttctaaaaattagttggatgtttcaaataattacaatgtgcttgtttaaaaataataataatattaaaattattttaaaatctattttcaaaattttataaaaatttgtgaaagatcttaactagaaaaataaaaaagaattatatttttttttaaaaaaaaatctcaaaaagaaataagaagccaaaatgcaagtcctactaaaaaaaaattatatataaatatataaatatataaaataatattagtactttacaagcatgtggatatgggcacgatctaattaattgaaaagaaaaggcaaaaacagatcacgcttt

SEQ ID NO: 183311 - DNA, 768 bp, Cannabis indica
gttggattttgaggaactgccattacttccggcaaccgactcactacacagtactcactaagtttaaaataacaaaatcctagtagtgatccagtttggcatatacgtgctctcgaaaaaaagcagctgtagtactgtgagaaaaaattactgagtacgtaggtaaatataattttaaaatagctgtgaatatataaatatttggtaaactaaatgattaaatagttgttaaatatataattactatgacatttgttatctaatttatttaaataattttatacatattaatatatttataattattatttattatagtataatttatgattaatttttttcttataatatttaattcttttaaatatttatataataaattagacttttactactactactattaataagaataaaatgatgattgttagtaatttttaatcaaaagggtttttttttttttttttttttgaataaggatgaaattgaaagaatgtaagaagtcctaaaattaattgggaaatggagaattttaaaattagatgaggacaattgggtcaagtgaaaaattcattaaaccaaaattgtaacttcccttaaaagctaaaatcccaaaaccagggtgggccaacttttcctaaaagttataaatttcacttaaatttttgaaaaagctattttttaaattttaccaaacacatattaaatcgtaactttttccaaaagtgattttagctttttaaaaagctcccccaaacagggcctgag

SEQ ID NO: 183312 - DNA, 625 bp, Cannabis indica
gcttatcttttttataagttttttgaaacaaataatcacccatacccatcatagacacgtggctattacagttttttttttcttcataggaaatggactatagttttacagaagagcgcttacaaacaacatatgaacatttacaatcaaatccaaaagtacaatatatgatatagctcaactctaaaatatttttttttaaaaaaataaaattatcatctttattaattacaatctatagtgattacatgattaaaatctggagtaacacgatcagcaactaaataggatgctcgatctaagaagtgagtaacactatttgcaaaacgtctaataaaattgacagaaacatttctcaaatcatttaacatcatcttacaatcagaaatattggagaacattgtcccacatggattaaatgtaaaagtattgagtcatatataagaatatgagctactccactcattgccaattgtttttgagatggaacctcatgattctcaacatggtatcagagccatatctctagcgggctttcgatccacacatttcctgtgacaacctctttccaatcctttgtcttaatccaactcaagcgcctccttaacacccaaggcttccacca

SEQ ID NO: 183313 - DNA, 612 bp, Cannabis indica
aggactaggctcttcactaatcctaaggaagttcgaatctctataattttgatttgtgttctttaaattctgttattatactttctgcaattcattaattcatttctggtgtgttgattattgtttgtttgctggctgaggttgttgtttaacacaacaaatacattagatttttttcattttacactttaaaataagggtatacattgagtgtgttctaataggtttcgagttttcagattttcaagttcgaatttaggaatttcgggaccgaacccgcccatgtggaaactggcttttttgggttttggatccaggtgggtggggtttggattgggacaggttcggatttcgggttaggctaggctcttttttatttttaaatatcacgtttttaacaaaaaaaaaaaaaaacaaaagaatacaattatacaatatattattattaggctaattaggatttttacccccgaactttgacatgtaccaaatcatgccccctgaacttttaaggtcgttaaaaataccccctatactattgagattgttgaatttaaggatttttgtttaattttagtaaaaaaaagtctaacacagatgaaaattcaggag

SEQ ID NO: 183314 - DNA, 920 bp, Cannabis indica
aagaatgaatagtgtttagctaaattgcttagttattttagctcacttgatggagagtgttttgtgaatgatcctttaaaaaaaattagcttatacctcacttgttgagtactcacatgacatgttttaaaaatagagatatatcaaatattctgaactcctctatttttaaaagttttttttaaaaaaaattattattcgtactctacatttatagattactattcattgttctaaatatattttattaatttttttgagttttaataattatttttgtatgaggatatgtgtatatataaatattatatatttaaaatgaatgaaatttgaaaaaataaaataaaattttggtgatgtattttaaagaatctgatatatagtgtaatgtaaaaatttgaggtaagataaaaatagtgaaattttgatgatgtattttaaaaaatagaataaaaaataatgataaaagtgttcggagtgttttaaagttgtaaaaataaataagatttttaagtatctaaaatttttaagtttgtaagtgacataaatttaatatttatttttaatattttaatttttctctaatttcgttatgttattattttaaacatgacaaatataaggcaataacagagtgtactcaacgaaactaaaaaaaataacagttttacagccattaaatatttgtgccactagaaatagacattaatttataccaacttcaaaaactataaaattttatatacttaattacccttattattattattattattattattataaatcagaaactaaagcttcaaaactcaaacaaaagcaattgtactagaaggaaagtaaaagctggtgtggctgcataaatgtaaaaagaagctagtataatacttgcttatatgttttctatataaattttgata

SEQ ID NO: 183315 - DNA, 828 bp, Cannabis indica
agagaagggtcttctggagaagacttgtccaagtcttacttcgggaggaaataagcacacacacattaaaagtcgaagggagttcattgttttgtggtgctgatcagaaattagattggcaaagtaaagtacaaaagattacgacaaaattttatagggagtttatatttatttaagtcaattgtatttgtaattgtttgaaactttattaattgattttattctctgagcgcgactccatggactaagagtgtttgaaagaataatgatatcacatataattatcttgtgttaagtttttatattatgcattattattttataaagttaatgtaaatttgtgttctgcagtaacaagtttctaatatatattattgtagatctttacagtcttatttgttttttactgttattaaaaaaatttattgaattatgtaaaaatacattttttcataaataattacatattaggtgattactcaatggttatatttttattgtaaccatcatagttacatttttcttttaccaataatagtaggttactaataggtaaaattttatttttagaattaattaattataattaattatttcttaaaataattaattaaatatttaacaagatctcttttaccaatttattttttactaaaaattagacttctttttactacaatttagaattctcttcttgtataataaatttttaaatatttaattattttaaattgatattaaattatttttttataactatagtaagaactaagtatgagtttttctattcgagtctgtggttgcttagttttctgaggagcttgcttt

SEQ ID NO: 183316 - DNA, 561 bp, Cannabis indica
aactaactttatcgtttctattatatataaatgaaaaggactatatttcttatttacttttttttaaaaaaaaataaaaaaaaaactttatgtaaaacattttcaaaaatggcctcaactttttgaaaaactttacggaattattttggaatgtatctactgaacacatttgtagtgtagtgtagtgtaaagtgtgtaggtaccttccaaggaagaagcaacgcctttgaaatttttgacgaccaaggtgtgcaaatcttcgccagaccaaatcggaaatatacaaacattaacaacaaaacaaacaccagctcccaaagcaatgagcaccaatcgagaaattactgcctcattgtactgcccagttctattcccagcaagcattagtatacagaacgttatcacgaacactcggtaaccatagtcatacggcttcattgttgggtacaatctcaaatacgacgcaaaaaatgctgatgaaaaacacgctactataattaatcaaatattagagctagctgttaaagcctaatgatatataataataacaatcaataatac

SEQ ID NO: 183317 - DNA, 673 bp, Cannabis indica
cactactacaaaaataatttttttcgatgttttttaaacagtcgtttaaagtatttctgccggtttctataaccatcgcttatacgaccgtcgcaaaacagacaaaataggcaacggttaaaaaccatcgctaatgtggacttcctgacggtttaaaaccgtcacctataacagggtataggcgacagttttaaactgtcgggaatgtaaaaaaaaaaagaaaaaaaaatacaaattttaaaccaaatataaaatctatatttttaatggtagaaaaatttgtattttttcctattttttttcctactattagttttataattttacctaaattaaaataaaactaacaattaataaattttattataataataactaattttaaaacacattaaatttatacaataacaaaataataaatagggaaaaaaaacaggaaaattccaaaaaggggtaaaatattacaaaaaaactgtgggccggcccaatcaacatttgtacagcccactatgaatatattacaaaaataccacctcacctataccttcagccgcacgtcacgaacggagacgatgaaggaacctccatcgatgcagtcggctacgcaaccagaatgaaaccagatcgagcgtagaacaaccatcaattctggcgaatttcgataggaaacaaa

SEQ ID NO: 183318 - DNA, 728 bp, Cannabis indica
agtttttactacctatatgtgattttaatttgagcttttggttagtaacaaaaacatgaggtgacttcttagtacgttgggactgaaatttttggagcttaaaacaaaatatggtatttttattaaattttaaatataaaatggtatatttaaaaaaaaatggatctttttagtgggagcccaagacacagtgcctaggaccggcctatttcttcagaatgattagcaatttttgagaggtgtttttaaatttttaattttttagttttttattgtgaggcaaatattttttaaaaatattgtatttttttaataatattgtgtaagttttattttgtgtattgtattaagtttttatggttgttctatagttgttttttaattgttctactgttgttttaaattattctgttgtgttttttacaattattttaccaaaagactattttttggtaaaaaattaaaattagaaatttttatttaaattttagtattttagtaaaaaatccctttttagattatgtgtaaaattctttaatttaaagatcattaattaatattacttgccacttataagtgtgttattatcatatttgtgtgtaaattatatgtccacgtattattaatgatattagttatatatgtatattcaattttaaaattacatatggtaattaattttacatagtttttagatattttttagtaattttgtatatttaaatact

SEQ ID NO: 183319 - DNA, 694 bp, Cannabis indica
gtcgagcagaacattcagtgcatcttctctgtttgcaaacgtaaatggaatatgccattctcaattttctttccattttccatcccctttatggcattccatgagtagttttagagagaaccctttgtatggctgcttttcccgagtctatggcgacttatgattttccctagcagtacttgattggcttcctgaggttcatccacctcccctggattaaaggcgaaggttatatcgtcttgtgaaatctgaactgattcctcaaataaatcacacatacttgcaggatccattgaacaaactacaacattgatgcagagtaacagtggaaaagtaagaacaattctctattacttcaataaagtgagcttctgaagagcattctatatatattcatatatgcataaaaatagtgcagaactcaaaaaaaaaaaaaaaaaaacttattaatgcaatttcccaaaaagtaaaaagttcatcaagttactttttttttttaagaaaacaaaaaaaaaaaacttacaaaacttgtattagtgtctacagagtcatgtgggcttagctctcacatcaatatattatatgaactataaaaattatcaactattaattacacataccaactcattaattaagaagtaaagaaaatgtaactattatcacactttctctttctctcggctttgccattcca

SEQ ID NO: 183320 - DNA, 633 bp, Cannabis indica
catgccttatcctcctctggaacggtaatctgctgccaagaagaatacttgggaaacttataatcacaagtatactccttgtcgacaagaaggcccaccgatctcagattagcctcgttcaaaaggaagtcgcatgacctaaggccgtaaggaagagtcatcaagcgcctgtgccgactgaccatctcgagggtacggatgggcttcgtcaagagagctgtaaaaaataatcaaaacatttttcagaaaactgaaagacaaggattaatgtaactgagcaagaggaaaataatcgcttacgaagtctacaaaaggtggttgtgccgattggggaaagactagatgtccaaaagaagttgtctttgaaagacactttgtttggcaagtccacaatgattttaggctcgctggaatgagtaccaagataatagaacccccttgtagctatttttcctcactggaatacgccttaaaccgaataaagatactcaagtgggaccaacccgaaggtgtatttatgtaactccttgaagtagtctcgaagagggagtagtcggccctgcactaatatgctccaagctccgaggccgccatcgccacgtcgacgccacgtggtactagtctcaccacgtc

SEQ ID NO: 183321 - DNA, 845 bp, Cannabis indica
ttataaactcttacccctgaattattttgcttggcaaaaatactctcgaactataatatttgtagacttttaccccttttatactaaaaaattaacggttttctaacatgtcagttataaaatagatattttatggtattttttttattaattaatcatttttaaattttaaaatgtaagttagaactattttcaaactaaaaaagtaatacgaacttagtttaaatttcttttttaaaaaaaaaataaaaaaaaatgtaacttagaatcaaataaatacaaacacagataatcatatctaacatttattcaagaaattaaaacacttttttctagtaaaaaaaatagagaaaaaggattatgataattattgaatttggatttattttttgtattttatttcttttgtgtttctttaatattgatttaaatatgagaaataggtgtgttttgttggtaatgatttggatttgagaaataagttacggtgctctttctcatggcatgaaattagatttgaaatggtctttctctttctcacacacttactggagaataaggcgtctagctccgtcggatagagaaggagacggacgatgctctattgggtggtcaatggtacaatggtgttccgatgagagagagagcgcgtaagtttttttttctgatagagtttaagtgacaaagaatctagaataaaaaaaatgttggatgaataaagtagtgacacatatgcaatgtgttcatgtagacaatacttaaaaattctaatatgacaattaacaataaaaagtaaaataaaaataaaagaattagctaacaaaactaataaatttaaaaagtaa

SEQ ID NO: 183322 - DNA, 636 bp, Cannabis indica
actacatcttactattacacaaggactaagaaattaacctctacatttggtagaagaattttatgatgataataaaattccatcgagaatttaatctattatagaatattttatcttgtatgattttgttgattgcattgcaggtgtggaactgcattctgttacaactgcgggaatattttcacaaataagagcaaccactattgtagtaaatgcaatcactgatgttctctgtgcttgttattaaccactacaatagtacaatactattctaataattatgtattatgaagttcaaaatgtaaataatcattcgagtagttatgattttacgtttcacatttctcatgtgaaactggagatctaaatcattagattatacaaatttattcctagctgcactcaatacatgttgggtttagtatatgtatgaactcaagacaggtttattaacttattattgatgcctgtacttcttggagtcggaactcggtatgtattgttgaaactgtactattttttcagttagttctatttttggttttagcatttgttttgtttgagttttgatgtttgaactaacgttaatataatgttcttagggttaattatgatgttagatggaatgatacatat

SEQ ID NO: 183323 - DNA, 653 bp, Cannabis indica
ataggaagtttctgaaaacaactttgtgcgacgtgtggtggtatttatcagaattaagtgcattgcttatgaatcggtcattacttaattaatattcatagatattttatcttttgtaatctttttttgttggttgtttgttatatagcattcaaaggtgcgtggtgcatattgcttgggtgtttttccaaatggaagagatccaaccactcttattgggggtaagttgttctttccaaagatgccgtctgattttttcttactgtaatatacttctgccaattgaattattaccacatatttttttcttctctttcgatacttttctaaatgccaatgtccatatatttacttattagcaacactattggttatcttgatattaattatgtgtttataataggaatcattgtccgaaatactcttgtgatgtatgaccgtgagcattcgaaaattggttttaggaaaactaattgttactgagttatgggaaaggcttcacataactaggctctcccccaaccaactggcaccagctcctgttgtagaaaaattacaagtacagaagttccacctaccattagctcccctaatgaatcacccagattatgtgcttccaaggtttgtctagctgtaaaacttctgtttggtat

SEQ ID NO: 183324 - DNA, 763 bp, Cannabis indica
cttggctaattcacctatcatcaagatcttcctactaatgagcacgtactacccaataattatcaagtaaaattatcaatgttcttggtttcccaatgccttatgctctgcattaagtagacactctagggatatcccacatgatccattagctaatgacgaggcaagttaacaaaatacacgacaattgagtggtggtcaactaaataacagtgacatggaacctgcccatcatcccaataattgtaattacgatggaagagatcaacattgttatccttggccaacaagccagcatcaaacacctgaggtaaagaagagaggagttttgagatcaatagcggctatcatactatgtacatcaatgactacgatgatgatgaagttgacaacatatattatgaccaggatgatcaacacctaggggcacaatatgtgtcttcgcctagtcaatgagtccctaaaaaccctatttttccctagggtgacagagataataggcaagatactcgtagtaggtgccatgaaattcctattatgcttcaaggtgattgttatgaaaatttgtgtgtaagtgtacacagtatcatctcaacaaagattgaaaattaaaataattcaaaaagctaatattttaaataagtttcaacaaacaaaatatagtaaatgagaaaagtgaaaaaaattaacaaaacataaactagaatgaaaggaacaaagctaaaatgataaaataggctaaatgacaaataactatactgta

SEQ ID NO: 183325 - DNA, 544 bp, Cannabis indica
tttttgtttttattttgaaatttcttggtaattacttttagtggatattaacattatttagtaaaaagtccctgtggagacgaactttgattacttatcattgtattacttgtttgtgattgtgtacacttgcgcaattataaagcaatacaattttcgcaacaagtttttggcgccgttgttggggactttaagttctaaattttgttttatcaactaattgacattctaataatttttgtccttttaatcttgctggtttgtctttgaaatctcaggtatctatagtgtatgaaccaataagaggactttaaacttgctcctattgatcccgagattgaacgtacattccgaagaagagagaggttcaaaaggctaagggccgagacatcatggcttagaattttgatgatgaggggattgctcaacaaattgttaatcccatcatattggcagatgatcgagcaagggctatacgagagtatgcagcccccatgtttaatgagctcaatccaggcattgtgaggcctgaaatacaagcacc

SEQ ID NO: 183326 - DNA, 712 bp, Cannabis indica
gctaggtcacgaagaaggaggagctgctctcgtgatttttgttgacaccgtattttttaaaattaaaagtttttttttctatttttgtttattttccctttctagggtaaaattgtaaattggtgcctttaattgcctattatagaaaaaatcctttaaaataataattctaactataaaatattacttcaaaataataaaataatacatacaaatatgaaaaagaaaagttactaataataaacttataaatttttttttcttcatatatacatatataatactatttttataatatatatacgtatgttttatcttacaaatattatttcttttgctacagattttattatgccaatatctctcttcttagtccttctctcctcataaatatataaaatgttattagtcttcatagatattttaatccatcattaagatacaactttgttttttcttttagaggagagatgcccttaagaaaagagaagaacaactagattacatgggtcatctccaatccaaattgcagcttgatctaaccttagagctaattttgcgattttgtgggcaaaagtattagcagtgcgcttaacatgagtgatcgaggcattagggacgtgagataaagccgatttaattaagttgatgaggtctccaaatagagagatgtcttattttgccgctgctattgtgtttgtgactgctttgc

SEQ ID NO: 183327 - DNA, 794 bp, Cannabis indica
gtaaaataattattaatcaaggggtgataaatcattgtgaacatgcagaagggaagagaaagtagatctaactagtaacaaatgaaaggggtgggataacgggagagggcatgggtttggacccaacacctctaagttaatttgtaaattgtaataccactatgctagactaaaaaaactagtaacaaatgaaagtggaaaattcataggtaactgtttgttttttcctctaaaaaatgacagtagtcaaattgctaggactgacccctcccaagtttattgagagtcctcacttatggctgaggaaaaccgtggtaacatgagaacaagggataacctgctaattgtttttgagaacaggagtccttactatcacaaacatttctttttgagaaccagtaaaggtggaactattactaattgtttttaaatatatcatgtacattttggaagtacaatcacaaatttttttagcttttagctttcagtagcttattttagttcctcactttgtcctcaattttactcttttgcaactaattgctttaaattttatggctaaactattgcatatgtagttttaggcattatgatatggtctttctttagcagatctatcatacattttttaacatgtagagcggcacaagtgtaccgttgctaattactttctgtttggtttagtctctaggataagtgattatacattgggaaatgatcataacaatgcaaacttttccctaactgctgctttttattttgtcatcagccctgcagttgtttctaagatgtgt

SEQ ID NO: 183328 - DNA, 653 bp, Cannabis indica
atccaattctcttatttttgggtgtctcgtcatagttggttgtttgatttatttcccttatttttttgtgtgaaaatggggttgtgttctaatttttattagaagatcatagattgatagccatcgatagggtggactctgtcagatgttcattaacctaatttgcttaatacttttttgatgcttgatcattggtggctcactataaaaattcttacttttagtcacaataaaacttgtgactaaaagtaaaaaagttgtgactaattataaattatcatttttatattgtgactaaaaagttcgtggttaaagatattagtcacaaaaattacaatttgttgtgactaaatgtgtttttagtcacaatacttgtgtgactaaaagtaaattagtgacaacttgtatctaaaaactatgttttagtcacaagtaactttttgttgtgactaaaagtcacactagtcacaaaaaaattatgttgttattaaaagtttgtcactaaaagtagctattttttgtagtggcttattgaatctttcgttgaggttgttgttagggttttgtttatttttattgtaaatgtcttggtattattattgttgattttactttatgacctatatattcatgtaataaattttgtctgattt

SEQ ID NO: 183329 - DNA, 581 bp, Cannabis indica
ggtctaaatttttataattgtatactttaggataggattgttcataaaactactcaaatcgttcgcaccgcactgctttagcaaaaaaaaaatccggtttaaaattctttgtagtgcgatcgcagttttgaattttttctaaaccccgcaaaatactaatttttatatttattttagtctactatgtgaagaccagcttaaaattcactaattattgtattgtttaaacttgaaactttttttcatattaattttcaagtcttatgacatttttgacagatgttgctcaagctttattatatttgtgataatttaattatttggtgatagtccaaattacagaaatcacagaaactgtactgcaccataccattttttgcagtacggtttttgtgattttttaatttcgtagtgcaggtgtaatttgagaaattagaaaaactgcatgtacagattgatttaaaaaaaatgatcaaaaaatgtactacccgtattgcaaacaatcttacttttaatacacaaagtgtaaattaaccgtcaactcaacagtagtgaataataaatttttattgaaattatat

SEQ ID NO: 183330 - DNA, 596 bp, Cannabis indica
attaatgatttttgctgatccaagactgctcatttttaaagtaattgaattatccttttgcaaggattcagacattctcttaacagttaatgaatctgaattttgcttggaaaaaaaaaaagaatagttgataagaagatgacagaaatattttcgaggaacaacgtacaaatagagatattgggagacaacatattgtagatatccatttcacctgaccacatatcagacaacattaaattatacattcaaaattactctgacttcaaacatatatttcaagattgtcatttgatcaagaatattatatatggaggaataccaattttagtttacatatatatatatatatacatatgcacaaaaatatattcacaaagtatatgaagcgacaaccaacaaatcttttctccctcagatgcgaaaaatacaacacaaggaatgcttacaaaataattgacttgactcccagatgttcatacctacaacatgactgctccactgagaaggacttaaaactaggtctgatccagcaaaaggcagagcaccatattcaccaccttctttctgcaataagctcggccgataagcaggat

SEQ ID NO: 183331 - DNA, 723 bp, Cannabis indica
agccatcttctcttctcttctgcatcatatttgataatttgaaagccaatattttggacgttttctgaatttcaaccatttttatctttaaatatataattttctttttttgttctctaatccctatcaaatcaaaaaatacgtcaccccattaaaaaaaaattgctaataataaattaacaaactaaaactaaagtctaaagaagaagagaaggttcactgttatttctcactacagttatatggcccccacacgttttctcttctctctcaaatccgcgtatagatattattattattgttctgttttttcaaagaaaataattatagataatcacagcccatggtttttatttatttatttattttttgacttaaagtgcacgtacacatgaactgaaagcattataaagtaattccaagtcttcccaattcagttcagttcagttagttgcctaggtcgtcttcacttcagtagttaaatgttgagttattgactcataaattgggacaaaaaaaaaatggtttgtaaaagaaaaaacaacatgcatatgctttttagttccgtaaaaaactaagtctttccttacgtagtgcgtctagaccaaaaacgaaaagtacttctcttccttttcgtatgatatttttaattctctagtaggtacccgaatgaggaataattatatagtccaactttgtatgaagttggtaggtcacagtttc

SEQ ID NO: 183332 - DNA, 1122 bp, Cannabis indica
ttactttcaacataatacaatcttgtccagtccagtccaatcctgcgtaccaaacgggcccttaagaccaagatactaaactttttttaaaaaaaactgagcacattaaaattgatacacctattcaaaatcacacttaagctttttaaaaaaaactgatacacttcaccaaattttaaatcccaaactaaaaataattagttgtgacttagatccatatactaaaacttaaaaattggttgtatggcttttgatttaatctaaactcttgagaattatataaataatttgtcgggtgtgcattgttaagaagataacagaggaagggtgcaattcctgtccagtatgcaaagtcgaattgggtgctgtcccacttgacaaactcaagtatatcactcttatatactattcagagattttcacattgtaactaattatttatatatgcaatctcaatctattaccttttgttgtacatgtcaaaaacacagcagaagccccacacattagtcccatgttaaaaaaaaacatcacaaaaaaataagaagatgccggtggattgacacgaagatctagccttcgacgagatgaagaagcggtggtgttggactaagacgaagatctaggcttcaacaaaaaattagggcttcgatcttcttagccattaggtcctgtcgaaaccataatcctgtcgatgccgattccgtcaaagtcggcaccgtcgatgtcgatcttctcgtctccagccatcggcgaacccccacaccaaacgctgttgcccaccctcaacaacaacagctgcagaaagaagaaaatagtgaggaagggagaagaagacgatgaaacggccaatacctctgttgactcactgacatagagaaatgaccattcatggtcttcatacccactggtacagatcgtctcttccattttagggttgagactttgagatattttgagagagagaaagaggtagcaggagacagagagagtaaaagagaaagagatgtgattaatttttttttttttaattagtaagagatgtgattaattaattttagttttttattaatgtttttattttttgaaaacattttattagttttttaagatatatgatgt

SEQ ID NO: 183333 - DNA, 840 bp, Cannabis indica
tttatatctatctccctacctataaactatgaagttgaaaatagcgaaattatttatttatttattaaataaacccaaattattttggctgttaatattcaataatattatatgaaggtggatgaaaaatttgactagaactagacctgctgctttctgaaatttttcctttttggttggcaaaaatgctgttaatctccaacttgtctaaattttgttgaaaatatctgtcatgaaggcttttctccattccattatacgtccacgtgtacaaataatgtagtatcattttgtttagttatttatttatttattattattataatgttgataaaggacagacaagcacactccaattattagtgaagggcaacccagtctagcaggagcagcacccacctcaacctcataattaataattttatataatgaaaaggagaattatttatcatattcatactcatcttttaacccatttcaaaaaaaaaaaaaaaaaaaaaaaaacttaactcctcttttaacaattttattcacggaaacctctccacaattattttaattttaattaaaatccaattatatatatagttaattaaatgaaaacaaaactgtgtagaaagagattatgttatacagtacctctcaatttatatgcatgctttcttataataacacatatatatagagataaaaaaattaataaatatacaatgctgagaattcaactaatgcatacaaagtacaatttggatagcttggctatattattaatttattattattattttagtttattatattttggttagtattttatagttattaatttaactgtactag

SEQ ID NO: 183334 - DNA, 1153 bp, Cannabis indica
caacagttgtatttactaggagtgttcgtggtgcgggtggtgcagtttttgaccattttttcaaaccaactcgcacatgcagtttttttaatttctcaaaccgcacccgcaccgcgaaactaaaaaactgcaaaagtcgcaccgtaaaaaatagtgcggtgcggtgcgatttttgcggtttcaacagtttggactatcaccaaataattaaactataacaaatacaacaaagcttgagcaacacttgtcaaaaataccagaaggcttgaaaataaatatgaaaaaaaattaagttttaataatacagtaattagttgactttgggttggacattcacatattggacctaaataaatataaaaattggtatttttataatgtgcagtgcagtgcagtttgaacttcatattaacaattcaaaactgcaaactgcatcgtaccgctgggttaaagaaaaattcaaaccgcgaccgcgaaaaatttcaaatcgattttttttgcagtgcggtgtggtgcgagcagtttgagcggtttgatgaacaccccacaagtaattgataatataaaataaaaataattagtaaatttataacacgcatcagtcattcaagtggatacaatggaattgatgatatctctagattgttaattattcacgttgaagttgttacattaaagtcattcaaacagaattagtaacattattagtagttgtggataggtctcacacactctcctctatattctcgattcttattttttttaaatgctcttctttttgtaatgtgttaggttttttattagatattttttgctagtttactttccaattttcctaaggcattttcctagttcatgttcgttctcataaattagcgtgtatgtatttagagttgatggtaaattagcttggattaagaatttttcatatatactctattgttgttattaagagtttaattttaaaaaaaaatattaatgaagaaatatatttttatataagtgcagtgagtttataaaaaataataataggaatatatttttagatatataaaaaataataaaaaagaatatttttaaatatgtgcaaatgaattaaaaaaaataaatagaaagtaatgttttttttttaaaaaaaaaagtaatagtctaa

SEQ ID NO: 183335 - DNA, 656 bp, Cannabis indica
gaagttgtaagtccttgtgattccatgaatttgattggatctatgaggaattgagctaaatatcagcttagttacttttttgtaaaccttgtataagctcgggtaatgaggctgctaactcttttattgcaaattgaagtaatgcaaagactataatagatttctagcaaataaatttattaaaataatagataccggtgtatagattccatcgatgaatgaaaacataagcttacacaaatgtgattggtatgcaatgtgagtcatagagatgcttggtgcaactaggccgggtggttatttcttgacaaaatgttcgataatatgatcagtatgcctgcatatttgctcagtatcttttacctcttataattgcttttatcagtaattttcttatttaattttatttggttggttgtcttttttgtatttttgtttgctgtaggagtttgaggaatttgtagcttacaaggtcctattccgaatttgagcaggatccaaagctgggttatttgtaagttcagttactgggttttcttttccaaagtacttacaaactagtgattagtaaaacttcaagagatgcaagctcttataaaaaatcactctttatagatttccttcaaatttcagggacctcagttcaatcagctaat

SEQ ID NO: 183336 - DNA, 659 bp, Cannabis indica
aactaataataatttgtaattttcacattataatactaactctaaatatacagagcctccctcaaaaacaaaaaaaaaatatacagaaccgattgggcttgggccgggtttataattgggctagcataatagaaggcccaaacaagttttattgcaaatatacccttacattcttaatttatttacaataggacctccccgaaccgcaaattgagctttggcgccagttcctttgatgtagttacgaattggcgccgacccacttcacactggtaaaattcaaatccctaagcccactgtttgtttcccgagaaaatatcagtagaaaagaaatattgctaatcctagaagatagatagagtagagagatgaagttcaaggcgtttttgactgagaatggtgtttgcctgctggaaaaagaggttttttaccagctcttgacaagatggggaagatttgccatctctacctcaccagagaccacgctatattcctccataatcttctcaatggcgacggaattcaatccatcgctcaattccgtaaagaagctctcttcgacgattaccgtatctccagccagaacgaggatcgaattgcctctcatttgacgtttcgctcctccaccgagctcttcgtagtagtgtcagcatctgtac

SEQ ID NO: 183337 - DNA, 629 bp, Cannabis indica
ttgcatcgtcctgtggtctcgatctccttcttagcgagcttcctttcaaattcatcggcttgggccttgatggtcttctcggcttcctcttttgacttctcagcttcttgtttaaggcaggtgattccctactggcttccttttcttaatcacaaccctgcattgggatagttattttagtacctcgccctccaggtatataagtcgctacgagattcgtcgattagaagggaaagaaatgaaagaagcttggagaattgaaaacatatgaatatgaaagaagtacaaaggagaaaaaataataaaaaataaggccaacttaccatgaagttgtagtccaagctattcgaaagcatctcttcttgaatcccaagattgatgtgattccaatcaaggggaaggagagtttgaagtttacgccagcaagcaaccccatacatctgggcgaattcaaatccagcctctcccactgtggccgacaaggtctcaatggccttgcttgaggaggcagaagcatgggctttctcaggacgaggagcgttggcgttagattaactggaagaggaacatattcttgggtctcggtatctgaaacctggagatcgataggcttggccaatgactttttc

SEQ ID NO: 183338 - DNA, 751 bp, Cannabis indica
tttctctcttctatcaagtatttgcactcattgctcctcatatgacaaatctggcttgagttctaatgtttcataactcagaacatgggacgagtctgagacatatttaggaagcattgaaacatgaaacacgttatgtacagctgccagcgctgggggcatagccaacctgtacgctacttgccctatcctctcaaagatttcaaaaggtccaatgaacctcgggctaagttttcccttcttcccaaagcgctttatgcctttcatcggagatattcggagtaaagcccgcttagttaatttggaaattagcagttgtttatgtttaattatgaaattatttatagctatttaaataatttatgatactgttatttatgttattcagtagcttgcatattttgcatttccggtgtccggtattttggaactcggcgtttggctcagtagaaatcacaacttagtatgttagtaatttggggacgggttttagacattgggaatgtcgggaatggccgggaatttagaatttcccaaaaatacccctttagtatgatttatgtgattttatggtggaggggcaaaatggtctttttgccccattagtgttttgtctttagtgctttaaatggaaattaaatgttaattgttattttagttggctgaataagtttatgtaatagcttttattttatttcttctcactttaacaaaaaatagaattttcaaaaaaaagaaaactctctctttc

SEQ ID NO: 183339 - DNA, 522 bp, Cannabis indica
aataatataaattcagaaaggaaaaagagaaaagtcacgtacaaatgtgtagcgatggaggaggagctaggttgctatggcggaaatttttgagatgtggaggatatattgggcaattcaattattttgcagtatatttttggtaattgtgtatatgaaaacttgtatttgtcaaacttatccactgtactggcagctgtaagtcttcttcttttctttattgatttattttctgattacttttcatctgttttttctcttaaatcaattgagtctagtgaggaggagaatcatccatggctgtagaattggtggttggacctgttatctctgcttcagttgagtttctcctgaagaagatcacttcttctgaagtgacaagccttcttaaggggaaaaaaaagacgtctaggttttgataggtcttcttgagaagctcaaggacaatgtttctctctctttgctgaggtacttggtgatgctagatcagaaacagatgagtaaaccctagagtggaggagt

SEQ ID NO: 183340 - DNA, 541 bp, Cannabis indica
ttattgtttttctcgcttacagttttgggatatttctttttactcttttttggattcaattggtaattttgaagtatgacaatgattgacattttctttatgaatttattttttcattatgtttggtttgaatgtattactctaatatattttaaaactaggattgtgaatgaatattggactgaaaacctaataaaccttgactatcgagtaatgaaaatctgaaataatattaaagttacatctaaaagaatcttataacataaaatttttacttggaaaaaaaataaggaaaagtaatgctatattttatctttaaaagaaaaataagcgtagtgacaacatatagtcgtcactgatgtttctttttcatgacacacatcgacatgggtgttcatgtgtgaccaaaaacaaactgttcagttcagtactatttccgtcatgtactttttttttttactctagtgtctactttcctaaagccccaacgaaaaataattgtgagaattctaatctacgataattaattatagggaattga

SEQ ID NO: 183341 - DNA, 839 bp, Cannabis indica
ttgatgatgagggcaagtaattcattgtccattgctgccaaccattgcttgaattgtgcagcttgtttgtaattttgaggttcaaactcggctgtgacagcaagtataaaggctttgtaagctttagataattttgcataagacatgaatttagatataggatgaggtgtagtagatttatcctgtaggagattgtagcattcaaaatcttgaagatagcttggaggtcgtgagacacgagaggttcttcgaggtgcaattggttctggtgtagaagtttcttgctgtgaagtaacaggaggtgtcgactgggctggtgttgacatggtattttcttgctgttgagtagcagtatgagtatcatgggagatattgtcatcttcattgtcattatcctgtaaaatgggattaaaggcagtatcattgtaattttgtgggaaataatcagctatatgcgtgttggttatgtgatgtgatggtaataccagaggtaaaaaaggatctatagattgatcttgcaagttaagtttatgaaaaggaaagacattttcatgaaatataacattgcgagaaataaatacttgtttggtattaatatcatataacttataaccctttattcctctaggatagccgatgaagacacaggttcttgcccttggtgcaaatttggttctatgagaagaaaatactggaaagcaaaaggctagacatccgaagcatttgagatgactgtaaacaggtggtttgcctagcagtatttcataaggagttttgttctttgagcttaggtgtaggtgttcgattaatcaggaacacggctgtcatgagacactcag

SEQ ID NO: 183342 - DNA, 778 bp, Cannabis indica
agcctccaaggctgtttttccctatcttgctggggggggggggagcccctgttttatttattccagaagaagcggtagccttgtgcattgattatcgggcgctcaacaaggtaacctaaccatcaagaacaaatatccactttgattgcagacttcttcgctctaatcaataagcgcgagatacttctcgaagttggatctacggttgggctactaccaagtgcgtatcgcggaaggagacgagccaaagacgacctgtgtgacaagcaagcaaccttactaatgaaggggcatttgatttggttatgccttttggactcaccaatgcccctgccacgttctgcaccctccacaatgagctattccacccgtacttagacgactggtcgtatactttgatcgtgggctatagctatccgttaaacgaccacgttagccacctccggaccgtttttaaggtattaaggtctctcgagcctcaaatcaagtaagtctaatgctcctttggacagacggagatcctattcctaggacattggatgagcatcagagccatcgaggagtggcaagcacctaccaaggtgagtgagctaagatcatttttagggctcgggaactattaccgaagattcatcgtaagttactcgaagagggctgctcaactcaaaaaatctcctaaagaaggacgtacggaccgatcatggcactgcactgatcggaagagtgtcaaaagagcttttgaggacctaaaagcaaagcagtgattgatgaccccgta

SEQ ID NO: 183343 - DNA, 561 bp, Cannabis indica
agagatgtggaagtccaacctccctattatttttgaaaaacaaaaaataaatgtgattaaatttttatattatcgtatattttaaaataaattaaattataaatacaaaaatgaaaactcccctaaaatatttagcgttatagataatgaaataagaagaaaataatttttattttattttttttatttagttacatatattaaagtattaaaatattattttaataaaataatctttctactactttagtaattctatttttcagtgtcaattattctgttttaaaattaaaaaaaaattatttcaatacataattaaaaaaatttaataattattttatgaaatgttttatatattttaaattttattttatgttattcttatttttatattctctttccttcaaaaacagcaaattagtctaaaaataaataaataaaataaaataaacagtaagggagttctctgtgagctgctgcagcagctacctcgacgacgtcccagccctgattggctcgcgcataccgcttcaatttcaatggccaaaattggcgaaagct

SEQ ID NO: 183344 - DNA, 658 bp, Cannabis indica
aggctcattaattatcttcattaagttgaaacttggacagtaatcatttgaattctacaaaaaaatgtatttataaaaaaaataacatttaaaaattacaaaaaaaatatatcagaatataaaaaaatatagatataccatttgaactaaattgtcttcagcattaacttgaacaacatcctaaaaaattaaaaaaaaaaaatcaaacaaaataaaacaactgattggttattattgttgtaaaaaatttatacaaccaaacaaaacaacaaataaattactaaacagatctacttccccactagtgataagttcatagctttttttgttgattaaataaaaaaatgtaaccaaacagctaaaaaaaaagttctaaaaacactaaaatgaccaaaccactaataaataaacatgtatacaaaaaattgcagcacttgagctatattgcttttaacagcaactccaacaatttcttgaaaaatttaaacaacaaaattaaaaaaaaaaactaatccaaaacaaaacatgcacaactattaaaaattgcatatataccttttcaatgaaactactctcaccaccacaagctccatcaccctgctgatttattaaaaaatgtatacaaccaaacaaatcaagacattataaaaacaacaaa

SEQ ID NO: 183345 - DNA, 732 bp, Cannabis indica
gttagttggttaaaattgtccttaacaatacctcaacacatatttcatacataattgccaatatgttgtttatgcattgtcaaatagttatcttactaatatcttataatgaaaaaaatcaagaattataattggaaatgtaggagtcatatgcaagaaactacattgtagtaagtttgtttataataacaaggggaggttattcatttttttaaattgtataatagttgtcttacaacaaatatattatataaaatattagctatcgtgcttgccttgttgcatttcagtttctttatttttttattttttttttgtaagaaccgaaggagttcattgaagaagaaaattggatatcacaccaggggaccccgtccctaaaacaaaggccagcaacattaccttcaatcctagcctttttggcaatactatctgccattgaattgtctaaacgggaaatataaagaaattacacatactgaaatcagaacataaattgagaatggaaatcgccagaggcctaacttcccacacagggggacgaccgtcctagcatgcaatgacttcgctattagctaagcatccgtgaggactgtgatcgatacatatcctttctccttacccaattataacgcccaaaagactgcaagcatttccgcctccactgtccgaagctgccttacatcttttagccgtccaattccaagatccaacactcgaatcgaataacac

SEQ ID NO: 183346 - DNA, 781 bp, Cannabis indica
tgtgcttaggcatcctgcagatgttaaagaataaaagtgctttaactggcttcatctgtcttttgccaccctaaaagtgcatgagttctaaatcgttgttattgaccttattgattcaaggtccatcatctcctggaaaatatatggatatgtttatgagaccgttaattgattaaatgaaacagttctgggagatgagtgttgaagcccgagatgcctacaacggaactgtattttcaatgcatgcggcagtgttgtggacaatcaataattttcctgcttatgctctaatgtttggttggagcacgaaagggtatatggcgcgtcccacttgcaataaagacactccttccattggcctaaacagtaagattggatatgttggccacaaacattttcttgaaattgaatgatccaagaaggagaagcaaaaaatacgagggtaagcctgagaagagagccccacctcctgtattgacaggggatgatattttatctcaattggactgaattcaattttgtttgcctgaaaaacacaaacagttcagggtgtgaaacggaagcattctactgaagagctaaattggtcaaaaaggagtatattttttgaaacttgagtctaaaaagaaatttgtccttgccacataaatctcgatgtaaatgcacattgagaaaatgtagtgtgtcagcttagtaggtactcttctaagtatcgatggaagtcaaggataccagaaggcgagaatggattgtaagacttgcaatatgacgtgagttgtgg

SEQ ID NO: 183347 - DNA, 500 bp, Cannabis indica
catatttatgtgtgcttttatagttggattaaaccaaaatttaatctttccgttttgggtgttgtttcatttccatggaggaaccaaaatcaagctataagttggtttagctgaagttgtgtatggttttgtttaagtcttgtaatgacattcaatcgataatcttaccatactaacttttgcaggttgcccttgatttaactgaagacgagaaacattatgttaggagctgggtagatgaagatagcaggtaaagaacctatttaatgaatatgatgatgagtattgaggaatgtattttttttttttttttttttttatgtgagcagcatcagaaagcttaaatcttagatggtatttgttgaactgtattttcggattgttgctgcgtatggtggggcatctattaccaatcaggttttgttccttccaagtttttataatggttttacataatttattatgcatattgtaatcagattagaccttgctttgattcg

SEQ ID NO: 183348 - DNA, 696 bp, Cannabis indica
taattaattcattcttaaataaactttttattaaagacaactttattattatataagttttgtcttaaaataataacttttattatttattttgggttaagataacttttatcttaatttagttttcggtttgagtttgaattttaaaccaaaaatcaattatatttatttaatttgaatttaaatctaaataaatatcccaaaataatagtttattatttataataaatattttttttttgattaatttatagtgtatatactatatatacacatatattatatatctacattatatacataatatatatctactatatatataccgtaatatttacatatacgggttccaaatcggccgccatggtccaccgtggtcggctgcttgacagccacctacgccagtagtggccattgaggccattagaggagctcaaaaaaacagacacacgaagaaatggatcaaaacttgagttgagtaggctcgcttgagccatacaggactcacgtctcattgcatgcatggatttcatgcggacgtcctttcgacgtccatgtcctatgacggtcacggggtggtgttcaggtgatacgatggtcaaaccactgtggaggagatacgacgtattgggaatatttttaccaggatctagatttactaacaagtatgttgattaacatcctaaatatgaaata

SEQ ID NO: 183349 - DNA, 568 bp, Cannabis indica
atgtatataagaataacattacaaaaacctacaaaaaactaccatgttaagttctggtaaaataagtccacacaccacctatgtctaaaggtgagcatgttaccatcatgaacatgctccaacgaccggtctagcatcaagtgctcaatgtgctccatggcatacattccacaattgccactacaaaaaaaaaaactaaatattagcaaaaaaattacaaaatttgaagaacaaccatttgaaaaaaaaacgaaaaactattaattatcgcacaaacatcgcatacacgtcgcataaaatcgcataagagatcaggttggtacacagcatagtaaagtcgcacacatattgcatatatgtcgcataaaatcgcagaaaacaacatattcagcatagtaacatcgcatcaaaatcgcacaaaaatcgcataaactcgcaaataaaacagtgggaaatggaaaaatagtcttaatcgcacaaagaatcgcattgaaatcgcataaactcgcaaaatgtaacagaggcaaatgaaaaaacaatgtttacatcgcacaaaaatacgcataac

SEQ ID NO: 183350 - DNA, 539 bp, Cannabis indica
agagagagagcaggtgaaggagagacaattttttctagggtttcatttgtctggtggtgattagatctatttggccggcggtggtgcctggaagtggtagttagtgagtttagtgacttagtagattgaagaaagagaaacaagcccataaggagaagattttttatttatttattatttttaaacttcttaatattttttattatatataattttaatattattaaaaaattggtttaataaagtgacgtggctcaactttgatgatatggattgatttgaatgagttgggctaataagatgtggacaattggcaatctatgtgggagttaatggcaaggtacctactgctgcaatgaaagtgtaacagaatgtatttttgctgccaaaaaaaaaacttaggtattttcactgcaaattactctttactatatatattctctaaaaaaaaataacttgtttctgttttttttggtcatttttttttccattaatagtaacttagcaagacacacacatttctttttatttatttattt

SEQ ID NO: 183351 - DNA, 1221 bp, Cannabis indica
taataaatatgtaaatatctctagcctaaaatggaatcatatctcaattcaaggtatcattccattttcatatctcaattcagagaatcacaggaatcgttccattttttcattatctctatttaaaaatatataaaatatattgaattgttttataatatatatatttcactaaattttatgattttttaaataaaatatatttagacaatataatatcctattttttcttgaaaatttcaactatatctctaatatttttataaaattatagtaactatattttcattcatttttcttataaagaatttcatccttactttcaaggacatgcagaacctcatttcaccaccataacaactctcaatgaagatactataaatatataatctctgttaacatgtcaaataatgttttgacttgtttcttcattgttatggaaacatacgtacaaacttaatggagactatttttttttttactgggaaactctattaatcccttatgttattattgagtttggcaaaaaaaaatcttgcctcattgcattgctgtgcaaactatttcgaaacaattgatagattcttaagaaagtgcaatattcaatgctaaatgtaaggaacttaccttagatgatgaagaatttaccacccatcttcctgttttgcttagaaaaaagtttcctttttttgtttttcacttgtcatggccttcctcattcgcgatctcaagtctcgaatttcaatgttacaactgcaaacaaagagttcttctcatatcaatatgaaaggttttttgcaaaatccagagctggtaaccaacttcctgtcatagttcatccaaagcaacaaggtacataatccacttcccaaatttgcagtttttttttttctctttgttttcgggttagaatatcagtccagttttcgttcattgttaagttcagccaccaaattagatattgttatcaacatggttcttaggtgtttcgtttttctgtagctcgtctctgtcacaatacaatattttctcatcaccagtacagtgttcggttgcttcggcttcttttcctactaaagtactgtttgtcaccagtcatgcccaataggatcgatttgctcctcaacaaattggaaacctcatggattgaaagaagaatctgcatcattttccatatggtttatagccagaatcagcattgactgtcatttggagcactag

SEQ ID NO: 183352 - DNA, 548 bp, Cannabis indica
cctaacaaatcaaatattggttccctttatgtgataattcaagaactgaaaagttttgcataaatttactttcactagtgaattaacggtactaaaggataaaaaagtaattagaaagataaaatattaatttgacaaaaattaattacgaaacaatacaaggagggctaattaatggaattaattatatcattggatactggagtaaaactcagtaaatataattctataattactaagagttcaattccatatttatagtggagtaatcatgcaattaataaacaagattatttgattaatgagattcaataaataaatctaatttattggaacttagaattataggttcatggtctctggatcgccaccttgaaacactatcaagcggtgtgataaatattgtatatagaagttcagaaaaatctattttaaattagcaaatagtaattatttatttttcaaattaaataattagaaaaaaagataaaaattgttaggacaaaagaaaagacacaattcttatcttaataacaagacataggagg

SEQ ID NO: 183353 - DNA, 522 bp, Cannabis indica
aatattatacctaaaattaattttatttacaaaaatagctttaagaaaattatttgcacaaacaccgatgtgccatgttagcatacgcaccgaaagtcaaaataattatcgaaaatagaaaaatctaaaaaagtcccgtttcaattttttttttttgctttttgggagctttgaaaaaagcaatcatttaattgcttttgatatgaataagatatcaattggttacttttctattaaaaaattatttcagaatttttacacataaataataaaataattattttaatatgaaaaaaacatatatttttctgtctaagaaaaaaagacaactaatattaaaagtaacttttttttttttgtattttttttatattttaattaataaaaataataaattttaaacttaataatattcaacatattaaccaaatatcataattactgtaattttttttattatattgtatttttagtaacttatgaaattatttgataatattgaatgttgtttaagcttcacaa

SEQ ID NO: 183354 - DNA, 611 bp, Cannabis indica
caaccaactattttgtgtcaggggagggatgtctctttgtgattcccatctatctttcttaatcaatgaactcgaggttctttcaaaagaaaatatgttgcttagatattattttattactaattttccatttttttcattgtaggaaggggtagagatagagccattaaaatacttaaaactatatttatttacccgtatttgtaaacctatttaccaattacaacatgttaagtacctcaatgatgcagctagggctacacaacacgacaacacaattcgaaaataatatgaaataaatggctttaggtgacacatttaatttttgtgtcaaatttgggtcgacacatttaacatgtttaataaatgtgtcatttttggatcaacacgcttaacccaaaaataatacgattataacatttataagcatacatataagtatttttattttattatatcatgtaaaataaaataaaaactacttaaaataaaccctaccataaaataatttattaaattaattaattgagttaagaaagaatgatattatctcagaaatagtgaggaccatgggcgttatgtatccaagctcctaataagtagattcgaaa

SEQ ID NO: 183355 - DNA, 677 bp, Cannabis indica
tctctttcttttgttttcttttctactttttaagtttaatgtttttccacagcaaacgttaaaatcaaaagtctccctaataaaacggtcgaaaacggggtgtccaccggctgtaggcggtgacacagaaattgcatttgtattgaattttgggttcatttcatttgtagaattaataataataaaataataatgataataatctaaaactgcagtcaacttaaccttggtaagattttaaccccataactgacccaagttggtttatttaaagagagagaaagtaaggccagctgggttgtgaactgcttcactgaccttcccaactctcaaaccaaaactcctctctctctttctttctttcttccttacaattctctttctcttccattgtggatgaacagtcgtagactatactgtcttcccaactagcttctaagaaactgattgagtaatgatgtagagagagaaatatttgtattgtgagagagagctatcttcattgttacttctttttttgggttattcttttttcgttgttagttgtcaaaataaagaacaaaagaaaaaaaaaaacacatatatagtttaaattggattcgttttgtgagtactttttttttcttctttatcttttgatgggttcagaagttgtaagagtgtactgaaaaaagtag

SEQ ID NO: 183356 - DNA, 535 bp, Cannabis indica
atagtaatttgtcagttaatggctacgtctatagtgtacacttaaaagaattatataaggaaaatttgaaattttaacataataaactctaaaattatttccttaatactaaatgttataccataggttatacatgattacttttactttatccctataatacccctcatatttgaaccaaagcaaatctaaacttgtctctttctctcgaccaaaacacctccacatactgcgggtcacctccaccacctccaacgacgacgacgaggaccacccagctccctctgtcggacccgaagcctcaacccacccagccccctctctcggacccgaagcctcaacccacccagccccctctctcggtcgcgaagcctcaaccgacggtgacggcgcacggcgcagcggcccccatagcccccctctctccgtgcaccagccccctctctctcttcgtctctctcaaatcgaaaaaaaaaaaaccaaacaatggtcggaccatggagacccgaaggtttaattttaccaatctattata

SEQ ID NO: 183357 - DNA, 859 bp, Cannabis indica
attccaaaaactatagccaggaaagtggacaaggaactaagggatttttggtggggtgattctgaaactagaagatcttgccacacgatagcgtggagctctctttgtcaaccgaaacagagagggggtctcggtttcaggagattggaaacaataaactcagcttttctccttaagtgggcttggaaggctctcaccgacaattcaagcatttgggggagagtcatacagactaaatatttgatgaatggtaacttcatggatgatgtatccaatagtaaggactcaagtttttggaaggctattctaagaactaggtccctgctagttgatcatgtgtgcagaaagattggtaatggtaaagaaacttccatatggtttgacccgtgggtgccttccgcaaatagatgtcctaccccgctcatggatgcaactaatggagtggcttaggtgaatcaattcatggatgataatcttcgttggaacgaggatatgattagaagatggttcgcacgggaagatgcggcagcaatcctcaatatacaactccctgaagaagatactaaggatgactggctgtagctgggtgactcaagtggggagttctctattagatcaacttgccgtattgttaatggaggaggctctgtcatccaggcagagcatagggtggaaaaaaggatttggaaaatcaaacactccatcctagactgaaaactactgtggtggcaaattggaaaagagatgccttcaaactgaggcaacttgctggttttatggaataactaacgacagttgccctgtgtgtggcgaagagaaggagactattttccatttgttatggcagtgcactatcgct

SEQ ID NO: 183358 - DNA, 783 bp, Cannabis indica
atcataagatgactagagttttaacagtagaatccaagaacaagtttcattttttttctcacttaaatctttgtttaggagtttgaatctagttttccttcccagttatactttcaaattattgtgtcaatgttggttttgattttctattggtctgtgtaatatttctttctcagttcataatttccaacaaggggatgtgccttattgcctagcagtgttttctatcctctcttctcctatatgcaccctacatttttctaattctggaaacctactttttgttgggttcaactgtgggcaggtacagtcaatgtcatcttttttttttccttgtgttttttctattcttagttaaacgttagagagttcttaattttcttttcatcatacttcttttcaggtcgcaatgcttgatattaatacgttatctgttttaagtctaactgatgtttcatccgagacaagttcccctctaaaagttttggatgttagatcattattagatgctaatagctcagtcaagagtccaaagggctctcaatccaaaattccgagtgattctgaatcaggggttctgttcactatgacaatgaatgcacatattagtgtaagagatatcactaccggaaatccggtttgctctcagcctttacaaccaataaagaattgtacggcaatttcattgcacgtcataggtaagtaaatacagctaaaattgagtgaaacaagaatttatccaatttactttgattttgtgtcgtctgaggtactctttctttt

SEQ ID NO: 183359 - DNA, 638 bp, Cannabis indica
ccggtaatttcgtactgaaattcgtgtcgtactttattcgagagcctatttttcttaaataaaccagcctgtttttttatacaagttcaaattcgtactttatatttttatatttttattacaattgatgagctaaatactagtgtatatgtattttatagttttaattatatatattttttaataatagttatacataatcatataagaaataattataatcattataatttgaataatactgtaattttaattgataaataaatatttattattttattattgttattattatcaaattattaggctttttgatttgtcatgttttcgaattattttattcatgcttacgtattgtactttcaaacttgtcatgtcgtgtcgtgcttaaactcatatatttgtgtcttgttgtgcctaagtctatattttttcgtgtcgtgccgtgttgtgcctaaacacatatttttttcatgtcgtttcgtgctcgtgcctctcgggcatcgatttcatgccatgtcaaaaatatcggcccatatttacagcactaagctcaagcaggtcatgcaaagacaagtagggattcatacttcagtctcgtatcgtgtcgtgccaaagctcatattttttttttttta

SEQ ID NO: 183360 - DNA, 672 bp, Cannabis indica
atatttaacgttatgtgtggtaatttattagttttttttttttttttttgaaattgatgtgtggaattatattatatagtcatcttcttacataatattatattattctactttatttttatttttccttctatatgatatatattattattattatttaacaccatgtaagcataccatacattaaagttgtaaatttaggtttttttcaccaagtttatcttaaatattttagagaccctgtactaatttttaaaattcaactatataaaaaatatataatttataaataatttttttaaaatatattatacgattatatattttacaaaatactaaaaaaacttcaattattttattaaaattgttactaattttaatacaacaaaaaaaaaaaaaaaaaaatagaaaataagaatatgaaaacgtttgaaaaaaataataaataaaagtaattgatttttttttttttttgttttaaaaactaacaataaaattaacaatgaactttgaaaattagaatagaagtgaccaataataagttcggatagagacatatcttatcatattaatgtgggggctataacaaaaatattgcctgaaaaattaaatctagtaataatgatcataatgtaggtataaatattttttatgataaataagctccacaaa

SEQ ID NO: 183361 - DNA, 562 bp, Cannabis indica
agtagtgactgtaatgaaatgtacttcaaccaagtctatgaaggctgggtattttctgaatgtagtatccccaacaagtaagaacaccagcattgtctactgaagctagtgttgtggcctgtttaacatccattagaatggcccccaaggctagtcctagtccttgggagaccaacacattgaaaaggattatcaacagagttagcacaaatgtgatgaaagacgggttgaggccgcccatccaatatgtcaccgttacaaagactgttgggagaacaagctccattggcaaatccccagccattctagcaaagtgtaggacgagaggcgatacatgcccgaggaacgttcttttattagcataggcctttcttgagggaatgcaaagatggcattgaatagaggaaagaagccccagaagattgagaaaaagaacaatagtccaatctgtttcaacattgtcaaaattgttagtaatgatcaaaatggtccaatatgaaagcaattgtattaaatggtgttgttgctaaagtgatatgatcttcaaaaaagtcataacttt

SEQ ID NO: 183362 - DNA, 744 bp, Cannabis indica
tttagtcacaacataagaatcataatttataattagtcacaatttttttttatttttagtcacaaattttgttgtggctaaaaataaaaatttttgtataaaaaacaagtaaacttttttttttaaaaataaaacgtgcctttaatagataaaaattagacaaacagctaaaaataaatttcttccccaccataaaacaattaaaaatagtgtcaaaaataaaataataaaaactagctaaccataaaattcatttttcaattaaaaagaaaaaaaaaacaaagaaacaaatggtgatgaatatgtaggtaggcagtagtagtagctaggcaaatgtaaataaagagggattaaatattgatcaataattgaactgcctaaacagtcatctgtcaaaaaatgtaggacttacgaggtgtatgattcaatggaagtagcatgtgatttgacaagtcattcacaatcttacacacaataataataataataataataatggctctaaactctatatatacaataatcaatttattctagctactctattttattttattaagaaaatattcagtttatgttggttatatttgtgtcttcttttgacccctcaattatagaatccaagtttgatattttttatatttgtttcaaaaaaatatatattatcaatcaatataattgatctatttgtattattatcttggagagggagtgactcgtgtgagtcgtgactaggaaaaagtg

SEQ ID NO: 183363 - DNA, 715 bp, Cannabis indica
aattgtcaatcaataatattgagaaaaaattgtaatcagaaactaacataaatcatatggttaatattttttgagactaactaattaatgttactgtaggttcgattcaacgacctgaaatcagaggctatcttcacaacaggcctaataggcagagacaatgccattgcaaggcatggaatccatggattgtactggttttacagcataaatgtaccaagcactctactcctccacggcaacaatgttatttatctttctcaaacaagacatttgaccgctttcgatggacttatgtacgattatattagattcgaaggacctcctagaacatgagattagattaattataaattatttttttctttctccatattcttgtgtataggtcgattaatagaatccattctttacaattttttttattgtaataataagttattatgtttttaataattcctttctaattgtttaatttatttgtttttcaaagtttatgtaaatgaataaatttcaattggatgaagatcatcaatagctgtcatggcaattttatagattaattattattattaataggtaaattacggaataaataactaatgtttcagattttatatacttaaatacctaacgtttattttgggaggcaaattacttaatgttacaattctcttacaccgttactactatttctgttaactcataaatatgt

SEQ ID NO: 183364 - DNA, 522 bp, Cannabis indica
atgtaagacacttttgtcgttatggttatatagtattttgcaaagagaatgatggactcatggcagcatagcaataatcatattaaaaagaaaaaaaatatttcattataattaaatcatttttatcatataattatatttgtgatgtatataattagtgtgaggaagtttttttttatgacaagtggtgaattctcgttcatatatataggaagtttttttattttattttactttttttttttttgaggaaatacaatgttattatataaattaagatatcggcgtttggttgggaggaatgaaaatataggaataggaatgggaatgagaataggaatggaatggaataaaatttaaaatgcaataaaaaaaattgaataaaaaaataattaaattttttttcttgttacattggaatggtcattcctttctttttaaaatggaatagccattccaccaaaatggtggaaagagcattccattggaatgccattccaatactttaaaatgcaaccaaac

SEQ ID NO: 183365 - DNA, 618 bp, Cannabis indica
agtaaactctgttgtagattatcatatcagtaaaactctatgtctgataaatctaggaaactttattcacatagtcatgtttactttccaatgtgttgacggcacaataaacaggatcaagtatgtgaaaagggtttcagatgaattcatacattatgcacatataatcatgaaataaatcaagtgaaccatgcaacattaaatgttatttctgatctatattaataagtaaatctgattatattgaaatgagttttatttagggcataaaacccaacacattatatattccaattacgaaaaatgtatatccttatttttaattgcatacaagattttgccctttctcccctaatttcagcttcaagaggttagttatctgctttgcttgactagctcacttgtgttttctttttactaatattattatggtttttggaacataatgagaggaagtatatatttggtgtgatgttgggttgaggttaaaaattcatgtactctgttcagggttccagccaaacatttaataatataaaaatatattattttaaattatatacatatatcatatatataaatatataaacatacatcatatatatatatgtatactgc

SEQ ID NO: 183366 - DNA, 816 bp, Cannabis indica
cacattagatacataatactttgttctacggaataaatttttatttctttatttattttaggaggctgcatttagtttgtttattcattaattgtcaaagcaatcattgttcaattcttatgcttcttgcttctttcaggtacacaagtttcatccaaccagtgacagcctcaaagctttataatgatgtatattttctgtctatgtgctgaagtttgccaccaacctctatttcaagctcttgttaacattatcctggaaaatatcacaggtgaagtcacataaagatgttatacacttcgaaactgcttatgttgttaaattccacagtattgcaaagcttgcttctcctcaacctgtgagttctctctctttagtgctctgataaatattatatatatattaattatataattttgtacatgcttgtttatttagtctcttacaattactacaaacttggatcagagttatagaactgtcatttcatctcatagatttttcccttcaattaatcttggactagttttattccaacccatatctttgtgtcttgttaatttcacaggtgttcacatttacacatccaaatcattctactgaaaaaagcaataatcggtacacgaaactgcagtttgaaatacccagtgatactggctcagccatggttcatggtatgctcctgaataaactcctatatatatatatatatattgcttttagtggttttgttttttttcagtaaagagtactattttctgtacgtgtaggatttgctgggtattttgatgtcaacattatacaaagatgtccatc

SEQ ID NO: 183367 - DNA, 545 bp, Cannabis indica
cttgttcggatctggtgtgtgggggcttcaaggtgtggaaggatctttagaagattgaaattgattgacaaatagatgtctttggtttgccgttttgatgtcttttttttagttttttattgttatttcttatttttttttatttttcaataattgtgtttttcactgccctactagattagtagggattgttatttgcttggtgcaatatgcaagtgttgtttcttattggtttatgggtgtctgatctataattccaaatcgttttggtgaggatatcttggtctctctttttggtcgtcaaatttgggggatttaaaattctttattgaccatttgttacgtactccaatcttttatgattaagcattagaacatagttgactatgttatttccctgatttaaataatgtggttgttatattctaatttttattagaagatcattgactaatagtctttgataggtgaatttcatcaaatattcatttggtttgtaaatttaatatatttctacacttctttgatacttgatcattggtgac

SEQ ID NO: 183368 - DNA, 751 bp, Cannabis indica
aatccatcgagctgtctggaactgatgtatttcatcaacttgttggttgtttgtttcggagaccaagttgaatgcaacacgatcatggcctttgtaaatgtatttatagagatactttaccgccttcactgtagagcaaatttctacattaatgtggcagtcaaatgtggcaaggagatatgggttgtagggaacaacccaacgattgtctaatgttgcccctctgacctttacggtcacaccattatttgaacgcctataaatagggaaacagtcatttccgacagacgtaaatggagcatacttttttggaaaattatttttgcaacgtggattctcccccttcatgcaaacatttgttttgttcaaatccccacaaggtccatgcatcatgtgttttacaaccgccttgtgcaagtggatgttagagtttttatctggaatctctgctgacacgatctcatcgaaggattcaggagcatggactttccaatcccttttcaatataattaaaaagtgtgcatgtggaagacctcttttttggtgctcaataacgtaaacatatgctgcgaccttgccgaatatctctttcttgaataacctgtcctttaattcctctagttttgcatggaaaactcgtgcaaccagatcaggtctattgtggctctcctcgtgttgacataattcatttgtgatttccttccagtttggagttgcatgtcatcgttagaaaaatatcaggtttaccata

SEQ ID NO: 183369 - DNA, 719 bp, Cannabis indica
gaagatcacgaggcagacctcgaggttcaagaaccagaagacaggaagcaaaccacgaaaattcccaaaacacccaggaagaacaaccttggtgtacaagggatgttccaatggataatcagacaaataatcaagagcaacgacaagacgttcctcaaggatcccaaggatttacaaaccaagataacgaacaaaatgacatactagaagcttctcgcatgaatgaggatgcaagatagcctcgacctagggatcagggaatcccttgtggtaacgagagaaatcccaagactcaacctaggacaagtgggctgccaccgagacaccgtcagtgtccctctcgatcagagagggaagatgtatacacttatctaaatagagtcacaaccactctcaactcaaaaataaggtgactaatcaaaggacaaaaatactaaaatgcccttacttccccgctaagtaacctcataaccctagggataaaatagtccaatattgttaccccgctaaactctaatattctaaaatcaacttatcataataattccatggaaatcatactctaaaatcgatgtatccttttcggtcctccgactcgggtcccccaagactcgctaaacctaaaacatttttattgtacgataacatacatcatacccacactattccaactaaaattacctgtaattaataaattaacggttatttatttcacttat

SEQ ID NO: 183370 - DNA, 596 bp, Cannabis indica
tgtcaaaatgaaggggtggagaaagaatttgcaccacgtaatgcccttctagttatataaaaaaaaataatataacaaaaaaaaaaaaagaaaaaacagtgtatttgaatagtactgaaaaattatattagtttttaggcatgagtttgattttattgtgttgatattaggatgtctatttggtatgatgctaagctggtatttgtgggttggttggttcttcctcaattcaaaggagctgctgtgttgtacaagaaatttgtgagagaacaaatcaaaaagtataatagcaaacatggtggccgtaacttattccaaggaaggagcaagtttatggatttcatgcaccacaagaaagtcagttgttattgttttgtattacaccttttcaatacttgatgatcatgagttgagttgattatgttattctaatttgtgtgccctttcatctgtcattttcaggaagaggtgcaggattattatgattaaaaaagaaggcaaagctaaatgcatggcttggattaatattccactactctgtttttaggtctatgttataactattattgttggttatgttaattaaatgatctatc

SEQ ID NO: 183371 - DNA, 820 bp, Cannabis indica
gataaattgaatgttcttaatcggtataaaatggactaatatgaaaattcaaattattaaaaaaattatgcagagttaaaatgcaccgcaaatttatttatttggtaatatttcattacaatattattaataattactcatttttgtatttttttttcatctaacatgttaaagaacttgtaatttggttaggaaattaatttcattaataaataatatagatgattgcttatcattaattagtcatttagcatttctaaaaataataacgtgagatacaaaaataatatataatttcactgattctatagagtatttgtacgtatatacataataacttgatatgagttagtcgaataaaagttaactaacaatttagaaaaaaaaagtaattggataaatattattttggtattattaaaatctatccaaaaaaaaaagtcatgcatcatgattggatctgatatttaaaaaattatatcccactatagtgcccttcgccaaactctataacctgagcactgttgatcaattattttgtcaaatgtccttaaagaaattatccactgtaaatttttattcatgccactgtgtaagtatgtgtctgcatagtaatcgaaatttatgttgccaacttatcacttaatagtgtacaggatgtcattttcaaaagaaacaaaataagaaaacaacacaataaaaatagttgaagctaaaaaaatacaaaacaaaaataaacaataccatttaattcataaaaaatgaagttcaatgaagtttcctccacatatatatacttgtggagtttaaaaaaaagttt

SEQ ID NO: 183372 - DNA, 884 bp, Cannabis indica
tgctcgcttacctgttctatcaatgaagttggaggaaacatgtcattcacaagagtgtgtaaagaagtgtatgacttcacatcaatcctatgactaatggctacctcaccctgccgagttcacagttcacaaaccaattaggaatcatcccattaccactaccattaccaactcttttatgcaacaatacaatagaataataccttaggattgataataaatattttcccttttggaatcccaatcttcctataactcagttcatctgtgtctctgtttccaaaacccgcataaaatggattgtaatcattagggaacagcttcttaatatcctaaacatagaaaaagaatattgtgtcagaagaagcctgtcgaaatgcgtttaaatttgaaattagttacaggctttttgttaactttaacctctagacatgcaatcttgaattcatgaggtgctcttcttattactgcaatgaagaaaataatatgagaaataaactaatcaatccaagcatactcaacaatgaacatctacaatggctgtcctaataattatcagcaagatcatctcaccttcgcggtacaaggaaggaaataatccatctggtgagatcacaacaggtccatttggtagagtgcttccatcctatatgcaaagaaattaagaagataactttaacttagctcattcagttctagaattaactgcaatcacaagactccaaaccaatattagaaagtgcaaaaccacctattatactaagagaactttaagaatctgatactaaaaacctaatgccaaaacagtgccacattatgcaagcaatgcctgaccaagtaaagaacaatcataccagaaaaaaaaactacaaacaatggtacct

SEQ ID NO: 183373 - DNA, 635 bp, Cannabis indica
gaagtggattaacaaagagcccgccgagaaaccaaaagccaaagaatccatttccatgaagtctttgaaagctttaaggccttttttagttttgtattgtgcagcaccaggcatggttatggctgcttgaaatgttatacctgcaatgagtgtggacaccaccaaattcatgttttgcatgtgttgtacatcttgaccattatcttctttaattggtacacaggattgtgtcatttctatttgggtttctccacttgtttcttcgttttttccatggtttttcaccattccatatccagtgtcttgtaaacttagaagagggtctttattcttggccagccgcaattctaatctaacaataaactgccaaatgaaaaagttagcaaacgagtgttgaatagggtgtgtgtatgaaaagatgcatgagattctatttcaaaattaatgtaggactcttcgacaagaatttgaggacatacctttccaataaaaccagcaaaatttgatgatttgagaagaatctcaaacgcagtcatccccatcttattggtcattctcttgtttgtcaagtattacttgtcaaacgattcataattccataacgagaatgaatagcagcaacatgtaaagctgta

SEQ ID NO: 183374 - DNA, 559 bp, Cannabis indica
aatctctttgattgagagtcttaggaaaaccaaagccaactattccaactacgacaacaacaacatacgcaaaaataatctgtatatatgttttaacatttctattttaatttttgataaaaaaaaataaaaacatatatattatgttcttttaatgagaaaaagatcacatttatttatagtttctataaagtatatgaataatgtaagactaagatataagcaaaagttatatatttttaatttttatgtaaataattgtatataaaaattatgtggattttattttggtttttttattttaataattctaatatatatatatatttttattatttttactagaataattctatataaaactacatattataattagtgctgcaacctaaatcgtaataaaaaatacgtatagaaacccttattgcaattagatatgaggaaaaaaaaaaaaaaaataaattaattttttactctatttgtacaaaaaaataaactttttaagttagagatcacatgtagtcttcttcttcttcttttttctcttttttgtgtacct

SEQ ID NO: 183375 - DNA, 636 bp, Cannabis indica
tatcatcttctttcggatttctctaatgcttttacccataaacgacgctaatgatgctgtcgtctcgtataacaacatccttttttgaaatatgggttaaaaaaaagaataattagttgttttttttttttttttttagtaagaaaagcgtatttcattaatagaataaattagacctcacagttattacataatatgttgaatgggatggtagatagcggaatatcaccgaataacttataggtaaacgtccacttagctacagtatggacaacaaaattacaagtcctgtcaatatgagagaaaatacaactcgaaaataaagaagagtaactattacaaaaagagacatagtttccaataactcaattagattccttcccattgagagcattgataactaccctcgagtagctctccacgatgacaaacttggcttcaaaatccaaagcaacagaattagctagagagcacgccgccgcttccccacaaagagcatcacaaaagtcaagacaagccgtatgaactcgaactacctcgcctaagtggttcctggcaacaactgctattcacatgctatcaagccccaattaacatcgcaattcaatttggagagagaccagcactccttcaggc

SEQ ID NO: 183376 - DNA, 827 bp, Cannabis indica
aggtttaggaaaataatttaaatctaataaatgcatataaatttaaattttccaatgtaaataagaacacgttaggcaaaaaaaaaataacaattctttttgaaaattataaaaaaatatttgatatttttagttttttgtaacagtttttagaaaaatcctttaaaaaaatttgaccaacacacttaattagtttttagaagttgtttttcattttaaaaaatgaaaataatttttaaattaccaagcgaaacaacggcaaggattaaccgatttccttaattcagacaaataattcattcaactttacattaatgggacctaggttaaattgttcacttatttaatttttctttattgaaacaatgtccgaataaataaattccttgtaagaaaaataataaattatattaaatattgaggaaatgattctataatgtttacaaagaataactaactggatgttcaaaaaatgaaaagaaaataatgaagaaaagtgaatgttcaaaaaatgttacaaatattaatgaagaaaataataaatgaaaagaataaagttgaagaaggcagttcaaggttttgttgtgtgcatgaaaaattgaagcttattatatgttatggctttgtatgtagctgaaaactggtctctcaggaacaggtatgcacttcacaatccaaccaattggccaagacatggcggcgagtccaacacacgcgccccacttgtccccacgttcaacctctctgtgtcagcaacttcttcaaaactcaaccatcaacacttgaagacaatggtaatggcgatgatcgccaacgaacacgtttag

SEQ ID NO: 183377 - DNA, 550 bp, Cannabis indica
gaatgataatctagatacagagtacaaattctcttaatcaatctaatagatagctttttttctcaaatttgtcgttctttttaccctagattctgcccctatttttaggtgtacagggtggcatttattttctttgggatctaatcattcacaactgctcatgagatgagaacattcctcacatttcatttctatgcatataggataatatttaataactacccaactgttcctttatctttctccttaaacggttctgctaactatgaaggttgtctctcgctaagtacgagttgtccttctttaccgtccttgtagaaaaaaatgctaagtatagatagacttctcctcgcaatactctttactttgatggtattaacgaggtgattatttctacgtataaatggcgagatggatgaatgtagttattatctccatatacacatatgtggatcatttagttgcaggctcttatttccaagtatgtgggtcatgagctgcaagctcttactatctcttcttgaacacttttgatatgcactctgtctat

SEQ ID NO: 183378 - DNA, 609 bp, Cannabis indica
aacacaaacattgaagactttcctataccagataaggaagacaataattcccacaacactaatcagaatgaccttcctgctgaaaccgaaactcacttgactgccactcctgaaggaaataatgaagctacagaccaactgctgcagcaagatgaaaacaccacagttccaaggcgctcaaacagaaataacaagacctccttcttatctccgtgactatgagtgtcactccgttatactggacaaaacttccactccacattctctaaataaatatttgtcttatgaacacttatcgcctgcttataaaacgtttattcttgccttgacagctcattttgaaccaacaaactacaatcaagcatctcaataccgtgtatgaatcaagctatgcaacgtgagctattcgccttctaaagataaacttggacatatgttcagcttccaagaaacaaaagggccataagatgtagatgggtatacaagattaagtacaatagtgacggatccgtcgaaagatgcaaggcaagactcgtggcacaggttatacacagcaagaagggttagactactttgatactttttctacctatagcaaaaatggttacc

SEQ ID NO: 183379 - DNA, 790 bp, Cannabis indica
cgaaaacttctggataggtatcctacatctgaactgaattctttctggttaaagaatctctttctagttgctcgggaacaattaggagattctctagaagaaatacagggttctgcttctggcggcaacatgctatggggtggcggtcccacttatggggtcaaatcaatacgttctaagaagaaatatttgaatatcaatctcatcgatatcatcgatttcataagtatcataccaaatcccatcaatcgaatctctttttcgataaatacgagacatctaagtcatacaagtaaagagacctattcattgataagaaaaagaaaaaaggtgaacagtgattggattgatgataaaatagaatcctgggtctcgaacagtgattggattgatgataaagaaagagagctcttggttcagttctccgccttaacgacagaaaaaaggattgatcaaattctattgagtctgactcatagtgatcatttatcaaagaatgactctggttatcaaatgattgaacaaccgggagcaatttacttacgatacttagttgacattcataaaaagtctctaatgaattatgagttcaatacatcctgtttagcagaaagacggatattcctttctcattatcagacaatcacttattcacaaacctcctgtggggctaatagttttcatttcccatctcatggaaaacctttttcgctccgcttagccctatccctctctaggggtattttagtgataggttctataggaactggacgatcctatttggtcaaat

SEQ ID NO: 183380 - DNA, 674 bp, Cannabis indica
ttatttataccgtaaattaactctaatataaaataattatataatatttacgtattatatattaattttattttatttatttaattatttttagtacataacacacaatacattacacataatcctaaaaaagtttaacctaaaaaattcctcttagccgcaagcaactcaccgtcgactcccccccacccgatttctccctctccttccctaatacataacacagaatactaggattgagcatttgtaccgggtttgataatacattatgtttggcgaaagaccacccaactcagacccgccaacccatatgaacgggcatgtacgagttcacttttttctacctgaaatttagtcaactcgctcaatgttaagtcctaaatatatatatatatatatatttatatatatgtatatatatttatataaaatgaaggctccttgacattgaagatagaatacatggctattcttggggaacatgccctttggtttgaaccagaacttttggggtccattgtatctccaaaatatctcaaataatgacttgtgataataatgctcttttgtaattttgtttctattttcttgtttgtttgtttttttttttttagtatttttattttaaatatctttgataatagtgtgaaaaaaaaaacttattatgtcccata

SEQ ID NO: 183381 - DNA, 605 bp, Cannabis indica
ctactagatcttctactttagtgtagctattactaaagagtcccaattgtctgaatttcatagggttgcaggaaaacatttggctatgaacttgttcccagagattccttagagaggccaagaaagactcagacaaatttcctggaattttttccagttgctcaatgttgcacatgtttattaggttgattgcaccattgagaagtagtacagaaagctcatcacccttacatccaaccttcatacagaaactcttcctctcggcaaagcatagaggaactgaagtagttgaacacttgggaacctgcaagaatctcaatctaaagaatgtaaagtgaatgatcaaacttacaaaccaaaatagtcaagtggttatcatagaagaaaattctaattcaaataagaacataaacattgaggaagcaatgcatattaatcaatcaatatatcaaggatcaaacaattacagccctctttaccaaaaaaaaaaatcagcctaaaatatttgtctccatcaataactattgtaagacaagaaaaaggtataacccaaagaaaaattgaaggacttgtaaaatataagggaaaaaaaaatgttgcgatct

SEQ ID NO: 183382 - DNA, 670 bp, Cannabis indica
gtggcgaacttctcagactgattagtggctgaattcaacaataatgaaccttcacaaccctgcagtaaaaaattagttaattaattaatatatattattattttgctgaaattaaatattttaattaattatatatttaatagtactctcaccctaacaaaacaatcatgataatgcattctcatcaaaggggcagccaatgtgggtgcaactttcacagtatcgtgtgtgatttgtgctacaattgcctctgcttttgggcatgtatttttatagaacccaactttcaatccctgagcgtttgctgtgtggtgaaggactgagaatataaaaatcaattgtaaagcgaaacatattaaaaccttttgacttgccattttaattactcaaacagagaaattaaagatggaaactctatatagttgtttgataactataaatgttaattagcttagtacatcaaacacttagtttgagcaccaatttatagtaatttggagtgaataaacaaacatttgtcacgaacattacgcatagctgtctttgcttggccatatggcaatacttttttatttatatatatattttttttcatattatataattttgtcataaatggctatctaataattaggcgaaattcctgttctttagtattacttgttggact

SEQ ID NO: 183383 - DNA, 516 bp, Cannabis indica
atttggtttttgttgtttccttagtttcaattattaaccccaaacaaacttgagtaacattgtcctttgtttgcctttaatctgcccagtgttagaatatgtaaataatatgaggcttattagtaatttggaaatattgtgaaagcctataaatatgtaattgtgtagctattattggaggatggattaagaaaatagaactttggtttaattgggagattggcactgtctcgaaaagtacatttcggagatttgtcctgtttcgaagaggacccgttacctatcattggtgcttttgatagataatagtcctcttcaagacgggacaaatttccgaaatgcactttttgagacaatgtagatctcctatttgaactaaagttctattttctcaatccatccccaataatagctacaattacatatttataagctttcacgctatttttaaattactaataagtccctatagtattttcatattctaacaacctgtgtttaggtttaccctgtaat

SEQ ID NO: 183384 - DNA, 773 bp, Cannabis indica
tcttttgtagaggtgactataaaatcatcattcttttgctccaaggtttaaagcttttctcagccacctcaggtttacaacctaacaaaacaaaatctgtaacttattgcagcaatatggtagaacaagaggttgttagagtgttggaagcatcaggtttcacaaggcagcaggctccttttatataccttggtgttcccatatgcactaagaaaatctcgaagcaggaatgcaatattttgacagaaaaaatgactgtaagaactcgatcatggagtaccagaaatatttcatttgctggaagagttgtgctcatcaactcggttctcacagcaatccactcttataagtgctagatccttaaactaccaaagaaggtaattcatgagattgaagctatatgtagggcctttctttggaaaggacaatatatgatgcagggaactggtttattggcttgggaaagtgtttgtcaatcaaggtcagaaggtcgttcatgcattaaaaaaaattgttgagaggaattcagcgccactttttaaatatgtgtggactctagcaaacaaggaggacaatctttgggtcaaatggattcacagtgtgtatctcaaagaggagattggtgggatacctagacctagccatggaagttggtattggaagcgaaattgtggcacccaaaaaatcaaaagtcaaaaagactaaactgatgcacatcaattttccaaaaccaggtaatagaaatctagttggctataatctgctttgtccca

SEQ ID NO: 183385 - DNA, 654 bp, Cannabis indica
ggccagaggaaataatcacgccatttctaaacacactagtcaagatgttcaagggattttctatgcttccaagtgaagcgattgccaacatgttgcatggtgggcagattatacttaagtaaaaaagtttggaagttggtcatggcatatggaggggggttagtggggctattcctatcatgcacagagggatagtcgttaaaatttcctataatcatccaaggtgcaaaaggtgccacatcataaaggaaattaagaagtttccaaaaataggatttagacacaaaagggagagccatagtaacaagaaacatgccaacttatattatcactaaaagagatataatagtcgatatggttcttagaaaaagaaatgatactaacattaattacattcatccaaaagagaagcaagccccctcctaaacctatgcaagggacctcaaaaatattatcaaaaaaaagcctattcctaaggccactaccaggattaaactgaagcttcggctccatcacaaaaaggaacggtggtttgtgctgcttcaccaaaaaggagagatttctgaatacacgaggactccccaaccctcgggcattcaagctataagactcattttcctagcagggttgttgagaacactcgcctgatcaaat

SEQ ID NO: 183386 - DNA, 719 bp, Cannabis indica
aaccatatggcattgaccacatgatcattagtaaccttggtgatcaaagagtcatcaatggcactattgtagctttgtaagtatattattgttgtgcaaaaaatttattattatatgtattctaaatcaaataaaataataataaaaaatctaattagtaatcaaatataaataagtaaataatatatagattatgtttggatttttttttttacttgaacataataaatgtgatttaaaattaattataaataaaaaattattaattattctttagttttcaaaatttaatttgagtcatttgataatattaataattataaattatttttccaatcaataggtaagaaatacattatttatagatgcaataaagtttttgatcgatatgagaaaatattaaattttggggtaattaataaatatattgaggtgatacgttcttttttttttaaataaaaatcataagatatattaattaataaattcgttcaaaataaatagaacgcgcttcagagaaacagtcttccaactgaagcacacaacctgtagagaaacaagagtctcttgccaagcaatgaaccaatttattggtagatcgttttacaaaacacaaatcaataaaagataaaccaaaagcaaattttgaatatcttgagcaataaaaccaaactgtgaaagcataaaaataccgctctgaatctcttggacacacatca

SEQ ID NO: 183387 - DNA, 781 bp, Cannabis indica
aaaacgttaagagttgtgatctagaggtgtctcttttgtgtcctatctatactatgtgaataaaatggggatttttacatcatatactgaaattttaagtttttttacttttataccgtaaggcgaattttttttcaaaaatactgtgtaaattttatactgtacactgtgttaagtttttacagttgttccacggttgtgttttagttattctactattgttttaattgttttattttgttgttttacagttgttttataaaaaaatagtacttttgtaaaaaaaaaaattatgtgatagtgaaattgtaaatttttagttaaaattaggtattttgtaaaaattcaataaaatattgtttaagttccaaaaaaaaaagaaagtaaattggtctggcaagatagtaagttacattctgtttgttttattatttatttatatattattttatggtgagaaagtaaagcaagaaataagttgatcaacaataaattgatgttgatgctgacagttagtttattgttttggttccatccaaagcaatttgcaaccacaataaactaatactcaagacataccaccacatatatatattttcactaattcaaagaaaaaaaaaatctcgaagtaagtgaaaccgaccttaaaaaaagaaaaagaaaattaagtgttgctatggctatcaaaacatatgacattaaaatgagaatcccacggctgagagtggattgaattgaaacacattgaatagacgcgagataggcgggatccagagttttt

SEQ ID NO: 183388 - DNA, 885 bp, Cannabis indica
agaaaagcttaaatatacatatgaattaattatcaagcctatgcacgaacattctaattttttttttttgaaaagtcgaacattctaattgtaaaactagaatgttaaagtggtaaataaaatgtgtatgaatttgggaaaaagcaagaaagcgtgccaaattgactagtttaatatttatagaaaagtgatatccatttaggtttgattgagttggcgggtcaatttttggtcaatcaaattccaccactttagtattggtggtaccttgttgtcaagactaagtggtgttactaccccacttaatgaaaatgtctcaactgctgtgttgatcttgcaaattgtcatccaaagaagctcaagtcaaaatgattaattagaagaaaacacaaatattggaaattctaccttgcattctcaaaaagagtttatggatacacattttgattttcaacatcaaaataatttaatttttttttcgtatgaagtgtacaacacaataatttcaaacattctacaatttttttgtgaaattaaaaaaaaaaaaattaaaacattaaaaataaaattcaaacactttgttgcatgcgttgttttttttttattttatactcatgtaaaatgaattgtttgaaccttgttttctatattgtaaatttattttaaattttttgaatcattatggataattaaaaaaggtctttttttttgagtatatactaaaatgaacaaaaatattacacaaatacattgagctggtcctacaaacatttatacagcccagcaacaaagaggatgttaataatgttcttactcaagaagataaaaggggtggccatccctacccaagatggctattggagggctttaatcattgccttgctg

SEQ ID NO: 183389 - DNA, 543 bp, Cannabis indica
aattgtgttagggttgttcatcgagattgaccaaacgcagtttaaattcaaaatacaacaattcaaattactatagactataatctgtaagaccgtctttggtgatccaattaatttgaatagtttattattgtataatttagttgtggttcgtaataaattacaaaatgcatagtttatttgttattataatatatctatatcttacaaaagaaatttaacatattaattacctaacacatttaacttacaaaaacgattaaattactttttttaaaaaatacaactatgaactataaatattattatgttacattttaacttttgagctttgttgcaaactttatagatcattcacaaaaatagaattcgtttaaaccatggttttgaactaaattaaattattcttaagagttttgttagtttgaaaaatttattagtcaaagtttagtttttaatatctaaaaaactgttatatgctgatttagttaaaaaaatatataaaaatttgaaccaaattaattcgtaaacactcgtaatcgg

SEQ ID NO: 183390 - DNA, 565 bp, Cannabis indica
attgagaattcatcaataacaccagaaaatcggatcttgccatttcaaaaaaaaaaaaaaaaaaaattaatacaaacaacaactacataaatttacttaaatgaactacataattttctaaatgtgtaataaattgcttaaaaaatgcttacccattattgcatgtttttagggtcgtccatggtggaggaggagcagcaagctgggcactcgcgagatggtcgtgtggtcctatggcatttgtgactgtcgtggtctctccgacgtgggttgtcattttgattgagagaaagtagagatttctaagcgtagggggtactttggtataagattaataatattgacacttgtgtgatttcaaagcttattagaacatctccatcaaggttccattaaaagctttgacttgacactaaactaaacttctcaattaccttcttctacatttgcaaaatcaaccccgttgatcttttgactttgattttggcttttagattcaagcttcaattcaataagagttattagaactgccaatatactggtaagggatgtatggattctcaag

SEQ ID NO: 183391 - DNA, 648 bp, Cannabis indica
gtgaaagttttaaatttgtgtattgtttatgaattttttttttctatttttacaactttttgtggtatttttaaaacaattgatataacttattacaaacacattaatttttcaaaaattgataaaagtaaaaattagaggaaattttaaattttatgggtttttatactttttgtgtaagaaaatggattttttccaaaaaaaattattttatggaaaattgaaaaatatggaaaactaaataaaagtaattagatactcttaggataacaaattaccataagaagggtaactagtaaccttatactagtgttttccctatatttttagatttttttctaaaattttccccaaaaaatgataattttgcaaactcataccttaaaaccctacaaataaaaattcccctaaaaattaatagtagtactggtaactggctactaccacattaaatttcaaaataactaattccatactagtaactagttatcataagatattatatatatataatataattttggacgcataattcataatataaaaatgctgaattaaacataggaaacataagcataaacatatcaaaataacaaagatacatcattgttgtgatgcttagttggataaacaagctactctcttcta

SEQ ID NO: 183392 - DNA, 677 bp, Cannabis indica
atatattttaccttaaaaattggcaggcttttgacgaaaccctaaacgggttatgggtatgtccggactcgaactttaagttatataaatcctttcatttattcataaggaggatcaaagaaaaaaatagtcgaaactctactaaaatatcctatcacaaatatatctacttaacatttaataaaaaatttgaaatgaggtatttcatttacaacaaaatattaaccgaaagtattattattttcaaaattttaacttatttatttaagagcaacctgaaattatactcgaagtattttttttatcgtaaatatctctggtttctattatatatacccatttacccttttatattgaattaaagagaaagaatgaatgttaataaatggcaaaagaataaagttctaacctccaactaactatgttggctccttatcccaagaaccaaacgcccaccccaaaaatatcattaatagaagaaaaagcaaatagaagaaaaagaaaaagtacacgtgttaacaaacttatcatttttttaacggttaacaaaactatcttaaggaagtaccatcgtcacatatggttacgtgtattttaatattagatctatcatttttgtttggtaaatattattttaaattttgtgtttttgtaaaaattatttaatttgattttaa

SEQ ID NO: 183393 - DNA, 510 bp, Cannabis indica
taggctaagcatccaaagttccttaagtgatggtactggggagggagggggggggggtggtggtgtgcatcaattcataggaggttttcttcatgtaaaagaatagatggtgtcctatttattaagtatgttgctgtctttaccatatgtcccaaatatagtaagggtaagttggattgaaaacactaaggcacgggccactgtgagtatatgttggtgtttgcgttccactacaacattttattgtggtcggccaacacaagagtggtgattgagaactcctttgcttgcatagaagctggtgagagtgagttcttttgcattatctgttctaacagatttaatgtctgttttataatgaactttgatgtaagaaattttttttgaatgatcataggtgcatcagatttttctttagtaggtacaaccaagtataccgtgagtgatcatcaactattgtcaaaaaatcttgtatccttcgattgaaggtaaggggttatggaccccaaa

SEQ ID NO: 183394 - DNA, 603 bp, Cannabis indica
atatatactgatttaagtttgataaattgatataatttataaggactttatatctattttgtcattgaataagtttattttaatcaaaatacacaacttaaacagaggtctttagactcaataattttgtcattccttttaaatttatgtaaatataaagacctactgtttgtaaatttaaattcaagtaccactttcttcatttaagacaaattccggatgtgttaatttatgaaaatttcaaaaattatattacgacaaagtaccacacgtatccttccttcctatattaattgttgtttggactttataattcatgcatcgtggctcatctcatcggattcaaactttcaagcattttgttgaagctacattcagccactatatcatattagaaatacatattaagttgcatgttcaacaatggcaccgaaagagacatatggcagcgaaaagaaccatctggaaatgagaaaatatatgtaaaattatatataaaaaattatacgttatcttttaaaaaaattaataaaataaaataaaatattagaaaacaaacacacacacacaacaaaaaaaaaaaacgtaaaaactaaactagaa

SEQ ID NO: 183395 - DNA, 1152 bp, Cannabis indica
cctaatagtttttctagtgtataaaaagaccctttatagggtcaatcatgaaagattttatagttggtaaaggaattcccaataagaattccataccatattttacataattcatataataattatatttatatatgtaatcttcatcagtatatctcctctcctcagaggagcttatagcctataaatattttttttcccatatttgagaatttctaactatttatattatgttcatgtattaaataatgctttcttaaaattagttatgaaaaaaatacaagaatgcatgtttaataatttattaaattttcgttaagtgttatcaaacggtactttaatattgtattaatatatattgtgtgtttatatacaaagagatgcaccttgaatatctcttaataagaggaaaatagtaatttgaggtattttgctcaaatatgcaaatgaaaatccttttgttctatttatttatttattattattaactataatttaaccaaaatggaattcaacttaattttgttaaaccattatggtctaaagaatattagatctgaagacacttttaaaaatggagaggagcacaaataaattttaatctttacatcataaaattatgtgtgactatatttttatataaaaaaaagtatattttttttctttattttatggttgttctattagttagtggaataaaaattcggtacatgtttttaagatagacaataaaattgtttagctattgtgtattaaatttcattgtataattgactatttttaatcatattaattatataaaattaattaatcttaccatattttattgcgtaacttaattacttttgttattttaatatttatcggtttgccttaacataaaaataaaaatttaatttaagatatgaggttgaatgaacttgttgtaacaatttttactgttgtgttttctgatgggtaaatacaactgaatatatgtcttgttaagtttaactgtttatgctagcaatattttttctcagattttttttgtcaaacgatttgagaattaggtggctcattattggacttatttttttaaatttaagttctaattgagttatagactattattttaagtaattttcattaataaaattgcataatttattg

SEQ ID NO: 183396 - DNA, 665 bp, Cannabis indica
taatgaaaatgtatttacaaaggcagtcatttacccgttcagtttctcaaatatgaaataaatgaaaatcgtagataaaaaatatgtaaacttttattgtgtttcacagcaaaaatacacttatacagttaacataaaatgaggagagaatgagcttttcaataattgtgttacaagaccactgtattttatccgattttgttgggtggtggttgtggcactatgatttttgtagtagacttgatttcatttacggaattttagcattgttctggtggacagttgttcttggtgctttctcttggccaatatagctccctatcttcctagttaaaaatgtgaatttggtctaatttatctattaataaaaatatttattttttttattaaagaataaaaataagtaaacgagaatgagacaagaatataataaaacaacagttaatgtaccttataaaatattcataatatgaaaattcatagctctaatattagaaagaactatatacacactgatggagaatatctatagtgggaggcaaattgtgaagaaaaaaaatcgaagggagcaaataaaaaataactatttatatttgttatcatgttttgggtaacataacagtgtaaatttttaagttgaaaattagcaccttatatttttttgg

SEQ ID NO: 183397 - DNA, 548 bp, Cannabis indica
ctcgtcggtgctggtgaagatttcgtggttttagcttctgggtatttcgtttttttttgtgatttgtttctatgtctagggttttggttatagacattgttgatttctgtgttgtgagtggaatttaaactctgttttgtaatggagtacggacgggaaagcgtggttcaggtgattggtactgagaattggtcaggagaccaagctatttgggctactgaagacgattatagagcttggaacaacaacagtgatacatctggagatacattttcaaactcgaattatgagcagagacaatcccagtctcgatcaggtagcgaaccacccaacaagaaatcgaagaattcgcaagatgtaacttcatcaaataggtctaaagctattggaaaaatgtttttcaagaccaaactttgctgtaaattcagagctgggacttgtccttatatctcaaactgtaactttgctcatagtattgaagagcttagaaggccaccacctaattggcaagagattgtggctgctcatgaggaagaaaagggtgtatc

SEQ ID NO: 183398 - DNA, 502 bp, Cannabis indica
taaaattcattacctatcctaaaggcacaacaataaagttacgactaacaagtgagatgtttcaggaaagctagctagaaataaatttaatatttaaaaaaaaaacactttgagcccatcttaatcgtaccaacaatgcaaaaagttgcgcttgaaaaattgatccttagacaaaaaccacaaaataaacaaatttagtgacttcataataaaatattgaaataagtaatattaaaattatggaaagtaaattaataatatattaaatttttaagaaatataattaataaaatttatattcttgaagttttagtattcgtaaatagcaaaatgagtcaaataaaaatacatttataaaagataaatatctaaaatttaatttacacgctatttaataataacattaaatgacaatttttatttaaatattgaaaaaaaatacaaaatattattttatgaagaaaaatttatttatgatatctttgtagtggagactgtaact

SEQ ID NO: 183399 - DNA, 609 bp, Cannabis indica
atcatgtaattcttccatacatatattagtaactattataagtatcaaatcaataatcataaataataaaatttaaagtcacatgttataatgactacacatctccttaatctataattcacatatacaatacatatatatttatagtaagtttagtaaatattatattgaatgatttaaatattagtaaatatgttattaaaatgtatgagtttttataattaagttttgtttacacattttttgtaatatattaatttttgttgtacattaatgaaaaaaccccataatacaatttatatgaccaaacgattatcagtgtagttagaaaatatttttaaaactattttttaaatataaaagatatttaaaattattaaaagataaaaagataaaaaaaaatataaatgtctcatcatatgaaaatgaattattataaagaaaagaaaatgtagataaaaactaaaattaataaggaagaggtagatagatattcaagaaaacaaaagaaaacactagtgtatcaacgtaataataatgtacattagtaaatttttaccccttgaactttgacatatagtaaatcgtgccttctaaattttttccccg

SEQ ID NO: 183400 - DNA, 927 bp, Cannabis indica
attactcattagacaagatacatattattattgtaccttttaacatttttctaatattaataatattattaacctcctattacaacctctgtgcttgaaaacacttgttggaattttttttttcaatttttttcatggcgatattcattatacttacaacatcatccatgtaaatttttaaaattttttgaatagtttaccgtacgtaaaatattttaaagtttttaaacgcgcatggtaaactagaatatcaggaattctgttttcaacattgtaaactattcaaatttttaaaaaactttacaagaatgatactgtacctataacaaaaaccgctatgaaaaaaaactttaaataaaaactattcctacatgtaatttcggacacaaagttgactaagaggttgtaattagcactcctcttattatttttatacaaggactttcaccttctacaaggacacattctcagaccatctacatataacccctccacccagtatccactactctatccatcttccaaattgattttctacccccacaaaaaaaaaaaagaaaagtaataaataatatggaagcagatggggaggacgcagtgttgagaggtcaagttgagatatggaagtacatgttgagcttcgcagattcgatggccttgaaatgcgcggtggagcttcaattagccgacataatccactctcacacctctccaatcaccttgtcccaaatagcttccgctattcctggcgctacctcgccagacctctcttgcttggcccgcatcatgcgcctactcgtccgccgtcggatattcacccaacaccaaaaaccaaaatcggacggagaagaagaagaagccctctacgggcccacacactcttccagatggctgctgaccaaaacgaacgatcacgatcaactaact

SEQ ID NO: 183401 - DNA, 505 bp, Cannabis indica
attacttaagagaaaaaagttagagggttgtaactgaatatagaagttataagattttaattgaaattattttggtcatttattatttttaattgtaaagagcatttatatttaaaaaatctagaaaaaaaaaatataaacggaacaatgtgatataataggtaattaatgttttttttttaatgaaatcaatgttttattcaattctataaaatttatgtattttcgtttttaaatttgattagtcaaatgtaatcatatgcttttattagtcacaattattaatcttaatgttgtttcacattttgttttttctataaggaaataattgtaggaaaactaattctttgtcttgtacgataactttaaacctcatctaaaactagaaaaaatctaagaattagagataaaataaaaaaaaatgtaaaataatcatgcttggatgcttgaataaccaatctaactaatgatatatttataagagaaaataaataactttatcaga

SEQ ID NO: 183402 - DNA, 740 bp, Cannabis indica
catggaactaaaatttaggaagaggatcaaaataaaataagataaaacagatgaaaataatactattaaataggatttattttatttttttttttggtaaatactatttggatcgcaaaagttactaattacactctctgttttactaaatgacaaaatgaattttgtattttttaaaattgtacaaataggatcatgaaatgattttttttttttaatcaaaataaaacttaataataatctaattataacaaactggttatattttttgtaattgtcttaaagttagttatattaaaaaataaaattgttgaaaattgagctcatgatcctatttttactattttagaaaatatagggtgtattttattatttaacaaaataaatggtctaattaataattttggttgcatatatcacactaaaattaaaaaaatttgaatttttatatttaattttttatttaaaaaatactcttatttttatttttattaccatataagctgctgaggttgttctatagtttatttttataagaacatatttttaattaagtagttaaattaatagaaaaatttaaatttttttttatttatttattattgatcaaattttattgtttaatattttaaaattaatattttaactaaattcatttagtaactaatgggtaatcttatcaaatagtgttccttatatattatatatagattattgatgtgtggtcgtgttcaaaaaat

SEQ ID NO: 183403 - DNA, 727 bp, Cannabis indica
tgggttagtaacctttctggtttctgccattttttctctgaggagttggcacctcttgatgtcagttaagactttattttgttttgctctgttgtgagccttttgctggttaattaaatgagttttttaataaaagaaagtctcaaaataagatacaaataaaagcctgtgtaaactatcatgtttctgcagcaattatatgacttcattttcttgattttaaatgtggatcttctttacaattcgtgagttcttttatatgtgttggacattcttttgattactgatcttgtttttggtagaactttcctatgattcttgataatttcaattgcatgatgtgtattaaccttgacctatgaatatgtgctatagtgtgattgatacaattctttattttgttttgtcatttagatttgtggttatgttattcaaaaatattccaatggctaaatgtaacgaaaccgatgacatatggaatcgtcctgttaaaaatgataccggctggtattttaagaaaagattgaatctaaggagaaacacggatgagataagactttgtcaggctgtcaaaggtgggaaattcagagctaaaaggttctataaccagctggtggaggagcaagaggctgtgtattcagggtatgtttgggataagctcattgtcccaaagtatagatttctttattggcaaatagtaaattcccagctgctaactagggacgtc

SEQ ID NO: 183404 - DNA, 528 bp, Cannabis indica
gaaaacaatagcaaaacgctcttggtttttatactgggtaactcagaggaataattacttctacgattatgcattaccttcttccctttttttcttctttgcatgctatcatttgctataggtttttgctcctgaaatgtcagtgagcaagaaccaacaacaataaaaccaatagatgattcagtgaatgagataaactcaaactgaatgcagaaaactgacagatccaaacccacaaaagagataagaaatctcatagaatgaatgaactataaaaaataaaataaaaaagacacccaacacatcataagttagcaactctctctctctctgagtacataaatgtgtatatggcaagtacaataataataaacgctcaaagaattatgcattattatcagtgtaccacttgaccaggccacataactaaatattcttccatcacagctcccaacttcccaaatgcatatactccattctgcccactgataacccaattatgcccaattcccaaattcatatactcca

SEQ ID NO: 183405 - DNA, 707 bp, Cannabis indica
cacatgtatatattattgttctattacccccactcttttttagttgaaattctccatgagaggcattaattgctacaaggaaaaacacactatgtggaaccaaaagttaggagctagctagggtcaataattcaaaagacagaaatctatttgtccttttttaaacaacaaaattaataaaaatcacaaaaacactctcacatctttcccaacccaactcaaaccactctcttactagttttagtaccaaaaataaaaattaagtaagataatttgagtggttgcatcactaattcattacaaaaacctaattttgtaaggtatttaaagctaatggtctatatatatactagattacttatttgtgtttagacttttattaaattttctagcaattatataaaataataattttaggaaagttgaactttttttttcatacaaaacaacaatgtgttactcatttatcaatatgaatcaatttggaaatagaaagcacaattctaatatagtggatgaaacccctctcaactttattcaatgatttagtaaatttttattttaatagtgattgtttattagtgtccaacaaagataataatttttctatattaattattaaattaaaaaataaagtgttaattacaatctttattataatatctcagtcaatttctacgtcctaaatcacatgtctgaatattctt

SEQ ID NO: 183406 - DNA, 621 bp, Cannabis indica
agagaaagagaacaagctctaaaatgtcataaggagacaatttattttgataagagtaataattaaaattcttaattttcaagcaacacaaaaaaagatttttatcactatattttttttaatttcaatcacaatactaaaattatactttttattattatattattttattaaattataaataaatataaataatatatattgaaaagtttaattataaatatattatttatgactgactaaaaacattaagaaagaattggtataatttatagtgtaacactaatattagtgggatactataaataatgtcataaataggataatttttagaatgtggttggaagtgtaaaattctcaatgagtttaacattttagacttctattggacttagccttaaaaaatatatgcctaagtatttttattttatttcatattttctactctaatatgtatttttggatgcaaaagttgagaaaagaataaaataagaaattgacagtaatttttatttttattaaaataaagacgctacacactctttaatattattagaatctatgagaacataataccaatgcataagtcactcttttatcacgcatatacaatatacattt

SEQ ID NO: 183407 - DNA, 765 bp, Cannabis indica
ataataaattaaaaacaaattacacacaaaaaaaagtcagtgagtgttaatgactatatatagtttaattaacttcttcaccaagatatatgctgtcattattagggagtaaattaatagaagagatgcatataatatataatgatcgatacaactttggtaaattaaatacatgacaaggcaagcaatgatgaatttaatgatcctataaatataaatataagtacttttgctttcaaatttgaattaatatttcatcggtttttgtagggtgtagctagctgcatttatttttaagtttagcaattaattacgtaccttaaaatataaaaataaagaggggttagttgatcaataataaacatggattgaccagtccaatccaacattatcatgatcattttacttcattgcacctcacatggatggctttccacctaatgttattttcatacaagttttctactttctactctttaacattcaattctttttttttttttactatttaatctcttcacaaaacaaagaatgcattttaaatttttaacccttcgtatatattttagtttagtttaattccaactactatttttttttgttacctatatgttaattaaaaactcaagtgatgatgattttttagtttggaaatattaatttgcgtcgaatataaccttgagaatctatcaagaaaacctggaagaagagaattaatatatatatatttattatttatttattatatatgtgtgtgtgcatgtt

SEQ ID NO: 183408 - DNA, 595 bp, Cannabis indica
  modified_base (563)..(563): a, c, t, g, unknown or other
attcctctttccattcatggaggcactccaccatgaggggtggaacttggctatgaatactgaaatgggtgctttgcgtagaaacaagacatgggtgttagtgcctccctcaccacactacaatgtagttgggaataagtgggtttacacagaaaagtttgatgcagctggtgtgtttcaacgattcaaggctcgccttgtcgctaaaggatttcatcaaaggcccggggtagattttagtgagactttcagtccggtaattaaagcctctaccataagagttgttttgactattgccgtgggcttataattggactataaggcaattggacattaacaacgcttttcaaatggtacgcttgatgaggatgtttatatggcccaaccacaagggttttgaagacccttctaaacccgacactatgtcctgcaaactgcagaagtccgatttacggacttgaagcaagcaccaaggagtgtggtatgaacagcttaaaagtacattactgaaagtggcattttgtgaactccaaagctgactcttcctctttatgttaaaaacnctcagaatatgtcatcatggtcttcgatttat

SEQ ID NO: 183409 - DNA, 714 bp, Cannabis indica
  modified_base (557)..(557): a, c, t, g, unknown or other
catcgattgcatcagagtaaaggaaagtagagacgttggtttttgaggctgagaggtaagtggtggtaatcgcgcgtcggtgtatcagagtgtgtcgcagtaccagaagccacatcccttacccaatcttattgctcctcttcctatatatgtatatatattgtatgttactgctcctatattgctattaccttagcctgccccccctgaccctgaccctgaccctgacccctgacccaaaaatatattctcacaccacatacacatttactcatactcatactcaactctctcattcactcaatttcactcaaacaagaaaaggaaaacagaaaaagtaacacgacaaaacctctaccttcatgtggggccatatattctttttaccatttaaccgcttttcacttttttacccttcacacgctttcaaaaatttccaatatgtatgtatgtcttttactatactatgcggattgaattaaatattttaatactgtattgtgtttagtctaatataaaagtagatctagtacaaatagttttttttttttttaaangtaactataatttgtaataaattaaaataatactttatattcataaataaagtaaaactaaatatttaagaataataaatattattattgagatttatgtacattataaataaaatatcatttcaaatgaaaaaatagatacaaaaaaaaatacata

SEQ ID NO: 183410 - DNA, 690 bp, Cannabis indica
agtggctatttaatgcacacataaactgtaagcgttgttttttttctttgaaagcttatatatattgttcctttatttgttgtagacatccttttttttttcaaaagtttattaaagtactgtaatccctaattggcgtctgcatataattaacaggtattttaacaaaattttatatctttctaatataatatatatttgtagttttttttttattcacattttgtataagttttggaagtattattatacttgtaggtttatttatttattcgtagtttatttattttagttagttaaatttaattagttctttcataattttaccgtttgttttatccatacaatatatatatatatacatatatttaatttgtaattattttgtcttgtaaagggtggattgtaaagggtggatttcttctgtcgctacacgtttctcaactcctttatcttcaattaagatcttatctcatatgcttgcttcttctgaccttgagatatatcgtgtaaaatcaagtttagatcaattagtgtcatattggagtaaggcaacccacacttttattgtaaattggggagagtttactgtaactttggaggatgtttatgcattacttcttttgccgatttgtggtacaacttcattggtatctcctttatcaaatgatgaacaatctctgttatcat

SEQ ID NO: 183411 - DNA, 681 bp, Cannabis indica
aaattctattatttttttccatatgaaaaaactctaaaataaaactgaaaaagtcaaactagattttgttgtttgtgtggatcagaattaagaatcagacttcacattgaaaacattaaattatgattgtctgtcctagttgttcccatcctattgtgaggacgtgattaggtgattctatttaggagtgttcatcaaattcttcaaagtgggcctattgtattgtactataaaaaaaatacagtatgaaatttttacagtgcggtcgaagtttgaattttttttcaaattgtgtagtatagtaccgttttgcgattttaaattgtcaatatatggctcaaaccgcaccaaactgcataatataaaaatactaatttttaatatttatttaggtccaagaatattcaactcaaagccctctaattattgtattgttgaaacttaaattttattttcatatttattttcaagtcttatggtatttttgacaagtattgctctagctttgttgtatttgtgatagtttaattatttggtaatagtccaaatcgcagaaatcacaaaaactacaccgcaccgtacattttttttagtcggtgcgggtgcagcttgggaaattaacaaaactgactttgtcgggttgatttgaaaaaagtacaaaaatacgcaccacctacaccg

SEQ ID NO: 183412 - DNA, 459 bp, Cannabis indica
ttctaacaatcaaagttaaacacagttgacaaatcaaagtcaaaaaatgtgatgaatcaatagccctgtttcttcttcttctatcttagtagtcattagcataatactgcaaaaacttaattataatcaaatctgggcacctctaatcctctcttcattgttctctcaacatactttgtagcttccaataatcaaatctaggcacctctaatccactctttataacattatatatataaactaatatactcactctgcaataacaacttcagttattcttgttacaattatatatacaaaattttgtcaaagcaattgcatagacaaaatcttcaaaaagaagtaagaataacagaaaatggagagcaagatttatattaagaaaggtagcaatggaagtttgttatctctactggtactaatggtagtagaaaacattaacattatcactcactctat

SEQ ID NO: 183413 - DNA, 912 bp, Cannabis indica
agaaatcaagggttagatatatgaacggaaggagtcattatattccgctgcacccaatgtaaggtttcctaaactttagatgtgtttatttcattgttttagaattcatattaggatgttaatgaaacatacttgttagtaaatctagatcctggtaaaatatatccaataatttaccctttatgaaatgagcaatttggtgctttggatgaataagggacatttgttcattcatacttacatacttttcatgcaaatgcctgatgctactattgaaatagcaatctgtagttgtaatcttcatgtttgttgtagtagaatacttagctttctttctcaaatataaaaaatcacatccatatgctgaaaatattgaaaagataatttaacaataacttaactaacaaaaacatcaagacaataaaaacaacaacaaaaaatctcacagaatcactaagaaactgatcacaatgaagcaacgagagaaaccgcatcttcaactaaacatattcataaccaaaatcaaaacttggctcaagcttattatttaccagggacaaaatacaagaatgaccattcatatccttcctataaacacaaaacaaataaaataattaataaaaaattaaaataatctaaaaaaaataaaatagctatacacaaataacatagacaaaaacaaccaaaattacatacgtgggtctcttaaacaaaccagatttgaaccaagcatcaaaggctttctcatcattatcattgacatcgtcaacaacagattattgcaaagcacataaacctttaaccttacttgtaactatagtaggcttagatgatgaactcaactgccgagcataaggagactataaatataaaccagactttagaattcttctctcaacaggaggagtgacc
